United States Patent Application Publication US 2004/0034888 A1 - sequence listing, part 5

SEQ ID NO: 9818 - DNA, 585 bp, Glycine max
  Clone ID: 700873242_FLI
tccacattcaattatcaagttttacacatatgaaagcttgaagcaagtgatgccatctagtattcaacccaactcgtttaagactgtagtgtgtggaggattagctggatctacggctgctttattcacgactccttttgatgtgatcaagactagattacagacacagattcctgggtctgcaaatcaatatgatagtgtgctccatgccctttacaaaattagtaagagtgaaggattgaagggcctgtacagggggttgattccgaggttgattatgtacatgtctcaaggatcactgttctttgcttcatatgaatttttcaagaggacattttctctggaagcaccatatcccactgatttatgcattcaggacaatgatgggaatgctgaagagtgaagacagcaaaaactttgaattaacaggtccatcgttgggttttccagcagcagtttccccaagtcctgagcattcttgataactagatagtgtgtggaagaaaagtttaattgtgccacaagatgtaagcagtttcataaactatggatttaaagagtaatattaaatccttctttaacatt

SEQ ID NO: 9819 - DNA, 558 bp, Glycine max
  Clone ID: 700873248_FLI
cgtatataagctggatttatcttagatactggcagaggaaaccagaaactaaacatagaggtgatctgagtgaagattttgctttctccacatttttcccagaatttttaagaccagtcatagaccctatcgcttcaatatttcatcgaatgctctgtggaagatatgatgcttctaatgatggtcaaggcaacagtctggaaagtgagcctttaccaggttcggactcaattgaggcatccaggagacgagaaagaggtgctcgagcactggaagaacgattggctgcagagaggttggctgttgcacgacgtgagttgcaaagagaggctgaggaaaatgtataattccccagcgtttgtaaattttggatcagttcaggcaatatgcacctattaggagtgatattttcagaggtcgtacagtaattagaaattttttgtttaggtcaaggaaaattttaatgtggttttgccatggactatgatctttacaaaaccgaaggtttctctttcttttgtcagataaatatatttgactttcttgtgtactttacac

SEQ ID NO: 9820 - DNA, 1389 bp, Glycine max
  Clone ID: 700873255_FLI
tagagagtgtagggggaagacgtgtgggagcgtgagaagagaaatgaacaagactgaaaagtggattgagggagacgagagtggcgcggagatgctgagtagagtgagcagcgtgcgacctttcctgtttcctccgccgctccacagggttcctcttcgcgtcggaaacgtcctcgagcttgtggggccctctccctccgccaaaacgcacattctcatccacgccgccatcacttccgttctccccaaacgccacggaggcctcgaccacttggtcctctttctcgaccttgattcccgcttcgatgtcacgcgcttctcccaattgctcattcaccgcattaccctacacggaacggattcttatgataaaaccctctatgatctctgcatggcccgttttttgtatgtccgttgttacgacagctttgaatttcttcacactctcaggacattgcattgtcgcttagagaaggagaaagaagttcatggagttggtgttcacttgctcatgattgacagcatcggagcttttcattggatggatcgtgcatcgatgttcttgtctcaaagagaaaacagaaaaaaaaaaacttttccttcagactgtgtcagaagctgtagttcagaatattaaaaaacttcttcaggtgcaccctatgcttattatagctacaaagtcagtgatttttgggaatagatattctacagcttcaaatgaggtcaaagggaatatggaggaaagatgttcaaaaaatgtgacaagaaaccatcaaaattacctgtatcgtgaatacatgccttctgtctggcagtcctttgttacacacagaatacttgtacgttcttcagatgagcatcctgttacaaccaataatcaaaactcctcattctatttgttggaatggttattgccaagattgagttttccggataagattgtagtgaaagatgctggtgtctttgtcgattcatgaagcacttgttgcaaagggatctctgtatgtgatccattatccttctttcagttgacgtaaaggtaaggaaaaaaggttggattggaaggatgaagtgcatcctatgtttggtagcacatttgcaaaagaaaggaaagaattgtggtgatagaattgtcgcaagccccaccattttcttacgcccttttggaaggaaatgattatatatttacatagattccattcatttatatgtattttcattatatcaatcaaagcctaacaaatttagaatgcaaggacagccaggtgaattatcattcccaacatactgaaaggtagtgggccatggtagagtgcaaactgcatagctagaaattcaggtcgccgtctgttttactgtctagtttaattgattgctatgatttgatgt

SEQ ID NO: 9821 - DNA, 816 bp, Glycine max
  Clone ID: 700873313_FLI
tatggcatctgcaacacgtttagtgcactgcgagctgcggtcggcgaggcccgcggttcgggcgagggaaccggccggtccggttcaggttacgatcccgaaacccaaagcggcggaggcggaaggcgcgaacatcgttttgcagccgcggttgtgcactctgagatcctacggttcggatcgagcgggggttctgatcaaggcccgcaaggagggtgacgatgatgacgtgtcccccttcttcgccgctctttccgactatattgagagctctaagaaaagtcatgattttgagatcatctctggtcgtctagctatgatggtgtttgcagcgacggtgacaatggaaatggtgacaggaaactctatgttcagaaagatggacattgaaggaatcacagaggctggtggggtgtgtttgggtgcagtaacttgtgcagcactctttgcatggttctccagtgctcgaaacagagttggtcgaatcttcaccgtcagctgcaacgcattcatcgattccgtaattgaccaaatcgtagatggtttgttctatgaaggcgacgaccctactgattggcccgatgaaccgtgatcaaatataccattcttaccattttacacactttgcagatttaatgtgtctaaaaaccatagacacagttagactaagatgtaatattaaataatatttagaaatatataagcagaggaagaatactaaaagtgatgtcatcccgatgcagaagaaaaaatagtaaaataaataaatgatgcgcaccatagatttgttgaacctaaatggattatgtaaagtgt

SEQ ID NO: 9822 - DNA, 1516 bp, Glycine max
  Clone ID: 700873392_FLI
caggtagttttctggaggaacagcaacaggggcaacagcagcagcagaagaagctatgtgataacatgtgcagcaggtgactcacagacagtggtgattggtcttgctgcagactcagggtgtgggaagagcaccttcatgaggaggctgacaagtgtgtttggaggagcagcagagccaccgaagggtggcaaccctgactcaaacacactcatcagtgacaccaccactgtcatatgcttggatgattaccactctttggatagaactggcagaaaggagaagggtgtcactgcccttgaccctagagccaatgattttgatctcatgtatgaacaagttaaagctcttaaggatggaattgctgttgaaaaaccaatctacaaccatgtcactggtctcctggatccccctgagctcattaaaccccccaaaatcttagtcattgaaggcttgcacccaatgtatgattctcgggtcagagatctcttggactttagcatctacctagacattagcaatgaggtcaaattcgcttggaaaattcagagagacatggcagagcgtggacacagtcttgaaagcatcaaggctagcattgaagcaaggaagcctgattttgaagcatatattgatccacaaaagcaatacgcagatgcagtgatagaagtgttgccaacccaactcattccagatgacaacgagggtaagattttgagagtgaggttgatacagaaagaaggggttaagtactttagcccagtttacttatttgatgatggctctaccatttcatggataccatgtggaaggaagcttacatgctcctaccctggcatcaaattcttctatggaccagagacttactacggaaatgaggtgtcacttgtagaaatggatggacaatttgacagactagatgaactaatatacgttgagagccacctaagcaacctctctacaaagttctatggagaggttactcaacagatgttgaagcatgctgatttccccggcagcaacaatggaacaggtctcttccaaaccatagttggtttgaagataagagatttatatgagcagctaatagccaccaaggctgagactccagtggctgcaaaagcttaggaattgaattgaacctgccataataatatatatacatatcgaccgagcgacgcagtcaaattgcattagttctcatcaaaatcatcattttctttcttctttcatgttttccacaatttcactgtgtttcatgttattttgtctattgttattaggctgttctgcatcataattaatgaaaaaaacacatatgtatgtatgtatgtacttatccgagaaaaaaaagtgaggctgagattcagttatgttgatacaagattgagacaataattggcttctctttctctagctttatccatactggcatcgcatattttcttatcaaactttttgtgtgtagtttgtaaattaatcaaagggaatgatctaatattctatttgttggttg

SEQ ID NO: 9823 - DNA, 991 bp, Glycine max
  Clone ID: 700873411_FLI
ctgcgaatgaaaatagcactaggggctgcaaagggtcttgcttttcttcatagtacagaacataaagtcatataccgtgactttaaaacgtcaaatatcctactcgatacaaactataatgccaaactttctgattttgggttggccagagatggtcctactggtgataaaagccatgtctctactagggtcatgggaacccgtggatatgcggcaccagagtatttagcgacaggtcatctcactaccaagagtgatgtgtatagttttggagtagttcttctggaaatgatatcaggaagacgagctattgacaagaaccagccaactggagagcataaccttgttgaatgggccaagccttatctatctaataaacgaagagtcttccgtgtaatggatccccgtctcgaaggtcaatattcacagaatcgagctcaagcagcagctgcgcttgctatgcaatgtttttccgtagagcctaagtgcaggccgaatatggatgaggtggtaaaagcattggaggagcttcaggaatcaaagaacatgcagagaaaaggcgctgatcataaacagcatcatgtacgcaattccggccccggccgtaccaatggtggcgatggtggttcagatgcccctagaaaggcttctgcttatcctagaccttctgcttctctcctccgcggttgagagaattttgtgatgcggcaagtagtaaagcatataacaaaattcggaggtttaggtgtggctggcatgaaccatgtttatgtaagcaatgtatagtttgctttatttccatgttacattttgtgctatatataatttttttttctcgttgtggttctgattgttagacattcaagggtctaatgtgggtccttaaggtgttcattaattttgaaccctgtaaacaactgcaacactacccatgtggttgattctctacatttttatcttttgctttataatatgtaaaaaagtcttctcc

SEQ ID NO: 9824 - DNA, 1834 bp, Glycine max
  Clone ID: 700873423_FLI
gaagaattgacgataggccaaagttgacgacatgtgtcatgtccatggccttatactatgttcaaatgatcctcttgttcccttgccctccatttttaccttcaacaattttctggttatctcccttacactttgcaacctctgattgaaccaaacgttatctttcttcatcatcgtctcatacacacatacataccctttagaaagttcttcatactcttccagaagcagaaaaaagtgcctttttttttttacttctttacttgaagctttctgtgttgtgctgccatggccgtgacacagttcaaccccacttgctcaaaaactcatcttcactcatctcagctcccttttctatcgaggactcttcctagacatcgccactgcactattgcgccacttcatagaactcaacaagctaggatttgttgttctgttgccccaaatgaagtgcaggtgccagctgtgaaaacctcggatcccaagagtaagcctgagtgctatggtgtcttctgccttacctatgatttgagggctgaagaagagacaagatcctggaagaaattaattaacattgcagtctcaggtgctgctggaatgattgcaaatcatctacttttcaagcttgcatctggtgaagtttttggcccagatcaacctattgctctcaaattattgggatcagaaaggtcaatccaagctcttgaaggtgttgcaatggaattggaggactctttgtttcctttgttgagggaggttagtattggtatcgatccttatgaagtgttccaagatgcagaatgggctttgctaataggtgcaaaacctcgaggacctggaatggaacgagcagacttgttagacataaatgggcagatttatgcagcgcagggaagagcattaaatgccgttgcatcccgcaatgtcaaagttatagtagtgggaaacccttgcaatacaaatgcattaatttgcttgaagaatgctcctaacattcctgccaaaaattttcatgctttaactcgtttagatgagaacagagcaaaatgtcagctagccctcaaggcaggtgtgttctatgataaagtgtcaaatgtgacgatatggggcaaccactcaactactcaggtccccgacttcttaaatgctagaattgatggtttgccagtcaaagaggtggttaaggatcagaagtggttggaggaagagttcactgaaaaggttcaaaagagaggtggtgcacttattcaaaaatggggaagatcatcagctgcatcaacttctgtgtcaattgttgatgccataagatctttagtaactcctactcccgagggtgattggttttcttctggtgtatatagcgatggaaatccttatggaatagctgaaggtattgttttcagtatgccatgccgatcaaagggtgatggcgattatgaacttgtcaaggatgtcatatttgatgactacctccagcagcgaatagctaagacggaagctgagttgttggccgagaagagatgtgtggctcacctaacaggcgagggaattgctgtttgtgatctacctggtgataccatgctccctggagaaatgtaacaagcctaaatctcctgaataccaaagcagatattgaaataggtcctgccaacttgtgtcttaaaggtactagttagggaatcaataaataaaatgtttttattcagaatcacggtagggtacgttggtaaatgttgtattttttcctaaaaacttctcacttttgattccttaactagtgtcttaaggtactgttagcattctattattgaaataagatcacacaaatttatgt

SEQ ID NO: 9825 - DNA, 424 bp, Glycine max
  Clone ID: 700873428_FLI
gtccaaatctgagatttgatctgcttaaggagctgcatgctttgagcctgaagaaaggaatttttctggtgcttcatggtgcatctggtttgagcaaagaacttgttaagacgtgcatacatcttggtgttagaaagttcaatgtcaacaccgaggtaagaaaagcatacatggactcccttgttacccccaagaacgatctagttcatgttatggcctctgcaaaggaagccatgaaagttgtggttgcagaaaagatgcatctctttggttcagcaggaagggcataattcctacaaatttactagctaggattattggtgactatcaacttcttattattttgctattatgttgtcttgtagtaaggaatatcactgcctcatgaattcattatttccttcagttcaatagatggtttctg

SEQ ID NO: 9826 - DNA, 1045 bp, Glycine max
  Clone ID: 700873444_FLI
caggctcctttcttcggtgagtcacccgaatttagtgcgcctcttaggttgctgcatagaagggggagagcagatacttgtttatgagtacatgccaaatggaacactatctcaacatttgcaaagagagaggggtggagtacttccatggacaataagactcaccattgctactgaaaccgctaatgctatagcatatctccattccgcaaatgatcatccaatttatcatagagacataaaatccagcaacatactcttggattataattttcaatcaaaagtggcagattttgggctttctaggcttggcatgtcagaaacatcacatatttcgaccgccccacaagggaccccgggctatgttgatcctcaataccaccagaacttccacctttctgataaaagtgacgtctacagttttggagtggttttggtagagataataacagccatgaaagtggttgatttcgcacggcctcagagtgaaatcaacttggctgcacttgctgttgataggatcaagaagggttgcatagatgacatcatagatcccttccttgagccacatagggatgcttggacgctctattctattaacaaggtggctgagcttgcatttagatgccttgcttttcatagtgacatgaggcctaccatgattgaagtggctgaggagctagatcttatcaggcgcagtgggtgggcgaccatggaggaaaccatatgcatggcttcttcggttgggtccgtgtgttcatcgcctcgaaatggaagtgttaattcacttagaggtgttagttttgagagagctgcaggacttgggagtgagacattgattgttccccacaagactgatgtttttttgcaatcaattgaggaggtgaaggacagctctcctgtgtctgtgcatgatagttggttaagtggaactagctcaccttcaacaaatagcttgttaggacatgtagttcagtgacatatatacttattttgggtggaacacctattatttgaatggcaaaggtcattaatgttttccttt

SEQ ID NO: 9827 - DNA, 934 bp, Glycine max
  Clone ID: 700873548_FLI
cttatgttgtgcccctggtttatggggcaagtttttactgaagggaaaaatatggtatacatgacctatatgggttgggccatagagacttctaatggaaaggggaaggttgagtatgttgggtctccagatattatggtggtggttcttccccatctattatttgtggttttgcctgcaattttggtcactggtgctctgacggctgaaagagcaatttaccgggaacacatgttagcatttttggtaaagaaaaaagatgatatttgtatggactctagaaaatctgtattgaatggcagcatggtatctaatgttcaccttagcaagcgattgattcggaagcttctttttgtggtgtgcttggcaatatgttggaagcattttatgaattgcagaactcttctaaaagcttatgagatgaacccagtactccatttcttaggctatggtatatcaatccccttgttgttggcacatgctatcagcaaaaccagaagtgctgaatgaaacttgttccagaggttcacatgtgccaagtctccctgttttgagtacaaccaaaggatgcactttgtggttgcgtggtcggtgttagaattggttgaagctagccggattcaacaaatattaaagacccatcaactggcaagagagggctggttgtttggatattcttctcatcattcacgatgatatttgtgttgtctgtattctttaagcttatgctgtatgcactacggtttagtggttttgcatgggttgaagatggtgtattatggtttaagcttattgtttgaagaaccaaaaaataccgatgcagtatgcaacaagttatcgtgctggctgagtcactttgtaaaatttgatttgacacttaaaatattaatgtaatattaattactttttcaacgtatctaataagtgttatttt

SEQ ID NO: 9828 - DNA, 673 bp, Glycine max
  Clone ID: 700873647_FLI
atccagtgtcgtggttccaaggaacttcagattgctggaggagcttgagaagggagaaaaaggaataggagatggcacagttagttatggaatggatgatggtgatgacatttacatgcgctcttggactggaaccattattggtccctataatactgtacatgaaggaagaatttatcaattgaagctgttttgtgataaagactaccctgaaaagcccccgagcgtccggtttcattcacggatcaatatgacttgtgttaatcatgaaactggagtggttgaatcaaagaaatttggtcttcttgcaaattggcaacagaggtttaccatggaagatatactgacccagctgaagaaggaaatggcggcttcacataaccgcaagcttgtccaacctcctgaaggtactcactattagtgtccaagatcacactgatattggatcatattgcatttgcagtatgcaatatatagtatgtaatactctggatccttctaaattcaagaacatactggggaatgctcgaaagagcttcatctttacctccatagagttttgttgcaatacattgtcaactttgttgaagggatgctctctgattggtcctaaatattgaaagcaactcttaaagtagcgttcttttcttattataacagttcttcccgtttt

SEQ ID NO: 9829 - DNA, 1510 bp, Glycine max
  Clone ID: 700873651_FLI
aaccactttgtcccatcccacttggacttccacctcacccctttttctcaacgccatgaaaatagatatcagcaattgatcaaaggtcattttgtttttgtggctctgagaggggagtgattctaaactaaaatatatgggggctggggaagagagtacagctaaatcttctaaagtatcttcggcagctcaggagacaccaacagcacttgcatatcctgactggtcaagctccatgcaggcctattatgctcctggaggcactccacctcccttttttgcctcaactgttgcttccccaactccccatccctatttatggggaagccagcatcctttgatgccgccatatgggactccagtcccatatccagctatatatcctcctgggagtatctatgctcatcctagcatggcagtgaatccaagtattgtccagcaaagtacagagattgaagggaagggagctgatggaaaagatcgggacttgtccaaaaaattgaaaggaacttctgcaaatacaggttccaaagcaggagaaagtggaaaggcaggctcaggttcaggcaatgatggcatatcgcaaagtggagaaagtggttcagagggttcatcaaatgctagtgatgagaatactaaccaacaggaatcagctgcaaaaaagaagggaagctttgacctgatgcttgttgatggagccaatgcacaaaacaattctgctggtgccatttctcaatcttctgtgcctggaaagcctgttgtcccaatgccagcaactaatcttaacatcggaatggacttatggaatgcatcttctggtggtgctgaagctgcaaaaatgagacataatcaatctggtgccccgggagttgcccttggtgatcaatgggtacaagatgaacgtgagctgaaaagacagaaaaggaaacagtcgaaccgagagtcagctaggaggtcaagattacgcaagcaggctgagtgtgaagagttacaaaagagggtggagtcgctgggaggtgagaatcaaactctcagagatgagcttcagagactttctgaagaatgcgagaagcttacatcagaaaataattctatcaaggaagagttggagcggttgtgtggtccagaagcagttgctaaccttggatgagaaagcaacgcatttcagttcctcagtttagtgtttgatggtaacggcaaaatttgatagattcttaattaagacgaatctgcagctagaattttcttatcaatggccaggtctcttaattgagaataggatataaagtttttttctttgttatactaactctatgtcattaaccctcaattgtaattgcccttgtgattttacatgtcatttgtttgtaatattaaccagtaccttagaatagaaaacgtaggctacttgagcacttttgttcagaacttagttttgcaagtgatgttaagaatcctgcttcaacttttcaaatctttcactagttgactatggaatcatttttgttct

SEQ ID NO: 9830 - DNA, 1309 bp, Glycine max
  Clone ID: 700873716_FLI
gtcgcagtcatggtttatgtgggtgtagtagtttaatagtttttccaggtatggaaataaaattgttgcaatcaaagttctgcatcgtgggagcacttccgaagaaagggcttcccttgaaaatcgttttgctcgagaagttaatatgatgtctcgcgtccaccatgacaatcttgttaagtttattggagcatgtaaggatcctcttatggtaatagttacagagctattaccagggatgtcactgcgtaaatatttaacgagtatccgtcctaaactattagaccttgatgtggctataaactttgcccttgatattgctcgagccatggattggctacatgccaatgggatcatacacagagatctgaaacctgacaatctattgcttacggcggaccagaagtctgttaaacttgcagattttggtcttgcaagagaagaaactgtgactgaaatgatgactgcagaaacaggaacttaccgttggatggcaccagagttgtacagtactgtgacattgcgtcagggagagaaaaagcactacaacaacaaggttgatgtatatagctttggaattgttttatgggagctactaacaaaccgcatgccctttgaagggatgtccaatttacaggctgcttatgctgctgcatttaagcaagagaggcccggcattccagatgatatatcccctgaacttgcttttgtcatacaatcttgctgggttgaagatcctaacttgagaccaagctttagtcagatcatccgcatgctcaacgcgtttctcttcacactctcaccaccgtctcctcctttgccagtaccacctgacaatgaacctgaggtggctacaacaagtaatggcaccattactgagttttctgcccgaaacagaggaaagtttggctttcttcgccaattgttttcttcgaagaggaccaaaaactaacattgagcgctgaattttttttaaaattcccttttgttgtagatgaaaagagttgccattctatggtatacagttttaggacatttatgagttaaccatctcaggtgaccaaaaggatgtaacatgttccataaaagaaaagaatgttgtttatagacttttgaaagattaaggaaagaaaaaaaaggattgtttacattatctagtagatcttgctgtaaaggaacaaattaatttagacattttcctgctttgagaaaggtaattactgagcattgtaaaaaaaaaaaaaataaccattaaaaaaaaaaaacaatataaccaaatcatttatcaaccataaatttaaattggggt

SEQ ID NO: 9831 - DNA, 2443 bp, Glycine max
  Clone ID: 700873747_FLI
atcaataacaatattattctcctcattccttcatttttaaacctagctccatctccctccactcaccataacatggcatcagaagcaaatgctgccaacaccaacttctgtgtaaatgttagcaacaatggctacattagtgctaatgaccccttgaactggggtgcggcggcggaggctatggctgggagccacctcgacgaggtcaagcgcatgctagaggagtaccggaggcccgtcgtcaagctcggtggagagaccctgaccatctcgcaggtcgcggcgatcgcggcccacgaccagggggtgaaggtggagctggcggagtcctccagggccggtgttaaggccagcagtgactgggtgatggagagcatgaacaagggcactgacagctacggcgtcaccaccgggttcggtgctacctcccaccggagaaccaaacagggcggtgccttgcagaaggagctaattaggtttttgaatgctggaatatttggcaatggtacagagtccaattgcaccctaccccacacagcaaccagagcagctatgctagtgagaatcaacacactcctccaaggctactcaggaatcaggtttgaaattttggaggcaatcacaaagcttctgaacaacaacattaccccatgtttgccacttaggggaacaatcacagcatctggtgatcttgttcctttgtcctacattgctggtttgctaactggtagaccaaactccaaggctgttggaccctctggtgagattctgaatgccaaagaagcctttgaattggccaacatcggtgctgagttctttgagttgcaacctaaggaaggccttgcccttgtgaatggcactgctgttggttctggcttggcctcaattgttctatttgaagccaacatcattgctgtcttgtctgaagttatttcagcaatttttgctgaagttatgcaaggaaagcctgaattcactgaccatttgactcataaactaaagcaccaccctggtcagattgaagctgctgctattatggaacacattttggaaggaagctcttacgtgaaagctgctaagaagttgcatgagattgatcctttacaaaagcctaaacaggaccgttatgctcttaggacttcaccacaatggcttggtcctctaattgaagtgattagattctctaccaagtcaattgagagggagattaactcagtcaatgacaaccctttgattgatgtgtcaaggaacaaggcacttcatggtggtaacttccaaggaactcctattggagtctccatggataatacacgtttggctcttgcttcaattggtaaactcatgtttgctcaattctctgagcttgtcaatgattattacaacaatggtttgccttcaaatctcactgccagcagaaaccccagcttggattatggattcaagggagctgaaattgccatggcatcttattgttctgaacttcaatatttggcgaatccggtgacaagccacgtgcaaagcgcggagcaacacaaccaagatgtgaactctctggggctgatttcatcaaggaagactcatgaggctattgagatcctcaagctcatgtcctccactttcctggtcgccctttgccaagccattgacttgaggcatttggaggagaatttgaagaacacggtcaagaacgttgtgagtcaagttgctaagaggactctcaccacaggtgtcaatggagagcttcacccttcaaggttttgtgagaaggacttgctcaaggttgttgatagggagtacacatttgcatacattgatgacccctgcagtggaacataccctttgatgcaaaagctaaggcaagtgcttgtggactatgcattggccaatggagagaacgagaagaacacaaacacatcaatcttccaaaagattgcaacatttgaggaagagttgaagacccttttgcctaaggaagtggaaggtgcaagagttgcatatgagaatgaccaatgtgcaattccaaacaagatcaaggaatgcaggtcttaccccttgtacaagtttgtgagagaggagttggggacagcattgctaactggtgaaagggttatctcaccgggtgaagagtgtgacaaagtgttcactgctttgtgccaagggaagatcattgatccacttttggaatgccttggggagtggaatggggcacctcttccaatatgttagtttttcttattttctgttttcttgaagagtggtttcttttctgtacacgtgtttgtgttgatattaagcatttggtttgtctatataaggctgtggcaaatcaatccacatacaacaacttcccagttttccttgatgtatgccatgcaaggaacttgtaattcataatgtaatagaattccatttgtttgccgtagctttgcgtgcaaatatcaat

SEQ ID NO: 9832 - DNA, 1514 bp, Glycine max
  Clone ID: 700873763_FLI
acgccgacgacatcctgatccgtcaggtggtgccagatgttggcgaagccgaagaggaggacaacctgctgaacgccgagcaccacttcgcgagcttcaaggccaagttcgccaagacctacgccaccaaggaggagcacgatcatcgcttcggcgttttcaagtccaacctccgcagagccaggctgcacgccaagctcgacccttccgccgtccacggcgtcaccaaattctccgatctaactccggccgagttccgccgccagttcctcggcctcaagccgctccgcttcccggcgcacgcccagaaggcgcccatcctccccaccaaggatctccccaaggatttcgattggcgagacaaaggagccgtcactaacgtcaaggaccaaggggcgtgtggttcgtgttggtctttcagtacgacgggagcgttggaaggagctcattatctggccactggtgagctcgtgagccttagcgagcaacagcttgtggattgcgatcacgtgtgtgatccagaagaatatggagcgtgtgactcaggctgtaatggtgggttgatgaacaacgcatttgagtacatacttcagtctgggggagtacagaaagaaaaggactatccatacaccgggagagatggcacctgcaaatttgacaaaaccaaagttgcggctactgtatctaattacagtgtggtttcccttgatgaagaacaaattgctgcaaacctagtaaagaatggccctcttgcagttgctatcaatgcagtttttatgcagacatatgttggtggcgtctcatgcccatacatctgtgggaagcatttggatcatggggttcttctagttggttatggtgaaggtgcatatgctcccattcgttttaagaacaaaccttactggatcattaagaattcatggggcgagagctggggagagaatggatattacaagatctgcagaggtcgaaatgtgtgtggagtagattccatggtctcaactgtagctgctatatatccatccagccattaaatacaaagatatgcctgattgtggttgtgatgtgatactggactaaggggagtttgtataaatatttatgttgtgaactttatcatttggtactggtaaaattatctccgtataggatcaggaaactgctaagaccatgttgtttatgtagtatgtaatttctgtatgtatgcttgacatatacaagtgggaaatccaaggaaatgtgtggtcctaaaaatggtgcaagataagcaactctctatggagattggcggggtggggttgtttcaaactgcaacaggggaatacttgccactgattatgtctcagttattgcataattaaactaatatacgtgccactgtcaatgttggttcttatggatgtggtagtgccatacccaaaaggataccaaaatgtttaagttgcttctgtacctttgattcgtttacctttgagtttgtgcatgtataaaaatttctatggacttaggacttc

SEQ ID NO: 9833 - DNA, 1051 bp, Glycine max
  Clone ID: 700873794_FLI
gagcggttctgtgtcgtggcaaagaacccatggcgctatctgttgatcataaaccaaatcgagatgatgaatatgcaagaattgaggccgctggaggcaaggtgatacaatggaatggtcaccgagtatttggtgttctagcaatgtcaaggtctattggtgataggtatttgaagccatggattattccagaccccgaggtgacgtttcttcctcgtgcgaaagatgatgaatgcctcattctggccagtgatggcctgtgggatgtcatgaccaacgaagaggtgtgtgacattgctcggcggcgcatacttctctggcacaagaaaaatggcttggcattgccctcagaaaggggagagggaattgatcctgctgcacaagcagctgcagagtacctatcgaaccgtgctcttcagaaaggaagcaaagacaacatcactgtaattgtggtggatttgaaagctcaaagaaaatttaagagcaagacttgactgtttcttcaactgcacctgggtgttggaagataatggaaagctgaatatgatccaatatagtttttttgcccataaatttttcatgtgggcatcagaatagcaccctgtacaatacatccacctctccctagaactctccaactgattaagagtctccttgtacactgccacattggggccatgtaaatctttgctgcttttgtcggtaggtataggaggtcagttccatgcctatctgtcaccaccatattgtattcattattatgcctccgagaacaaaggctctgtgaggtatttacttcatattgctttaacatgtgttgtttataaaaaaagtagtagctaattggcattgtggtttacaagttgtgatccaccccttctaataatgtagcaaagcaattctctatttgaagcttactcttgaaatttatgtcggtggtggattgatatcattggttatgactcaattccagtggttgtactgcaataatgatggtagggacaattatggacaaggttgcttaagaaaaatctcagctatcttttttgtt

SEQ ID NO: 9834 - DNA, 1339 bp, Glycine max
  Clone ID: 700873842_FLI
atcttctgccccaccctgcatttcagcagagtgattctgttcactacaatgccatcatcactatcctctttcctccatatggttcctattctctcccttcttgtactctcatgtgtgatttgttctagtagtgctcagggaccaccttcacctggctactaccccagttccaaaattagtcctgttagtttttatcaagggtttagaaacctatggggacctcagcatcagaggctagaccaaggctcattgacaatctggcttgactctaactcaggaagtggattcaagtcacttcactcttatcgatctggttacttcggtgctgccattaagcttcaacctggttacactgcaggagtcattacatcattatatctttcaaacaaccaagaccaccccggaaaccatgatgaaattgacattgagttccttggcaccacacctgataagccatatgtcttgcaaacaaatgtatacatcagaggaagtggagatgggaatattattggaagagagatgaaatttcatctttggtttgacccaacacaggattttcacaactatggcattctatggaaacccagtgagataatatttttttgtggatgatgtccccataaggaggtatcctaggaaaagtgaagcaacatacccctcaaggtcaatgtatgtgtacgggtcaatatgggatgcatcttcttgggcaacagaggatggaaaatacaaagctaattataattaccaacccttcgttggtaggtacaaaaacttcaaactgcaaggttgcactagtgaaagctctgcctcgtgcaagccaccttctttctccccatctggctttggtagcctcagtcctcagcagtttagggccatgcaatgggtccaaaacaactacatggtctacaattattgccatgaccctaggagagaccacactcttatcccagagtgctaagctctagttcgtttcaaaactccttcagaagaaagaaatcgcctctaagatatcaaagctataattattaacttctgaagatcacattccagatgtgcaaaaatcacgtccgaaacgtgaaatcaattaagctatgatgttggtgtgcctcaattctaagttgccctatacactttgcatatttgaattgtaaaatggttttgattattcaggtggaggtggtttttgtgatggtcccacttgctaagggtaattgcaagagtagttgaacgtccaagccactccaatgattggaatgtttttgttgtttatgtaattgtgttgtagtattgtttgggtcctgtcttactgttcaaataaattgattcggatgctttcctc

SEQ ID NO: 9835 - DNA, 405 bp, Glycine max
  Clone ID: 700873879_FLI
cacaacttcgttcggcgactcataataagaaagtaagagatatgattgatgatgaagccttgggagccattgccaactttcttggcatcttcatttttgctttggttatagcttatcacctggtcactgcggaccccaaatatgaagccaagtgggatttggacagtttcccaggatggttctattccatgaacccaacccccaaaccaagatcatctgatcctacttatcttcaactgagaagcgacctatggtcctatgctggggagactgaaattgctagaacgctttgattacaacgcatgtgttatcctacatatggagcctgaattgctctttggcttgaactttgaagtgtaaatgctacttttgaagtaatatcaaattaattagcccttgaaagat

SEQ ID NO: 9836 - DNA, 653 bp, Glycine max
  Clone ID: 700873886_FLI
atttaaaaaagcaaagataacgtcatatcaactaaccacacgtggggaagaatcttccacttcaacattcaatgctattttcaaatactcttgtagcttcaaagaaacatcacacaaacgaaaacaatattaaagaaataattagcatcacgttgttcaaactatgtttctatagttacaacgaatacataaaaaaatatacaactccagaacccagtggtataaatacacaacgcattattcttcatagtgcttcaagaataaaaaaagataaccccaaaatcagaaaaaaccatcgtcttcatcaccattcaaaacatggccaccacaatatcttgtgatttctcttcaatggaatctattcaacactatcttcttgagcctgaacacgattccaacgctctcatgaacatttccaaccacgaagtttgctattctgcaacgtacaatgcattcccaagccctacgttcagcttggagggtgtcgtccatgatgcaaacgattccttagcatgcaaaagagaacaccctagggaggagcgtgaagttcacgcgccaccggtatggaagcattaccggggtgtgaggcgtaggacttggggcaagttcgcggcagagataagggatccaaagaagaatggtgcaaggatttg

SEQ ID NO: 9837 - DNA, 866 bp, Glycine max
  Clone ID: 700873890_FLI
ggtcgagttgaagtgtatgttttgtcataagcagatatttcacttctaatggatttcatttcattttggtttgtgactcagttcaattgatatattattctctttgttttcagcattcacaatgttcgttgctattaccttcccattcttcggtggtctcctaggattttttggaggatttgcttttgcaccaacaacatactttgtaagccaaatacattggtgaatttaatcacacaataatctttaggggggaaaataaattcttaactgttaattttcttgcttaatttttcagctcccctgcgtcatgtggcttgcgatctacaaaccaaggagattcagcatgtcttggtgggccaactgggtatgttgaattttgatttttgtttcaattattctcctttagttgagattccattttttaagctaggattaatcttgccccattaattacagatctgcattgtgtttggcctattgttgatgattttatcaccaattggaggattgaggtcaatcataattagtgccaaggactacaagttctactcataaattcattcctaactgagtcaatgatgggaatctgaagcatgcaattgcaaatacaagaagggaatgaaagctcaataaaagtcatgtgttatagaatctggtttatcttaggtcgctgggtgctttaactatagaatgcaagaatgcattggttgaggaggatcatctgcaacttgcttgttagtggaaaagaaaattatgaaaagggaattttatatatattttctttgtcaatttttacttcacgactctttgctctatttaaagtgtttgctattatatttatttggttccactgaattcacatc

SEQ ID NO: 9838 - DNA, 432 bp, Glycine max
  Clone ID: 700873909_FLI
gcgagtcaccagaagataaatctaaatgggaatgtgtaagaaagggactttgctgcatatgctgtgaaagcaatatcgattctttgttgtacagatgtggtcatttgtgtacatgttcaaaatgtgcgaatgagttgcttcaaagcagaaggaagtgcccaatgtgtcaagctcctgtggtggaggtgatacgtgcttattctatacaataatttgacattaatataaaggtcacacttttaacaaaatacaggattctaacaagttttatttcctggacgtttccaggtacactttttcgttttttttttttttttttataattttcttactgtgattactgtatttatgtcgagtgcaccaatggaacacatgatggcatttttttgcggccatgattctcatatgaataaaaattgtacgtcgtttttg

SEQ ID NO: 9839 - DNA, 699 bp, Glycine max
  Clone ID: 700873993_FLI
ggatgctggtttgagaacttgggtggaccaaatgggaaatgtacatggtcgtgttgatggagctaaagctttattgattggatctcacatggtacatgcataggctaaaatcaaaagatctctcaatatgccacaatatgatcctactgggatcttgtataatgaagccgaatgctacaaactgaaatgatgcttgcgctgtgacatggcccaactttaccgatgtatacccttttgcaccgattgaccaaaactaaaggttatcaggaaatgttcaacaatttgagtgaactgttgctggacaaattctccttacatagccgactggtggttattcgtgcacattatttaatttgccaattgtagatatcctcatttgtgccatttagtggagtttcaagctgaagctcttgaccgattgacaagtgatgatcctggaggaaaggtatttcaagtttatatgttgtgcattaaaatgaaagaatgcacgtcagaaggaaaaaaaaaactagatttattttattctattattcttatgggaaacaagatcaaattaattaggacccaaacctaagtttactgcatcttagactactaggaaaataatttataattttctgcaaatccttgtggattgtttaagcaagaatatgatttaattattcttactaatgtatgtaatgttagtacaatatatgt

SEQ ID NO: 9840 - DNA, 951 bp, Glycine max
  Clone ID: 700874028_FLI
gattatacgaaccgataaaacatctgcacaagtgattcttgatctgataacagttggtaaaatcataaagaagacacctgttgtggtgggtaattgtactggctttgcagtgaataaaacattcttcccatattcacaaggtgcccatttgttggtcaacttgggcgtggatgttttcagaattgacacattgatacgcaactttggctttccgattggtcctttccagcttcaagacttggctggctatggagttgccgttgctacctcaaaagtatttgctgatgctttttctgatcgcatatttaaatctccactgcttgatcttctgatcaaatctgggcgaaatggcaaaaacaatgggaaagggtactacatttatgaaaaggctggcaagccaaaacctgatccttcaatactaccaatcattgaggagtctagaagactttgcaatattatgcccaatggaaagcctatatctgttactgaccaagagatcgtggagatgatactcttcccagtagttaatgaggcatgccgtgttctagaagatggagttgttattcgagcatcagaccttgacattgcatctgttcttggaatgagcttcccaaattaccggggtggcattgttttctgggcagacttggttggggccaatcatatatataccagcctaaaaaaatgggcacaattatatggtaacttctataaaccctcaaggtatttggaagaaagagcactcaaaggcattcccttgagtgcacctgcttcatctactccaaagtcaatggcacgtctatgagaaagccaagtgttgagcatatatgttggatgttctacaatagaaaatgtaacaaccaatgtttgcttccttcctagattaaagaataaattattaaatttggtttcacaaagagaaaaatcgaaggaaaataattgtttcttggg

SEQ ID NO: 9841 - DNA, 2827 bp, Glycine max
  Clone ID: 700874082_FLI
ctcttttcaagccttaaatgagtaaaaaagagtgaagaaaggaaagaaaggagcaccatttttggtttgagaaacataattagcaagagagttcaaaatggggaagagagagtttaatggggtggtgttgatgatgctgtgtttgtgggtttgtggtgtcacagcctctgtgacttatgaccacaaagccattgtggttgatggcaagagaagaattttgatctctggctccattcattatcctagaagcacacctcaaatgtggccagaccttattcaaaaggccaaagatggaggccttgatgtcattcagacctatgtgttttggaatggccatgaaccttctcctggacaatactatttcgaagataggttcgacttggttaaattcgtgaagctcgcgcagcaagcaggcctctatgttcatctccgtattggtccctacatatgtgctgaatggaacttggggggatttcctgtctggctcaagtatgttccaggcattgctttcagaaccgacaatgagccgttcaaggctgcaatgcaaaaattcactgcaaagattgtcagcttgatgaaagaaaataggttgtttcaatcccagggtggtccaataattttgtcacagattgagaacgagtatggaccagtggaatgggaaattggtgctcctggaaaagcttatacgaaatgggctgcacaaatggctgttggtctagacactggtgttccatgggtaatgtgcaagcaagaagatgctcctgatcctgttattgacacctgcaacggattctactgtgaaaacttcaagcccaacaagaacaccaaacccaaaatgtggactgagaattggactggctggtacactgattttggcggtgcagtccctcgtagaccagcagaagacttggcgttctcagttgcaagattcatacagaatggtggttcattcgttaactactatatgtaccatggaggaacgaactttggccggacatcaggtggcctcttcattgccactagctatgactatgatgcgccgcttgatgaatacggacttgaaaatgaaccaaagtatgagcatttgagagctttgcataaagcaataaaacaaagtgaacctgctttagtggctacagatcccaaagtgcaatcgcttggatataaccttgaggcccacgtgttctcggccccaggtgcttgtgctgcattcattgctaattatgacaccaaatcttatgcaaaagctaaatttggaaatgggcaatatgatctaccgccttggtctatcagtattcttcctgattgcaaaactgttgtttacaacacagcaaaggttggttacggctggctgaaaaagatgactcctgtaaacagtgcatttgcttggcagtcatacaatgaagaacctgcctcatccagtcaagctgattccattgcagcatatgcactttgggagcaggtcaacgtgacccgcgattcttcagattatttgtggtatatgacagatgtcaacgttaatgctaatgaaggatttctaaagaatggacaatctcctcttctaactgtaatgtcagctggccatgttctccatgtgttcattaacggtcaacttgcaggaactgtgtgggggggattgggaaatcctaaattgacatttagtgacaatgtgaagctgagggctggcaataacaagctttctttacttagcgttgcagttggtctcccgaatgttggtgtgcactttgaaacatggaatgcgggggtgttaggcccagtcactctgaagggtctaaatgaggggactcgagacttgtcccggcagaaatggtcttacaaggttggactgaaaggtgaatccttgagccttcacaccgaaagtgggagtagctctgtggaatggatacaaggatcattagtggctaaaaaacaacctttgacatggtacaagacaacttttagcgcaccggccggcaatgatccattggctctagatttgggaagcatgggaaagggtgaagtgtgggtaaacggtcgaagcattggtcgccattggcctggatatatagcacatggtagttgcaatgcttgtaattatgctggatattatactgatacaaaatgccggacgaattgtggacaaccttctcagagatggtatcatgttcctcgctcatggctgagctcaggtggtaactccttggttgtgtttgaagaatggggaggtgaccctaatggaattgctttggtgaaaagaacatgaagtgtgatattttatgatgctctcttaaaaggagcagcattgacaggcaatatatatcttgtaacaaatgtctaggaaatgcaaagaagctgtcaagtgagtcctatgcggttaggaccctatgatgcagcaatttaccaaatacgtgtggtttagatcatattaggttcagtatataaaaaatatttgaagttcataattggtgctccttgtcttctggttgttcaagtatacctcaaaagattgccaaggcctaatcatgcattgcctggccaaaaacaaagatttatataagagaatttggatgcgcaaagactgtgtatactgtacatagtcaagtcaggctattgtgctgaatattgccccatgtattacagggcttgtatcaatgaagattgagcccttacacatttatttaatttactatgatacaatggaaagaattgtagacacgcaaaatgtgtcggagagtatatttgctatattctgccagaaataattgtgttttcccattataattattatgtaagaacagattgaaagtaataaaatatcctttgaaat

SEQ ID NO: 9842 - DNA, 483 bp, Glycine max
  Clone ID: 700874265_FLI
ccttgtcaccaaacacgttgttcccggttcaatgctgtacgtggaggggaacctcgagaccaaatgcttcaccgatccgataaccggcattgcccgccgaattcgagaaattgctgttcgacgaaatggtcgcattgtatttttaggtgaaggcggtgatgctgagctgcagacactgccaaaagacctgagagctgttggctattactaacgttagatgcttgaaatgggaacattgcatttagttcataatggagatttttctattttgtaattatactctgattttttaccgcaaatttggaattatttcgcagacatttgtcatgagggaaactctaggtttgagcgatcttgtagtttctacgtgtaattcataatcagggaatatagagctcaaccttcctgattttgtatgttggtaaacttgtggtagggcaagtatttcaattctctctttggttttaaaaacacaaaaaaaag

SEQ ID NO: 9843 - DNA, 831 bp, Glycine max
  Clone ID: 700874266_FLI
ttgagtgtgagaaatgctacaagaaggttaagaaacttctcggcaagtaccctcaaattcgggaccagaagttcgatgagaaggaaaacattgtgttcatcacagtggtgtgttgtagccccgagaagataagagacaagctttgctacaaaggtggaggctctatcaagagcattgagatactggaactgcccaagcccaaggccgagaagcctaaagcagaccctcccaaagctgagaagcccaaggccgagcccgagaaaaagaaggacggtggcggcgagaagcccaaggccgagcccgagaaaaagaaggacggtggcggcgagaaacccaaggccgagcccgagaaaaagaaggatggtggggagaagcccaaaggggatgctccgaaaaaggaagccgagaagcccaagcccgggcccgagaagcccaaggacaagcccgcgccagctcccttacccgtgcagccacatatggctgcacctatggcggttccagttgggatgctctatgctcctcctccgtgctacgaaggcaggcccgttgggcctgggtacgaatacggtgggcccatgttctgttacgacgggtactatgcaaggcccgtatatgatagttacggtggaggcagaccctgttatgtgaaccgtggtgatcaatatttcagcgaagagaatccacaaggctgcataattatgtgacaattacgtccacggcgttgcattattgggttctgtaaatgatggtggccattcacaatttgtttcaattatcatcatgtttaatcacgtccaatccaatgtttttgttatttaaaattcaacgacc

SEQ ID NO: 9844 - DNA, 874 bp, Glycine max
  Clone ID: 700874271_FLI
aaaagtgaaaaccagaagtacgaacgaaagagaagagcgatttagaagtgagagaagatggggttgtcgttcacgaagctgttcagcaggttgtttgcgaagaaggaaatgaggattctgatggtaggtctcgatgctgctggtaagacaaccatcttgtacaagctcaagcttggagaaatcgtcaccactatccccaccatcggatttaatgttgagactgtggagtacaagaacatcagcttcactgtgtgggatgttggtggtcaggacaagatccgtccactgtggaggcattatttccagaacactcagggtctcatttttgtggttgatagcaatgatagagatcgagtggttgaggcaagggatgagctgcacagaatgttgaatgaggatgaacttagagatgctgttttgcttgtttttgccaacaagcaagatcttcctaatgcaatgaatgctgcagaaataactgacaagcttggacttcattcactccgtcaacgccactggtatatccagagcacttgtgcaacttctggagagggtctctatgagggtttggactggctttctaacaacattgccagcaaagcatgagacatttgaaaaattttggtcttgtctggtgatttcatgcgagtctggcggttcttggagaaagatgcttatcttttctagcgaatgttgtaatagcagaatgcttgctagaagtattctcttttgtgtaacttgggtttgtatgattgcttaaattagctaatacttttagctataattggaactcttgcaccctcttgtgcgtgcgtgctgtgttgcttacatcttgtttgtttgatttttgattgaatatatttccatgcgttttgtt

SEQ ID NO: 9845 - DNA, 650 bp, Glycine max
  Clone ID: 700874291_FLI
attaattaatactgtagtaccatctcttcaatgtgaataaaatcaatttaattaactatgttgactcttgataaagatttatatatgcatcaaggctcaagaccgccaagttaactttaattgatttctattttgtaaataatcaagaccatatatattttaattaatgattaggtgcaaagaagtgtagaagatccaagtgtgttggtaacaacttacgaaggggagcacaaccatgggcaacaacatcaaactgcagaaatatcaattaattcatcaagcaaaagtgaaacacctaggcctgcagtttcaccctcagccatgaatattcggagtagtgcagcagcaggtccaattgtaacacttgacttggtcaagtcaaaagttgttgacattaatgcgcaaaagtcatctctccagcagtttttagttcaccaaatggctacttctttgacaagagatcctaatttcacagccgcacttgcttctgccatctctggaagaattctagatgatacttctgtgggaaaacgttgaattattaagagatatatatgtattaatttcactgatgaacatatatgaattttgtcacttttcttcgttttaatatttaataacagctagtcacgaggagtagtgttctatgc

SEQ ID NO: 9846 - DNA, 1875 bp, Glycine max
  Clone ID: 700874312_FLI
ggcttgtgacaaaatgacacaggagaatttgagccatcctaagcaagcagcatgagtcacagatttcattctctctccaactgataagaaacgtagttccatgtgggctcttaggatccactcacttaactctaaactcgtcgtgtgtgttccttctttccacttcaaacttgtgacccagaaaaaagaccctttccattctcctccttttcttcctcctccactggctgcacctcgctgccgtgtctctgcctagcgtgaaattggcctcatttcccatctgggtcctgtgaattgcgattggaaccgcgttttccccgcttctgggcttggctcagaagtagtcagaatgatgtctgtcacaggcaaaagcattgattttgctggcaaaaacttggtctcttgtggctgctcttccaatgcttcttcgtttgataggtacactgtgaggaactatgccaagctgaatagtaataattctaaagggtgtggcagagatcatggggctcgtaaattggtttgttgtaagaagaggagcactcattgtcgggtttcttctatgaagactgcacagcctacggtgaatggggggactcatgcatttgaaggccttaccacaggattggacttgaagggttattcagaagaccccatttcccctgctaggctttttgaagtggttgccgatgatctgctaactctcaataaaaatcttcagtcgattgtaggagcagaaaatccagttttgatgtctgcagctgagcagatttttagtgctggtggaaagaggatgagaccagctttggtgttcttggtgtcaagggcgactgcagagttacttggcttgaaggaacttactgcaaagcatcgacgtttagcagagataattgaaatgattcatactgcaagtttgatacatgatgatgtactagatgagagtgaccttcgacgagggaagaaaactgttcatcaaatgtttggaacaagagttgcagtgctggctggagacttcatgtttgcacagtcatcatggtatctagccaaccttgaaaatattcaagtcattaaactcatcagtcaggtgataaaagattttgcaagtggggaaataaagcaggcttcaagcttgtttgattgtgatgtacaacttgacgagtatctaattaagagctattacaagacagcatccttgattgctgccagcacaaaaggagccgcgatctttagtggtgctgacagcagcgtgactgagaaaatgtacgaatatggaaggaatcttggtctatccttccaagttgtggatgacatattggatttcactcaatcagccgagcaactgggaaagcctgctggcagtgaccttgccaagggcaacctgactgcaccagtaattttcgcactggagaaagaaccgaaattgagggatatcatcgagtctgaattcagtgaggttggttcccttgaggaagccatcaatttggtcaagagttgtgggggcattgaaagagcacaagagttagcaaaagagaaagccgatcttgcaattcaaagtctccaatgcctacctcagagtgtatttcgtttagcccttgaagatatggtggcatataaccttcaacggattgcataagcttgtgcatgctgatgacacattgttaaagaaaaaacacaaaaagattcttttggtcctaatatagggatgagagagccttgaactttttgtcatttcaagaatttcaagcaaatctacacttgtgctacttttggggtacttttatagtcattgaagggcaaagcaagcgcgcattctcatcatttaatatatttgcagcttcctgcaaagtacaagaacataatatattccattattgtatc

SEQ ID NO: 9847 - DNA, 794 bp, Glycine max
  Clone ID: 700874396_FLI
gtgttacttgatgaaaacctggaagctagagtctctgattttggaatggctaggcatatgagtgctatggatacacatttgagtgtgagcacactggcaggcacaccagggtatgttcctccggagtactatgagagcttcagatgctctaccaaaggtgatgtctacagttatggtgtggttttgttggagctgctaactgggaaaaggccaacagattcggctgattttggtgataataatcttgttggatgggttaaacaacatgccaagctgaaaataagtgatatttttgacccagagctcatgaaggaagaccccaatttggagatggagcttttgcagcacctgaagattgcagtttcctgtttggatgatcggcattggagacgtccaacgatgattcaagtgttgacaatgttcaaggagattcaggcaggatctgggattgattctcagtcaaccatagccaatgaagatgacagtttcaatgcagttgaaatggtggagatgagcattaaagaaacccctgaattgagcaagcattaggcaacaaattccggaagtgtcatgtggattctttgggaaacagacaagaagagagaaaaggaggagatgacggattcagctcccctcaaagttttttccttcctctttgccgcttcaaattatttcagacacaagggggaaacggttaaaggggggaatgaatgcctttgatgtatgtagtcttgttattttatacaaaaaaaaaaagttgtttaacttgtatataaacagcttcagttgttacc

SEQ ID NO: 9848 - DNA, 564 bp, Glycine max
  Clone ID: 700874409_FLI
agcaaatatggaatctgaagcactgatatggggtgacaaactcatactgaagggattgtcattccgtggttttcatggagcactaccggaagaaaggaagctaggccagaagttcgtggtagatgttgatgcatggatggatctgaaagcagctggcaaatctgatcacttatcagatacaattagttacacagatatatatgatatagctaaggaaattcttgaagggtcacctcaaaaccttctggagtcagtggcacaaaaaattgcagtgactactctgacaaatcataagcaaatatctgctgttcgagtgaaggttgaaaagcctcatgtggcagttcaaggtccacttgattacttaggcgttgagatacttagacgcagaagcgatttgtcagaatagaaatttcatagttttgttctctctggtttttgttgctctcattctgatttgtattgtttgttttcattgaatgtttcttcttgccattcagtttgatacatcgtcaagttccatttgatataaaggtaactctttccctgagtaccctattagttttc

SEQ ID NO: 9849 - DNA, 2865 bp, Glycine max
  Clone ID: 700874414_FLI
agtcgctgttgaacatgacgggtctgttacagttaagtgtcggagataaccctttcgacttaacgccctttcccaaagaggttgtgagtctcaagaatctcaattggttctacctatcgaactgcaccctcggatggaagcttccggtaggactcggcaacctcacggagctcaccgaattagaattctccgataacttcctcaccggcgattttcccgcggaaattgtgaaccttcggaagctctggcagcttgagttcttcaacaattccttcacgggaaagattccaaccggcctgagaaacctcacaaagcttgagcttttggatgggtccatgaataaactcgaaggggatttgtctgaattgaagtacttgaccaatctggtttcgttgcagtttttcgaaaacgatttgtcgggggagattccggttgagataggcgaattcaaacgcctcgaggctctgtctttgtacaggaacagattgataggtcccattcctcagaaggttggttcctgggccaagtttgattacatcgacgtgtcggagaatttcttgacggggacgattccgccggatatgtgtaaaaagggaactatgtcggcgctgctcgtgcttcagaacaagctctccggcgagattccggccacctacggggactgtttgagtttgaaacgattcagagtcagcaacaactcgctctccggtgccgtccctctttcaatttggggattgccaaacgtggaaataatcgatattgagatgaatcagttatcaggttcgattagttcggatatcaaaaccgcgaaagcactcggttcaatattcgccaggcagaaccggttgtccggtgaaataccagaagaaatctcaatggcgacgtcgttagtgattgtggacctgagcgagaatcaaatctttgggaacattccagagggaatcggcgagcttaaacaactaggtagccttcatttacagagcaacaagttatcaggttcgataccggaatctctaggttcctgtaattccctcaacgacgttgacctatctcgaaattcattctctggagaaatcccttcctcgttgggttctttccccgctttaaattctctgaatctttcagagaacaaactctcgggtgaaatcccaaagagtttagctttcctcagattgagcctctttgacttatcgtataaccggttaaccggtccaattccacaggctctaaccctagaagcttacaacggaagcctctcgggaaaccctggtttatgcagcgtcgacgcgattaactcgttcccgcgttgccctgcttcctctggcatgtcgaaggacatgcgcgcgctcataatatgcttcgcggtggcttcgattttgttgctctcgtgtttgggcgtttacttgcaactcaagaggaggaaggaagatgcggagaaatacggagagcgttcgctgaaggaagaaacgtgggacgtgaaatcgttccacgtgttgagtttctcggagggagagattctagattccatcaagcaggagaatctcataggaaaaggaggctcggggaacgtgtacagggtcactctttccaatgggaaagaactcgcggtgaagcatatttggaacaccgatgtccctgcaaggagaaagaactcgtggagtagcacccccatgcttgggaacaagcacggtggtggtgggaagtcaaaggagtttgacgcggaggttcaggctttgagctccataaggcacgtgaatgttgtaaagcttttttgcagcataaccagcgaggattcgagcttgttggtgtacgagtatttgcccaatgggagcttgtgggaccggcttcacacgagtaggaagatggagcttgattgggaaaccaggtatgaaatcgcggttggggcagcaaaagggttggagtatttgcatcatgggtgtgagaagcctgtgattcatagagatgttaagtccagtaatattttgttggatgagtttttgaaacctaggattgcagattttggacttgctaaggttattcaggccaacgttgtcaaggattcctccactcatgtcattgccggaacccacggatacattgctcctggttagcatttactactagctcctgtctttttataagaaataagttttagtgtattttgtatgttaatttgacaatctttaatcatgcttattaatgtatggattttgtttgaattggtgtagaatatggctacacgtacaaagtgaatgagaagagtgatgtgtacagctttggagtggtgttgatggaactagtaactgggaaaaggccaactgaaccagaatttggggaaaataaggacatagtgagctgggttcataacaaggcaaggagcaaagagggacttaggagtgcggtggattcgagaattccggagatgtatacagaggaagcttgcaaggtgttgagaacagcagtgctgtgcacggggactcttccggctttgagaccaaccatgagagctgtggttcaaaagcttgaggatgccgagccttgtaaattggttgggattgttattaccaaagatgacagtgaaaagaaaataggagtcaacgacaagtaatgtattgtattccatcctccatagttggttacaaccggactgaagattatggatcatcatgaagttgaaggggaaccaaccacctccacgagttatctataattgatgtaaattttcccggaaagagggaacactgtaaaatattagtcttggcttctttaatgtctattttaaagtggaagacttgtgtagtaaaagggtctgcatctagtactcccaataaaagaaaaaaaagagaagcaaattccttcttcctt

SEQ ID NO: 9850 - DNA, 1635 bp, Glycine max
  Clone ID: 700874479_FLI
agaaaagaaaaaatttgttttataactttttaacttattgttcacttcttcttcttcttcttcttcaatatcttggttctttgatattattctattgagcaaaaaatgggagttccagagagagaccctcttgcacaattgagtttgcctcctgggtttaggttttaccccacagatgaggagcttttggttcagtacctttgccgcaaggttgctggccatcatttctctcttccaatcattgctgaagttgatttgtacaagtttgatccatgggttcttccaggtaaggcagtgtttggagagaaggagtggtacttttttagcccaagagacaggaagtacccgaatggttcacgaccaaacagagtcgcgggttctgggtattggaaagcaactggaacagacaagatcatcaccactgaaggtagaaaagttggcataaaaaaagcacttgttttctacattggcaaagcacccaaaggctccaaaaccaattggatcatgcacgagtatcgccttctcgattcttcccgcaaacacaacctcggaaccgcaaagcttgatgattgggttctatgtcgtatctataagaagaactcaagttcacaaaaggttgaggctaattttttggctatggaatgcagcaatgggtcatcaccttcttcatcgtcccacgtggatgacatgctgggatcgttgccggagataaatgaccggtgcttcaccctgccacgagtgaactcactcagaacaatgcaccagcaggatgagaaattcgggtctccgaacatgggatccgggtttttctcggattgggttaactcgaccgatctcgattcgatttccgaattcgagtcgggttgccaaacccaaagaatggtgaattatgattgcaatgacttttttgttccttctctgccgcccttgggccatgtggactacatggtggatgcacctttggaggaggaggttcaaagtggtgtgagaacccgacgggtcgacgggccggggcattttcaaccgaatccagatacccgattgttaccgggctcaggtgacccattcgggtttgggtttattatgggtcagcaagttgggttcggggttagggagtgaagtgaaggatcagaaagtgtaattgtgtaaataattggggattttagtttaatttgaattctatgaccattgttatggtttgtgttattgattcccgcttggaaaggaaaaattgcaattttggtcatacttttcggctagaacaagatgaaggacggttgacacattatgaaactgagaaaggacgcaatggtgattgcaccacaaccacaacaatgcatgctgaaaagtaattgctttgtaagacattattgcctaaacatgaatcacgttgtacttcaaagcattaatacatagcaactattttccaaagtttagtttagaactttagatattggtatttttatttggctagtgtcccatgcatccttgtagacaacctgattaacatgtaatgaagatatgtccaccatttgctataaagttgtcttgcctcgctgattgtgaaaaaagtgagatcaacgtgtgaaatgaaccctccattttatgtatgaaacaaatggatttggattgatt

SEQ ID NO: 9851 - DNA, 1222 bp, Glycine max
  Clone ID: 700874591_FLI
gtcatctcttcttccaccaaactttcggagttttctttggttaattagtaaaaaattgcttaattaatttgtccttccagaggatcgaatgagatagaaagggtactggaggggcaattaattaattaatctctagtgagtatatatataaatatggagagcctggaagaaagagtgtttatgttgatgaatgaacaatattattattccaattccaatgtatcagatcagctgcatatgcatcatcatcgctctgtgtctgtggagaatctaaacctatggtgggaaaacaacaccgactccgatgactcagccgagcgaattttgtattgggaatctcagatctcactgcttcaggaaattttggagcggtaccatttaagtgggtcaaaattgagacttgaggttggtcgaatcattaaagaggtcaaagcttctgatttttgcagctgcttgaaggctaactcttcggattgcatcacctgtttgagaagacgagtggttgacgggctctgcgaaagaggattcagtaccaacctttgcatttcaaaatggagaacaactaaaaaatttccaggaggctgtcacgaatacattgaggtgattgcaaacacatcaactaggaagaagattcattttctggtggaattggagttgagggagcagtttcagattgcaaaagcaagtgaaaattaccggaaactagtgtcctgtttgcccgaattttatattggaaaactggagtacttaactgccattgttcgagtaatgtgcaatgctgcaaagaaatcaatgaaggaaaagaaaatgcacgtgggtccgtggaggaagagcagcttcatgcaaatgaagtggtcaggattcaatcaaatatgcaattctaataaatccttgggttcagttgcaacatatccccatgcacaagcaagtgaatcttacttcagaatttcaggagctcctacacctttggtagtcacctgaaaatgaccagaaaatttcaacactaaattttgaacttaggcctatttagtagtaggagttgatgagcaatatatcagaattcgaaattcagtgtcctttactttaggtccaaggttatgatgtaatatatttgcccagcattagagtatatcatatattgtttgcagtaatttttaaattgtaaatgtccttgttgaatatatatatatatatataaaggaacgtactgagattcgagctt

SEQ ID NO: 9852 - DNA, 1199 bp, Glycine max
  Clone ID: 700874601_FLI
ctttgaggttttatcagctcgccttggacgtaagcctgaggatatcgtgaagttagatgctaatgaaaatccttatggtccccctccagaggtcatggaagccctaggatcaatgcaattcccatatgtctatcctgacccagagagccgcagattgcgcgcagctcttgcccatgattcaggccttgaagctgaatatattcttgcagggtgtggtgcagatgagcttattgatttgatcatgcgttgtgtgctggatcctggagacaagattgtggactgccctccgaccttcacaatgtatgaatttgatgctgcggttaatggagcacttgttatcaaagttccaaggaggccagatttcagcttgaatgttgaacaaattgctgaagttgttaaacaagagaagcccaaatgcatatttttaacatctccaaataatccagatggaagtataattgatgacgaagttctcttaaaaatactcgagcttcctatattggtgatactggatgaagcatacattgagttttcagcaattgaatcaaggatgagttgggtgaagaaacatgataatttgattgttcttcggacatttagcaaaagagctggtttagctggacttcgagtgggatatggagcttttcctttgagtataattgagtatctttggagagcaaagcagccgtataatgtatctgttgctgctgaaatttctgcatgtgcagcattgcaaaatcctacctatctagagaatgtaaaaaatgctttgttgaaagaaagagggagactttatgaccttttgaaagaagttccattcctccggccatttccaagccattctaacttcattctttgtgaggttacatcaggaaaggatgcaaagaagctaaaggaggacctagcacaaatgggtgtgatgattcgtcactatgacaagaaagagctgaaagggtacgttcgtgtgactgttgggaagcctgaacaaacagatacacttatgaagtgcctcaagagactctcgtaggaggaaaatttgatgtaataaatattgtaacacgtcatgctaaactcctcttagctaatctttatatagagccgtcaaaattagaagaaaatatgttgattttggcaagggatgtggatgtagctttatatattattgacctaaatctaccatgataaatattgtgttttgc

SEQ ID NO: 9853 - DNA, 1160 bp, Glycine max
  Clone ID: 700874629_FLI
atcaacataaatattccgttttgcgtttctctgcctaaaaggattgaaagatgggtcaagcactaggttgctatcaagttgatcagtcaaatgtggctatcaaggagcattttggaaaatttgatgatgtcctagaacctggatgtcattgcctgccttggtgtcttgggtaccagattgctggtagtttgtcactgcgtgtgcagcaacttgatgttcgatgtgagacgaaaaccaaggacaatgtctttgtcactgtggttgcatctgtgcaataccgagctgtgtctgagaaagcatctgatgcattctataggcttaccaacacaagggagcagatccaatcatatgtttttgatgtcatcagggccagtgtaccaaagttggagttggattctgtctttgagcagaagaatgatatagcaaaggctgtggaggaggagcttgagaaggccatgtcaacctatggatttgagatagtccagactctcattgttgatatagagcctgatgttaatgtcaagagagcaatgaacgagattaacgcagctgctagattgaggttggctgcaaatgagaaggctgaagcagaaaaaatactgcagatcaaaaaagctgagggagaagcagaatccaaatatctgtcaggactcggtatcgctcgccaacgtcaagccattgtggatggactgagggacagtgtgcttgctttctctgagaacgtgcctgggacaacagctaaagatgtcatggacatggtgctggtgactcaatactttgacaccatgaaagagattggagcatcttcaaagtcctcatctgttttcataccacatggtcctggcgcagttaaggacattgccatgcagattcgggatggtctgcttcaggccaccacttcacagaattaagctttcctggagttgtaaataacaaatagtagcgtgccagattttttttcagtaaatgcttttcttgtttgaacttaaaatgtctgcatctttactcttatattggatagattcatggcagtgtctatttttatgcgtgtaagtactgatgtgcagttttgaatacttgtttgaggatagtcttaatgtcaagttgcttgtgaatcatattatttgggggtttgttatgtaagaattacttcccagagg

SEQ ID NO: 9854 - DNA, 1483 bp, Glycine max
  Clone ID: 700874651_FLI
atgtaattgaggatagaaacattgccatctccattcaagatctacgcaaggtcaccaataactttgcttcagaaaatgagctaggccatggtgggtttggaactgtttacaagggtgagctagaaaatggtaaaaaaatagcagtgaagagaatggaatgtggagctgttagcagtagagcactggaggagtttcaagctgaaatagctgttctttccaaggtccggcaccggcatttggtatccctactaggctattccattgaaggaaatgaaagaattttggtttatgaatatatgcctatgggtgctctaagcaggcatctttttcattggaaaaacttgaaattggagccattgttgctgtctcagaggcttacaatagcccttgatgttgctagagcgatggaataccttcatggtcttgcacgccaaaccttcatccatcgcgacctcaagtcttctaatattctactgggggatgattttcacgcaaaagtttctgattttggcctggtgaaacttgccccggatggccagaagtctgtggcaacaaagcttgcaggaacatttggttatcttgcccctgaatatgcagtgatggggaaaatcaccactaaagttgacgttttcagctacggtgtggtcttgatggaacttctgactggactaatggctcttgacgagagccggtcggaggaaagtcgatacctagctgaatggttttggcaaattaaatccagcaaagaaacacttatggcagccattgacccagctcttgaagcaagtgaagaggcttttgagagcatttctattgtggctgaactcgctggacactgcacttccagggatgcaagtcacaggcctgatatgagtcatgcagtcagtgtgctatccgcattagtggagaaatggcgacctgttgatgaagaatttgattatggctctggcattgacttcagtcaaccacttcctcagttgctgaaagattggaaggaatcagaaggcaaagaatcaagctatacaagtgcacacagtgaaggaagcataccagctaggcctactggttttgcagactcttttacctctgctgatgcaagatgatctggaggtaactccagtgcaatttgtggaacttgttactttgtcttaccaataaaattcactttatattggctatttctgtgttggcagcaaaagggtataatttatttgtttccaagtctttgtctttggacttttagagaatacaggtatggagatgtagataaagaaacattatttttattctttttatgtttgtgtctatatacaaattccaaaatctaaagtaacgaatcttggctacaaggtacgttaataatatttatcaataatgctacatgtgctattcatgttatacgtgttatccatgttgtacaggccaattattgtattaaaaatgtttgtcaatagcataaattacaaatgtactaccaagtacc

SEQ ID NO: 9855 - DNA, 1306 bp, Glycine max
  Clone ID: 700874658_FLI
acaagcttgaacccgaaaggaaggtccaacttgcaaaagagcttggcttgcagccaaggcaagttgctatatggttccaaaaccgaagagcaaggttcaagaccaagcagctagaaaaagactatggcgtgttgaaagctagttatgataggctcaaaggtgactatgaaagtcttgttcaagagaatgacaagttaaaagcagaggtgaattctctggagagcaaattgattcttagagataaagagaaggaggagaattcggatgacaagtcatctcctgatgatgctgtcaattcttcaccccacaacaacaaggagcctattatggatttattaatttcaaaaaatgcaacaacatctgaaaatggaaccgaagtgtcaacactcccactccctattatggtaacatgcaagcaagaagatgccaattcagccaaaagtgatgtgcttgattcggatagcccacattgcactgattatgggaaccacccttcctcattcgtggagcctgctgattcctctcatgcctttgaaccagaagaccactcagaagacttctcacaagatgaagaggataaccttagtgaaaactttttgaccctcccttcttcttgttgcttacctaaggttgaagaaccctgctatgatgaccctccagaaaactcttgtaattttggcttccatgttgaggatcaaaccttctgtttctggccctactgaaccaaccaaccaaccaaccgcttccaatgttataaaaacttcgcagttgtaaccatgtactagaaatcaataaaaatggtattgttacttctactaaggaataaaaatcagaaggctaatgcaatgcatcatgctatcatcactggtggtgttaatagttagcagtgaaagtgtaacacaatgttactactagctaaaattcaaaaacttggttcaggtgtgcgcgtaggtatcccaaaatttcaggtggggtacagcaaccaatcgttgttttactttcggatgtggaaaatggaaaccctgttttctctttctctctgcactcctctggatcacaccgttgttttactcatgtattaggaagaccctttcatcatgattcacctgtcctcactgctcagcataaagttacagttttatatgcgtcccagtaatcattagagtcatcatagcaaccagagtttgagtagattaaataagatctcacattcaaattttcctgttgttattggacactgagaaaaacttgtgtctaagttgatgatgattatgtaagaaatatttggcatattttaatgaaattg

SEQ ID NO: 9856 - DNA, 772 bp, Glycine max
  Clone ID: 700874667_FLI
gttcttttcataaacaacaacattttaactcaagggttgcctgataacttagcctccactcatattctcttactcaccttagcaaacaacaagttcatgggtccaattccaagaagtcttcctaaggctttgtccactctaagtgaagtgcttttactaaacaaccagttaactggttgtttgccttatgagattggttttcttgaagaggcaacagtgtttgatgctggcaacaatcagttaactggtcctttgcctttatctttgagttgtcttgagaaggtggaagtgctcaatttggtggtaatctattgtacggcatggtgcctgaagtggtgtgtgtaggattagtgaatttggtcaacttttcactatcagataactatttcacacatgtgggaccattttgtaggatgctgattcagagaggggttcttgatgtgaggaacaattgtattcctgatcttcctttccagagatcagtgatggagtgtgctgagttctttgcaacaccaaggatgtgtcccttcatgtggtttcatggtctcatcccttgtaagcttccttttcaacattccattcacaattagatatgcctaaggcatttggggttgcaattctttgtttttcttttctttcttttttaacttcctgtgtaatgtataattggaactgatgagctttgtgatggtccatccatgttctgataaattctatatttcaagtcaatgtgtgcagctgataaattatttcatcatagccattgtattat

SEQ ID NO: 9857 - DNA, 451 bp, Glycine max
  Clone ID: 700874769_FLI
accttaacatgtttttttgtgccgagggattttaaacctttgtactttctatgcttaattattattgttatcaactgtgtgacaggttgcaaggattttcctgttcatgttccttttttaccacatagggacccgtttggatgaggtgaaggaagtctttctttttggtttttacaccttgatcatggtgccttctgtgttggcagttttgaacatattttggttctggaagattgcaagtggcatggttaaaactctcacaaaagcaaaacacagcaagtgagactgacaaatacactttgacatattatcttgattcttgaccaatgagatagccagtaattgttttatagtagagttacaatcaacattttttattttaacttgtaacctttactacagatggatattttaaatttgaatgttactcaattgaaatttttttagttgc

SEQ ID NO: 9858 - DNA, 1517 bp, Glycine max
  Clone ID: 700874814_FLI
cgaacttgttagcaacactgggggatctggagagggactccttcgtggctcttctttcgaagctgatcgctgaatcgaagtacgtccagaacaacccgccggagctcattccccaagaggacagagtggtgaagcacgtcttggacgttctgttaccgttcagcaccaccaccggcggtggacccttgctcgtaaaccacgtcacctaccacgccggcagagggaacctcatcgtggagtaccccggcaccgttcccggcaaaatcctctcgttcgtcggatgccacatggacgtcgtgaccgccaatcccaacgattgggatttcgatccattttcgttgagcgttgacggtgataagcttcggggtcgtggaactactgactgtttgggacacgtggcgcttgtcacggaactcatgaggaagctcggggagaccaagcccaatttgaagtcaagtgttgttgctgtttttatcgccaatgaagagaattctgcgataactggtgttggtgtggatgcacttgtcaaagatggcctcctcaataaactcaaggatggccctctgtattggattgacacggcggataaacaaccatgcgttgggactggtggtatgataccttggaaacttcacgtcaccgggaggctctttcatagtggattagctcataaagctataaatgcgctagagctagccatggatgctctaaaggaaatccagttgcgattttactcagacttcccacctcatcctcaggaacaggtttatgggtttgcaaccccttcaaccctgaagccaacccaatggagttatccaggaggtggaatcaatcaaattccaggggaatgtacaatttcaggagatgtcagattaactccattctacaatgtaaaggatgttatgaaaaagctgcaagaatacgtggacgatattaatgagagtgcacagaagctagaatctaggggtccagtttcaaaatatgtcctacctgatgaaaacataagaggaagacttactttatcttttgatgaggcactgtctggagttgcttgtgatcttaattctagaggttttcatgttttatgcaaagcaactgaagaagtagttgggtatgtaaagccttactctattactgggagtttgcctctcattcgggaactacaggaagaaggttttgatgttcaaacttctggctacggcctaatggctacttaccatgcccagaatgagtactgcctctttacggatatgtcccaaggatatcgggtcttcgcgagaatcatctctcaattggaagagtgagaatagcagaggaactaataattctggtgtctcgtgggctatgaagatgttcgtgttcagatatatgaacataatttctgttatattgtgtagagggttcggtattactgacttttcttcagcatgataggcgaaactagttttttccacataaatttctccggggaaaagtacgtttttgataccatgaaaatttaatgctcctttcacttt

SEQ ID NO: 9859 - DNA, 2008 bp, Glycine max
  Clone ID: 700874881_FLI
ctttcaaccccatccaatcctcacatgcatgctgtctctgccaaagtgccaagtcacataacatttccattgttaccattctttctttccatcacaaccacttattaagcctctgatcctcactttctctcacacaaaaacacactcaccatggatcatcgcaaaccattgctacccacttcctctgatgctgctccaaatccacacactcgcaaggaccttcttctagttatttgcggcttgctattactctcttcccttgttgcctttggagggtacagggcctccaacgcgccgcatgccgacgtggcatcggcaacatcgaacgatgagcaacgtagtccgacatcggtgccttctccgaaatggtacccggtttcgcgaggtgtttcttccggggtgtcagagaagtcatcaagcatgttgtttgcggttaaagatggagcttcgaaggcatttccatgggacaacagcatgttgtcttggcagagaactgcttttcatttccaaccagagaaaaactggatgaacgatcccaatggtcctatgtactacaagggatggtatcactttttctaccaatacaacccgaacggtgcagtttggggtgacatagtttggggacatgcagtttcaagggacatgatccattggcttcaccttccactggcaatggtggctgatcaatggtatgacatgcaaggtgtgtggacaggctcagccacaatcttaccaaatggtgaaatcatcatgttatacacaggttccaccaacgagtcagtgcaggttcaaaaccttgcataccctgcaaacccctctgaccctctccttgtggattggatcaaataccctgggaaccccgttttggtgccaccaccaggcattggggccaaggactttcgtgacccaacaacagcgtggctcacctcagaagggaagtggcgaatcaccataggttccaagctcaacaaaaccggcattgcgttggtttatgacactgaggacttcaagaactatgagctcaaggaggggctgcttcgtgctgtcgctggcaccggcatgtgggagtgtgtggacttcttccctgtgtccaaggagaatgagaatggattggatacttctattaatggggctgaggtgaagcatgtgatgaaggtgagcctggatgatgatagacatgattactattcaattgggacttatgatgagaagaatgttctgttcacaccagatgatgctaagaatgatgttggcgttggattgaggtatgactatgggatattctatgcatccaagacgttttatgatcagaataaggagaggagagttttgtggggttggattggggagtctgacagtgaatatgctgatgtggccaaaggttgggcttcagttcagagtattcctagaactgtggagcttgataggaagactggcagcaacttacttcagtggcctgttgctgagatcgagagtttgagattgagaagtgatgaatttaaaaatttgaaggctaaaccagggtcagtggtgtcagtagatattgaaacagccacgcaggtttgtgttcatgatatcatcaagtttctaaagttgtagacatgaataaaaatgtgaagctaaattacatgacattttatctaccaatcagttggacattgttgccgagtttgagatagacaaggaaacccttgacaaaattcctcaatccaacgaggaatacacgtgcagcaccagtggtggatctaaacaacgtggtgccttaggaccttttggtcttttggttttggcagatgaggggctttctgagtatactcctcagtatttttatgtcattaaagggagcaatggaaatcttaagacttccttttgtgctgatcaatcaaggtattggattatccgttaattttcaacatgaaagttatccatacattattatcattatgtaaaaagttttatacattcatcaaattataatttattatgtatgataaatttattaattttt

SEQ ID NO: 9860 - DNA, 1608 bp, Glycine max
  Clone ID: 700874908_FLI
ttcaatcaaagaggacccatcatttcctttcccttattataattattattattaattttttttctttctttctttgtgtgtgctgttgatggatcccaagggctcaaagcagcagccacagcaatcacaggaggtggtaccaaacttcctcagcctcccccaacagcaacaagggaataccaacaacaacaacatgggagagaacaaacctgcagaggtgaaggatttccagatagtggtagctgagaacaaggaagagagcaagaaacagcagcaacagttggcaccaaagaggagttccaacaaggacaggcacaccaaggttgaaggcaggggaaggaggataaggatgcctgctctctgcgcagccagaatcttccagttgaccagggaattgggtcacaaatctgatggggaaaccatccagtggctcctccagcaggctgagccatccatcatagctgccactgggactggcacaataccagcatctgctcttgctgctgctggaaactcactctcaccacaagctgcttctctttcatcatccttgcaccaacatcaacaaaagattgatgaattgggtgggtcaggggggagtagtagtagggccagctggcaaatggttggggggaatttggggagaccccatttgggtgtgggtgtggccacagcagcaggcctatggccccctcatgtcagtggatttggatttcaaacaccaccaacaacaacaacaccaacaacaacaacatcatcatctggtccatctaatgccaccttagccactgagagctccaattaccttcagaaaattgcattccctggctttgacttgcctacttctgccactaacatgatgggtcacatgagtttcacctcaattttgggtggaggtgggggtggtggggcccagcatatgcctggcttggagcttggtctttcccaggatggccatattggggtgttgaatcaacaggccttgaaccagatttatcagcagatgaatcaggctggtagagtgcatcatcatcagcatcagcatcatcatcagcatcatcagcagcaacaacaccatcagcaaactcctgctaaggatgattctcaaggctcaggaggacagtagtagagtgtttaattatggatttggatgaaagaaagaaaaagaaaaagaaagtagcatcattgtctagatgctggctgaggtttctagtttctacaatggcttttgtattgtataattgggagactgtgagggaaaaaaaaaataggtgtctcagagaattcaatagaaagctggatttggtttacccctttggtttaccccccccatattgtttcttctccccagtactcaagtctccatatacaggtggaattgcatggccagatggcttggctgctttggtctggccttaaaaaactattgtttaattcagaggtgtgttgattattttgttcttctctaggtcagggtggagtgctgatcggtttgttttgtgaatttgaagatatagtttcataatcatatttgttaaatttcatattggatatggtatttagtacttttatgtcatctgggaaattttaatctttgtgtggaacagc

SEQ ID NO: 9861 - DNA, 379 bp, Glycine max
  Clone ID: 700874924_FLI
gcgtgatttcgcatccgcaggcactcgcgcagtgcgagcacactctcaccaaactcggcctgaacgtggcgcgcgaggccgtggacgacaccgccggcgctgccgagttcgtcgccagcaacaatctccgcgacaccgccgccatcgcgagcgcacgcgcggcggagctctacggcctgaacgtgatggcggacggaatccaagacgatccgagcaacgtcacgcggtttgtgatgctcgcgagagagcctatcatcccgcgcacggaccgtcctttcaagacgagcattgttttcgcacacgacaaaggaacttcggtgcttttcaaagtgctttccgcgttcgcgtttcgcaacatcagtttgacgaagatcgagtc

SEQ ID NO: 9862 - DNA, 1494 bp, Glycine max
  Clone ID: 700875134_FLI
aacacagcaaaggttggttacggctggctgaaaaagatgactcctgtaaacagtgcatttgcttggcagtcatacaatgaagaacctgcctcatccagtcaagctgattccattgcagcatatgcactttgggagcaggtcaacgtgacccgcgattcttcagattatttgtggtatatgacagatgtcaacgttaatgctaatgaaggatttctaaagaatggacaatctcctcttctaactgtaatgtcagctggccatgttctccatgtgttcattaacggtcaacttgcaggaactgtgtgggggggattgggaaatcctaaattgacatttagtgacaatgtgaagctgagggctggcaataacaagctttctttacttagcgttgcagttggtctcccgaatgttggtgtgcactttgaaacatggaatgcgggggtgttaggcccagtcactctgaagggtctaaatgaggggactcgagacttgtcccggcagaaatggtcttacaaggttggactgaaaggtgaatccttgagccttcacaccgaaagtgggagtagctctgtggaatggatacaaggatcattagtggctaaaaaacaacctttgacatggtacaagacaacttttagcgcaccggccggcaatgatccattggctctagatttgggaagcatgggaaagggtgaagtgtgggtaaacggtcgaagcattggtcgccattggcctggatatatagcacatggtagttgcaatgcttgtaattatgctggatattatactgatacaaaatgccggacgaattgtggacaaccttctcagagatggtatcatgttcctcgctcatggctgagctcaggtggtaactccttggttgtgtttgaagaatggggaggtgaccctaatggaattgctttggtgaaaagaacatgaagtgtgatattttatgatgctctcttaaaaggcattgacaggcaatatatatcttgtaacaaatgtctaggaaatgcaaagaagctgtcaagtgagtcctatgcggttaggaccctatgatgcagcaatttaccaaatacgtgtggtttagatcatattaggttcagtatataaaaaatatttgaagttcataattggtgctccttgtcttctggttgttcaagtatacctcaaaagattgccaaggcctaatcatgcattgcctggccaaaaacaaagatttatataagagaatttggatgcgcaaagactgtgtatactgtacatagtcaagtcaggctattgtgctgaatattgccccatgtattacagggcttgtatcaatgaagattgagcccttacacatttatttaatttactatgatacaatggaaagaattgtagacacgcaaaatgtgtcggagagtatatttgctatattctgccagaaataattgtgttttcccattataattattatgtaagaacagattgaaagtaataaaatatcctttg

SEQ ID NO: 9863 - DNA, 677 bp, Glycine max
  Clone ID: 700875152_FLI
aagcaattggaagtggtggagctcagcgagaacgcgctcaccggaaccgtcgagtcgtggttcttccttttgccgtcgctgcagcaagtggacttggccaacaacaccttcacgggggtgcagatctcgaggccactcgaggcgcgtgagggaagcagcaacagcaacctcgtcgcgctcaacctcgggtttaacagaatccgaggctacgcgcccgcgaatctcggcgcgtatcccgcgctgtcgttcctgtcgattcgctacaacgcgctgcgtggcgcaatcccgctggagtacgggcagatcaagtccatgaagaggctgttcctcgacggcaactttttcgtcggaaagccgccagcggggctaatggaggccggcacggcggtttccggcagcttgggggacaattgtctgcatgcgtgtccagggtcgtcgcagctgtgctcgcccgcacagaaacctagctctgtttgcaagcaagcctaccgtggtagaccaacaccgtaatctgttgtcggttaaaattaaaaagaaaaataaattataaataatagatagatttctattctattttttaaaaaggttctttgtatgtagaagtgcgttactatctgaataaaagacgatgtctgtgtaaagtgtaaactatggtctatggtaatgaatggtgtttt

SEQ ID NO: 9864 - DNA, 1781 bp, Glycine max
  Clone ID: 700875185_FLI
tgtctctctctctccaccattgccatggatccttacaagctccggccatccagcgccttcaattctcccttctggactacaaattctggtgctcctgtttggaacaacaactcctctttaaccgttggagctagaggtccaattctgcttgaggattatcatcttgtggagaagcttgcaaactttgacagggaacgtatcccagaacgtgttgtccatgccaggggagctagtgcaaagggtttctttgaggtcacacatgacatttctcacctgacatgtgcagatttccttcgagcccctggagttcagacgcctgtaattgttcgtttctcaactgtcattcatgagcgtggtagccctgaaaccttgagggaccctcgaggttttgccgtgaagttttacaccagagagggtaactttgaccttgttggaaacaaccttcccgtcttctttgtacgtgacggcatgaaatttccagatatggttcatgctcttaaacccaatcccaagaaccacatccaagagaattggaggatccttgacttcttctctcactttccagaaagccttcacatgttcacctttttatttgatgatttgggtgttccacaagattacaggcatatggatggttttggagttaacacatatacgctgatcaacaaggctgggaaagcagtgtatgtgaaatttcactggaagaccactagtggtataaagtgtctattggaggaagaggccattaaggtgggaggagccaaccacagccatgccactcaagacctccatgattcaattgctgctggtaactatcctgagtggaaactgtttgttcagacaatagatcctgagcacgaagacaaatttgactttgaccctcttgatgttactaagacttggcctgaggacattatacccttgcagcctgttggtcgcttggtcctgaataagaacatagataatttctttgctgagaatgaacaacttgcattttgccctgccattgtggttcctggtgtatactactcagatgataagatgcttcaaaccaggatattctcttatgctgattcacaaaggcacagacttggaccaaactatctgcaacttcctgctaatgctcccaagtgtgctcaccacaacaatcatcatgaaggtttcatgaatttcattcacagggatgaggaggttaattacttcccttcaaggtatgatcctgttcgtcatgcagaaacgttccccatacctcctgctatctgcagtggaaggcgtgaaaagtgtggaattgagaaggagaacaactttaagcagcccggagagagataccgatcttgggcacctgacaggcaagatagatttaatcgccgatgggttgatgctttatctgacccacgggtcacccatgaaatccgcagtgtctggatatcttactggtctcaggctgaccgttctctaggccaaaagatagcatctcgtctgagcatgaggccaaatatttaatgttgttgccaaccccagaatgattgttagagttgcagacgtgcaaagagtacgataaggatgtgattttcgatcaatttgaaagaacttatccatttcttgcaattttagttgtgtacccataactccatgcatgcaactcgttgagctatctcaataaatgccgtttgtatgtgttagtatttatatttatataccttttcggcatgtttcgctgctattgttgtggactatgtgttccttgtaatccaattaattaagaaagaaagtattaaatt

SEQ ID NO: 9865 - DNA, 1752 bp, Glycine max
  Clone ID: 700875202_FLI
caatttcagtgtgttttttaagagagagagagaatcacgtttacatgtctctgaatttgcaactaaaaaatgttgaaacaattggttttcagtttcttcataacaacgctttctctttcacttatccttttcaccatcaatatcatacccatgcctcgctctcttttccctcaccaccacaaactcgctttcgccctccgacaaccgtcttctccgccctgacggcggagcagatcgccgcgccgccggtgaggatggtggctgtggttggcaacggagctgccagccctctcaagtccgcatcttgggaacaagtcatgcttcacactgcaaagagattgaaatgggttgatgaagggtatgaacttcttgtatttacagatgaatgtattatatctaatggaccgatgaccatgaaactccagagagaattactgaatgctgatatattggttattgttgctgttacaaacaaggaatctgttgagtggattaataacaacagaaaaactattgaaaatgtaatatgccttgactcttcaccggatttgaaaaacaaattaggaggctatgatgttcccagtgaagtgagaggaagtatgtttggaaacttttttggaaattctcaatctgagaaagctaaagaatcatatgaagtagtgcagactgtatctgaagcatgggatcgacataattctgatgatataaggttctgtttgctggtactaatcaatgcttatataaggcccgttccagtattgaagaacttgagagctaaaggtttttctaccctgaactgtatgttgaagaactgtggtcgtcaggtacttaattgcttgttggatcccaattgtagaaaagctcttcaatgcttgaacaagtgtagtcccgttgatcaagtttgtaactaccgatgtattgcttcatatgaaagtgcaaatctagaggctttttcactatgtgtattacagaaaaacaactgtcttgagttggaagcagaaatccctgacaagccatatgtgcctccaatgatcaagttccgggggaagaacttaagttatgaaatgacagaagatttgtttgttggatggttggggagtttggaatggagctggcgtgttgtagcagggcagaacccagcatatgatcagtttccatgccaataccagttgttctataggggaaaagcaaaagggtcattttggtacgaaccagtattccaggtaaaaacattggaaggccaattggtttggaggaggaggaaatatagagtcagaagaggtaaggtacctggcacattctatttcagtgtattagataatggagttgtttcaaatgagttttggacaattgtggatgtggctgataatcttagttggggtttgttccattatcgtggtgctgctagagttgcaggacaatcttatactggggcagtacttgttagtccagatggagcatttccaaatgacagagagaggacaaagatagttgctgcactagacaaatgtgaaattaaagagtgggagctatatactgttgacaattgttcatgcatagatccacccctaggaattccggagggttcaagtttacataccatagtccaaattgaagttccaaagtagatggctgtattattatttgtgccgagaactcatcagaattataatctctatccggtaatgttcagcacacatgcagattcaattttcaaagaaagttaattggttttgtttcttgtcagtgtct

SEQ ID NO: 9866 - DNA, 1524 bp, Glycine max
  Clone ID: 700875302_FLI
caataagctttaaccatgtctgcctttgttggaaagtacgcaggtagtatctcatatctcctcctcttctcttaatattactcactcttacatctctcacccacacgtaaacaagaacatttcttcattgaatgaagtacaagcttgtcaaacattccactttaatgcactgattaacaagaaacgagtagccgagaaatgcatcatcatattctcattagttattggaacataatctcaaattataaaagattcattcatgtctaagaagctccttcgaagtcttttatatgtttacaactcttagactttggtttccaaatgggatgtatgttataacttacatcaattccagatgagcttatcaagaatgccaagtacatagccacacctgggaagggcatcttggcagcagatgagagcactggcaccattgggaagcgcctatcgagcattaacgttgagaacattgaggccaaccgccaagctcttcgcgagcttctcttcaccgctccagatgccctccaatacctctctggtgtcatcctctttgaggaaactctttaccagaaaacctccgatgggaagccttttgttgaggtccttcaagagaacaatgtcatcccaggcatcaaagtggacaagggtgttgttgagttggctggcacaaatggtgaaaccaccactcagggattcgactctctcggagctcggtgccaacagtactacaaggctggtgcacgcttcgccaagtggcgtgcagtcctcaaaattggcccaactgagccctctgagctttccatccagcaaaatgcacagggcttggcacgctatgccatcatttgccaggagaatggccttgtgcccattgttgagcctgagattttgactgatggggctcatgacatcgccaaatgtgctgctgttactgaaactgtgcttgcagctgtttacaaggcactcaatgagcagcatgtccttcttgaaggaactcttctcaagcccaacatggttactcccggctctgatagcccaaaggtaactcttaacattttcaaaatcatacatccttatgtatggatacattctatagttgaatacttactagtctttgaaataaaattggaatgaatgaagtatggtgcaatattgttgacttcaaaaaagatttgtagacaccttatatgctatttgacacagataaaaggaataatagaggtatgataaatgatatgatgtgataggaagagagaaaagataggtgttgatggagcattagtaattaaagggtgtctaactatcattgttcgattaacttggaagtgaatgtaagttggcactagttaaaaatctggtcagttcgaactctcaccttccacataggtatggattcaaatttccttgaagccactttcttgcttggtgtccaaccttcttcaggaagctctcttggagcttagatgctagttaagtagttgcaattaggtgaaactactggtgtcttccagttctaccacttttttg

SEQ ID NO: 9867 - DNA, 1736 bp, Glycine max
  Clone ID: 700875422_FLI
atgaaggtagcgaaagggcgtatcctggttggtaaatacgagttgggaaaaacaattggagagggaagctttgccaaggtgaagttcgccaggaacgtccagaacggtaactatgtcgccatcaaaatcctcgaccgtaaacatgtcctccgcctcaacatgatggaacagctcatgaaagaaatatcaaccatgaagttaatcaatcaccccaacgttgttagaatacttgaggtgttggcaagcaaaacaaagatttacattgttctggagtttgttgatgggggagaactatttgacaaaattgctgcaaatggaagacttaaagaagatgaagcaagaaattatttccaacagcttattaatgctgttgattactgccatagtagaggcgtgtatcacagagatttgaagcctgagaatcttctagactcaaatggtgtccttaaagtttcagattttggtttgagtacatactcacagaaagaggatgaactgctccacactgcatgtggaaccccaaattatgttgctcctgaggtgcttaatgatagaggttatgttggttctacatctgatatttggtcttgtggagtcattctctttgtacttatggctgggtacttgccttttgatgaaccaactcatatggctctgtacaaaaaaattggcagggcagaattctcttgtccatcatggttttcgccacaggcaaagaaattgctaaaacacattcttgacccaaaccctctaacgaggataaaaattcctgagctcttagaagatgaatggttcaaaaaaggatacaagccaacatccttcactgaggaagaggatctaaatgtagatgatgtagtcgttgctttcaatgagtctaatgaaaatctagtgacagagagaaaagagaaacccgtctccatgaatgcttttgagctcatttgtaggtcacaaagtttcaatcttgacagtttgtttgagaagcaaacgggtcaagtaaagcaagaaacaagttttacttcacagtgccctgcaaatgaaattatgtttaaaatcgaggaagcagccaagccactgggctttaatgtatacaagcgaaattataagatgaagttgcaaggtgacaagagtgggaggaagggtcacctttcagtggctactgaggtttttgaagtggcgccatccgtgcatatggtggagctgcgaaagacagggggtgatacattagagtttcataagttctacaaaatattctcatcagggttgcaagacatagtgtggcatgatactgaaggaaaaaaaaatatgaagaattaagcaacctctagggaaagcaatcatcatattcatagggttacgccttcaatgattcgtttgattaattcataaatcgggttattgttctgtttctacttctagtgccattcccttattgtggttcgtggagttcccatgctttgctaaatctggaactttggatgtgtctggttggatgttcgatatgaaagagagaaaaatagatcccttattggtgctttatctttgacgctgtattcttaattttttttttactaccgtattcagtatagacgtagtaaatatatataaatggggggaaaatagtataagtgagtaggcattggagtgtggtataatacttgtactcttcaaatatttcattcccttatgtgttcattacttctatctatacttattttttgcatgcttgtggcttgatc

SEQ ID NO: 9868 - DNA, 1326 bp, Glycine max
  Clone ID: 700875731_FLI
gtccttttcagcttaccaagaacttgtctcttgtgtggaatgactatggctgggacaaggcatcaaatattatatttgtagaccaacccactgggacgggtttcagctatacttctgatgagagtgacattcgccatgatgaagagggtgttagcaatgatttgtatgacttcttgcaggcatttttcaaggagcaccctcagctcactaagaatgacttttatattactggagagtcatatgctggacactacattccagctcttgcatccagggttcaccaaggaaacaaagcaaaagaaggaattcatataaatctaaagggttttgctattggcaatgggttaaccaatcctgaaattcagtaccaggcatatacagattacgcattagacaggggactaattaaaaaggctgattatgacagcatcaacaagttgatcccaccatgcaagcagcccatagaagcttgcggcactgaaggtggagaaacatgcgtatcttcattatatgtttgcaataagatattcaatcggatcatgaccatcgctgacgatgtaaattactatgacattagaaagaaatgtgtgggagatctgtgttatgacttctctgtgatggaggatttcttaaacaagaagacagtgagagatgctttaggtgttggggacttggacttcgtttcatgcagtagcacagtgtatagtgctatgatgcaagactggatgagaaatctggaagttggtattcccacactccttgaggaaggaatcaaggtgcttgtgtatgctggagaagaagatctcatatgcaactggctcgggaattcaaggtgggttaatgcaatggagtggtctggtcaaaaacaatttggggcgtctggtacagtcccatttttagttgatggtgcagaagcaggaacgctgaaaagccatggacctctctctttcctcaaggtatacgaggctggtcacatggtccctatggatcaaccaaaagctgcacttgagatgctaagaagctggatgcaagggaaactgacaatgacaaagagtggagataatgtctctcctaaatgatgcactcacagcacaaaaaccaaaaccatccctctattgctgcatagatattgatgtcatttccttgtgtatactgggagggtggaatgtaattctttttcttttttcttttttttttctttctctagtttctcttatccctgaccattgagggatttggaactaatcatctatcattgtcaccaaatcacgcacaactttacacttgtaacctgatttcaatcaaagcaaatttcaattcttgaac

SEQ ID NO: 9869 - DNA, 846 bp, Glycine max
  Clone ID: 700875735_FLI
aaaagaggcgcaagatgagtggtagggtttctgggaaggtgaagtggttcaatgatcagaaggggtttggattcataagccctgacgatggcagcgacgatctcttcgttcaccaatctcagatcaaatctgacggtttccgaagcctcgccgaaggagagtccgttgagttcgccattgaatctgaatctgacggacgcgcgaaggctgttgatgtcactggccccgacggcgccagcgtccagggaaccagacgaggcggtgatggtggccgaagctatggcgggggacgaggaggtggtggaggtggctacggtggaggcggtggctacggtggtggtggtggctacggtggaggcggtggttacggtggtggtggaagaggcggtggaggcggtgcttgctacaactgtggtgaatcgggacatctggctagggattgcagtggaggcggtggtggggacaggtacggaggaggtggtggtggtggcagatatggaggcggcggtggcgggaggtacgttggtggtggaggcggcggcggcggcggaggaagctgctacagctgtggagagtctgggcattttgccagagattgcccatcaagtgctcgttgaatttactgttagggttgtttatgttttgcggattgttttaagtttttactttaatatgtcttagggattttaatggtttctgtccaaactatgggttcttatgagtagatgtgtgggatttttcttttttggttatttaaatgaagggtttctgtgttatcgttacaatctgcaaactaaaatctgtttgaacttacattttgctataatgaatcgtatgattgctatc

SEQ ID NO: 9870 - DNA, 1062 bp, Glycine max
  Clone ID: 700891711_FLI
gtgcaattgatatttggagcattgggtgcatatttgcagaaatgctcactgggaagccattgtttcctgggaaaaatgttgtgcaccaattggatctcatgactgatttgcttgggactcctcctcctgagtccattgcaaggattcgaaatgaaaaggctaaaaggtatcttaatagcatgaggaaaaaacaaccaattccattctcccaaaaatttccaaatgcagatccattggctcttcgtttgctggagcgcctacttgcatttgatccaaaagatcgtccatcagctgaagaggcattatctgatccttacttcactggcttggcgaacatggaccgtgaaccatccactcaacccatttcaaaacttgagtttgaatttgagagaaggaaattgaccaaagatgatgttagagagttgatttatcgagagattttggagtatcatccccagatgctccaggagtatcttcgtggtggagatcaaactagcttcatgtatccaagtggggttgatcggttcaagcgacagtttgcacatcttgaggagcattatggcaaaggtgaacgaagcactccaccattgcagagacagcatgcctccttacctagagagcgagtttgtgctcccaaggatgaaagtaaacaaaacaacgattctgaaaagccaagtggatcaaatcttcagcagagtcctccaggttctgatgagacaggtgctcaaaatggaacctccaaaccaaactacagtgcacgtagcttgttgaagagtgccagcattagtgcttccaagtgtgtagttttgaaacaaaataaagatccagagcaagagccaattacggaggtaaatgatgaggcagtggatggagtgacaggtgagattgctgccctccatgcttgattataactttggtggtttgaagcactacatgcaaatcctcctcgttgttagtgctaggactcatttagtcatgaactgccatcttgtattactgttgtaattatttattttgtgtacggaaatgcaatgtatactagtcacattttattatgaaact

SEQ ID NO: 9871 - DNA, 1604 bp, Glycine max
  Clone ID: 700892234_FLI
cttcaagggatcgcacctctattgatgactttgagattataaaacctatcagtcgtggggcatttggaagggttttcttggctaaaaatagaacaactggtgatctttttgcaataaaggttctcaagaaggcagatatgatccgtaagaatgctgtggaaagtatattagcagaacgtgatatcttaattacagtacgcaacccttttgtggttcgattcttctattcttttacatgtcgcgagaacttatatcttgtcatggaatatcttaatggaggtgacctgtattcattattaaggaatttaggttgcttagatgaggaagtcgcccgtgtatatattgctgaagtggtgcttgcattagagtatttgcattcactgcgtgtggttcatcgtgacttgaagcccgacaatttattgatagcacatgatggtcacatcaagttaacagactttgggctttctaaagttggtctcatcaacagcacagatgatctgtctggtccagcagtgaatgggacatcactacttgaagaagatgaaactgatgtatttacatccgcggatcaaagggaaaggagggagaaacgttctgcagtgggcacacctgattacttagccccagagatacttttgggaactggacatgggtttactgccgattggtggtctgttggggtcattttatttgagttgcttgttggtattccacccttcaatgcagagcaccctcagattatatttgataatattcttaatcgtaagataccttggccagcagttcctgaagagatgagtcctgaagcactggatcttattgatcgattattgacagaagatcctaatcaaagactaggatccaaaggggcatcagaggtaaagcaacatgttttcttcaaggatataaactgggacacacttgccaggcagaaagctgcatttgttcctgcttctgagagtgctctagataccagttacttcactagtcgctactcatggaatacttctgatggttttgtatatccagcaagtgatgttgaggattctagtgatgctgatagcttaagtggcagcagtagttgtttgagcaatcgacaagatgaagtgggagatgaatgtgggggtcttaccgagtttgattctggcacatctgtcaattactcttttagtaatttctcctttaagaatctctcccagcttgcatcaatcaactatgatctcaccaagggatggaaagatgacccggcaacgaactctagtgcatagctgtatttattatcctgtgtcaaagttcagaatttggttttcgacctatgatccaagcaattttgggggcataaacacctttgtcatttgtataccttgtacatatttagaggttcaaagtggttcaggatgtactctttgcttgttagtttacagggcaacaatggggggtttcaatcttacggttattggtattcacaattgtgtatgaattgagaattgtaaatttaaaaaatgcagatcacagttgctcacattattctgtggtgtgctctttattggcaatgagaacacatccctttttgttcaggccactgtaatattatttacttacag

SEQ ID NO: 9872 - DNA, 979 bp, Glycine max
  Clone ID: 700894426_FLI
tttaatttgtagataggagctccacccgaagtggtggcgcgtatggctgcggctaagcaagagtttgaggcacggcaaagatcttcagttggttcaagggaaacttcaaaagaccctgaacttgaccaattcatggaagcatactatgacatgcttgtgaagtatagagaggaattaacaaggcctattcaagaggctatggatttcatgcgaaggatagaaactcagctaaatatgctttgcaatggacccgtgcggatcttctctgatgataaatgtgaaggtgccggttcatcagaagaggatcaagacaacagtggaggagaaacagaacttcccgagattgatccccgagcagaagaccgtgaactcaaaaaccacttgctgaagaagtacagtggttacttaagtagccttaagcaagaactctccaagaagaaaaagaaagggaaacttcccaaagatgctaggcaaaagctacttaactggtgggaattacattacaaatggccatatccttcggaatcagagaaggtggcattggctgaatcaactggtttggaccaaaagcaaataaataactggttcataaaccagaggaagaggcattggaaaccatctgaagacatgcaatttatggtgatggatggcctgcatccgcagagtgcaactctctatatggatggtcactacatggcagatggtcactaccgtctaggaccatgacaaaagacaaggccaccttataaattattattatatatatttttaattgtaatttaaatgcaaggtatgtgtttcttattaacaaagagattgtgcccaaactggataacagtcaacgctctagctactagtttcaatattatcaagcatataccgtgaacattaattggttgtgcttgtgcagtgtgagtacttgagtagtttgccacagtgatgttgtacgttttattaaacaatgacggttgcttattat

SEQ ID NO: 9873 - DNA, 524 bp, Glycine max
  Clone ID: 700894449_FLI
ggaatgtgtcttataagtctgatatttatagttacggaatgttgttgttagaaatggttggaggaaggaagaatgtagacacgtcttctccagaagatttccatgtgttgtacccagattggatgcatgacctagttcatggagatgtacatatccatgttgaggatgaaggtgatgttaaaattgcaagaaaactagcaattgttggactttggtgcattcagtggcagccattgaaccggccatccataaaatctgtcatacaaatgttggaaagtaaagaggaagacctattaactgttcctcctaatccatttcactcatccacttccactattcctagtggattcacttcggcaagactacctttggaattggaagtaattcaagaatgagaaattagcttattgatttatttacaacgggagatgatcagtgtttacacatattttgttttctcctcaaggaaatattgttgtgtttgaatcaaatgtatgaaaataaagtaaattattattataatt

SEQ ID NO: 9874 - DNA, 1036 bp, Glycine max
  Clone ID: 700894460_FLI
ctctttgtgtgtctctttctctatttctgagtctcagtgttaggggggttattcattattcataataacttggctttatagcattttcccttttgatataaaatgggaaggcaaccttgttgtgacaaagttgggttgaagaaggggccatggactgcagaggaggataagaagctcataagcttcatcctcactaatggccaatgttgctggagagctgtccctaagctagcagggcttttaaggtgtgggaagagttgcaggctcaggtggacaaattacttgaggccagacttaaagagaggtcttttatcagaatacgaagaaaaaatggtcattgatcttcatgctcaacttggcaatagatggtctaagattgcttctcatctccctggaagaactgataatgagataaaaaatcattggaacacacacataaagaaaaagctcaagaaaatgggcattgatcctgccacacataaaccacttcctaatgcaaatgaacaaaaccaaaatcaaaccagacaagatcaacaactacaccaccaaccagtagaattagaagagcctaaccaacaacctttgcaagttgactttgaccccaaagttgacccaaataaggagccagagaagccagagacttcattggaatcatcaaccatcactgaagaagccaaagaggaagaccaaatcataacacccttatttgacacaatggagctaatgaatggtttctgcacagatgaagttccaataattgaacctcatgagattctaatgccttgtgctccttcctcttcatccaccacctcttcatcatcttcttcaaattcaaccaattttcttgaagacttgcagctaccagattttgaatggtcttgtaattacaatgataataacactattactaacaataacaacaatgaagacaaagacgacgacaacaacaacaatagcagcatggccttgtgggatgatgacattattggcaaccgttattggctgattaatgaagatgatgatagtgatgaaaacc

SEQ ID NO: 9875 - DNA, 855 bp, Glycine max
  Clone ID: 700897731_FLI
gactatttggatctctaccttatccattggccagtcagtgcgaaaaacgggaagcttaccaaacctgacatacctagcacatggagagcaatggaggcactctacaattctggcaaggctcaagctataggggtcagcaatttctctgtaaagaagcttcaggatttgttggatgtggcaagtgtgcctccagctgttaaccaagtggaattgcacccttcattacagcagccagaattgcatgctttctgtaaatccaagggagtgcacttatcaggctattcaccactgggaaaaggatacagtgaaagtaatattcttaaaaatccatttctgcacacaactgcagagaagttagggaagactgcagcacaaatagctcttagatggggactacaaatgggccacagtgtgcttcccaagagcacaaatgatgcaaggctcaaggaaaactttgatctctttgattggtccatacctgcagatttgcttgccaacttctctgacattaagcaggagagaatagttactggagatggtttttttagcaagacatctcccgggtacaaaacaattgaagaactctgggatgagtaatggacagtttccatattggccacatccccccctcttgcttaatgcaaaaatgagcctatctttatgattattgtaataatctacgatgtgtttataattttggacttgagatgtgtcaagggagatttcgagtttacattaataacgtgtcattttggaattcagttgtttgagtcttgaccttattgtgtgtttgacaaaactattgttagaagtctaatatcgtttagatcggaaaatgttagttattaatatgtt

SEQ ID NO: 9876 - DNA, 1040 bp, Glycine max
  Clone ID: 700898749_FLI
cgtgagtggaaaatggcctgcaaaacagcggaagattgctattttggttgatcaagtgaatctgcttcaaaggaagttttcatactgcaatccaaggtttgtggccagacatgatgtcaagtttgcatttaagcttgcaagagatgcaattgaatctcagtccacaagacttgcagaatctgggagtaggagtttgaatgaaacttgtgtcatatgtttggaggaaactgatgttggtcagattttttcagttgatggctgtcaacaccgctattgcttctcatgcatgaaacagcatgtggaggtgaagttgcttcatggaatggtgccaaagtgccctcatcaggggtgcaagtatgagctcctagttgacagctgccagaagttcttgactcaaaagttaaccgagaccatgcagcaacgaaaattggaagcttcaattcctgttgctgaaaaaatttattgtccttatcctacgtgctctgcattaatgtcaaaaactgaggtcttagagtactccaaagatatcactggtcaatctgaacaatctgaacccaagatatgcctaaaatgtcgtggccttttctgttttaactgcaaggtcccttggcatagtggtatgacatgtaatacttacaaaaggatgaatcctattcctcctgcagaagatttgaagctgaagtttctgcatcaaggagcctatggcaacagtgtctgaagtgtaaccatatgattgaacttgctgaaggttgctatcacatgacttgcagatgcggttacgaattttgctataactgtggagcagagtggaaggacaaaaaagcaacatgtgcttgccctctttgggccgaggagaatatttggttagatgatcatgaggaagagttggaagaagaagaagaagatgatgatgatgattatgatgattataggtctgattatcctgatgattattattattaagtatctggccgcttgaccaggttgacggttttacaactagtaaatattcatattcatatatctatatatatgtaagc

SEQ ID NO: 9877 - DNA, 367 bp, Glycine max
  Clone ID: 700898772_FLI
cttaggtcttccgaattcgaagttaatttgcaagatggctaaggaaaaggctcagatcaacattgtggtggttggtcatgtggaccctgaggaggcaaccaccattaacgagctgaagaagcctgttgtggagaaagaagctccagggcatgccatatgagggcatgcacgtacggcctcggaggggaaccagaaaattatgttaacaaaataatctggaaccctaatgtatcagtgtcatcatcagtgtgtagtttaagctagctttgctatggttacgttctttgagatgagagtcttgatgaacagtaccattctgatgtattgctttccttgaaagttaatgcatgcttcttatcttctgtct

SEQ ID NO: 9878 - DNA, 1602 bp, Glycine max
  Clone ID: 700898775_FLI
aagacaggagatcaagatctgaagccttgttgaagaggctgcttctttggatctgaacaatgcctctggctctggatctttgccgcgccttcaaacattgaaaaagacttccatttcttctcgaaggtctggtactgccactttccctagtcctggtacactcaattatcgcgttgcaatgcacaagggatggagctccgagcgagttcccttgcatgcaggtgctacccggaagcacgttttgccgttcaacaatgggaaaacattgccgtcaaagtgggaagatgctgagaggtggattctcagccctgtttcggcagatggcactgggagggcctcgcttaatgcaccccaaaggaggccaaagtccaagagcggtcctcttggaccccctggtgttgcgtatcattctatgtactcgccggccgcgccggtgtttgaagtggggaatggggggagttttatggaaggttctccgtttacaggtgatgggttaataatctgcaccggtggccatggtggagctctttccgtgagaacagaaccttgcatggcacgctcagcaagtgtccacggatgctctaagatacagagtcagtcatcatcaatgcccctccaagaggataagtttggtgggttcaaagatgtgggcaccaatgtgtcccgtgccacttcaaggagggacatggcgacccagatgagcccacagggtagctcacgctcctctcctaatctgaggccttctttctctgcctccaccccatcaaccttgcctgtcacagaattgcggactgttggttcctctaaagtggatattagggatgtgcaggtagatgaacacgttaccgtgacaagatggtccaagaaacatagggccctattcactggcagaggctcagaaaaagtcgaaagctggaaaaaagaactaagcactcaatcgtcaacttgggacgtttctgaaacgtcaaagcctgcctcaaagacaagaagtgaggaagccaaaatctctgcatgggagaacttgcaaaaggcaaaagcagaagcagcaatacggaaactagaggttacttcctagttcctagtgaatagtgattactttattttgagaattccgaataagtaattttctaaaaatgtttactctgaagaaaaataatcattataatgattatggggattattcttcctttgtaataaatatttagatttaggagttcagcttttggaattcacccttttttcttgagttgctgaaatttttcccctgtcgctcagtttcatttggttatcctcagttagctgtatgtcccttagagtgcttaagaaatgcctcttattttttgtgtgtaaaaaaagcctttttttatttgacaaaacttagatacagtattctaatgctgttctctaatcaaaacatttcatcttgaaaattgcggttgatttaagtcacagagacaagaacaatggtgactgaaatgaaatgtcgattttgattggagtatgatactgagaatatctatgatgctcattttaagttttattcttttttattatgatgcaccaatcatacattatttggaccatattatcatccatttaaat

SEQ ID NO: 9879 - DNA, 1160 bp, Glycine max
  Clone ID: 700898910_FLI
cacctcatcaggtcaatcccatgatctcaaaaaagaagattgcaaggaaacaagatcactggttgtttgctttggggaaatgttaatagactttgttccaacggtgggaggagtgtcactggctgaagcacccgctttcaagaaagctcctggtggtgcacctgccaatgtggctgttggtatctctagactgggaggttcatctgctttcataggcaaggttggagcagatgaatttgggtacatgttgggtaacattttaaagcagaacaatgttgagacgtctggcatgcggtttgactctaatgcaagaactgcattagcttttgttacacttagagcggatggagaacgtgaattcttgtttttccgcaatccaagcgctgatatgctccttcaagagtcagaacttgataaagatatcctaaagcaggctagaatattccattatggctccatcagcttgattgatgagccatgcaagtcagctcaccttgctgctatgagcattgccaaaaactctggttgcattctatcatatgatccaaatttgagattggctctatggccttctgcagactccgctcggaaaggcataatggatatatgggatcaagctgatgttataaagataagtgaggatgagattacatttttgactgggggtgatgatccttatgatgataatgttgttttgaagaaactttttcacccaaatctcaagcttttaattgttactgaaggttcacagggttgcagatattacacgaaggcatttaagggcagggttgcaggtgttaaagttaaacctgtagacacaactggagctggcgatgcatttgttagtgggattttatactgcatagcttctgaccaaactatttttcaggatgagaaacgtcttcgaaaggctttatattttgccaatgtatgtggtgccctcactgtaactgagagaggtgcaattcctgcactacctacaaaggaagctatcttgcaattcttactagaagcagctgtaatataaacagtattgacagatttttgttataattggttgttaagctatagcttaggtgatgctgaattctttttcctttttaattaaaaattttgtctatgaaattttcttatattaattctagttttcttttgctctc

SEQ ID NO: 9880 - DNA, 325 bp, Glycine max
  Clone ID: 700898942_FLI
gttgctgcatggctcccaggtagcgaaggccaaggtgtggctgatgttttatatggcggctatggtttcactggaaagcttccaaggacatggttcaaaactgttgatcaactgccaatgaatgttggagatcctcactatgatcccctcttcccatttgggtttggcctttctaccaaaccttctaaggccctttattcctcttgatgtatatttttttatgtaaaactataaacaataaaagagggtaggatttatttactaacatgtgataaaatattacaaatttaccttaattatattatctttgcaacatttcaacgat

SEQ ID NO: 9881 - DNA, 958 bp, Glycine max
  Clone ID: 700899010_FLI
aaaatctcttccttctctctcctcatttctgagttcccaactttcctcacctgagatctggtgtgacgtgcatcacaattgaatcgaattgaaatttgttgtcgtggttgcagcaaggaatgccgctggtattagcgaaaagcgattcgatccagattcgcgaggtatggaacgataacctggaagaggagttcgcgttgattcgcgaaattgtggacgattacccttacatcgccatggacacggagtttccagggatcgttctccgacctgtggggaatttcaagaacagctacgattaccattaccaaaccctaaaggacaacgtcgacatgctcaaactcatccaattgggcctcactttctccgacgagcacggcaaccttcccacgtgcggcgacgaatccggcacgtgctgcatctggcaattcaactttcgcgaattcaacgttaacgaggacgtcttcgccaacgactccatcgagctcttgcggcagagcgggattgatttcaagaggaacaacgaaaacggcatcgacgcccaccgtttcggggagcttctcatgtcctccgggatcgtcttgaatgacaacgttcattgggttactttccacagcggttacgatttcgggtacttgttgaagctcttgacgtgtcaggatttgcccgatacacaagtgggcttcttcaatttgataaacatgtatttcccaactgtgtacgacataaaacacctcatgaagttttgcaacagcctccatggaggcttgaacaagcttgccgagttgttggaggtcgagagggttgggatttgccatcaggccggttccgatagcttgctcacttcctgtacattcaggaaattgaaggacaatttctttagtggctccttggagaagtatgcaggtgtcttgtatgggttaggtgttgagaatggacagggttctcattgagaagg

SEQ ID NO: 9882 - DNA, 1716 bp, Glycine max
  Clone ID: 700875318_FLI
gcaaattgtggtatcatcatttgagcaagcagcgggttatggggcggcaaaatcttacactgcccttgccctaaaaactatctcaaagcaattcaggtgcctgaaagatgcaatctctgcacaaatcaaagccacgagcaagacattgggtgaagatgattgcttaggagttaaagtagaagggtcaaggcttaggtatgttgaccaccatcttcggcaacaaagggcacttcagcaactaggaatgattcagcccaatgcatggaggccccagagaggcttgcctgaacgagctgtttccattcttcgggcttggctttttgagcatttccttcacccatatccaaaggactccgataaagttatgcttgctaaacaaactggactttctaggagccaggtgtcaaactggtttatcaatgcccgagttcggctttggaagccaatggttgaagaaatgtacttggaagaaatcaaggaacatgaacaaggtaatgcctcagaaaacaccaaatcaaaggaatcgagcaaggagttgggttcaacagcaaatgttgcacccgaatcaggtgccattaaactcgatcatctccaatcaaagcaagaaagcttcaaacaccaaaacacttctccaaccgagatctcaacaaactcttcaatgtctccaatgggagggtcccttcaatccccctctggtttccatcttgcaggatcatctgacatgcaaattaggagtccaaagaaaccaagaagttcggaaattcaaaactctccaagtagtatactctcagtgggcatggaaatgaagcataataataatggtgatcatgcaaataatagagaagccaacaacacaaagtttggcaatgaaaggcaccaccagaaagatggataccctttgatgactagcaatgcaaaccatggtggagggtttggagcgttcaccatggaagacatgggaagcagatttaatgtcactactgagcaactggcttcaaggttccatggaaatggtgtttctctcacacttggacttccccacaatgagaacctttctatgccaggaactcaacaacatggatttctctcacagaatatacacttgggaaggagacttgaaatgggaacaaatggaaatgagttttgtgctatcaacactccaccttcttctcactcaggaaccacttatgagagcattgacattcaaaacagaaagaggtttgttgctcatcagttattgccagatttcgtggcctaagtactgatggctaggtagccagctaaaaatattggataatttatgtgagaaatcttagaattctgatgagtgtttctctagacacgctaattaacttggcagaagacttagctagcagcaccaagaaaagaaaaggagagggtttatgttgttttcacatatatatacatgcacatgcatatgcagtcactaattatgaaatgtaccgtgattttggtatactgaaattcctggaatgggaggggttgctagctccctgtaaagattggatagtagtataggattatacttgcagagatttaagttagcttaattaattataggattcataaaagttggggagggggtatatatataatgtatatggtattggatgtagccagttatgtagatggatttgaatgatttcttttgatttgatgttatatatatttgtgcacgagagttattatttgtgt

SEQ ID NO: 9883 - DNA, 1327 bp, Glycine max
  Clone ID: 700875376_FLI
gttttccaggcaaagtgcttggagacaggggaaactgtggctataaagaaggttcttcaagacaagaggtacaagaaccgggaattgcaaaccatgcgtcttctggatcaccccaatgttgtaactttgaagcattgcttcttttcaacaactgaaaaagacgagctttatcttaatttggtacttgagtatgttcctgagactgtccaccgagttatcaggcattacaacaaaatgaatcaaagaatgcctttgatatacgtgaaactctatttttaccagatatgtagagcactagcttatattcacaactgcattggagtgtctcacagggacataaaacctcaaaatttactggtcaatcctcacactcaccagctaaagatttgtgactttgggagtgcaaaagtcttggtcaaaggcgaaccaaacatatcttatatctgttctaggtactatagagcacctgagcttatatttggtgcaactgagtacaccacggccattgatatctggtcagccggttgtgtacttggtgaactattgcttggccagcctctattccctggtgagagtggagtagatcagcttgttgaaattatcaaggttttaggaaccccgacaagggaagaaatcaagtgtatgaatcctaattacaccgagttcaaatttccacaaattaaagctcatccatggcataagatatttcacaagcgtttacctcctgaggctgtggatctcgtctcaaggctactgcaatactctccaaatcttcgatgcacagctctggaggccttggctcacccattctttgatgaactgcgtgatccaaatactcgcctaccaaatgggcgttaccttcccccactctttaacttcagagccaatgagcttaaaggagtgcctccagagatgctggtgaaactgattccatctcatgcaagaaagcagtgtgccttgtttgcgtcatagtgttgcctcgtgtaaatattatctactccgcctgtagaaatgtatgtagtctgttccaagttgttaatagtttctcccaccccgtgtcctttgttctgttaatttgtccccctcacctgaagaagaaaaagaaaaaccccaccttccaatttgatatatttcttgttgccttaagaaagctgtttgagaagaagcttcaacttgatttaattggtttcctcatcttcaaaattttaacagattgcattaagtattaatattaattagaaggaccgttgtatactcaagtagtatacttgaacactagtacgatgtaatccgggaggggatgtttttaaagcttgtttgtctgctc

SEQ ID NO: 9884 - DNA, 940 bp, Glycine max
  Clone ID: 700875378_FLI
ataattcacccactaaatcacttgagggctgttcgaaatctggttccagggataaaaagtctggatcttcagcacacaaaagactaggagaagccgtagttcagagacttcacaaatcttttaaagaaaatcagtatccagatagaaccacaaaagaaagcttggcacaagaacttggacttacttatcagcaggttgccaaatggtttggcaatacacgttggagcttccggcattcatcacaaatggaaaccaattcaggtataaatgcttcacagcaagttactgatggcagagctgaaaatgagggggagaaggaatgtgaattaatatctctggagttcagtggagaaaaatcaaaaaccccaaactctagaaaaaggaagcatttgtcagaacccctatctgaagcacagctggatatcaatggctcagcagcaagttcaccaaatgttcatctaacgcaaataggcaataaaatgaagacaaggaaaaggaaatgatgcttagttgagaagtcgggtttaaccttttcctaaggcttcaaattgcagtatccatccttttgtgagattgagatcccatgagatgatcagctcagatctcgatggatttgtttccatttaggaagggaaccctagtaaatattgcagcttatgtgtttgactgttcacaatgtatggatatggctctcatcttgcattgatcgtgtgtggttcgacattcaaggtgggttgttttcgggaatcatgaagctgctacgttggtcaattgttggcaatccccatttcctttaaacaaaaatttgtcatggatctgtgatttgagtaatagagtggggggatgggagcatcatatattccaattgctgcatgcacattgcttaacttaataacctattattattgtgaggaatggaagtaaaataacacattgaggg

SEQ ID NO: 9885 - DNA, 654 bp, Glycine max
  Clone ID: 700875393_FLI
cagccaccgccataccaagaagaagaagaagaagaaagtggttgaagagtttggtggcaaaccagatattaaatggagactttatgttttcaaggctggtgaagtgctaaacgagcccctttatatacatcgccaaagttgttatctttttggaagggaaagaagggttgctgatatccctacagatcatccatcttgcagcaagcaacatgctgttattcaattccggcaagtcgaaaaggagcaacctgatggtaccttattaaagcaagtaaggccatacattatggaccttggaagcacaaacaaaactttcataaatgatggtcccattgaacctcaacgatattacgaacttagggaaaaggacaccattaaatttggtaacagtagtcgagaatatgtattactacatgagaattctattgggcaatagacattagtctccaatttcgctctatctactcatcaatactgattaaagcagcatttgacctgcagttttttgtaattcatgtccaacttatgtgtattccctcctttcagaagtttctagatcagtttgtcagcaagtttcttgttattattatatatacaagacacgttggacaatttatctttaagttgtataattcaaacttgagccctcaactt

SEQ ID NO: 9886 - DNA, 1726 bp, Glycine max
  Clone ID: 700875403_FLI
gttgtggaaagctgtgataatgatggtgctgaggaatgcggcgtggtttcgagttctgaagaggagtctgatgtggaaagtagtgagattgttgatcttgaggacattgctggtaaagctccttcgcggcggaaggtggtggctaatggggaagagagcaatgggaagttgaatggcagtagagaaatggtcactccggtgattcgagcaaatttagagaagcaggggtataaaattattgggtcgcatagtggtgtcaagctttgtagatggaccaaggcgcagcttcgaggtcgaggtggttgctataagcactcgttttatggaattgagagtcacagatgcatggaggcaacccctagcttggcttgtgcaaataaatgtgttttctgctggaggcatcacacaaatccagttgggaaaagttggcagtggcagatggatgatccaatagagattgtaaattctgcaatagacctgcatacaaatatgattaaacaaatgaaaggagttcctggagttaccttggagcgattatctgaaggtctctcaccacgtcattgtgcattatcgcttgttggtgaacctattatgtatccagagataaatgcacttgtggatgagctgcacaaaaggaggatttccacttttctagttacaaatgcacaatttccagagaaaattaagtcactgaaacctatcacccagttatatgtaagtgtagatgctgcaacaaaggactctttgaaggcaattgatagaccactctttggagatttctgggagcgattcattgattccttgactgctctaaaggaaaaacatcagcgaacagtataccgcctgaccctggtgaaaggctggaataccgaagaagttgatgcttattctaagctctttagtttaggagaacctgactttgttgaaatcaagggagttacatattgtggctcgtccactacgtcaaaattgacaatggataatgtcccttggcatgctgatgtgaaagctttttctgaggccctagctttgaaaagccaaggagagtatgaagttgcatgtgagcatgctcactcgtgctgtgtcctcttagcaaaaactaataagttcaaaattgatggccagtggtatacatggatagactatgaaaaatttcatgatctggtggcatctggaagaacttttgacagcagagattacatggctgccacaccatcgtggtccgtctatggatcagaggaaggtggatttgatccaggacaattgagatacaggaaagagagacatcacaagtctacccgcaatcaagcaggttagacatttaagagcctttggcagccaacactcattttcctgttgatcttttttcttcagtgtataactctaggttatacaacatacttcaataggacagttttgtaatacatggcttcacacataggttagtaccatttctgtgtatttaagccccattgttttcccaatcagcagttgaatgaacagaacattttttcttatttaccacaaatagtactttggatgtcaatgttgcagtcacagaagtaatttgtttttgagattgagatcagaagaatatgtttgagcttctgctgcaccaagctattgcttagtgttgctctgttgtaatattttagcaaattcctcagttggtctttcaggagaggaagattagctggaaatattataatacaatgcaatcatgtag

SEQ ID NO: 9887 - DNA, 1556 bp, Glycine max
  Clone ID: 700875432_FLI
tgataccaatcctgctaaagaaagcaatgaatttgtggacaaccttattaaagatattgatacattgggtatcaaatatgaacaaattacatatacgtcagattacttccctgagttgatggagatggctgaaaaattaattcgccagggtaaagcatatgttgatgacacaccacgtgaacaaatgcaaaaagagagaatggatggcatagattctaaatgcagaaataatagtgtagaggagaatctaaaattgtggaaggaaatgattgcaggaacagagaggggcttgcagtgttgtgtccgtggcaagttggatatgcaggacccaaacaaatcacttagagatcctgtttattatcgttgcaatccaatgccccatcatagaattggatccaagtataaagtgtatccaacttatgattttgcttgtccatatgttgattctatagaaggaatcacgcatgcccttcgatctagtgaataccatgatcgcaatgcccagtattactggattcaagaggacatgggtcttagaaaagttcttatctacgaatttagccggttgaatatggtctacactcttctgagcaaacgaaagcttttgtggtttgtacaaaatgggaaagttgatggatgggatgatgcacgatttcctacagtgcaaggaattgtgcgtagaggtttgaaaattgaagccctgatacagtttattgttgagcagggggcgtccaaaaatctcaatctcatggaatgggacaagctctggaccattaataagaagattattgaccctgtctgtcctagacacactgctgtcattgcagacagacgtgttttgttgactctcactgatggtcctgagaaaccttttgtccgcatcatacctcggcacaagaaatatgaagctgccggagataaagctacaacatatactaaaaggatatggcttgaccttgctgatgcagtgtctttatcagcaggtgaggaagtaacattgatggattggggaaatgccatagtgaaggaaatagagaaggaccaagatggaaatatcatagggttgagtggtgttttgcatcttgaaggatctgtgaagaccacaaaattgaaactcacttggctacctgagatagatgaactagttagcctgacattagtggagtttgattatctaattacaaagaaaaagcttgaagaaggggaggatttcattgatgtggttaacccatgtaccaaaaaggagactttagcttatggagactccaacatgcgaaatcttcagcgtggagatttattgcaactggagagaaagggatatttcaggtgtgatttacccttcattcgcccctcacaaccaatcgtgctatatgcaatccctgatggcaggcaacagacaagtttgaagtaatctttttggtcttgaaactgtttgggccacattcacactcagaatagttggtaatggtgataacaagtttgtggaactacttttatgtttaccatcacattgtactgtttatatgcaaaccattatatctggattttttactagt

SEQ ID NO: 9888 - DNA, 681 bp, Glycine max
  Clone ID: 700875469_FLI
gtggaaagtgctacctctatttaggaacatacaccacagtccagacaacttcaaggagccagaaaaatttgatccctcaagatttgaggctgctccaaaacccaacacttttatgccatttggcagtgggatccacatgtgtccagggaacgaattagccaagttggagattttggtcctcctacatcatctgaccacaaagtacaggtggtctgttgtgggtgcaaagaatgggattcaatacggcccttttgctcttccccaaaacggcttacccatcacattatttcccaagaacaagtagatatcactcaaacaatggcttcatagtagctttctaaatatggaaagaattgcttcatagctctcaaaattggtttccatattgcaattggataaccaaacaagggagatcaacttttcccttctttttggccaagagaaacccaaaggggtagtcttgacaatagcatacaaacaggaagaatgtcaagtgtatatagaggaggaggtttcacagcctgagcaaatagtattaagttcttttcattttcttattttttttatccttcaaatgtgaagaaaagtcctcataagattgtattgatgcattcaactaattagttctgtatccataagaatgccgcaaggccaaaataaaagttaaattttggttctgag

SEQ ID NO: 9889 - DNA, 420 bp, Glycine max
  Clone ID: 700875511_FLI
gagtatagttgcatttccagtttgttttacggttctcatttcacgctccacacatctagtcccccgtgccttttgcatattcggtatcacttgcgagcagaactttctttggctattttaggtgtgaaaaatttggtagcctcttaccggccttgtccacagaagtgttttggaggggtatataattcaaatgtactttcgacaatttgtgttctaaattctaattatgtacacccttacaggttagtgtcttgtttaatcccctggtcaatcgtcaatcttccagatggtttaataggatgaatctaaatttttaaaggaatctaattcagttggttgagtagaatgtgttgtaaactccttgatactgtgttggattcctatagataaaaaaaaaattccctagtgcctttgaccttt

SEQ ID NO: 9890 - DNA, 1469 bp, Glycine max
  Clone ID: 700875555_FLI
gtattttcctagtcatgagcctcatactgtggaagtttgtcccccttgtgtaggatacctcttcctctatgggtgcttgatgagatacagaaagatatagagttagcgtattgtgacaggtttggaagaagaaatattgaatacatttcccttggatgtgatattcttcctgtgctacatgggcgttcacctattcaagcgtatgcagattttatgaggaattttagggacactttcgggtctttgcttggtgttatcatcacaggtgtacagattggcatgggtcctggtggtgaactaagatatccttcattctcttcacaggagccaaatttggcttggcctcatgaacttggagagtttcagtgctatgataagtatatgcttgcttctctgaatgcctctgcaagaaatattggaaagcgtgaatggggaaatggtggtccatttggtagtggaagtttgatgcaaaatccggagcatactgattttttcaaaaatgacggtggctcttgggacacaccatatggtaaatttttccttgaatggtactcagatatgttgctgctgcatggggagaggatttgtagggaagctgaaactatatttaggggttcggaagtccatatatcagcaaaattggctgccattcactggcactatgtcacgcaatcccatccatcagagttaacagctggttattataatacttctaacagggatggatacttacccattgctcgcatgtttagcaagtatggattttcaatgtgctgctcttgttttgaaatgcaagatgctgtaatgcagaagatcaatccagatggtagtcctgaaggttttcttagacagcttttgctggctgctaggctctgtgatatatcactcgaaggtcaaaatttttcaactaatttggatgatggtgcattcacccaggtgcttaagatgtcaaaattttactcagatgggattgagaagcgatctttctcattcaactttgtaagaatggacaaaagattgtttgaatcccgaaattgggatcggtttactcgttttgtgagacaaatgtctaatggaaacatttttcgagccagattaaattctgttcgtgacgtacggttgaagaccacaccagtggtagcagcagtgggactattgtatcacctatatcagcactcttgaaactagtgttggccttttttctttaggcatatgtagtatttatgcgatcgatgcaagaaagtatgatgacctccggtcgaatgttgttaaatgtgtagtaactgctgattcttcaaatgattcttttattgctttttggcaagaagttacttccccaaggtaacacattacattgccttccagtttttttttttgatatgggtggcatgttatccacttgtacctgtatttccagtagacagagatatagtttaaaaccagttactgttgagatcttggttcttcac

SEQ ID NO: 9891 - DNA, 547 bp, Glycine max
  Clone ID: 700875570_FLI
ctttgagaagagcaaggctgatccatctcactgggacaaaatctcccagggtggactcaagcgtattcatgagaagtacacatggcaaatttactcggacaggctcttgacactcactggtgtgtatggcttctggaagcacgtgaccaatcttgaacgccgtgagagcaaacgttacctcgagatgttctatgctctcaagtaccgcaaattggctgagtctgtgccccttgctattgaagagtaaattcatgtttgaagagaacatcaatggagaaaccggcttttggtcgtttgaagtcttatggagctttcataaataacgccattgattttgattgtgatcagcttttggatttaaagagtctaaaaaaaagtgtcgtttgtttttatattttgcttaggttttgggtaaaaaaagtaaaaaaagaaagtcttttttttttaaaattctttttgttgttgcaatattgtgtatgattggaaatctttaaattcgggttttccaccccatcaattcaatttaaagatatgccttcttccattc

SEQ ID NO: 9892 - DNA, 1546 bp, Glycine max
  Clone ID: 700875617_FLI
gttctaatgatgaaacagctcctatggtggtacaacttgttcctctcatcatgatggagctccatcagactcttgagaatcagaaggtttcatctgacgagaggcagaatgagttacaaggccttctatgtggttgcttgcaggttatcatacagaagttaggatcatctgaaccaacaaagtatcatttcatgcagtatgctgaccaaataatgggtttatttttgagagtgtttgcttctcgaagtgcaacagctcatgaggaggctatgcttgccattggagctttggcctatgcaactggtgctgattttgcgaaatacatgacagaattttacaagtacttggagatgggtctccaaaattttgaggactaccaggtatgtgctatcacagtgggtgtggttggtgatgtatgcagagccttggaggagaaagtactgccttattgtgatgggataatgacccaacttcttaaggatttgtccagcaatcagctgcataggtctgttaagcctcctattttttcatgttttggagacatagccttggcaattggagaaaactttgagaagtacttgttatatgcaatgcctatgcttcagagtgctgcagaactctctgctcatacatctggtgctgatgatgatatgacagaatacacaaattctttgagaaatggaattctagaggcatactcagggatcttccaaggatttaaaggttccccaaagacccagcttctgatgtcttatgctcctcatgtgctgcaattcttggatagtttgtatatggagaaggacatggatgatgttgtgactaagacagcaattggcgtgcttggagatttagctgatactttgggcagtagtgctggccccttgattcagcaatctgtgtctagcaaagacttcctcaaagagtgtttatcatctgatgaccatttgattaaggaatctgccgaatgggccaagttggcaatcagtcgagcaatttcattttgaggctattgctatttcatggcttctagttcttgcatacatctgcatttgttgcgtgggggtctcaactgcatacatgagtcgggtcatcaccatttttgggaacaggtgttcggtcatttgggtctgcatttcatgtcagcaacaacataacatggtcatggagtctgctttttcatttttatttttaaaaatttattgttctgcattgctatggaggaagtcggtgggtgatgaccaatctttcttctgctaacttggcagaaaagatgtggtttttacgtacaggaggagaaacagggtgaaatgggggaaggagcaagaaaggagatagatgatatcccatgatatctgctgataccgtaactataggagtctatggtggtccagatattatgtcctttacttttttttttcttttcctattactattggctgtagagtgaaacaatcatcttagtccatccatccatgtgtttgggataggtaatgcaacatattttagccgttccttgaaattattcaaataattttttgtctcccgc

SEQ ID NO: 9893 - DNA, 839 bp, Glycine max
  Clone ID: 700875686_FLI
tgcaaaggttgctttggacattcataatctgcgtgaagagaatccagataagttttataaccagtttatgaataaagttctatatgcaagagaaggtgctaaaagtattatggataggacatttgcggatttaccttggcagattcgagttgaggtggatggagttgaaattgaggtccccgaggatgcggaaggtgtgcttgttgcaaacattggaagctacatgggaggtgtagatttgtggcaaaacgaggatgaaaattatgataattttgatcaacaatccatgcatgataagatacttgaagttgtgagcatatctggaacatggcacctcgggaagctgcaggtcgggctttctcgagctcgaaggcttgcacaaggacagtcaattaagatacaactgtttgccatgtttcctgttcaaattgatggagagccttggtttcagcaaccctgcacaattaacataacccatcaaggccaggctttcatgttgaagagggtggctgaggaacctcttggccctgcatctgcaataattgctgaagtgcttgagaatgctgaaacacataatgtaattaatacttcacaaaagcgagctcttcttcatgaaatggcactaaggctgtcctagaaatatcctctccaccctttgaatgtgattagagattttgtatttattttgaaatatatattgcacactgtgtattacttttcctttttgaatcctttgtccaaactccaaacttcctgctacttctgaagcaggcttgtgtattatgaatctttacatgaaaagaaagaatgaaatcagcaatatgcagttatatgtcccc

SEQ ID NO: 9894 - DNA, 891 bp, Glycine max
  Clone ID: 700875709_FLI
tttgcatgatcattgtgacccgaagattattcatcgtgatgtgaaagctgcaaacatattgctggatgaagagtttgaggctgttgttggggactttggattggccaaacttatggattacaaggacacgcatgtgacaactgctgtacggggaactattgggcatatagctcctgagtacctctccaccggtaaatcttcagagaaaactgacgtttttggttatggtatcatgcttctggagctgataactggacagagagcttttgaccttgctcgactcgctaatgacgatgatgttatgctgcttgattgggtaaaaggacttctgaaagagaaaaagcttgaaatgttggttgatcctgatctacaaaacaactatatagaagctgaggtagaacagttaatccaggttgcactgctctgcacacaaggttccccgatggaccgaccaaagatgtcagaagtggtgagaatgcttgaaggtgatggcttggcagaaagatgggatgagtggcaaaaggtggaagttctccggcaggaggtggagctggcccctcatcctaattctgattggatcgtcgactcaaccgaaaatctgcatgcagtagagttatctggtccaaggtgaccttggcacagtagtaaattaagaagaaaaaaagaaaagaaaagaatggatttatttatgacttattttttaactataaaagttttcttactttttccctttttggttccttcaagtgccatatcctgtaagtccgctgcattattttcatttacatttgtgcataggggtcgctttgtcaagttgcaatttgtatcatctgctgcatttgatgaagtgatgtttacttagatgaaacaatggcagcttaatctttttgt

SEQ ID NO: 9895 - DNA, 953 bp, Glycine max
  Clone ID: 700875787_FLI
cggggatgtcagtgataagccttgtgtcactggctaatgctggcttctcagagattagagggaagcatttgaactattcaaagttttggaatgctaatccctctgcagaaaagcaggtcaagttgtctagcaaagctggcatgcttttgctgtacactcctgcttttcttgctggccttgcatccttctggatctttcctcatcaaggcctcagatccaccctccttcagtctgcagttaccctgcatttcttcaagagggtctttgaggttgtgtttattcacaaatatagtggtgccatgcttcttgattctgcaatccccatcactctgagttatttcctatcaactgcaactatgatctatgctcaacacttaacacaagggcttccagaaccaccaatcgatctgttgtatcctggcattgttttgtttgtggtgggcatcattggcaacttctaccaccactaccttctatccaacttaaggggaaagggtgaaaaggagtacaagattccaaagggtggcatgtttgagcttgtcatatgtccccactacctgtttgagattattgagttttatgggttctccttcatttcgcagacgctatatgcattctctttcaccgtaggcactactttatacttgctaggtaggagttattcaactaggaaatggtatctttctaagtttgaagatttccctgagcatgttaaggctatcatcccatttgtcttctagaaatgttggaaggaataactaattttactttcatttctcagacgctatatgcattatctttcactgtaggtgctactttgtacttgctatgtaggagtgattcgactaggaaatggtatctttctaggtttgaagatttccctaaggatgtaaaggctatcatcccatttgtcttctaaatgttagaatggaacaactaattcttcttgagtt

SEQ ID NO: 9896 - DNA, 2029 bp, Glycine max
  Clone ID: 700875793_FLI
gctttgcttcgctgttgatccattctggagagagaaacactttttcagttctctctctctctctctaagatggccgacgatccaatgcccacgcgctggtctttccaggacttcaaattgtgttatgatgctaagtttggtagaaagaaagtcgcggagaacggagatgatgctgccggtaaagcggtcagcaatggaaatggaaattcagtgacagtggccattgtgtccaatggcaacaaaagggcatcggaaatggctgtttatgagcagtttcgaagcgaggggcagaatcagattcacacaaatggctttgtgccgacccttacagatgaaaggccgcagaagtctttgcttccaccctttgaatctgcggaaatgcgagctttagcagagagcttaagtagggatatcattcgtggaagtccagatgtgaagtgggaaagcatcaaggggttagagaatgccaaacgtttactgaaagaggctgttgtgatgccgattaagtatcccaagtacttcactggtctgttatcaccatggaagggtatcctcctttttggcccaccggggacaggaaagacaatgcttgcaaaggcagttgcgacagagtgcaatacaactttttttaatatttcagcctcatctgtagtcagcaaatggcgaggcctgttacttacaactttctccccctcttctttagagtatttctattttgtgaatcttaatctaggaaacttaatagtgcttatttttaatggtagtgtatattattttttaaaagaaaacagaatgatctctatctggaagatggtgtaactaactatttttcttcaaatactatggtgctaactaccttgaatcttgcgaattgatataacccctatttggtttcgaaaggtcatttgttcaacaccctcatcctctgtcttacttagccaaatagacacagacatacacagcatatatcttaaaacaatagtctattatcagtccgaggagcttaaaacaactaattgatatagcatgaatgacttggattaaaacaattgattgcgtgacttaagtgatgtttaacctggactattttgctatgttcagcttctctcacatctcattgtaagccgatgatctcaaagattaagtgtacaatagatatccaattatccattagtggtcatatgtttgttagttacccattagtttaatagttaattacagatttacaatatatcagttagtttaggctgaattagtttgctattctgtgaatatgtacatttacaaaaaattcttttggactgcaggtgattcagagaagttagtgaaagtgttatttgaacttgcaaggcatcatgcaccctcaacaatatttcttgacgaaattgatgcaatcattagtcaacgtggtgaagctcgcagtgaacacgaagctagtagacggttgaaaacagagcttctcattcagatggatggtttgacaaagacagatgaactggtttttgttttagcggcaacaaatcttccctgggaactggatgcagccatgcttcgacgtcttgagaagcgaatccttgtaccacttccagaaccagttgcgagaagagcaatgttcgaggaactccttcctcaacagcctggcgaggaatcgatcccctatgatatactggaggataagacagaaggatattcgggatcggatatccgattactctgtaaagagacagcaatgcaacccttaagacgcttaatgtcacaacttgagcagaaccaggatgtggtgcctgaagaagagttgccaaaagttgggccaatcagatctgaagatatagagacagctttgagaaacacaaggccatctgctcatctccatgcccacaaatatgacaagttcaatgctgattatggtagtcaaatactacaatgacaagttgtatttgttattgtaaggtcttccacaatttgattactgttgtaagactagtaaacttcaaacattattttggttatgcaacttttttttgcattc

SEQ ID NO: 9897 - DNA, 876 bp, Glycine max
  Clone ID: 700875818_FLI
gatcactggagttttgcttaatggacttgatcatggacaaaaagatttgacttggcagaagtggtcataccagattggtctaagaggagaggctatgaatttggtggctcccaatggggtctcatctgttgactgggagaaagactcactagctgtccgaagccagtcacagttgaaatggcacaaggcatatttcaatgcacctgagggagttgaaccattggccttggacctgagcagcatgggaaagggtcaagtatggatcaatggacaaagcatagggagatactggatggtttatgcaaagggttcttgtagttcttgcaactatgctggtacataccggcctgccaagtgccaacttggttgtggacaacctactcaacgatggtatcatgtgccaagatcatggttaaggccaacaaagaacttgatagtagtatttgaggaattgggtgggaatccttggaaaatagctctagtaaaaaggacaacacatactccagcaaactagtgaacccgattcaaagaactgaaaaaacgtgaatatggccagtcaaatggtgatcgacagggcaacgtgcaatgggcccatggtatagaaattggtgatcataatgttgagggaataagttaatgcttggttcaaccgttgatgtcttcatctccaattctacattattcttcattgcataaaaaatagagaaccgtgaataatacaaaaaaaaaggtgtggccaagttgttttttaatttattcttatagtatgtacttaaaaagagaaaataacaaaattcagaggtgtgcttttattcacttgtgtaatgtgtatatctcaaattctcaatacatgtaatgcattttagtggttgcctt

SEQ ID NO: 9898 - DNA, 373 bp, Glycine max
  Clone ID: 700875829_FLI
catggcataagtggcaagaatgcctactaccaggccaatgggcgccatgatttcaactgtgacttctctcaaactggtgttattactactactaatccaagccatgataaatgcaaaatctgagcatgtttatttaaaggttataatcagaggcaagaaaggaagatagagaaaagcccattgtcatggtgtcaatgtggcttagtggtatctgtgactctgagattatgcattcatgtactcaaaattatttagtttgtatattgttctggaagaagaatgttggcatggtatttcgtgccttgactagatatgatggtccatcgactactaaataggaactttgcattaatattaacatcattcgtagctg

SEQ ID NO: 9899 - DNA, 1133 bp, Glycine max
  Clone ID: 700875909_FLI
ctttggcagaaccaatggatgttgatgatgcggacaatcgaagtagctggagaagtccacgtgaacagcttcaacattggcagatgaacaggaggaagttggcattttcaacagtggggacaccagactacattgctcctgaagtacttttgaaaaaaggatatgggatggaatgtgattggtggtcactgggagcaataatgtatgaaatgctggttggttacccaccattttactccgatgatccaataaccacatgcagaaagattgttcattggagaaatcatttaagatttccagatgatgcccagttaacacttgaggctaaggatctaatttataggttgctctgtgatgttgatcataggttaggtactcgaggggccattgaaataaaggctcatccttggttcaagggtgtggattgggataaactgtatgaaatggaggcagcatttaaacctcaagtcaacggggaactggatacccaaaacttcatgaagtttgatgaggttgatccaccaacagcagcaagaaccgggtctggatcctcacgaaagatgctaactaccaaagatctaagtttcgttggttatacttacaagaatttcgatgctgtaaaggaagggctccgtcaatcttttggtgattccatgcaagagtatgcttctaaacgggcagctgaagaaacaagtttacaaatgcttgcatcctctggagatccaatggttccataactttgtgcaaattgaagtccatcctgttgggtttttgtgtacttgctttggctttaaatattcggccaagaacatgtattatggtgtactccaattcctatgccatttgcaagaaaaatgtgtacagcaagcagttgacagcattgtcaaagcttgtagggcaaccccgcgcgtctgtatttgaattttcaacttaggaactgagagttgtgcgactgagtgctcctgtcctggctgcccaggttggctgaggaagacttgccttctctagtggcagttgctggttaaatgttagttatggacaaaaattgctaaggaactattaaagcatcctgaaaattattcgatgtgatgtgtacatttattggaagataacataaattaaactattaaaac

SEQ ID NO: 9900 - DNA, 1030 bp, Glycine max
  Clone ID: 700875923_FLI
actacctctgccaattcttggtcaaaatgggggtcacctaatggtaattttgattggccagttggtgcttctgatgaaataggtaagctaagaaggtcatcatcatttgagcttgggaacaatggtgaggagcctgatttatcttgggtgcagtcacttgttaaggaatcaccagctgacgttaaaggtaaatttgcaaccactgtctcaaatgtttcagcagcagcagctggatcctccagtgagggatcaaacatgagcacacaaatggagtctgttgttgatcatgctgtgctgggagcatggcttgaacagatgcagcttgatcatcttgtggctcagcaaaactgaaatgagtttctgctgatcctgacgtatttaacaaaagaaatgtctcagtaaataaaaatatatattctttgttgaattttgttgatggaagaaggttacaataactaaagaacggatgcagtactaagataaagaaccattgaggaaaattcattttcaggtttagtgttacaaaagtaacttagaagggtcagaaaaccactgggtggcgttcacagaattaatgccactgaagggttttttggctgcatatctcttcaaattttaggtccacattcctgtcattttttccttccttgaggagcaaatgttgtatcgcaatgaagtcttagtcctaagtttgatctatcttttgattttatttctttatattttggggtaggatccaaagttacagaagggtcattggagtaattccttgtgtctccattttggtccaattttggggatgaaaacacaggttggttgctggatatggtatttcttttgtaatatggaataaatagttgtcgatgccaaggagttggtaagttaggaatatttgaacattgatcctttgggcatgtaacattcaattgaagtttattgctgtattatttctaatacctttgtctctattctaaatatcgcagcgttagtagtttctatttgcattgataaataactaaattgtatcatc

SEQ ID NO: 9901 - DNA, 662 bp, Glycine max
  Clone ID: 700875949_FLI
ccaaagaatgctcttgggaagcaatacaagaagatgttccaaatgaatggggtaaagctacattttacagaaaacgctctaagatcaattgccagaaaggcaatatctaaaaatactggtgctcggggattacgatcaatattagaaaatgtgttggtagatgccatgtatgagattcctgatattagaacaggcgatgatgttatagatgctgttgttgttgatgaagaggctgttggaggtgaggggcgtgggagaggggctaaaatcctttatggtaaggatgcattggatcgatatctttcggagcagaaaaatgattcagagaccatggaggcatcagccgcagataatgaagcagatacggaacttccttccattgttgccagcatgtaacttgttgcaaattatttattacagttgtctttgtacatatagttgatacatttggcttatgtggcttgggcttgaaatcaatgtaccatcaatcaatgtagtttccacggtaaactccgtggttgcttttgcacaaatcatagtgaggtaaactaaatgccacatacttcttataagtgtgcagtacctgattcgttatgtaaatgttgagtggcattatttaaagaaccaaaaatgtgtattgttaaatgattcgggttcatttt

SEQ ID NO: 9902 - DNA, 1738 bp, Glycine max
  Clone ID: 700876062_FLI
ttcttcttcttcgtgcgtgcgtgtttctgtaaaatcgaatctcaagtctctgaatctgaatctcaacacaaccttcgttgttctcaacactgtgttcgtttttgctgccaaggttacaacactgaaagagacaccggagtaacataaataagatggaccaacaaaaccaaaataacactccagatggttcaggagaggtgcctttgaagcgcaaacgtggtcgtccacggaaatacccaaagccagattcagaggagagttcctatatcctagttagtcaaaataaaaggcagaatcctgttcgtgcggaacaagctccagtacctcctggatttgaaggggttaatggaaatcaacagcttcaaaggggtcaagagaatcattcaaataatgaattggtgggccaggtagtttctggtgtaatcgaggctgtatttgatgctggatatttgctcagcgttagagttggtgattctgatactactttgagggggctagtcttcaagcctggacgatacgttcctatttcacctgataatgatgttgctccaagtgttccaatgatccaaagaaatgaagtttccttcccctcaagagctgctcaggttcagactcctctcccaaaggaaaggaatgaacagcctgtgaatgttcatagagttgaaactctcgcaatgaatggctcaccatctgtccctcaggtacctagaggagctgtcagttctagtaacttagttgcctctaccggaaagagtgtgccttctgtgacgggccagatcactcatcaactacccagaggtaatgtggtgcctgttctgctccagcctaataatttttcaaatggagtgccagtttctaatcaaccatcacaagtcaagacccaagtttctctagggagcggagtgattgctgccaaagaaattcctgtagatggaagccatgcactcgtctctctcactcaaaccagccagaatttattgccaagcagtgtgcaaagtgaaggtgtttcaccacataatcaatcttcatccaatgtgttgaatgaagatcaagctaaatctatgagaatgcctggcatgccttttgagcaactggttactgaagttgttaagaggatccaagctccgtcagatgcaatggataccgagactgacaacagtaagtcaggtgacaatacagtagtgaagtatccaagctgtaggcaggaagacaaagttaatgagatggatcaacccatcttgattaagcctcttcaagctgtacagtctctacctcaggaaagctccacatctgctcccaaacctgcagactatactgaaactggcagagtgaatgagcttttgcaggttttgcagcataacaaaacagagaaccaggcatccaccatagcagcagagctaggatctggaaacaagttggatgatataaggaatttaggaactggacttgaagatggtggaacgttcaatcaacaaagcctttctgagcattgaatgcctgatttataaatttttatcattagaagctattgtgccagcagatttatctgtcataaagtaggtatttatctggcatggtgaaatatttagtttttagttctagtctcaaggatcttaaataattttaaacttgcaagccttattgagttttgtggagaaaaggtagcttgttatagttatatttatgtttttacattatagaccataccttcaagtcggatgttaattactttcctagc

SEQ ID NO: 9903 - DNA, 1623 bp, Glycine max
  Clone ID: 700876071_FLI
cttagccttccctacaactccaaacacaaagacatcatcatccatggctgcctccgtctccactgtcggagctgtcaacagagctcttttgaacctgaatggttctggagctggagcttcagctcccagttcagccttctttgggaccagcttgaagaaggttattgcctcaagggtccccaacagcaaggtttccggtggaagcttcaagattgttgctgtagaagagaagaaagagattgaagagacccagcagaccgacaaggacagatggaagggtcttgcctatgatatctcagacgaccaacaagacatcacaagaggaaagggtttggttgactcccttttccaagctccacaggatgctggaactcactatgcagtcatgagctcctacgagtacctcagcactggacttcgccagtacttggacaacaaaatggatggattctacattgctccagcttttatggacaagcttgttgttcacatctccaagaacttcatgaccctgcccaacatcaaggttcctctcattcttggtatctggggaggcaagggacaaggaaaatctttccaatgtgagcttgtctttgccaagatgggaatcaaccccatcatgatgagtgctggagagttggaaagtggaaatgcaggagagccagcaaaactgatcaggcagagataccgtgaagctgcagacatgatcaagaagggaaagatgtgcgctctcttcatcaacgatcttgatgcaggagctggtcgtcttggtggaaccacacaatacactgtgaacaaccagatggtgaatgccactctcatgaacattgctgataaccccaccaatgtgcagcttccaggtatgtacaacaaggaagagaacccccgtgttcccatcattgtcaccggtaacgatttctcaacactctatgcacctctcatccgtgatgggcgtatggagaagttctactgggcaccaacaagggaagaccgcattggtgtttgcaccggaattttccgcactgatggtattcctgaacaggacattgtcaagcttgttgacaccttccctggccaatccattgatttctttggtgcactgagggccagagtatatgatgatgaagtgaggaagtggatttctggtgttggtgttgacagtgttgggaagaagcttgtgaactcaaaagatggacctccaacctttgagcagcccaagatgactctggagaagctcttgctgtatggtaacatgcttgtccaagaacaagagaatgtcaagagagtccaattggctgacaagtacttgaacgaggctgctcttggaaatgctaacgaggatgctattcagaggggaactttcttccagtcttgaattggaggcaaagcaaacttggcaagtaaatatttctgttcgtgaaggttgttgtactaatccaagtgctagaagttgtgatggaacttgcgtgtaacattcttagcattctcaatgtcttaggtgcaaagagaagatgctaagtttgagatgatcttactatatttttcatattggaccgtcttcctctataattttgagttacagtgtccacttaaattgaatttggtgccttttccttttgtcct

SEQ ID NO: 9904 - DNA, 1131 bp, Glycine max
  Clone ID: 700876074_FLI
ctgtagcgacccgagggggcttcttttagtctacgattacatccctaacggaaccctagcggaacacctgcataaccgtaagggctcgctgacgtggcaggtgaggctcgacatcgcgttgcaaacggcgttagcgatggagtatcttcacttctcggtggtgccgccgattgtgcacagggacataacgtcgtcgaatattttcgtggagagggatatgaggattaaggttggggattttggactttcgaggcttttggtggtgcaggataataacaccacgtcgtcttcgaacgggtttgtgtggaccgggccgcaagggacgccgggctatttggacccagattatcaccggtccttccggttaaccgagaagagtgacgtgtacagttttggagtggtgttgctggagcttatttcggggctgagagcggttgatcagaatagggacaagcgcgaaatggcgcttgcggatttggttgtttcgcggatccagatggggcagttacatcaagtgctcgacccggttcttgactgcgccgacggcggcgttgccgccgtcgcggagcttgctttccggtgtgtcgcggccgataaggacgacaggccggacgccagggaggtggtggaggagctgaagcgggtgcgcaacagagccgttacggcggcgaaggagtgagtttttttattttgtttttaaattacggggccgagtgcgcatgtggagtttgactgtggggggggggtgcacttgtgtcggacggtaacgctgacttgaccccactgaagctactatgatgaggttgttttttatatttgaaattgttactatactatgatgttagtgccacgttggtgttgcacgcacgagggtttttttttttgttttttttttaattctatcttctatggttacgttacgtaacgtcaatgggggaagtgtcagtgaccccgtaccggtacggtgagttttttattagtactgcgagtgggagcctacctaaattgagctcacttattggtttcactactacctcatatatgtctcggtatatataccatatcttgtataagttgtaactctttttgcaaagtacatttttccattttcaattataggataagttattt

SEQ ID NO: 9905 - DNA, 800 bp, Glycine max
  Clone ID: 700876081_FLI
gagccattaaatcttctctcaaaatatttgtgattccatgcccaacgccctaccctgaaaatatggtagccgagagagaggttaacggtaacggcgtcggagagggaagaacaacgctaatattcacctacggaaccctgaagcgaggcttctccaaccacccccttctccaagacctcattcgctccggcgacgcctccttcgtcggaacctaccgcaccgccgccaaatatcctctggtctgtgggccctacaaggtccccttcctcctcaacattcccgggtcgggtcatggggtccatggggagctttactcggtctccacgcgcggcctcgagcgcatggacgagctcgagggaacctcacgcgcccactacgagcgtctcccgatcaaggtggttcctgcggccgaggaagaggacgacgacgggtttgatggggaggaggaggcggcggcggggctaacgtgcgccgaggcgtattatgcgcatgggaactacgcgatggagctgtggaagaaaaacgggaagcgtgggttgaggtgttattcgcagaaagagacaattggttatgtgaagcgcaaggataggcctcagcatttgaccttcctggatcacattcgcttcttcctttcctctaattagcctttctcgttaattaggttactccaatccattcctgcttcctgccctttttttcttcttagcttatgttatgcactactttgtattttgccaagaccaattcatgatcaccaggatctctgtctcttactcttttgtttagttctgtacgacgtg

SEQ ID NO: 9906 - DNA, 1465 bp, Glycine max
  Clone ID: 700876112_FLI
tgctgagatgggtaccatgttccctgaaaacagtggttatgtggtttgggtttcatctgctttgggtcccttttgggggtttcagcaaggttggatgaaatggcttagtggggtgatagacaacgcattataccccgttttatttcttgactatctgaagtcaggaatcccggctttaggtggtgggtttcctagagttgttgcaacatggggtctgactatagttctcacttacttgaactataggggtatgaccattgtgggatgggttgctgtttgtttgggggttttctcactccttccttttgtggttatgggatttttggcgattccagacctaaagccttcaagatggacagtgacaaacccgaatgatattaactggaatttgtatctgaatactctattttggaatctcaactattgggattccataagtactcttgctggagaagtggaaaatccgaagaaaactcttccgaaggctttgttttatgctgtgatcctagtagttctagggtacttctttcctcttctaattggtactggtgctgttcctgtcaaccgtgagttgtggacggatggatacttctcggatattgctttgattataggaggagcatggttgagatggtggctgcaggctgctgctgcaatgtcaaacatgggaatgtttgttgctgaaatgagcagtgacgctttccagcttctagggatggctgagaggggaatgttgcctgagttcttcagcaagaggtctcgctacggaacacctctcataggaatactcttctcagcctccggcgtgattttattgtcatggctgagctttcaagaaattgtagctgcagaaaatttcttgtactgctttggaatgattttggagttcattgcgttcattctgttgcggatcaaacaccccgacgcatcccgaccttacaagataccggggggaactgctggagcaattatcatgtgtatccctccgacaatattgattggtgtggtgttgtttttctccacccttaaagtaatggttgtaagccttattgctatggcaattggccttctgatgcagccttgtctcaaatttgttgagaagaagagatggatgaagttttcccatagttctgagctccctgattttggcaatcaggaggacactcgcactttggtgcattaatctgtcctgtttcaataatatggagatgatttgttcttctaggtcttcaagcatgcttgttaagtttatacttctctgaacccaacaaccatagaagggcagctttttatcctacacctttggtaattcaactgtttgtctatgtttttagtttgatcaatagatgggatgccaattagaaacgtggaagatagtgtttagaatgtcttgggaaatacaattatttgttaagtggattatgttatcatttgtcaagaaaaaaatttgattattttccttccg

SEQ ID NO: 9907 - DNA, 1123 bp, Glycine max
  Clone ID: 700876145_FLI
atttctccattgtgggctattcatcggaggacttaaagtccatggataagctcattgaactctttgaatcatggatgtcaaaacatggcaagatttaccaaagcattgaggagaagcttcttaggttcgagattttcaaggataacctaaagcacattgatgagagaaacaaggtggtcagcaactactggcttggcttgaatgagtttgctgatttgagccaccaagagttcaagaacaagtatctggggcttaaggtggactactctcgaaggagagagtctcctgaagaattcacttacaaagatgttgaattgcctaagtcagtggattggagaaagaaaggtgctgtggccccagtcaagaaccaaggttcatgtggtagctgctgggcattttccactgttgcagcagttgagggtataaaccagatagtcacgggaaatttgacatcactgtctgagcaagagttgattgactgtgacagaacatacaacaatggttgcaatgggggtctcatggactatgcattctcctttattgtagaaaacggtggactccacaaagaggaagattatccttacattatggaggaaggtacttgcgagatgactaaggaagaaaccgaagttgtcaccattagcgggtaccatgatgtgccacaaaacaatgaacagagcctattgaaggcacttgcaaaccaacccctcagtgtggccatagaggcttcaggcagagatttccaattttacagtgggggtgttttcgacgggcattgcggaagtgacttagatcatggtgtggcagctgttggatacggaactgcgaaaggtgtggattatatcatagtgaaaaattcatggggatctaagtggggagagaaaggatacataagaatgaggaggaacattggaaaacccgagggaatctgcggtatctacaagatggcttcttatcccactaagaagaaataagattcattccctctatcgcttactacattgttgtttctgaatttctttccttcttctgatcaattctctattgtcggcctatttcagcttttccttgaaaacaatgtaacgttttccatacaataataaaaacttgattaactcttttc

SEQ ID NO: 9908 - DNA, 1060 bp, Glycine max
  Clone ID: 700876171_FLI
caacaaaggagttgtaaattaagagcatggctgcacaagctcttgtatcatcatcatctcttaccttctcagccgaggctacaagacaaagtcttggaccaagatcactccaatctccatttggcttctcaagaaaagcctcctttcttgttaaggcagctgctactccccctgtcaagcaaggatcagacagacctttgtggtttgcatcaaagcaaagtctttcctacttggatggcagccttccgggtgactatggatttgaccctctgggactttcggaccctgaaggaacaggagggttcattgagccgaaatggctagcatatggtgagataatcaatggtcgttatgcaatgttgggtgcagttggtgcaatagcacctgaaattctaggcaaggctggtctgatccctcaggagacagcactcccatggttcagaaccggtgtgttcccacctgcaggaacctacaactactgggcagactcctacacactgttcgtgtttgagatggcactgatgggatttgcagagcacagaagattccaagactgggccaaaccaggctctatgggcaaacaatacttcctaggactagagaagggtcttggaggttctggtgagccagcttacccaggaggacctttcttcaacccacttggctttggtaaggatgagaagtccttgaaggatttgaagctcaaggaagtgaagaatggaaggttggctatgttggcaatcttgggttactttgttcaagctcttgtcacaggtgttggcccataccaaaacctcctagatcatttggctgaccccgtgcacaacaacatcttgaccagtctcaagttccactaaatgtattatatcatattctttaccctcttggtcttggttcttgttcgcttcgcagttaccaaagctcaaccacctttctatatcctctctttgctctttgggactctaccatcatctggacattttgttccttggtgtgccgctgtaagaattgacatgtaaaacaactagaaacattcgacatctttatctttttgctcgtt

SEQ ID NO: 9909 - DNA, 582 bp, Glycine max
  Clone ID: 700876181_FLI
gtcttaattaagactctcacccttcttagtctctctttgaaaatgaagacctcatatgcaacattgtgcatcatgcttactttgcttcttctaggtcagagtgagttgttgtgtatggcagcagtgacgtgtaacgcgttgcagctgagtgcatgtgccagcgccatcacgtcctcaactcctccttcagctctttgctgtagcaaactgaaggaacaaaggccttgcctttgccagtatttgaaagaccccaacctcaagaagcttgttaactctcctaatgctaggatggtagctaatgcatgtggttccccattccccacctgctagaaagaattcagtatttcactagtctctctcaatccaaccactatataggagcatcttatgtgttttttctgtgtaatgtactctgttttgcttgggatcatcaagtgggacaggtcctctgcttgtccctcagtggtgtggtcgtgctacaacgatgtgtgtcccttgttggagaatttgatcttgtaccactttttgcatctattaatgaatatgtatgtggtttttgctgattctgagcgctcagctttt

SEQ ID NO: 9910 - DNA, 1297 bp, Glycine max
  Clone ID: 700876189_FLI
cctttctctctcctctctttcctctctcttggaacaaacgacaagttatggtagtatttgtcattcatttcacaaaactggttcacctttggacccatggcttctaaaaactccacgttgttccagtctcgcttcttcctcttcggcttctattgctgggactgggagtttctcaccgctcttctcctctttagttcttcttcctaatcaaataaccttctccaccatacataaacctttttttttttgtcttttgtacttaaatttctcattactacatcaacaaaagaggcatagattttttcttcttttattaaaataatagtttgtgaggtaggtggagggtagatcgggaagaaaaatgtcgcagcagcagcgttcgatgccggcgccgtttttgacgaaatcgtatctgttggtggatgatcccgccaccgacgacgtcgtttcgtggagcgaaggtggcaacacctttgtcgtttggaaacacgccgatttcgctaatgatttgctccccaagtacttcaagcacaacaacttctccagcttcgttcgccaactcaacacctatggattccgaaaaactgttcccgacaaatgggaattcgccaacgagtatttcaagcgaggacaaaaggatcttctcgccgagatcaagcggcggaagacggtgtcttcggtgtccggaaaatccggcagtggcggtaacatttcggcgtcccactccggcggcgatgacatggggtcgacatcgacggggtcgatggaggcggcgacggcgacagtaacaacgactcagtgcgcggatttatcgggcgagaacgagaaattgaagaaggacaacgagaaattgagcgacgagttagcccgcacgaagaaacattgcgacgatttggtggcgtttcttagagactcgctgaacgtgggccccgatgtgatagattgcatcattcggcaaggaacgtgtgggtccagcaacgatgatgcggtgcgttttgatgctactgaaaatcttaataatcataatcatgatgacgacgaaaatgcggtaggtgagtgtgaaccagaacaacccaaaggtgacaatggagaaagtttgaaactgtttggggtttggttgaagggtcaaaatgggaaagagaattcaattggtagctgccgcaagagagggcgccaagaccctattgctgccactgccaaggaattgaagacccttgtctaggacatatcctaaggttgttaattaattaccttataatatttcaagaaacaactattatagtcagatctagaacac

SEQ ID NO: 9911 - DNA, 748 bp, Glycine max
  Clone ID: 700876296_FLI
tgctgctgctgctgctgctgcatcaactccttattcttcatacatgtccactgtggctgttacaccaatggctcaatctcatcgcatgaaaaaggctccttcaaatctgggggatgatcctttaaaaatgtcagttatgcagcgtcagcaaactaatggtgcactcagtgttgctggtggtctttcaaatgtcaaaattttgagtaaatctaaggtttctcgggaaatggacggccctgaaagtagggttgtgcagtcttctgtacaattacctgttggcaatggtggaagcattgacaaatcaagtatgagcagtgcccaaatctcaggctcagcaaatggaaggctagtctcaagctttgcttctaaacagcagaccagggcaactggtgctgtgtacccttctcaaagataggaagatggaagggcgtgttagattatcctgtctcaccaggatgcggatgaaaacatacaagattatttatcgggtttgtgggagaatgttttttgaagcattgacggagtaatcttgtgccctgggcaaaatgtgattttaagttgccggtgctatctccatctccagtttctgtagtagtttatttctcccagctgttacaattcagtgtgctttcattaatgtgggcctcttgctgtggtattcttgctgcatacattgcatctgataaactgcgatttttttatgaatgcttgaaagattaatcagcatggttaacacttttcagtttgc

SEQ ID NO: 9912 - DNA, 1450 bp, Glycine max
  Clone ID: 700876304_FLI
tgaatctcagaattctctaaaagagatctttttctgctctttgaagaaagaagggtctttgcttgattttggagatgtctctgctctcagatctcatcaaccttaacctctccgataccaccgagaaggtgatcgcagagtacatatggatcggtggatcaggaatggacctgaggagcaaagcaaggactctcccaggaccagttagcgacccttcagagcttcccaagtggaactatgatggttccagcacaggtcaagctcctggtgaagacagtgaagtgattttatacccacaagccattttcagggatccattcagaaggggtaacaatatcttggttatctgtgatgcctacactcctgctggagaacctattcccactaacaagaggcacgctgctgccaaggttttcagccatcctgatgttgttgctgaagtgccatggtacggtattgaacaagaatacaccttgttgcagaaagatatccaatggcctcttgggtggcctgttggtggtttccctggacctcagggtccatactactgtggtgttggcgctgacaaggcttttggccgtgacattgttgacgcacactacaaagcctgtatttatgctggcatcaacatcagtggaattaatggagaagtgatgcccggtcagtgggaattccaagttggaccttcagttggaatctcagctggtgatgagatttgggcagctcgttacatcttggagaggatcactgagattgctggtgtggtggtttcctttgaccccaagccaattaagggtgattggaatggtgctggtgctcacacaaactacagcaccaagtccatgagagaagatggtggctatgaagtgatcaaagcagcaattgacaagttggggaagaagcacaaggagcacattgctgcttatggagaaggcaacgaacgtcgtttgacaggacgccacgaaaccgctgacatcaacaccttcttatggggagttgcaaaccgtggagcttctgttagggttgggagagacacagagaaagcagggaagggatattttgaggacagaaggccagcttccaacatggacccatacgtggttacttccatgattgcagacacaaccattctgtggaagccatgagcaaaacctgcatgttttctccctttggatggaaaggaacagttatgcttttcttagtaggatttggtctctctctctttttaccttttgattggtactatggttggtgccttgttggttggtgcaactaactggcaagggttgttcattgttttcttctattcctttccctcgttttccgattgttacaatgacaataatttaatggttattatcagtcttgaacaaagaaatgctgattgtgaagtataataataatatatgaaattgtcatgttcattggagtaggaatttgtttctgttgc

SEQ ID NO: 9913 - DNA, 1201 bp, Glycine max
  Clone ID: 700876305_FLI
gtccgtgtctctttctctcttctattactattagtaatatatctatcttttcttgcacaaccaaactcgtcactctgtggtattaattcaatattcatagacttcactgtctgattgtctttgtttaataccatataggattcattaaggattctctaatgttggcacaaatggacatggaggagcttgtctcatgtaacaacaacgatgccaccaacatagccaaagggaagcgcacaaagcggcgcttgaggcctttgtctccttgtgctgttgtcgctgctaccactatcaccaccaccaccactgctatcaccgctatcaccaccgtcatgacatctagctgttcaagtgcttctgccggtggcggtggatcgtcttcatccaccacctttgaggaggaagaggaagacatggctaattgtttgattctcctagcacaaggaagagtaggacgggaccctcctcatcatcacaaggacctatgtggtgatgtcaagacagagaagggtagcaccaaagttgatcatttatatgtttatgagtgcaaaacatgcagccgaacattcccttcttttcaagcactaggtggccacagggcaagtcacaagaagcccaagatggaggagaaaaagttgttatcaccaccactgttattgccaccactgccagcttcgtcttcgtcactatttaattttgaggaagcaaaacaaagtcacatgaagaatattattagcccttctgtctcccttcaattagggtgtggcattaacaaggttggtttaaatttccatggcaacaagtccaagattcatgagtgttccatctgtgggtcagaattcacatcagggcaagcattgggtggtcacatgaggaggcatagagcatctaacaataataacaatattgttcagacaacaacaacaacaacaactacttctaatggtgctgttgatgttaagcctcggaatgttctagagttggatcttaaccttccggcgccggaggacgatctccgggactcgaagtttcagtttccggcgaatccgaattctatgatgctgtcggctgctccggctttggtgggatgccattattagaaaccagggtgggaattagatggagaggggggaaaagttatattatttgattaatgatcattgtgaattatttagctttattttaatttacaattattctt

SEQ ID NO: 9914 - DNA, 1612 bp, Glycine max
  Clone ID: 700876320_FLI
tgatgatgaattttatgagtctggcatgtatgcatcttcttattctttctcaagtttctcaactgaagttcctgatggaaccctcaacatcaacgacaacaatggtagcttatttaacatgagctacaagattagcctctcagtgatatcatattcaaagataggggacaatacttctgtgtttaatttgtcctctgagagagtgaagatctctgcagaaggagtttatgatgccggagcaggaacgttgtgtatggtaggttgccgtgaccttctctcaaacacaaacactgagataccaatagctcattctgtggactgtgagattctactgaagtttcagttcccatcattggacacatatgatggaggctacattaagggaagtattgaaagcacgcgtcatgaatctgatcctctttacttcaagcgtttagacatatctgcagtggcatattatagggaagcagcaagaagaaatgtttggagaatggatgtggaagtgatgatggctctgatatctacaactctatcatgtgtttttgtggggttgcaactcaacaaggtgaagaaagaaccaaatttgctccccttcatctcccttattatgatgtcaattcttactttgggtttcatgataccccttgttctcaactttgaagctcttctcactcaaaatcccaacaacacaatgcgggtgtttagaaataatggatggcttgaggttaatgaaataagtgtgaggctgatcaccatggtggctttcttgttgcaatttcggcttctgtatctgacttggtcagcaaggaagagtggtgagagcaagaaagggctatggattgctgagaggaacagtgcttatgtcacttcactcttgtatgcagcagggttattgattgcatggttgttgaagttgaagaatggagataataaggattctgtgtatgtccctatgtaccagccttcaccttgggagaacatcaagtcttatggtggtttggttttggatggttttctcttgccacaaatcattttaaacctgtttttaaacatgagagacaatgttctttcattttctttttactttggaactacttttgtgagactcttgccacatgcctatgatctttacaggactcacagtgatgctgccctagatagtcgatcatactactatgctgatccaagtgaagatttttactccactgcttgggatattgccattccattgggaggtatcctatttgctatgattatttacttgcagcaacgttttggtagccattatattttgcctcataggttcaaagggtctaaggtatatgaaaaggtgcctgaaaaggtgcctgtggttactgaatcagaagctgaagtagatactaccaaaatataacatgctccttatgtcaagtgcaaatggtctgatcagggtgactcaaaaatggtcactctcaagcagttctgctcaattttcatgtattttagctatgaagttctgtaattcaaatatagtgtctgccatatttttttttgtaaaatactgctcgtgtggctgatgaagtaaagccttgtgcccttttcctctcaatttaatgttaaattaagtgacttg

SEQ ID NO: 9915 - DNA, 1423 bp, Glycine max
  Clone ID: 700876446_FLI
cttatcttagctaccccatcacaacaaccacgatactatttctcatactctattaggcaaaaacaccaccaaatgggagaggaaaaggagcagcctaagaatgacaccgagaaaaagcccgaggaggtagcccccaagaaagacgacggacccatccctgtcgtttacaaactcgacttgcattgcgagggatgcgtcaagaagatcaaacgcacctgtcgccacttcgaaggtgtggaaaccgttaaggcggatctatcgtcgaacaaggtgactgttaccggtaaaatggacgccgagaagctgcgagataagattgccgagagaacaaagaagaaggttgatatcatatcagctccgccgaaaaaagaagccgccgttgcggaaaaaccgccggagaagaaggcagaagacaagaagcctgaggagaaaaaaccagaagaaaaacctaaagagagtacggtggttttgaagatcaaactacactgtgacggttgcattgcgaaaattcgaagaatcattcttaggttcaaaggtgttcaattggtgagcctcgacggaagcaaggacttggtgacggtgaagggaacgatggacgtgaaggagatgttgccgtacctgaacgagaagctgaagcgaaacgtggaagtggtgcctcctccgaagaaagacgacgataagaaagagaaagaaggcggcggcggcggcggcggcggcgagaagaaagaaggcggtggtgagaagaaagagaaagaaggcgacggcgagaagaaagagaaagacggtgcggcggcagcggctgcggaggttattaacaaaatggagtatatgcaccggatggcacctccttcgttctggtacgacggaggacactttcccggtcaaacaagttacgctatggaggttcatccagggtatggtgctagtgctaataatcattacgtggagccagggtacgtgaaccagggttatcctctgcagccacctctaccgtactacatgcacccgcacgctcctcctccgcagatgttcagcgatgaaaaccccaatgcatgttcaatcatgtgatgatcggtgattaattttcggtgtacacttacacacgtacgggatacggatacggaatacgcatggtgtaatttgtaaataaaaaaaaattgacgtgcgtgtaaaaattgaggggtggataatattccgtgttattaaaatttaattaatatagagagtttttataatatggtaggattttgatataataatatatcatatgtgtaggttgttgttttagagaatagagatagagaatggccggctggctggagaatcctgtccagaactcacatcacatgagctgttctttgttttgtttatttttcagaataaatggtttactattatttcaatgaaatttgttgatcttatt

SEQ ID NO: 9916 - DNA, 866 bp, Glycine max
  Clone ID: 700876545_FLI
gcactggacatgggcataattcagaaggctgactatgaacgcatcaacaaagtgatggttccagcctgcgaaatggcaataaaactatgtggcactgatggaaaaatcgcatgcacggcatcatattttgtttgtaatacaatattcaattccatcatgtcacatgctggtgatatcaattattatgacatcagaaagaagtgtgaggggagcctttgctatgatttttcgaacttggagaaatacttgaaccaaaaatctgttcgggacgcactaggggttggagatattgattttgtgtcttgtagttctacagtttatcaggctatgctggtggattggatgaggaatcttgaagttggtattcctgcccttcttgaggatggaatcaatatgcttgtgtatgctggggaatttgatctcatctgcaactggcttggtaattcaaaatgggttcatgccatggagtggtctggccagcaagaatttgtggtctcatccgaagttcctttcacagttgatgattctgaagctggattattgaagaagtatggacctttaagtttccttaaggtccatgatgcgggtcacatggttccgatggatcagccgaaggcttcgttagaaatgctgaagaggtggactcagggaaccctttcagaatctgcagctgatgcggagaaattggttgcggagttgtaatcactttcgttattgcaattagtccagaaaagggatacaaaagtattatgcaataaagagaagggaattaaagtgatcagcatgtgttattaattataaagtgagattgaatcaaggccatgcaggaaaaaaactattcatatatagaatttcgtgtgtgcatg

SEQ ID NO: 9917 - DNA, 221 bp, Glycine max
  Clone ID: 700876593_FLI
gaaggttcaatggatgcatattgacatggctggtccggtgtggaatgaaaagcagcgctgtgcaacaggatttggtgttgctactttggtggaatgggttttgaggaacgcatcttaaatgcgaactgaaatgaaatcttgttcaattgtagtgtgatatatatactaataacttatctgaagggatataaaaggtgtgtgccccgaggcagattttagcc

SEQ ID NO: 9918 - DNA, 765 bp, Glycine max
  Clone ID: 700876595_FLI
tatggaaggccttccaagaatatagtaattcgaaaccttgttgttcgctctaacgtcagtgctggcatctcaataggcagtgagatgtctggtggggtatccaatgtcctggtggagaacattcttgtatgggaatcaaggcgtgccatgagaatcaagactgctccaggaagaggcggatatgtgcggcaaataacatacaaaaatctaatgttaaaaaatgtgcgcgttggaattgtgatcaagacagattacaatgaacaccctggtgctggatatgatcctagagcacttccaatactcagagacataagcttcatgaatatccgcggccagggtgttcgcgtgccggttcgaattcaaggcagtgaacagattccagttagaaatgtgactttccaggatatgaaagttggcataacctacaagaagaaacatatcttccagtgtgcctttgtccaaggtcaggcaatagggaccatatttccttctccctgtgacagctttgatcggtacaatgagcaaggacagcttgttaagcatgctgcttcacagaatgtcacagatatagattatgaaatttgagtagtcttgttttccaaactttgtgtgtgtatgcgcgcgtgtatataagtggcatgtttaatgaaagcatgagaggaactaatcttggtcatgaaggatcaaggttgttacctttcttagggttatgagttgtatataggtaaaattttctgatgctaatataaattttccagggttccc

SEQ ID NO: 9919 - DNA, 2012 bp, Glycine max
  Clone ID: 700876642_FLI
gtttatattgccatttaggcggtgatcgtaactgaaaattggcaatggtgaatcgtcgacgcctcactcgggtggcgacgagcgacgatgaagacgaagcaccgccgcgtccacaacgcacgcgggaagaggatgaggcttatcgaggaagataacgatgatgacgagaatgaagaagaaaaagaagaggaggtgccggagccgcctcagcttgcggaggacgctaaacctcttggccaacccgttagggtttcgggaaaaggaagaggcaggaagaggcaccatgattccttcgagttcgatggcatccaatatactctcgaggatcccgttcttcttgtacccgaggagaaaggccaaaagccttatgttgcaattattaaggacattacacagtctatcaatggcaacgtggaaagtgacggggcagtggttttaccgaccagaagaagctgagataaaaggtggtggaaactggcaatcgtgtgataccagagagctgtttttatagtttccaccgtggacgatgttcctgcagaggctgttatgcacaagtgtgtggtgcattttgttcccaggacacaaacagcttccaaagcgtaaggatcaccccgggtttattgtacagaaggtgtatgacactgtgggaaagaaaactctggcggctgactgataaggattatgaggaatttaagcagcaagagattgatgtgcttgttgagaagactcagcaacgtattggtgaactacttgaccttgagcccgagggaagcccctgatgacgatggggatcaattgaaaaataaaaaaagcttcaggagaaagagtgtttcacctcttgatgtttcaaaagaggaggaagaaactcttaagagtgaacaacatccaaaatctgaaacaccaacgggttgcataactaatggttcagagtattatcggatattggtagatttcaatgcactaactggagatagccatcgagacaaatggttggagaggttgcttcaacgcattcagtacatgtgtgattctaatgatagcaaagaaagggacaaaggattagggaatgccaattctgatgaaatcaacaatgaaagcaagcatagaagttcagaatcagcaactgactgtcaagataaggttcagaagagttccaagtcttttaactggccagatgttgctgtttcagccatggttgctctcgaaaaagcttctcatgatgctctctcatcagattctatgaagtacaaccaaaagttgcggcaattagcttttaatttccagaaaaatgcagtgttagcacgccgtctattgagtggagagttggagccttcaaaaatattaaatatgacacccaatgaattaaaggagggtttggttgctgaggaaaaaaccaaggagcctgacgagacccagcacttgcaaatgacagatgcccgctgctcaaaatgtatggattgtaaggtgggcttgagagagattatccaagctggaaataatgaacgttatcagctggaatgtgtttcctgtggtcattcctggtatgcctcccgggatgaggtgtctatgccgaccatagatgcatcagatccaaagggaaacataggcacagcgccataggccactgcaaaatttaaagatgtaccgatgaagatactgagcccccgtgaatccaaagtcagccaatgacatcttttaaaagaaaagttaattgtatatccccagaaatgatttggaaagtccaggaaaggtgacgatattgaggctatgagacgtgtatctatcccggctagtgttaagtcatagctaaaaattgtttatgaatagatatagttctcttcctatttgactctgcgcatcgcatacaaaaaaacggttggttttgtgtaatacttcacatgaactagctggttttacctcatacatcataaaggttgtattagccatagcattaaatttgcatagtttgactttgattttgtagtattaacttgttcaaatcattaataagc

SEQ ID NO: 9920 - DNA, 671 bp, Glycine max
  Clone ID: 700876682_FLI
ctttaaagcaggttattcaccccatccatgaccagaccttctatctgactatggagcataagaagaagcttaaggaggagtatggaattgagccctggacttttactcagaagttaggagatgctgttttcattccagctggttgtcctcaccaagtcagaaatctgaagtcatgtattaaggttgctttggattttgtctctcctgaaaatgttggggagtgctttcgtttgacggaggagtttcgcacacttccaataaaccacaggtctactgaggacaaattggaggtgaagaagatgacaatatatgctatgcaagaagtgataacaaaattagagaaagcaaggtccaggcaaaccatagttccaaagtagatatatctttaacagatcaaagccaattgaaagtgtaaatttttttagtcaagcttttatacaggtgtgatgatgggttctgtatatcgtgactgtaagaacggttccatattttgttttcgccaacacctggatggtttttttttttttttggaaatcatatatgacttgaacggtgtacatataaatatataattgtcaccatttgatacttaggatctcataatctatacattcggaagctcaaaaaataactccaaaattgagattaatgaactcacgttgtttacgaat

SEQ ID NO: 9921 - DNA, 2079 bp, Glycine max
  Clone ID: 700876780_FLI
gaaaagcagaaggcggaaaactgctgcatggctaagggagtgtgtattacagcttggtccaactttcattaaacttggacagttatcatcaacaaggtcggatctatttccccgtgaatttgtagaggagcttgcaaaattgcaggacagggtccccgcattttctccaaagaaagcaagaggctttattgagagtgaattaggagctcccattaatatattgtttaaagagtttgaagatcggcccattgctgctgctagtcttggtcaggttcatcgtgctattctacacaatggagaaaaagtagttgtcaaagttcaaaggcctggcctaaagaagctttttgacattgacttgcaaaacttaaagctgattgcagaatattttcagagaagtgaaactctaggtggtccaacgagagattgggttggtatatatgaagaatgtgcaacgattttgtatcaagaaatagattatataaatgaaggaaagaatgctgataggttccgccgagattttcgaaacataaagtgggtccgagtacctctggtttattgggattatactgcatcaaaggtgttgacattggagtatgcaccaggtatcaaaataaatgaagtggatatgttagcttcacgtggttatgatcgattacgaatctcatctcacactattgaggcatacttgattcagatattgagaacgggtttctttcatgctgatccacatcctggaaatcttgctgttgatgttgacgaagcaattatttattatgactttggcatgatgggggagataaaatctttcacccgagagagactgcttgaactgttctatgctgtttatgagaaggatgccaaaaaggttatgcaatgccttatagatctgggagcactccaacccactggtgacctgtcatcagtgaggagatctatacaatttttcttggacaatcttctaagccagacaccagatcaacaacagactttatctgcaattggggaggatttatttgcaatagcacaagaccagccattccgttttccatctaccttcacctttgttattagagcattttctacacttgaaggcctaggttacatactcaatccagatttctcctttgtgaagattgccgcaccttatgcacaggaacttttagacataaggcaaaagcgaccgactgggccacaactcgtggaggagataaggaaacaagcagatgatgcaagaaccaattcaatatcgatgccttacagagttcaaagaatagaggaatttgtcaagcaacttgaggcaggagacctgaaactccgagtccgagtacttgagtctgaaagagctgctcgaaaagcaacaatattacaaatggctaccatgtattcagtattggggggaaccttgctaaaccttggtgtcactttgagtagccaaggcaatcaagcttttgcaaatggatcattcattggtgcaggcattttaggggctctatttttaaggtctatgcaacggttgaagaaacttgacaagtttgagaacatgatataattcgttcccaccaaattcaactccttcgggcttcaagcatatgcatgatatatatatatatatatatatatatattcttgatctctttttccattcatatttttctcataagcataagatatacgagtacgagttgtacagaaacatgattggagggtaatgaagctgcaagaaactgttccttcatgataaagtgaatatcattgttttgtaaggagaaaagaaattttcatcaaccattggtacaatagttagccaaataacttttagttttcacattttcattctaattatggcttcctcaatcctccaagttaaattaagtatacgccctagaggcaaattgtatattgatcttactagtttgcatcgtaccatgtcgtttattgtatatacaagacattccattcattgtgttatttatttagtttacgaccaaatctaatgtggactattctagtatgtggtttagggtggacctctttttaatagccatttgatatattattaaaataatgaatggttttgat

SEQ ID NO: 9922 - DNA, 990 bp, Glycine max
  Clone ID: 700876832_FLI
accacgcttcttggccactatccatcactgtttaccaactttacactctcaacctctcaacaaaagacgcattttttttttttggtttggaagagagaagaatggagagaaaggttctgatattgtgctctgttgtggccttcttggggctgttgtcggctgcaactagcttcggtgcagaagcgacaaggattaaggtttctcaggttcattttgttacaccaaaccagtgcacgtatcctcgtagtccagctctgcctcttggtttaattgctgcagtggctcttgtgctatctcagataatcataaatgttggaactgggtgtgtttgctgcagaaaaaatttgcaaatccctgattccaattggaaggtggcactggcctgctttgttttatcctggttcacatttgtaattggttttctcctgttgctgactggcgccgcgctgaatgatcaacgcggtgaagagagtgtgtactttggctactactactgctatgttgtgaaacctggagtgttcgcggggggtgcgattttatcggttgcaagtgctgcatttggaattttgtattacatttctttaactgaaaaaaataatggtatccaatacccatatcctaatcaaggggtcatagccatggcacaaccacaaatcccatctcagactagtcaagaacctgtattcgtgcatgaagacacatacatcagacgacagttcacatgattgtgtggaggctgctttaatcaaaacatttcttctaatgtttactcttaggaagcagtgtttcttaggtcttgtatgtgcatatgcaccacttttgtgagggagttgttcattttgccatgtttataaatggatgttctagactatgaatcgttgccatgttttagatattagattcgatgcatgtggaggtaggcttgaatatgatctttaaagtattacaaggtattatgcaaatactaaataatagactatgatttttttt

SEQ ID NO: 9923 - DNA, 908 bp, Glycine max; identical to SEQ ID NO: 9807
  Clone ID: 700877014_FLI

SEQ ID NO: 9924 - DNA, 714 bp, Glycine max
  Clone ID: 700877040_FLI
aatggccaccaatgcattcactggcacatctctctccatgcgatctgtcattcctcaaacacaggcatttgcctcaatttctggcccgacatctgcttcaatttccagctttgggagaaagaatgtttcttttagcttgcagccacgcttaattcgccttaaaatttcctgtgctgccgctaaaccagagacagtagagaaggtgtgcaaaatagtaaagaagcagctggctatgcctgaaactgatgtggtgactggggagtcaaaatttgcaactcttggtgctgattcccttgacacggttgagatcgtgatggcacttgaggaagcatttggtattgccattgaagaggacagtgcacagagcatcgctacggttcaggatgctgcagatcttattgaagaaatcgttcagaagaagagttcttagagtaaacatgtaccagaaggtttgtgtaaaacatgaactcatcatagtctccatgccgatcaatatttatggtgtggggcaattctgagtctcgagtgttttagttgtgaactctgttgcgtgattaaaacaagtctgagaagaaaaacaaattagtccaaccttttgtttgtttctggaagttagttatatcaagttgtgtttttgcattaaggggtttttgtcaatgatatgttaattttaatagatgtagatttatgtcaatgatattggatgttaatttt

SEQ ID NO: 9925 - DNA, 861 bp, Glycine max
  Clone ID: 700877049_FLI
tgttactcaacgccaattgcgatctcaaggtgtgcgatttcggtctcgcacggtcagccgcctcgacagaagataatcagggcttcatgaccgaatacgtcgcaacgcgatggtatcgcgcgcccgagatcatgcttacgttcaaggagtacacaaaagccatcgacgtctggtctgtcgggtgcattctcgccgagatgttgagcggcaagccattgtttcccggcaaggactaccaccaccagctcacgctcatcctcgacgtcttgggtacacccaccatggaagactactacggcatcaagtctcgacgagccagagagtacatccgcagtctgccgttcaagaaaaaagtcaactggaaaatgatgttcccaaagacaacagacctcgcgctcgatctgctcgaaaagctactggcgttcaacccacagaaacggatcacggtcgaagaggctttgaaacacccttacctcgagccgtaccatgatccagaggacgagccgactgccgatccgattccagaagagtttttcgactttgataagaacaaggatgatctgagcaaggatcaattgaagcaattgatctttgatgagattatgcggtgaaacggcttgactgtccagaggtgtcgagtactaccatgcatggagcacaagagaggggttctattgtatcaccaaagagagaaagagaaatgtgtcactgtacggcggattcagtagctcggtagtccgggtcacctttgtttgtcgacaacgacagaagattcaccctctccggttgtatctgtgcttccgatactttgtcgatggtagagctactcgaaaacctctaagaaaaggatcctatcttctc

SEQ ID NO: 9926 - DNA, 1375 bp, Glycine max
  Clone ID: 700877103_FLI
gaatagctctgctcagtgttgctgttggacttccaaatgtgggaggacatttcgagacttggaacacaggaatccttggtccagttgtactccgtggacttaaccaaggaaagttggacttatcttggcagaaatggacttatcaggttgggctgaaaggtgaggccatgaatcttgcatctccaaatggtatctcttctgtagagtggatgcagtctgcattagtttcagagaaaaatcaaccactgacttggcacaagacttattttgatgctccagatggagacgagccgttagcattggacatggagggtatgggtaaaggtcaaatatggattaatgggctgagcattggaagatactggactgctccggctgctggtatttgcaatggttgcagctatgctggcacattcagacctccaaagtgccaggttggttgtggccaaccaacccagcgatggtaccatgtacctcgatcttggttgaagccaaatcataatctgttggttgtttttgaggaacttgggggagatccttcaaaaatttcacttgtaaagagatcggtaagcagtatctgtgctgatgtgtctgagtaccacccaaatattaggaattggcacattgatagctacggaaaatcggaagagttccatcctccaaaagttcacttgcattgtagtcctagccaggccatctcttccattaaatttgcaagctttggaactcctttgggaacatgtgggaattatgagaagggagtttgtcattctcccacttcctatgccaccctagagaagaaatgtataggaaagccaagatgcacggttactgtatcaaacagtaactttgggcaagacccttgtcctaatgtgttgaagcggttatcagttgaagctgtttgctctccaaccaatcggaggggctgaatgattaaggaaggaagccacccttttacgtgtagtatgaagtgacttaacaagaaaaacgaaaggaccataatagtataggtaaagttaagtgtcatggttgtttttagggagaaagtaataatgtttatgatatgttggtgccgaaggcacgaggtttttagtttcatttagtgatgttgtgttgacgggaatgtataaaaattagtgattgtcggataggtgaatcttaatcagggagtccaaaattgggatccttggtggagtagttcccggccttttacgttttaactataggcacggggaagagagggaatttggtttgtgtgatgttttttcgttttactttgtggggttaaattaaactccaaatcaggttcaagttgggagcggatcctactgtaaccactctacgtttatttaaagcccattgttcaattctgtgc

SEQ ID NO: 9927 - DNA, 397 bp, Glycine max
  Clone ID: 700877141_FLI
cttcaccaacgtgtcatcaccatcagccaaagccaaactgagactgttgtttgaggtagctcctttggggttcttgattgaaaaagctggaggttacagcagtgatggtcatcagtctgtgctagacaaagtcatcagtaacattgatgacagaactcaagttgcttatgggtccaagaatgagataatccggtttgaagaaaccctgtatggtaaatccaggctcaagggtggtgtagctgttggagcagctgcttaatctgttaaacctgcaattcattgtctatttttatctgcttttagaaaaagatatatgctatcttcagacaagtacctgcaatttagtcacatttctgtttatcactataataacaaggtaaattatgttggtatggct

SEQ ID NO: 9928 - DNA, 842 bp, Glycine max
  Clone ID: 700877158_FLI
gaaatcgcatttccggcaagattccgacggacatcgggaacctctggagtctcaccctattgagtctgggtgacaacgagatctctggcgagatcccaatgtcagttgtaaaccttgccagactcaagcatctagacctcagcaacaaccgactcactggcgaaattccctatgatttcgggaaactcgccatgctgagtcgggcgttgctgagtgaaaaccaattaaccggttcgatccctaagtccgtgtccagaataaacaggctcgcggacttagatgtctcatcgaaccggttaagcggttccatcccggtagagttgggaaaaatgaaggttctctctactttgaaattggatggtaactctatgacgggtccagtaccctccactttattgagtaatacgggtatgggtattttgaaccttagccgaaacgggttttcgggtaccatacccgatgtttttggagcaggttcctattttatggtccttgatttgtcgtttaataacttttcgggtcggattcccggctccttatccgcatccaagttcatggggcatttggatctgagctacaaccacttatgtggaaccatccctattgggtctccgtttgaacaccttgatgcggcttcgtttagtaacaatgattgtttgtgtggaaacccgttgaaggcttgttgatgggtgacccgaataagtattgggttgttgttggtgaatattaatcgttccaagatatagtgatttggttgtagtgaaggagcccaagtgtgattttcatttgatgtgatagtattttgtcatgtgaattgtgatgtaatataatatatttagggc

SEQ ID NO: 9929 - DNA, 441 bp, Glycine max
  Clone ID: 700877175_FLI
aagaagcagatagaccagaagatggattctacatccgatcaggaatcaccatcataatggagaaggcaaccatagaagatggcactgtcatataaatggatagggctcatttctgggctgattacccaaatgcgctggaagaggaatgctcccatctttggacagaagggtagctgtttgcaatgctgtgttacaatgcagaaagcagcagaacaccccatgtgctatatgatatgtaaaatagtagctcccccccaccaatacatgtaaaaatagaatgaataaaaccacgaaaatcaagatgcatgagagtatataaattgaagggctgagcccgaggtagctagctacaaagttgcttgaaccccttgtaaaagacactttctaaattatttgtatcgctaaggtatcagtgtatggctaaatggattcgttggcatc

SEQ ID NO: 9930 - DNA, 727 bp, Glycine max
  Clone ID: 700877186_FLI
atgctccccatcaagcaagatctctggctccacaattgggaccatggtattgatagaacttttgaagtagcccaaaaggtctgggcagaggttttcttctaccttgctgagaacaatgtcctttttgagggtattctccttaagcctagcatggttacacctggagccgagtccaaggacaaggccagtcctcagacagttgctgattacaccctcaagctccttcacaggagaattccccctgctgtccctggaattatgtttttgtctggtggacagtctgaggttgaagctaccctcaatttgaatgccatgaaccaatctccaaacccgtggcacgtgtcattctcgtatgccagagccctccaaaacactgccttgaagacatggggaggccgcccagagaacgtgaaggcagcacaagatgcactcgcattccgtgccaagtccaactcactcgctcagcttgggaagtacactggtgagggtgaatccgaggaagccaagaaggagttgttcgtcaaaagctactcctactaagatgtttgcagtgaatatgatacttgttaggcagcaacaccagcagttacagtaggtgttgacggacgatgaagtggaagactaatttgtctaaaatgtaatgtttttatagtcttggagactatttttgtttatggttaaatgcacctttacagcttaataaaccttttgctatgagttgtgtact

SEQ ID NO: 9931 - DNA, 696 bp, Glycine max
  Clone ID: 700877248_FLI
cctgaatgatgcacccacactctgtaaataccttgaatcattttataccttgcgtaagcctgtggcatccaccataaatacattggcaggtgctctttacaaagtattttgtgcatcccctgatctggcaaggaaggaaatgcgccaagcttgcttcgattatctcagccttggaggcctattctcggaaggaccagtctctttactttctggattaaaccctcgtcccttgagcttggttctccatttctttgctgttgcaatatacggtgttggccgtctattgttaccatttccttcacctaagagagtatggatcggagcccgattaatctcgggtgcatctgcaatcatccttcccataattaaggccgaagggattcgtcagatgtttttccctgccactgttccagcttattacagaactcctccagttgcacaatagtgagtatcactgaaattagtgaatacattttgaaaaatcaaggtgctctcaatagcacgagctaactttatcctgcttttttcagaattgagggaaggttgaagttcgtagttctgtaagcattttggcttcttttgtgtgtattctttgtagtctgtagcttgtaatgtttcaattgaatgtatcatctctgtctctctctctctctctcctttttggtacactagaaattaaatccatgatattaaact

SEQ ID NO: 9932 - DNA, 1797 bp, Glycine max
  Clone ID: 700877250_FLI
ctgataaaggcaggacattgttgcttggtgtggatgacatggatattttcaagggaataagtttgaagttgttggccatggagcagcttctcattcagcatcctgagtatcgggaaaaggtggtgctggtccagatagctaatcctgcgagggggcgagggaaagatgtgaaagaagtgcaagccgagacgaaggccacggtgaaacgaattaatgaaacatttgggaaacccgggtatgatcccgtcattctgatcgaggagcctctcaagttttatgagagagttgcttactatgttgtcgcggagtgttgtttagtcactgcagtaagggatggaatgaatctcataccgtatgaatatatcatcagtcgtcaaggaaatgaaaccttggataaagttttgggtctagcttcctcccctaagaagaaaagcatgttagttgtgtctgaattcattggctgttccccatctttaagtggagcaatcagagtgaacccctggaatattgatgcagtagctgatgcaatggactcggcgctggaaatggctgatttggagaaggagcttaggcatgaaaagcattatagatatgttagtactcatgatgtcgggtactgggctcgaagcttcttgcaagatttggaaaggacctgtagtgatcatgtgcgacgaaggtggtgggggattggttttggattaagctttagagttgttgcgcttgatccaaacttcaagaagctctcaatggagcacataatttcagcttacaagcggacggcaactagggcaatccttcttgactacgatggtacactaatgcctcaatcatccaccattgataagagtccaagcagtaaatccattgaaattcttagtagtttgtgtagagataagaacaacatggttttccttgttagtgctagaagccgaaagatgctttctgaatggttttgtccttgtgagaatctgggagttgcagctgagcatggttactttctaagaatgaagcgagatgaagagtgggaaacacatgttgcggcaacagacactagttggaaacaaattgcagaacctgtaatgaaactttatactgaaacaaccgatggatccaccattgaagacaaagagactgcacttgtttggtgctatgaggatgcagatccagactttggatcatgccaagctaaggaacttctcgatcatcttgaaagtgtgcttgcaaatgaaccagtaacggtcaagagtggccagagcaatgtagaggttaaaccacagggtgttagcaagggactagtggccacacgcctactttctgccatggaagaaaaggggatgtgccctgattttgttttgtgtataggcgatgacaggtctgatgaagacatgtttgaggtaatcaccagttcgatggggagtccgatcgcggcaaaggccgaggtattcgcgtgcacggtttgtcgaaaacccagtaaggctaagtactacctggatgatacaactgaaatagtgagattgcttcagggcttagcctgtgtttcagaacaaatagacaaatagtttcattttcttcggaacaaaaaatagtttgttaagctctgggaacaaaggtggtggtggtgatgagaggtattataaatacattgtactttgctttactttgtcattgaggatgtaggctcagttgtgctgctcttaaaatcttaatacacaattaatattattggtttccttgatattccatgtatattatccctagtttttactgagaaaagttctgtatcggattctgctcctt

SEQ ID NO: 9933 - DNA, 1458 bp, Glycine max
  Clone ID: 700877271_FLI
gtctttgaatacatggaccatgatttaacaggtcttgctgaccgacctgggatgagatttacagttccccaaattaagtgttacatgagacagcttttgactgggcttcactattgtcatgtaaatcaagtacttcatcgtgatatcaaaggctcaaatcttcttatagacaatgaaggaaatcttaagcttgcagattttggactggcacgatcattttctaatgaccaaaatgcaaatcttactaatcgtgtcattacgttatggtacagaccacctgagttgctgctaggaacaacaaagtatgggccagctgtggatatgtggtctgttgggtgcatttttgctgagcttcttcaagggaagcctatatttcctggaaaagatgagccagaacaattaaataaaatatatgagctgtgtggagcaccaaatgaagtcaattggcctggggtttccaagataccttattataataaatttatgccaacaaggccgatgaaaagacgtttgagggaagttttcaggcattttgatcatcatgctctggaattgttggagaagatgttgacacttgatccggctcagagaattactgcgaaagatgcacttgatgctgagtatttctggacagatccattaccgtgcgatcccaagagtttacccaagtacgaatcatcacatgagtttcagacaaagaaaaagcgccaacaacaacggcaaaatgaagaaatggctaagcgtcagaaaattcagcacccacagcctcacactcgtcttccccccattcagcagcctggacaacatggccaaatgcggtcaggaccaaaccaaccagttcatggttctcaaccccaagttgcggcaggacctacacatcattatgggaagccccggggtccatctggtgggccaggaagatatcctcccaatgggaacccaggtggaggatacaatcacccaaatcgaggaggtcaaggtggtggtggttatggcagtggaccttatcctcctcaagggcggggggcaccttacgggtccaatagtatgcctggtggcggtcctcgtggcggtggtgccagcggctatgttggagctccaaattatccccaacaaggtggtccatatgggggctcagcggctggtcgtggctcgaacatgatgggtggaaaccgcaatcaacaacagtatggttggcagcagtaaatatacttatgatgatcagtattagtactacaatttggcaataccctgataaatttgagaaggattggactgtttatggatcaagttactgagaagaagaaatgagatatgacctctatggtttgtatactactgagatatttgttctcattacttgaagtgcttggaaacttttgtgatgtatgcatgcaccttaggtaatgtttggggctccttattacaagggcaccacaagagaagagtgaacccccg

SEQ ID NO: 9934 - DNA, 901 bp, Glycine max
  Clone ID: 700877274_FLI
acagaggagaggagaggagaaggcgatgcaacccacatccggcggcggcgggctggcaaggttccgttcagctccggcgagctggttagaatcagttctgttgaaggaagaggaagaagaagaagaccccttaagcttcactcaactgctttccactatcgatgatgctccctctcattctcaacaccaactctatggtgccgctctctcaaacaaggataaaacacctgaaatcttcatgttagaagattccgttccttgcagagtgagggctaagcgtggctgtgctactcatcccaggagtattgctgaaagggtaactcactcactcttttctctctacttaactaactcctttactttctgttatcttttctcttttcgccttaggttcgcaggactcgtatcagtgaccgcatcagaaagctgcaagaacttgtgccaaacatggataagcaaacaaatactgcagatatgttagatgaggctgtagcgtatgtcaagtttctacaaaagcaaattgaggaactgtcagagcaccaacggaggtgtaaatgcgtggttcaagagtaaattgctgattgttccatgcagtgcttggctttttacgatttacttatgaattattatcagaatttttttatgttctgatgaagatcaaccataccacactctggatgctaattaaatttaatatctcctgataacttaaaagatgcatatattatacatgttaggggtgacattgccaagttcgagacgaataaattacaaatagaattttaccctagagtgttataattgtgttgtagtgttgtacaactcttaagatacacaaatctgccaagttaatagctacttggacttaagatatatacataaccatatgtgttattttatt

SEQ ID NO: 9935 - DNA, 206 bp, Glycine max
  Clone ID: 700877279_FLI
atcaagattcatggtttttaacccactaccactagctaccacctttcttctattatgaaattaaacctatggcagcgtttatgaaataagtaaggagtttgagtttggaatattttgtcattttctttctgtatgattgaaaatccaagaatagtctttgagagtggttatatatattactacttcatgttgtgctttcatggacc

SEQ ID NO: 9936 - DNA, 1190 bp, Glycine max
  Clone ID: 700877293_FLI
aaaatatattcaattttgcgtttctctgcctaaaaggtgaacttcttctctgcttcttccgattgaaagatgggtcaagcattcggttgctaccaagtcgatcagtcaaatgtggctatcaaggagcattttggaaaatttgatgatgtcctagagcctggatgtcactgcctgccttggtgtcttgggtaccagattgctggtagtctgtcgctgcgagtgcagcaacttgatgttcgatgtgagacgaaaaccaaggacaatgtctttgtcaatgtggttgcatctgtgcaataccgagctgtgtctgagaaagcatctgatgcattctataggcttaccaacacaagggagcagatccaatcatatgtttttgatgtcatcagggccagtgtaccaaagttggagttggattctgtctttgagcagaaaaatgatatagcaaaggctgtggaggaggagcttgagaaggccatgtcaacctatggatttgagatagttcagactctcattgttgatatagagcctgatgttaatgtcaagagagcaatgaacgagataaacgcagctgctagattgaggttggctgcaaatgagaaggctgaagctgagaaaatactgcagatcaagaaagcggagggagaagcagaatccaaatatctgtcaggactcggtatcgctcgccaacgtcaggccattgtggatggactgagggacagcgtgcttgctttctctgagaacgtgcccgggacatcagctaaagatgtcatggacatggtgctggtgactcaatactttgacaccatgaaagagataggagcatcgtcaaggtcctcgtctgtgttcatacctcacggtcctggggcagttaaagacattgccgtgcaaattcgggatggtctccttcaggccactgcctcacagaattaagctttcttggagttgtaaataacaaatagtatgtgtgtcaggtttttttcaggaaatgcttcttttgtttgaacttataaagtctgcatctttactcttcttatatttgatagattcatagcagtgtctattttatgtgtaagtactgatgtgcagttttgaatacttgtttaaggattagtcttaatgtcaagttgcttgtgaatcattaaggaatttgttatgtaagaattacttcccaaaagatgtgtttttctttt

SEQ ID NO: 9937 - DNA, 1897 bp, Glycine max
  Clone ID: 700888113_FLI
cttaacattagctcaaatttcatttatgggggaattccacaatctctatcctctatgaggaatctaaggagtcttgttttggttgataatctcttcaatggaagtgttcctgacctccaaaggctaacttctctagaagagctcaacttgggaggcaataatttgggtgctcaattcccttcagtgggaaagaatcttgtcactattatgttgagaaataattcactgagatctcatatccctccacaacttgtgcactttgataaacttcaggtatttgatgtgtcttccaataatttttttggaaacatcccatcctttttgatctctttgccttcccttcagtacctaaacttggcttcaaaccatctaagtggtaacctctcagtgaatatggcatgtagttcttcactaacatttgtggatatctcacacaaccttctggttggaaaattgccatcctgctttggttcagtgtcttcaaaggccaaagtgctatattctgggaactgtttgtcaaccgaaaaaaggttaaatgatcaacagcatccattttctttttgcaagagagagggggctttggctgttaagcctccagctaaaaatctgaagaaggaatcgggttcgggtgcaaaactaggcctaatgcttggaataattgtaggaattgtactaattggaggacttctggtactacttgttgtgtgcatctttaggaagtccaaagcagaaagatcacatcctaaaatggacaaatctgttgctaataaatattctatcagtgtatcccccagaccaattggtacaagacatattccacaggcaatgaagcaagctgcagttggactgccaccataccgtatcttcacatcagaggaaattgaagatgcaacaaataactttgacccatcaaatttaatagaagagggatcactgggacagctatataaaggttggctcagagatggttcagtggtccttgttaattgtgtaaaaataaagcagaaaggtttgccccacagcatcatgcagcaagtagaggtattacacaatttgaggcacaggcatatggtgagtgttctaggacactgcatcattactgaacaggagcatccccaaacaacaagcacagtcttcattgtgtttgagtacatctcaaatgtgtcattgagggatcaactttcagatgggagaaagagggaaatgctgaaatggccacaaagaatggcaatgagcataggcattgcaagaggagttcaattcttacacacaggagttgctcctggcatatatggcaacaatttaaagattgagaacattctgttggatgatagtctcaatgcaaaagtcagtagatacaacattccattgccatccaagattgcacatattgaacaaaatgccaccaatcatattggcagcacaaacgatgcagaaaaggaagatatctatcagttgggtattattctacttgaagttatcactggcaaacaaattacatcctcgagtgaaatagaggagctgaaggaagagctggagaatggttcatcagaagcaacatcagtaattagaagcgcaattgatccttcactgaggggaacttatgcatatgaatcaatgaaaactgcagttcagatcaccatcaactgtctctccaaggtttctagtcagcgcccttcaatagaggatgttctttggaatttgcagtacgcaatgcaagttcaagagtcctggaccagcagtggaaacctcagcacaaaattgtaaaccacacttgtcaataaaaaaatgcttgcttacatttccatatgttcattatcataatgaataaaatgttgatgtacatatgtaatttctttcataaggccccaaaatgcaatttggcctgcatttttcc

SEQ ID NO: 9938 - DNA, 973 bp, Glycine max
  Clone ID: 700888137_FLI
ataattgtttggaagtttgctttagtctccgcaattttctgcttgcttcttcacttttttttcctttgtctcctcctcaatcttcattgtcctgttcttcccctaggtgacacacacacgcagagatcatagcttgtgttagtgaggttagaagataaagaaagaatggcatttgcaggaacaacccagaagtgtatggcctgcgacaaaacggtttatctggttgataagttgaccgcggataaccgagtgttccacaaagcttgcttcagatgccatcactgcaaaggaaccctcaagctgagcaactacaactcttttgagggagttctttactgcaagccacattttgaccaactgttcaaaagaactgggagccttgacaaaagctttgaagggacaccaaaaattgccaagccagagaaaaatttggaagagaaacctgcagcagccaaagtctcaagtatgtttggtggaacaagggaaaaatgtgctggttgtcagaaaacggtgtatcccactgagaaggttactgtgaatggaactccttaccataagagttgttttaaatgctgccatggagggtgtgttatcagtccttccaattacatagcacacgagggaaaactctactgcaaacaccaccatgtccaattgatcaaggagaagggcaatttaacccaacttgaaggtgacaatgagaagagtgcgactaatgggaaaatcaatggtgaagaagtttccgcagagacatgaaggagtcgagtctcagaattttgctttctcaagtttcatatttgtgcaccatatatttctactctctcttgcttttaccattactttgcagtccgggaagctccttacccgtgacaaatatggtattctattttttgttagacaaagtgtgcggatcttcaccatatgtttttggttgttgtgagcgtttgattcaaaatgtgtgatttagaagtac

SEQ ID NO: 9939 - DNA, 878 bp, Glycine max
  Clone ID: 700888142_FLI
gttcttactaacatggttgcatacattcaaaaagaatttcctggaaacacacttaaattctggcgattacaatccccaaggtacttttatggtggtgactggaatcaaaatgggagctgcttgttcaacaagccccttgaggaggatgagcttgacttatggtttgaacccaggaacaacggagttaacaaggaagcgagagtgttgaattttgtgattgaagaagcattacaagctgcaaacattcaattgcttgacttgactcatttaagtgagttaagagccgatgctcatccggcaatttggttaggaaggaaggatgcagttgcaatttggggtcaggattgcatgcattggtgtctgcctggtgttcctgacacatgggttgatatcttgtcacaactgatccatgacggcttaggaagaactggtcggctgtagaaactgaagaagctatttgaattccatcttacataccataaactgaaaatttccatcaagatgctggggggcatgctgccaagttctgggaccaagaaatgagaattttgggttgtgcttgaaatgttcaaggctgatcttggttggaacttggaaggaaagctttgatgaaggaagtaagcgactgattggtcgagcataagctatactgaaagcagctccgatctaaatatcattcatcattgggccttaacttgtcaaatacatttaatcatttaatcctttcattcagattattattgttgttgttagtacgtaatcttctattcaaaatttgatatttagcaagtgcagtacatatttacgtcagactaactagcttgtgagggaaattataataagcaatgactcaatgagtgcattatccttttttattt

SEQ ID NO: 9940 - DNA, 826 bp, Glycine max
  Clone ID: 700888167_FLI
gcggaagatcagggaaaagctgtaggttgagatggttcaatcaattggacccaagaataaacagaagtcctttcacggaggaagaagaagagcgtcttctagcttctcaccggattcatggcaatagatgggcagtaattgcaagacacttcccaggacgaactgataacgctgtcaagaatcattggcatgtgatgatggcaaggattcggagagaaaggtctaaaaattatagtccaaaacagccactttttcctccaaacttgcaggtcgatcttgagacaaattttgagaccatcccttcttttgttgacaagtattatgaaaagtacagccacccttgtgtcgcactcactcatagctcttttcaatttcccaccaagaatttttactttcaagatccaagttctgctggttccacagtgcctcgagacaattgtgaatcagtagagttctatgattttcttcaagtaaataccgattcgaataaaagtgaagtgacagacaacgccagaagagacgaggaggaagtaagtcaagatgctgtgggaatgaagaataaggacaatggtgttccattcattgattttttgtctactggaggctgctaacatatatataattgccaaagtacaacctcaattacttccaatattgatcaattgatcgagtctgactacagaacaaaatctccacgtacgtagatccatttatgtaattaactacctactgcattcacaaaacagtaatgtatttaaggatatatacatgtacatttataacatgtaaaaaaactgcttctaagaagctccatgcatcgaagatc

SEQ ID NO: 9941 - DNA, 1613 bp, Glycine max
  Clone ID: 700888213_FLI
gacgggtcgctctccaagggacaagcgcgtcgtcaaggatgatcttactaagaacgacctttggtggggaaagggttctcctaacatcgagatggacgagcacagtttcatggtgaacagagaaagagctgttgattacttgaactccttggacaaggtcttcgtcaatgaccaattcttgaattgggacacagagaacagaatcaaagtccggattgtatctgccagagcttaccattcattgttcatgcacaacatgtgtatccgccccactcctgaagagctggagaattttggtactccggacttcactatatacaatgctggacagttcccgtgtaatcgttatactcactacatgacatcctccactagcatagatcttaatcttgctaggagggaaatggtcatcctcggcacacaatacgccggggaaatgaagaagggtcttttcagtgtcatgcattatctcatgcctaagcgccaaatcctctccctacactccggatgcaatatgggcaaagatggggatgtggcactcttctttggactctcaggtactgggaagaccactctttccaccgatcacaataggtatttaatcggagatgatgaacactgttggggtgacaatggtgtctccaacattgaaggtggttgctatgccaaatgcattgacctctcacgggagaaagagccagatatttggaatgcaatcaggtttggcacagtgttggaaaatgtggtgtttgatgagcatgatcgagaagttgattactctgacaagtcagttacagaaaatactcgtgcagcttatcctatagagtacattccaaatgcaaagttaccttgtgttggccctcacccaaagaatgtcatacttttggcatgtgacgcatttggtgtactcccacccgttagcaagctaaacctggcacagaccatgtaccatttcatcagtggatatactgctttggtggctggcacagaagaaggtattaaggagcctcaggcaactttttcagcttgttttggtgcagcattcattatgctacaccctacaaagtatgcagcaatgcttgctgaaaagatgcagaagcatggtgctactggatggcttgttaacactggttggtctgctggaagctatggtaatggaagccgtattaaactacaatacacaaggaaaatcattgatgctattcactccggaagtctcctgaatgcagagtacaagaagactgaaatttttgggcttgagattcccaccgaagtggagggtgtcccttcagaaattctggatcctatgaacacttggtcaaacaaaaaggcctacaaggagacactattgaagttggctggattgttcaagaacaattttgaaaccttcaccaactacaagattggcaagggaaacaacaacctgacagaagagattctcgcagctggtccaatcttttgagacaatgttatgcaacatgttgtgtggttgggaatgttagggtggtagataaaatctttccttagaataaaatattgtaccattggtttggttgggctcaaaatgtcatttctagtcttcctccaaaaatgaagtttattttctagtcttt

SEQ ID NO: 9942 - DNA, 1007 bp, Glycine max
  Clone ID: 700888221_FLI
ggcggcgccactgtcgaagaggtttccgccgttccgccccttgaaatctctatcaacgattctagccagctcacgctctcgtttcgcggccaagtctatgtcttcgacgctgttacacctgataaggttcaagcagtgttgttgctgttgggaggaaatgaactaacttcgggttcgcaatgtgcggagctatcatctcaaaatcagactggtgaggaggaatatcctgcaaaatgtagtctaccacagcgagcagcgtcattgaataggtttcgtcagaagaggaaagagcggtgctttgataagaaagttagatatagtgtacgtcaagaagttgcactcaggatgcatcgtaataagggtcaatttacttcatcaaagaatcaggatggaactaatagttggggttcagatcaagagtcagggcaggatgctgttcaatctgaaaccttgtgcacacattgtggaataagttcaaaatccactccaatgatgcgtagggggccatctggtccaaggtcactttgcaatgcttgtgggcttttttgggcaaataggggcactttgagggatctttctaagagaaaccaggaacactctcttgcaccacctgagcaggttgatgagggcagtaataataatgactttgactgtcggagtggcatccctgcacaacataacaatcttgttaatgataacaaagctttggtatctgatcgttgagttttccactcacaggaaatgcaagtccttgactgtgacattcgcaggtttttagtaattccattcagtttgacctatagaatgtacagtatatagcaaagctctcgtcaatacaagagaggtctatttctatactctctgatcagttgcattaaactgtttatctatgactgtacaaactggaatttggaatgacttgatcgaatacaagagatctattcctatactctcggacagttgcattaactgtttatctatgaatgtataaactggaatttgaaatg

SEQ ID NO: 9943 - DNA, 378 bp, Glycine max
  Clone ID: 700888243_FLI
cgcctctgagggagtggggtccactcacacaggaagccaccgcgatttcgatctgaacctcccggcttttccggacttttcaacaaggttcttcgttgatgacgaggttaccagtcctcatccatccaagaaatcccgtctcaatttgaccatacccaagattgaaatccctcaatactgatgatccatagatccaaaaaatattcagtgtttttttcttctttcttttttaaagttatttgagattaatttgttcttgtacatatatagtacttggaccttattcgctagttttaggttttagattgtagtcattgtacttttgacagtggcaattcaattcaattcaattcatttatttaaatttttttaaaaatg

SEQ ID NO: 9944 - DNA, 2479 bp, Glycine max
  Clone ID: 700888246_FLI
ccgcaaactcactgcaatgaacaagttgttgatggaggagaatgatcggttgcagaagcaggtgtcacagcttgtttgtgagaatggttttatgaggcagcaattgcatactccatcggcaacaactactgatgctagttgtgattcggtggttaccactcctcagcataccctgagagatgctagtaaccctgctggactcctatcaattgcagaggaaactttgacagagttcctttcaaaggctacaggaactgctgtagattgggtccagatgcctgggatgaagcctggtccggattcggttgggatctttaccatttcacaaagttgcagtggagtggcagctcgagcctgtggtcttgttagtttagaacctacaaagattgcagagatccttaaagatcgtccatcttggttccgtgactgtcggagcctagaagtttttactatgtttcctgctggaaatggaggaaccattgaacttgtttacacacagacatatgctccaacaacactggctcctgctcgggatttctggactctgagatataccacaagtttggaaaatggcagtcttgtggtttgtgagaggtccctgtctggttctggaactggccctaatccagctgctgctgctcagtttgtaagggctgaaacactccctagtggctacttgatccgaccatgtgaaggtggagggtcaatcattcacatagtagaccacctaaatctcgaggcatggagtgtgccagaagtgttgcggccactttatgaatcatccaaggtggttgctcagaaaatgacaattgcagcgcttcgctatatcaggcaaatagctcaggaaacaagtggtgaggttgtttatggattgggtaggcagcctgctgttctgcggactttcagccagagattgagcagaggcttcaatgacgctgtaaatggattcaatgatgatgggtggactgtattgaactgtgatggtgctgaggatgtaattattgctgttaattcaaccaagaatttgagtggcacttctaacccagcaagttcccttacattccttggaggaattctctgtgcaaaagcttctatgttgcttcaaaatgtccctcctgcagttttggttcgttttctgagggagcaccgctcagagtgggctgatttcaatgttgatgcttattctgctgcatcactgaaagctggcacctatgcctatccagggatgaggcctacaagattcactggcagtcaaataattatgcctcttggtcatacaattgaacatgaagagatgcttgaagttattaggttggaaggtcactctcttgctcaagaagacgcttttgtttctagggacattcatctcttacagatatgtagtgggattgatgagaatgctgtgggggcttgttcagagctcgtatttgctccaattgatgaaatgttccctgatgatgctccattggttccttctggtttccgcattatcccattagattcaaaaccaggtgacaaaaaggatgctgttgctacaaatcggaccctggatttgacatctggttttgaagttggtcctgcaacaactgctggtgcagatgcatcatcaagtcaaaacactcgatcggtgttgactattgccttccagttcccttttgacagcagtctgcaagacaacgtcgcggtcatggcacgccaatatgtccgcagtgtgatttcctccgtgcagagggttgccatggctatatctccatctggtataaacccatcaattggagctaaactttctcctggttctccagaggctgttacactagctcactggatctgccaaagttatagttactatttagggtccgacttactgagatcagattctcttgttggtgacatgatgctgaaacaactgtggcatcaccaggatgccattctatgctgttcactgaagtcattgccagtgttcatatttgcaaatcaagctggccttgacatgttggaaacaaccctagttgccttacaagatatcacattggataaaatatttgatgaggctggacgcaaggcattgtgtacagactttgccaagttaatggagcagggttttgcttatctgccagctggaatctgcatgtcgacgatggggcgccatgtgtcatatgaccaagccattgcatggaaagttcttactggggaagacaacactgttcactgcttggctttctctttcataaattggtcatttgtatgaaaaatccaattcgtgtgccctgctttttcccacttgaacataaaaatgaaagggttaaaagggagacaagacaagtttggggggaaaaagaagtcgtaaatttttgtataacacatcaggatcaggtttgcatttaattcgatttaatttatttcttatttagtgcagagaccaaattgaattaatcttgtaaattatttagtgctagagtgaagttgagacttttgaatg

SEQ ID NO: 9945 - DNA, 629 bp, Glycine max
  Clone ID: 700888371_FLI
gcaaagagccgtgttttgtctgtgcccacttggatgggccccttggagcccaagattggtagaagctgtgatatttggttgcatccctgttattattgcagatgacattgttcttccattcgctgatgcaatcccatgggaagagataggggtgtttgttgatgaggaggatgttcccaagttggatacaatactcacatctatcccaccagaagtcatattaaggaaacagagattgcttgctaacccttccatgaagcaagcaatgcttttcccacagcctgctcaacccggagacgcgttccatcaagttttaaatggacttgcacgtaagctgcctcacgacaacaccgtgttcttgaaaccaggggagaagatcttgaattggactgctggacctgtgggagaccttaaaccttggtaacaattatattacttttatgaggccattataggattctttgtgtttcttgctcaatccttccaaagtgttaataggggttggtaatttagataccttttttctttttctttttgtattggaaattttgatatttccatagaaaaatgacaaatcattagatcatgtaatccattttacaacatgattgaagtttcataatatgctc

SEQ ID NO: 9946 - DNA, 950 bp, Glycine max
  Clone ID: 700888434_FLI
gattttgcattatgggagccacctcatggtccatacaaaacattcaattatccttggagaagctatgttaaagtcagtggagctttgaggcattgtgctttcatggtcatggcaatgcatggatgcatactttcagaaatacaggcacccccagaaaagaggctggttttcagcattgaacttcagaaggttggcactgaaggagctaaagtattacgccaacttggaagcaaagtggaaaatatggaaaagctaagcaatgtagacatacttttgaaagtacatgaagcagctgagcaattgcagatgaagattgaccaacaatcattcctcctagtaaattcagagagctggcaggctgcaaaaaagcctaaagaagttgaaaatcatgacaatttgttgattgatctcaaagaccctcatgaacacaaacactcattgatctcttccctcagtgaaacaggagttgattcaagacttaacataaacatagagccttcagttcctgaattgcacatttctcaaagcttgttgtccaacaaaatatcatggccacgtctctcattttatggagataacatgttacttgagcaagattccaaagtatatgaaagtgcaagctctctgtctttggcaacatttgcttcccttttaatagagtttgttgcaaggcttcaaaatcttgtggatgaattccaagatctcagtgagaaggccaatttcaaagacccctttaacccaccagtgctgaagtaggggacaatgacattgtggcctcgcttcactggcgactatatttcaaaattggaggtatttagaatctatctaactaatgtataatagtctatccataatctataataacacaaatataaaagttatatcgcatttttcttagattttcatttttatttctggtaaattattattgtaacttgttttacttttct

SEQ ID NO: 9947 - DNA, 366 bp, Glycine max
  Clone ID: 700888487_FLI
gtagatgtgcttgatgatggttataaatggaggaagtatggtcagaaagttgtcaagaatagccttcacccaagaagctactaccgctgtacccataacaactgtagggtgaagaaaagagttgaacgactctctgaagattgtcgtatggtaataactacctatgaaggcagacacaaccactctccttgtgatgactcaaattcatcggaacatgaatgtttcacctctttttgaacaatgtcgtttcaataattattatgtattattaataattaattagctgtacgtgacattttcatgaaggatattgcattgtacttatattgttactatttgttattgagctcagtcactctttcatgg

SEQ ID NO: 9948 - DNA, 568 bp, Glycine max
  Clone ID: 700888545_FLI
aacttcttaatgctttcatttcgcaaaccccccttggacggattggagaagcagaggaagtgtcttcattggtggcattcctctgcttacctgcagcctcttacataacaggacagaccatttgtgttgatggtggattaacagtgaatggtctctatataaattagagaagtactaccaacacactctctaacacacttctcttgacacatattctaccataagttacaaataataaaaaattacaaaatcatgaaaataagatctaggacccatatatttttgtgatatctaaaaaatttcaagcaataaaaaaaatgtattgaaaagagtgtataagataatgtgttgttagcatttttatataaactatgttaagagcaaggtctgatgcatacgttgctagtttttatattagtattgagaataaatagctgaaagtcccttggttcaatctatatcatttgggagggggaatttgttgggaataaatttgtatgtccccgatccaatcatcatgtaatcaattttaattttaataataaagtattattttattttcattgtc

SEQ ID NO: 9949 - DNA, 1738 bp, Glycine max
  Clone ID: 700888550_FLI
tttttttttcctttcatttctaacctaattttcgtttccatccaaaaaatggctctatcgcgcgtggctcaatcgtcgccatcacagtcgaatcttttgaaacccctctcgtcgtacttatccctacgacgccgttcggtgtcgacctcgtcggagcccctcaccgtggagacctcggtgcccttcacctcccacaactgcgatgcgcctccacgcgccgtggagacgtcctcggcggagctcttctcgttcttccgtgacatggcgctgatgcggcggatggagatcgcggcggactcgctctacaaggccaagctcatacgcggcttctgccacctctacgatggccaggaggccgtcgccgtcggcatggaggccgccatcacgcgcaaggattgtatcatcaccgcctaccgcgaccactgcaccttcctcgcccgcggtggaaccctaatcgaggtcttcgctgagctcatgggccgccgcgacggctgctccaaggggaaaggaggatccatgcacttttaccgcaaagaaggtggcttctacggtggccatggaattgttggggcgcaggttccgctggggtgtggcttggcttttgctcagaagtattgtaaggatgagaatgttacgttttctatgtacggcgatggtgctgccaatcaggggcagttgttcgaggcgcttaacatttctgcgctttgggatctcccctccattttggtctgcgagaataatcactatggaatggggacagctgagtggagagctgctaagagtcctagttattacaagcgtggggattatgttcctggattgaaggtagatggcatggatgctcttgctgtgaaacaagcttgtaaatttgcaaaggagtttgctttaaagaatggtcccattattctcgagatggacacatacagataccatggccactccatgtctgatcctggcagcacataccgtacacgtgatgagatttctggtgtaagacaggagcgtgatccaattgagagagtaagaaagctactattgactcacgagattgctactgaaaaggagctaaaggacattgaaaaggaaataagaaaagaagtagatgaagccattgccaaagctaaggaaagtcaaatgccagagccatctgatttatttaccaatgtatatgtaaaaggcttcggtgtcgaggcttgtggcgcggataggaaagaacttagggctactttgccctgatggaaaacttttccttttccttagttccttagttttggacaaatcaaaataatgaagaataaaaggttcagaagatcatctctgcatatttgttgagctttcccctaattgtatatgaaattgattcttcaatagcaatgaggcagaaattaatggtttgccattaattttggaggatctaacactcatattacctcaattgattttgcaagcaactagtctcctgcaaatttggaggatttcgttatgcaaaacctccatggttggcaaaattttgccattattttaattttaggtattcaccagattgtgttcaaatgaaatcttttttttttggctattaacaattcatgtttctttggacagttaaaaatatgatgcctgtacattgcacagattgaattgttgatacaggttggattatgttattttatttttctgctctttacttacgtttatgtctcgctatatatagggaaataaattctgttgattttatttt

SEQ ID NO: 9950 - DNA, 900 bp, Glycine max
  Clone ID: 700888605_FLI
ggatccactagcactggtaaacgtgtacttgaactgtctgcacacagcaacctgaagccagtaactctggagctgggtggaaaatctccattcattgtgtgcaaggatgctgatgttgatgcagccgttgaggcttcacattttgctttattttttaatcaggggcaatgttgctgtgctggttctcgcacatttgtccatgaaagcatatatggtgaatttgttgaaaaggctaaagcccgtgctcttaaacgagtagttggagaccctttcaaaaatggggttgagcaaggtcctcagattgattctgtgcaattcgagaagatcatgaaatacataagatcaggcgttgaaagtggtgctcaactggaatctggtggtcaaagaattggctccaaaggctactacatccaacccactgttttctcaaatgttcaggacaacatgttgatagcaaaagatgagatatttggtccagtacaatctatcttgaaattcaaggatctagaggaagtgataagaagagccaatgcaacttcctatggcctggctgctggagtttttactaaaaatatggacactgccaacaccttgatgcgagcattgcaagctggaacggtatggatcaactgctatgatgtctttgatgcagcaataccttttggtggatataagatgagtggtcaagggagagtaaggggaatctacagccttagaagctaccttcaagttaaagctgttgtcactgctttgaagaatcccgcatggctgtagttttcccactacctgagtgttcatgttcataatgtcttatctagaaaaaaaactacatctttcatggaacattcctaaggcattgaattagccaaagttattacacaactaaagcttttctgtgcc

SEQ ID NO: 9951 - DNA, 1208 bp, Glycine max
  Clone ID: 700888633_FLI
attgaatttatatgatgtgaaagctacaagaattgaagaccagttgaagttttgtttggatcagcttcaaaaacttgcagaggataagcttcaaagttctgtcactttggaaaatacacaaagaaggctgtccaatgttagaagacaatctcagcaggttacggatatggtggtggaaatgcaatctaaaattggcagtaatcgagtgacgcgcatggagttacaagtagaacttgagaaagaaaggtttgccaagaaaagagtggaagagaatctggaggttgctaggagaaagtttacatgccttaaagaacagaatgagggctttttagtaactgaaaagcttcaacaggaacttgaagagtacagggaaattatcaagtgcagtatctgccaagacagggcaaaagaggtggtaattacaaaatgctaccacttgttctgctactcatgtatccagaaagttgctgggagtaggcatcgcaagtgtccacaatgtggtacaagctttggggctaacgatgttaagtctgtttatttgtaactagaaacttggttctctcccggatgtcgagaagaggctggtgttcttttgaaaaaatctggtgtatggatacctacataggaggttcaattgtatgcttagtgccaactgtcgagataaggaacattggcagcgatcaatgagttgcttgtctacatttggaccaaaaatgattattttttgctggtacttaatcttagtaccacctgctcgcatttttgaatctggaatgatgtttagttagcatttttaatagatagaacgaattcggagtcataggaaacgtgatatttgttctttgcagatttatcataatgcatcttccaatgcgatttggagaggggtcatgaaggttggtctttgaccctgcaattaataattcaaattcgaaagcctgaattggccatcatggcaaattttcttggaagttgactccaaaggtggcaaccacgatgcctcacatctgtatttctgtttctcctgctgaaatgacacaagtacaaattttggtttcaggggatttgtatatatgctagagtttataaggggtcgttcaattttgtttataacagcctgtaatttgtgtaatcgtagatgatatgactagatatcattgtaattgatgttgtgaaaagttaagaaagctcaagtttatcattttttc

SEQ ID NO: 9952 - DNA, 700 bp, Glycine max
  Clone ID: 700888709_FLI
cgaggaagttgtcgttgcccagggcgattttctacattgtaatgcaatgcttgggtgctatttgtggcgctggcgtggtgaagggtttcgaggggaaaacaaaatacggtacgttgaatggtggtgccaactttgttgcccctggttacaccaagggtgatggtcttggtgctgagattgttggcactttcgtccttgtttacaccgttttctccgccaccgatgccaaacgtaacgccagagactctcacgtccccattttggcacctttgcctattgggttcgcggtgttcttggttcacttggcaaccatccctatcaccggcactggtatcaaccctgctcgtagtcttggtgctgctatcatcttcaacaaggaccttggttgggatgatcactggatcttctgggtgggacctttcattggtgctgcacttgcagcactctaccaccaggtcgtaatcagggccattcccttcaagtccaagtgattcaatcaaaccgttcatgcttaatcaagttgggaacaacaaaaaaaatcaaaacaatgtttctgggtttcggtttcatttcatcaagatgatctgtttatctttttttttttaattttaatttaaagtctttgtattttgtatgtaaagatgtaaaattatgattattaggtggtgcatgtgttgcgtcatgggccaatgttatcctc

SEQ ID NO: 9953 - DNA, 1233 bp, Glycine max
  Clone ID: 700888837_FLI
tttatgacttcgtaggggcaggactaactagtgtgaagatcaagggactgaacaatgggacaatagacttgtcttcttatgcctggacttacaagattggagtccaaggagaatatctaaggttataccagggaaatgggttgaataatgtgaactggacatctacttcagaaccaccaaaaatgcagccattgacatggtacaaggctattgtagatgctccacctggggatgagccagttggattggatatgttgcatatgggaaagggtctagcctggttaaatggagaagaaataggaagatattggcctaggaaaagtgaattcaagagtgaagattgtgtgaaagaatgtgattacagaggcaaattcaatcctgacaaatgtgacactggttgtggagaacctacacagagatggtaccatgttccacgatcttggttcaagccatctggaaatattcttgttctttttgaggagaaaggtggagatccagaaaagatcaagtttgtgagacgtaaagtatctggagcttgtgcccttgttgctgaggattacccctctgttgcactcgtttctcagggtgaagataaaatacagagtaacaaaaacattccttttgcccgtttggcatgccccggtaacactcgtatatctgctgtgaagtttgctagctttggaagcccatctgggacatgtggatcttacctcaagggagattgccatgatcccaattctagcacaattgttgagaaggcgtgcctaaacaaaaacgactgtgtcataaaattaactgaagagaatttcaaaagcaacttgtgtcctggtttatcaaggaaacttgcagtggaagcagtctgtagttgaataataaactaacgaactccggtgcaagagactcgtcactttgtgactgctgttgattaatattattgtcgattccggaggaacattgcatctcaccatttattttaccagcttggctacatcaaaaaagcagaagaaaattttgcatatattaatattaatattatcagcaaggtctctaatgtacaaatataatttatggcagagaaatctgctgtaaatacgatatctattaatcaatttggctttcacatgggtgtgttagccactgagaatcaatgcattttattcacacgacgctctgaaacaacctttgtggtaacgttttgattcattattcatatgaggagttaactttcatttt

SEQ ID NO: 9954 - DNA, 1128 bp, Glycine max
  Clone ID: 700888856_FLI
cgaaataccaattctgtctcacatagttctataacaccacaaactgtccaattccaatggttgttttctcttgtgttaaaacaatggttgtgcttgtccttgcgtttctaatctctgtgccttctatggttgcttctgctgtcagcttgtaccaagatgttgatgtcacgtggggagatggcagaggtaagattctgaacaatggtcagcttcttactctgtctctcgacagagcctctggctctggctttcagtccaagaatcagtatctatatggcaaaattgacatgcaaatcaaacttgtccctggaaattccgctggcacggtcaccgctttttacttacgttcagaagggtcatcttgggatgagatagactttgagttcctgggaaatctgagtggtgatccttacatagttcatactaatgtgtacacacaaggcaagggtaatagggagcaacaattctatctttggtttgacccaactgcagattttcacacctattcctttctctggaatcctgcacatgttgtattctatgttgatggaagaccaattagggagttcaagaacttggagggtgcgggtattgaatacccaaagaaacagcctatgaggttatattcaagtctatggaacgctgatgactgggcaacaagaggagggcttgtgaagacagattggagtgaagcaccattcactgcttctttcaggaacttcagagccaatggttgcgtttggtccaatggggtttcttcatgcaactccagcacctcttctgaaaaagcttggctatattctcaacagcttgattccacaaaccagaagaagctaaaatgggtgcagaagaattacatgatttacgattattgcacagacctcaaacgattccctcagggtcttcctctggaatgcacggttcgcaccaagtcataagaaaaatatatgcaaactgcttttgtatttgtatatgtcaatatgtttgtgcattccattttcccattatactgcatcgcttgtcaatgtcattctttctgcaattattttggattcagagggcgtcgtaatgtaataattaaatgtttattaaagtaaaataaataaaaatgggatactatttctgagc

SEQ ID NO: 9955 - DNA, 1328 bp, Glycine max
  Clone ID: 700888891_FLI
ggcaattctgcaaaggtcttcagtgtactatcatggagtaggtattcaaaatcacccccatccaccaaagatggtgctgaattttctggtcgtagtgaaccatgcaagcctggagctcattgtgccacacttaaaaaattatatgcagcagagaagaaacttttcaaggcattaaaggaggagggaattgttgcattggagtttgacaggaagtccatgttattgcgtaaacaagaggatgagaatcttgacgtggtcaagattgacaaaactcgatcaagtgttgataagttggagtccgatttaataagcctaaggcagtgcattagtgacacaacttcatcaattttggaaatgatagatgaggagcttttaccccagctggttgcattaactgcagggttgacacaaatgtggaggacaatgcatgagtcccataaagcccaagcactcatctcccagcatttgagtaacctcagtgataatcataacatgatactaaattcggaatatcatcaccaggctactattcaatttgagactgaggcttcttattggtataatagcttttgcaaacttgtaaaatttcaacgggagtatgtgaggaccctctatgagtggattaagcttgctgaaagcctcaaggatagtaatgaatgtagcaatcattcttctattcttgccatttgtgatcagtgggagcgtgggcttaatgagtcacctgacaaggagacctctgaagcaataaaaagccttgtgtcatgcatccgttccataactggccaacagattcaggaagataacattctgaaaaggttagaaaaactcgataggaaattccaaaaatgcttgaactccttggctgagatgcagcaaagaattgatggagatatggctgatacaagccccaggcatccaatacatcttaagaaaactgaaaccgaagcccttaagaagcaagtggaaagtgcgaaagcaaattatttggatgctgttcagtatagtagggccatgaccctagatcacctccaaaagacacttccccctctcttccagtcactgatggagttttcaaatgcttcagctcaggctattgaggctatcaataccacaggaaagccagtagagtagagtgcaggacattgcatcacatctttttttctattgcctggtgctttggatggtatgagcacaaaatatatgtattgtaaattgtgttcttgacagtttgtaaactgaaacaaaattgtgttcttgacagtttgtaaactgaaacaaaattgtgttgagccatttttgtatggtatcaaaattatatacacttctgt

SEQ ID NO: 9956 - DNA, 513 bp, Glycine max
  Clone ID: 700888893_FLI
gtgagagctctttgagggatcttctccatggatctgaatatgttcttacatatgaagacaaagatggagattggatgcttgatgttcactgattcatgtcggagactaaggatcatgaaaggctctgaggcaattgggctagctccaagggccatggaaaaatctaggagccaaaactaatgcagaaaaaacctgtttgaccgaagctggttattactgaagcatataaagatttacaagggcgtttgagtttatgattctgttcaaaatcaaaaacatgtcattcagtgtctcagtttttgtgcattaatagtctgacaagttttattagtagaattcaactggagacatccagacaatatatacacatattttgtttgtttctctattttgtgtatctttggattctagttgctgtataaaagaattgcttgttgtgcttttcccctctataactattctgaattttctccatgtatttgttttcaatatacatactgaacctttgtattt

SEQ ID NO: 9957 - DNA, 1220 bp, Glycine max
  Clone ID: 700888971_FLI
gcgccggttgttcaagttcaaccaccggagtatgatgtcaataatactgccatttttgtcggtaatttggatcttaatgtgtcagaggaggagctgaagcaaaactttctgcaatttggggaaattgtctctgtcaaagttcagtctggcaagggatgtggttttgttcaatttgggaccagagcatctgctgaagaagccattcagaagatgcaggaaaagatgataggtcaacaagtggtccggatttcatggggtaggactctaacagctagacaggtgatatggcacccgtacatggttatagattcccccgaacaattgtgagattgtgaagatgatgtgtggtgatgtgttaatgccaaatgagggacattcagaacttttaaattggggtaatataaaataatgaaataaaaaatgatatatatttaaaaaaatgtaaatattatatattttagttgtataaaaataaacatttactagtatcttgtaaattttagttgtataaaaataaattttaggtgcacataccaaaatactagttactaatattcaagtttatatatgaatgaatttaatatctctgattagcttaacaagtagctcgtgtaaggagtaatgtatttgcgctgacaatcttggccctaaattgttctaggacttacctggtggctggggaccacagatggatccaaatcaatggagtgcctattatgggtatggacagggttatgaagcctatgcttatggggctgctcatgatccctcattttatgcatatggtgcatatgctggctatgcacaatacccccaacaggtaagctattgatgttaaattcagttagatactgtattggtttctgtgcagagaataattttattgggctactcatgcacatggattgtttatttttaggttgaaggtgctcaagacctatcgggtatgtctgtgcctaccatggaacaaagggaggaattgtatgatcccttggcaatgcctgatgttgataagttaaatgctgcatacctctcagtacatggaagtgccattttagggcggttgccctggcaaaaaacctgttcgacatccttacagcaagcttaatatctaattgtactgcctggtcaattatgtgcattatatgacaatattctgtagccataaatttagtctgcatagatttaaattattgttaatacatacttgagttgatccc

SEQ ID NO: 9958 - DNA, 1201 bp, Glycine max
  Clone ID: 700888972_FLI
gggattggccttatagaaaagaaacttaaaaatcgaattcaatggaagggactagatgtttcaagaccgggtgaggctgatgatagttttgccagtttacaggcagaagttgaaaatttaacgatgaaggagcgccagttagacgaacaaataagggagatgcaagaaagactgcgggatcttagtgaagatgaaaataatgacaagttgctttttgttactgaggaagatataaagaatttgccctgcttccagaatgaaaccttgatagccattaaagctcctcatggaaccactttggaggtccctgatcccgacgaggccgttgattatctgcagaggagatacaggatagtcctcagaagcacaatgggcccaatagatctttaccttgttagtcaatttgaagaaaagtttgaagagattaatggtgctgatgttgcacccaaacttccatcaagtccagatgttaccaaacaacaatcaacagtggtcccagaggatagagggaagcacatagaagtgcagggacaagcagctcctggacctagttcagattttactccctcccaggatttcgtgagtgggatcatgaagattgttccttcagatgttgctagtgaagctgattactggcttttatcagatgctgatgttagcataactgacatgtggagaacagaacctggagttgaatggaatgaactggaaccacttcaagaagattattgtatgactgacgagaacactacaacgccaagtcatccttcaaatgtaggtgaagtgtcttctgcatctaaacctactggaggttgaagcttccaaaggatgcattgtgaatataatagtgaacgtggtgttcctcttccttctgagaacctatgacatctagccatctcccttttgtatcctctctacatagtcctggaggttggattgaaggttccatgaagatgctttctcatgtttctccaagaagttcgatctaggagctaactgagtggccaatcaactggctcattgtacagtaaatattacataacctaagcgaccttagttcaagaaaaaaatctcgctgctttgctgaaccatctttgtatattacataaccctagtcttggctttctagtgtacttagctcgatctcttatgtttaccaagcaataaaaaacacttcggaatgctcccaggcaatgttatc

SEQ ID NO: 9959 - DNA, 697 bp, Glycine max
  Clone ID: 700888996_FLI
ggatgatcaatctgttctggttgcaacttatgaaggagagcacaatcatacacacccttctcaaatggaggtaacaacaggttccaaccgttcagtatcatgttcagcgtctcttagctcttccgcaccaacagttacccttgactggacaaaatccaagtccagcagtgagtctaagaatgtaaatcccaaaactgaatcaccagaagtcccgcaggttttggtagaacagatggctacttccttgaccaaggatcctaatttcagagcagcactagttgccgccatctctggaaaaatgttgcacaataataattaagtagaaaatgagtcaactgtatttaactcattgttaagcagtattctataagtggatcttgtttagagcacatgatctctttgtaaatacaacataggacattgctacgtatgtagagctcctcaatttaatcaatcctttttggtggaatagagctccactcaggatcgatagcatgtctagctgattgtgcatttgctaatcatgctcatctcagtcttctctattcttctgcatctggatgattaaaattaggtttacaattaagttctggcgaagtttctatagcatacaaaagcaaagagaaactttgtttcgaaaagtgcaactctattgagtattgagtattgacaatacaatatctccttgtcattttcc

SEQ ID NO: 9960 - DNA, 947 bp, Glycine max
  Clone ID: 700889004_FLI
gttttctgttttggaccatggacttggtttttaccaaatcaagaaaaggatgagcttttttgggccttcaaatcttgcttggagaaggctcaattttggtggaaacctctcacacaagaaagcatagtttcttttgggttcattctacttggtgtttagagatggtgagaggaaagactcagctgaggcgcatagagaacgccacaagcaggcaagtcaccttttcaaagcggcgtaatgggttgctgaagaaggcctttgaactttctgttctttgtgatgctgaggttgctctcatcattttctctccaagaggaaagctttatgaatttgcaagctcaagcatgcaggacacaattgaacgataccgcaggcataacaggagtgctcaaacagtgaacagatctgatgaacaaaatatgcagcatttgaagcaagaaacagcaaacttgatgaagaagattgagcttcttgaagcttcaaaacggaagctcttgggagaaggtttggggtcatgctctttagaagaactgcaacagatagaacaacagttggaaaggagtgtaagcagtgttcgtgcaagaaagaatcaggtttacaaggaacaaattgatcaactaaaagagaaggaaagagccctatatgctgaaaatgctaggctgtgtgagcagtatggtggtatccagccacagccagcaacaaaggatccgaaagaaattcaaccctatgcagaaagcagtccaagttcagaagtggagactgaattgttcattggactactcaggtctagctattgaacataatttaatccttgcctatgcaaatatcaaataagaagcccaactgcaatgtataaatatcacatgtttcctaatactgagatgaataatattatcgcttgtattatataaagaactttctagccttatgattagggtttaattatt

SEQ ID NO: 9961 - DNA, 3183 bp, Glycine max
  Clone ID: 700889015_FLI
gctgtttctgcttctctctctaccccccactctctctctaaaccaagacggcctcttcctcctccaagccaaactccaactctccgacccccaaaacgccctctccgactggaaccaccgcgacgccaccccatgcaactggaccgccgtcacgtgcgacgccgcaaccggaggcgtcgccactctcgacttctccaacctccaactctccggccccgtccccgccaccaccctctgccgcctccctcgctcgcctccctcaacttttcctacaacaacctcaacgccaccctccccgccgccgcgttctccgcctgcgccgccctcctccacctcgacctttcccagaacctcctctccggcgccatccccgccaccctccccgactccctcgtcacccttgacctctcctgcaacaacttctccggcgatattccggcgagcttcggccagctccggcaactccaatctctctcccttgtcagtaacctcctcgccggaaccctcccctcttccctcggcaatatttcaaccctcaaaatacttcgcctcgcttacaacaccttcgacgccggtcccattccgaaagagttcggaaacctcaaaaatctcgaggagctctggctcgcaggttgcagccttgtgggccccattccaccctctttaggaaggttaagtaatcttttgaacctcgacctgtcgcagaacaacctcgtcggagacatacccgaacaactcgtatcgggtttgcgcaacattgtacaaatcgaactctacgaaaactctctctccggcgcgttgccacgcgccgcgtttacaaacctcgccaacttagaaagattcgatgcctccacgaacgagttgactgggacgattccagaagagttgtgtgggttgaagaaactcgggtcgttgaatttgtacgaaaataagctcgagggttctttgccggagactatagtgaaatcgttgaacttgtacgagttgaagctgttcaacaactcgctcactgggtcgttgccgagtgggttgggtaaaaactcgaagttgcagtctctcgacgtttcttataaccgattctccggcgagattccggcgagattgtgcgacgggggagcgttggaggagctgattctgatatacaattcgttttccgggaggatcccggagactctcgaggaatgcaagagtttgaggagggttcggcttgggaacaataacttttctggcgttgtgcctgaagggttatggggtttgccccatttgtatttgttggagcttgtttataattctctttctgggtcgatttccaattcgatttccggggcttggaacttgtcaatgttgttaatttccgggaataagttttctgggtcgattcctgagggggttggggaattgggtaatcttgaaaagtttgtagctaataataatagtcttactggtcggattccgaaaagtgtgtttaggttgagtcagttggataggcttgttctcggagacaatcagcttttcggagaaattcctgttggagttggtggttgtaagaagctcaatgagcttgatttggcgaataataggttaggtgggagtattcctaaggagttaggggacctgcctgtgcttaattatcttgatctttcagggaatcagttctctggtgagattccaattgagctgcagaagttgaagcctgatttgttgaatttgtcgaacaatcagctttctggggtgattcctcctctttatgctaatgagaattatagaaagagttttcttgggaatcctggtttatgcaaggctctctctggattgtgtccaagcttgggtggtgagagtgagggtaagagcagaaagtatgcgtggattttccggttcatatttgtgcttgctgggattgtgttaattgttggggtggcttggttttacttcaaattccgggacttcaagaagatgaaaaaggggtttcacttttcaaagtggaggtcgtttcataagctgggttttagtgagtttgagattattaaattgctgagtgaggataatgtaatagggagtggagcatctgggaaggtttacaaagttgcgctgagtaatggcgagttggtggcagttaagaaattgtggagagcaactaagatgggaaatgaatctgttgattctgagaaggacggttttgaagttgaggttgaaacattgggaaagattcggcacaagaatattgtgagattatggtgttgctgcaacagtaaagacagcaagctcttggtttatgagtacatgccgaatggaagtcttgctgatttgttgcacaatagcaagaaaagcttgttggattggcccaccagatacaaaattgctattgatgctgccgaggggctctcatatttgcatcatgattgtgttccctccattgttcatagggatgtcaaatctagcaatatcttgctagatgatgaatttggagcaaaagttgccgattttggagttgccaaaatttttaagggagccaaccaaggggcggagtccatgtctgtgattgccggatcttatggttatatcgcaccagaatatgcttatacacttcgggtgaatgaaaagagtgacatttatagctttggtgtggtcattttggagttggtaactgggaagctccctcttgacccagagtatggagaaaatgatctagtaaaatgggttcagtccacattagatcagaaaggactggatgaggtgattgatcccactttggatattcaatttagggaagaaatcagtaaggtactcagcgtggggcttcattgcactaactctcttcctataacccgcccttcaatgcgtggtgtggttaaaaagctgaaggaagtaactgaacttccaaaatccttaagtggaaaactctcttctccttattttcaggaagaggcttcggatattgatcatgagggaagcttagtttgagctagatgctgaaaatcataacagtcagcttcaattttcacttcagctttggtacttaaaatgttagtttttgcataggtaatagtaattgaagcagcaattgtaacaaaatagcaagaaactttccaatttcaatcgtgtctaatgaaattcacaatagaatatattatgttctactttgcattaaactcaagaaattgtaatatgccaatctttatccgt

SEQ ID NO: 9962 - DNA, 1507 bp, Glycine max
  Clone ID: 700889069_FLI
gttgagtagccttttactcctagagaaattttgtagctatagagaggaagccaaagagaccttgattatctttattataataataatggaccaggcgaccacgttcaacaaatatgcctttgcttgtgctgcagttgcttcaatggtatccatcatatctggctatgacacgggtgttatgagtggagcaatgatattcatcaaggatgacattggaatcagtgacacccaacaagaggttctagcaggaatcttgaacctatgtgcattgggggggtccttagctgcgggaagaacctccgattatattggtcgtcgctacacaatcttgttggcctcactcctcttcatggtgggtgcaattctcatggggtatggtccaaactatgcaattctaatgcttggaagatgcattggtggtgttggtgtaggctttgctctcatgatagcaccagtttactcagcagagatttcttctgcatcatcaaggggttttctaacctcgttacccgagctttgcatcggcattgggatcttacttgggtacatatcaaactactttttggggaaattgactttgaggctgggatggagattaatgcttggggtagcagcttttccctcgctggctttggccttggggattctggggatgccagagtccccaaggtggttgacaatgcaaggtcgcctaggggatgcaaagaaagtgttattgcgagtttccaacacggaacacgaggccaagcttcggtttagagaaataaaagttgcaatgaggattaatgattgtgatggtgatgacaacaatgtgaaaccttcttacaagtcacaaggggaaggggtgtggaaagaattgctggtgaggcccacaccggaagtgcgttggatgctaattgcggcagtggggattcacttctttgagcatgcaactggcattgaggcagtgatgttgtatagtcccagaatcttcaagaaagctggtgtcacaagcaaggacaagcttcttcttgcaacggttggtattggcctcacaaagatcattttcttggtcatggctttgtttttgcttgacaaagttggtagaaggcgtcttttacaaatcagcactgggggaatggtttgtgggctcacacttttggggtttagtttgaccatggtggatcgttctagtgaaaagctcttgtgggctttgagccttagtattgtggccatttatgcttatgttgctttctttaatgttgggcttgggcctgttacttgggtttatgcgtcggagatttttcctttgaagttgagggcgcaaggggctagtataggagttgcggtgaatagaaccatgaatgctgtggtttccatgagttttatttcggtctacaaagcgatcactataggtgggagctttttcatgtttgctgggatatctatagtggcttgggtgttcttctactttttccttcctgaaaccaaaggtgtgcccttggaagagatggagatggttttcagc

SEQ ID NO: 9963 - DNA, 1589 bp, Glycine max
  Clone ID: 700889087_FLI
tcttagtggattggatcattgtcatagtcgtggtgtcctccaccgcgacataaagggctcaaatcttctcattgacaataatggcatcttaaagattgcagattttggtctggcaaattttattgacccccatcacaaggttccattgaccagccgtgtagtaactctgtggtatagaccaccagaactcttacttggagcatctaattacggagttgctgtggatttgtggagcactggttgcatactgggggaactgtatcgtagcagacctatattacctggaaaaacagaggttgaacaattgcataggatttttaaactttgtggctcaccatctgaggactattggtgcaagctgcggacgccacattcaacagtattcaggcctcctcaccattataggcgttgtgttgctgaaacatttaaagaatatccatctgctgccacaaggcttatcgaaaccctactttctttagatcccacacttcgaggaacagcagctgcagcccttaagagtgagttcttttcatcggaaccccttccttgtgatccatcaagcttaccaaaatatcctcccagcaaagagattgacactaaattgtgggaagaagcaacaaggcatggagctgatagggaaaaggagcaaaaatttagaccaggaggtcgacaagagaaagaacctcagacatttatattatccaaagacagtgccgactcctgcatatcaatgcagcaagggcaacgccttccaaactcaaggagccggaatgagttcttcaatcctcacagagaacctgtgtctggacatttggtttttccacaaaaacagtcagaagatcataaagaaacgctaaattatttctccggccctctttatcagaggcctttgcattcaggtccattggttccaggttatggctgtgaaatggttggaagggaagccggtgaacggcggcctcatgtttcaaacaaagtcaacctaccaaaactatctgggttagtggcatctaggacttcttcattgtctggagatcaaaaagaaaatccagttccctcgaggcctcgggaaacaattgaagtacaaatatctttggagtcaactaatggatcagagtcaagaagaaggcatgataccaaacaccattctcagagaattgatcccaggaaaattgaaaatggaaaagtttcaactgaaaccttaattcaggatgggcatggatccatgggaaacaatatctaccacctctctggtccgttactggtttcttcaaacaacatagatcagatgctcaaagagcgtgatcgaaagatccaagaatattcaagacgagcaagaatgtacaagtctggtgagatagctcatgcaaagcaaaattaggatgattcatagtcaattacaattttttttccaattacgcagctagttacattttttaatgaccgtgatatttatctcaaaattatagaaagagaggtaaagggtggaaagtgtgttcatgcacgcttctcttgttaattacatatatagtgtaaattgctaataagaatttgatgttccttccattattcatgttttatccttatgt

SEQ ID NO: 9964 - DNA, 1085 bp, Glycine max
  Clone ID: 700889116_FLI
atgagagtgggcatggagggagtgagaagagggaagggatgaaaaggagtgctgggggtgagattgcaccaactacaaggcactataggagtgtctccatggatagtttcattgggaagttgaatttcggtgacgagtcgccgaagctgcctccttcgccggggcagagaggtggtttgatgtcgcctgcgggtggaattgatgggaattcggcggccttcagcttggagtttggaaatggggagtttagtgggcctgaattgaagaaaattatggccaatgaaaagcttgcggagattgccttgaccgatccaaagcgtgcgaaaaggattttggccaaccggcaatcggctgcgcgatccaaagagcgaaagatgcggtacatttcggagctagaacacaaggttcagactctacagacagaagccaccacactatctgcacagcttactctgttacagagagattctgctggactcactaaccagaatagcgagttgaagtttcgccttcaatctatggaacagcaagcaaagctccgagatgctctaaatgaggctcttactgctgaagttcaaagattaaagattgctacagctgaactaagtagcgattcgcatggttctagctgtttgattcctcaacattctgtcaaccctctgatgttccagcagcagcctccttttgcatcccaacaaaacattcatcttcaacagcagcagcaccgccagaatggtaatgccaactcaaattctgacttaaaacaatagtttgggaaggagttcctgcagctgcatggttgtttctttatatattcgctgctgattcattgcactctcggtttcgcatatttacaaaaggttttccttagttgttatggtctcaagtttgattcgcattacctgtccagctcggacagaaagtccatatacaagttctaattcctgtcttatatctagattatcatagagcatatttaatttcagtatatatattaaattgtaagcattatttggacattttatgatgacattttagagaacctgttcaactttccttttgtaaagaatgactattctgttgtg

SEQ ID NO: 9965 - DNA, 1474 bp, Glycine max
  Clone ID: 700889134_FLI
gaccgacagttggattgtagtggaaaagatgaaatgagagaattattatgtgtctataataatagttattgaaagttgtgaggaaggaggaggatggtgtccccgatgtcaacggttctggtgacgggaggggcaggcttcatcggatcccacacggtgcttcagcttctgaagcagggcttcagggtttccatcatcgacaaccttgacaattccctcatcgaagccgttcacagggttcgccgcctggtcggtcctcatctttccaacaacctcaccttcttccacggagatctccgcaatgttcaggatttggaggcagtgttctcgaaaagcaaacactgaaacaggtttgatgcggtgatccactttgctgggctgaaaggtgtcggcgaaagcgttgcaaagccccggcgttattacgacaacaatctagtggggactataaacctttttgaagcaatggctaaatacaagtgtaaaaaaatggttatatcatcatcggcaactgtttatggggaagctgatagagtcccatgtgtggaggaggaggtgcatttgcaggccatgaatccgtatggaagaacaaagctgttcgtagaagaaatagccagagacatccagagggcggagacagaatggaggatcattctgcttcgatacttcaatccggttggtgcccacgagagtggacagattggggaagatccaaggggaatccccaataacctcatgccttacattcaccaagtcgccgttggcagattgcctcagctcaatgtttatggtcatgactatcccactaaagatggcaccccggtcactcactcactcactcactcttgtctttcattctcttttcttccttccttccttccttcttcagcttacaacaatatatctgcagatccgggactatatccatgtaatggacttggcagatggccacattgctgccctccgaaagctttttgcaacagaccacatcggttgtagtgcctacaatcttggaactgggcgtggcacatccgtgcttgaaatggttgctgcctttgaaaaagcttccggcaagaaaattccattaaaaatgtgtcccagaagacccggggatgctactgctgtatatgcatctacggacaaggctgagaaagaacttggttggaaggcaaaatacggtatagaggaaatgtgcagggatttgtggaattggacaagcaaaaatccatggggataccaggggaagcattaaatgaaattgggttgtacttggaggaggtcttcctccaccatatcatatcatctccactccagatataatatgttgatgtttcttttgttgatacaattgattgattgattctttacactacgtatgttgttggcctaaataattgtctgattataattttttatattgtagaaaggaccactttgatgagtcatatatgagaattaatttaaatgatttcccacg

SEQ ID NO: 9966 - DNA, 2028 bp, Glycine max
  Clone ID: 700889140_FLI
tgagaattcttggaggtggtttggcttctggagctgctgctccatctgatgtgcataatcttggtaggatgggaaatcaaattccaggcagtgctcttcaggctccttttgtcgatccaatgtatcttcagtacctgaggacgtctgagtttgctgcggcacaacttgctgctctcaatgacccctctgtggacaggaactacttaggcaattcatacatgaatttacttgagcttcagaaagcttatcttgggtctatcctctcgcctcaaaaatcccaatacaatgtaccgctgggtggtaaatcaggcagctccactcctcatggttattatggaaatcctgcatatggtgtcgggatgtcttacccaggaagtccaatggcaaactctgttgtatccacttccccagttggatctgcaagtcctgttaggcacaatgaactgaatatgcgttttgcttctggaatgaggaatttggccggggtcatgggaccttggcatgcagatactgggaacattgatgaaagttttgcttcttctctgttggaagagtttaaaaccaataaaacaaagtgttttgagctctctgaaattgcgggtcatgttgttgaattcagtgcggatcaatatgggagtcgatttattcaacaaaagcttgaaacagctactacagaagaaaaaaacatggtttatcaggaaatcatgccacattcccttgctttgatgactgatgtctttggtaattatgtggttcaaaagttttttgagcatggacttgcatcccagagaagagaattagccaacaaacttcttggtcatgttctgacacttagccttcaaatgtatggttgccgtgtcatccagaaggccattgaagttgttgatctggatcagaagatagagatggttcaagagcttgatggtaatgtcatgcgctgtgtacgcgatcagaatggtaatcatgtcattcagaagtgtattgaatgtgtccctgaagatgctatccactttattgtctcaacattttttgatcaagttgtgaccctatcaacacatccgtatggttgccgggtgatacagagagtgctggaacattgcaaagaccctacaacacagcagaaagttatggatgaaattttaggtgcagttagcatgttagctcaggatcagtatggcaactacgttgttcagcatgtgctggaacatgggaagcctcatgagcgttcttgtataataaaggaattagcaggcaagatagttcaaatgagtcaacagaagtttgcctccaatgttgtagagaaatgtttgacctttggaggtccttctgagcgccaattactagtgagtgagatgcttgggaccaccgatgaaaatgagcctcttcaggcgatgatgaaagatcaatttgcaaattacgttgtacaaaaggtgctggaaacttgtgatgatcaacaacgtgagctgattctttcccgaattaaggttcatttgaatgcattgaaaaagtacacctatggaaaacacatcgtcacgcgtgtagaaaaacttgttgctgctggagaaaggagaatagctgctcaggctcctcctcaacctgcttaggtggcttagaaaaataatcttgtacagctaactgaggctagtgtgagcttctttctttgtctcccagatcaagaggttatgtttgcctatctctcaagatgggttgtagccaattggaaataaagttgtcggttgtattgcagaactgtacattttgtagcttttaagtttatacaaagagtttaagctaagcgagatgaggctctcatcagttgttttaatgcacctgatgccccctgctgcagaggagataaagtactatacaagcctttttatggtgtaaagattataaaatggtgaggtagtctataagttgacgacatgactgtacaaaatgatgatgttcttgtttagacgaggccagttttttcttcttttcttttaatcatctatggttattgactttgtttcccctttcaagagt

SEQ ID NO: 9967 - DNA, 539 bp, Glycine max
  Clone ID: 700889221_FLI
gcagcatattgtgtgaaagctgatcgatgtgcttgggagagcatctctaatcatctttgttctagccttcacaatacttgtcagcgcagtctcactaggtggagttggcattgtagcaatggtcaaaaagattgaaaatcacgagtatatgggatttgatgacctctgcacatatgattcatagcccatttcactaaattattttatgctttgttttgtctcaagttcccaataaaggagccaagagaacctaggtcgccaaaattgacttaaggtatgcttggattcccgtaaaaaacagtggacttgaaagcaatgcatacatgcttctatgtatttatctgggttttttgtgaggaaaaaaatgttagatgttggacactatttcaaacactcacttgtgctctgtgtgtgcctgggctcttgttaagaggtatgatatgtacatttatatttttgttgctgctaagacatgtattgatgacactgttgaagattgagaaactgaaatcatgttattttaatattctttatgtcct

SEQ ID NO: 9968 - DNA, 1723 bp, Glycine max
  Clone ID: 700889263_FLI
gaaacatggcacgtgtgcacattggaccatactgagaaacctaacaaatatggcaagtattggtgctggtgcttctggtctttggaggtggaggtgcttgacctacttggggccaaggagattgcggttcgagcttgggatgaaggtctcaacactcagcctgaacacctcatttggaatgttatgggcatgatgaataactgctggttcagagtgaaaacaaatgtgtgcaagccccacaagggtgagattggcatagtgtttgagcatccaacccaaccaggcaaccaacccggtggctggatggcaaaggaaaaacatttggaaaaatcacaaaagccaaaaccaaccctaaaaaagagtgtctccacaccattcatgaacacttcctcaaaaatgttctccatctccgaagtgaaaaaacattccaaccctgactctgcttggatcattgtccacggtcacgtctatgattgcacccgcttcctcaaagatcaccccggtggtactgacagcatcctcatcaatgctggcaccgactgcaccgaagagtttgacgccatccattctgacaaagcaaaaaaattgcttgaagattaccgaatcggggagctcatcaccactggctacacctcagactcatcgcccaacaactccgtgcatggcaattccgaattcactcatttggcccctattaaggaaactacaacaccaccatcacgtagtgtggctctcaacccacgcgagaaaatcccatgcaagctcgtgtcaaagacctccatttctcatgacgcgaggctattccgttttgcattaccctcagaggaccaactcttgggattatccgtggggaaacacattttcttgtgtgccaccatcgacggcaagctatgcatgcgagcctacactccaacaagtagtgtggatgaagtgggtttctttgatctactcatcaaggtgtacttcaaaggtgtgcatcccaagtttccaaatggaggactcatgtctcaacatttggactctctacccattggatccatgttggacgtgaagggcccattaggtcacatagaatacaccggaagaggcaacttcatggttcatggaaaaccaagattcgccaagaggttggccatgttggctggtggaactgggatcacgcccatttaccaagtggcgcaagcgattttgaaggacccagaggaccacaccgaaatgcatgtagtgtatgcgaatcgcacagaggatgatatattactgagggaggagttggatgagtgggcgaagatacataatgaccggttcaagctatggtacgtggtggaaatcgcaaaggaagggtggaaatacagtgtagggttcatcacagagagtatcacgagggagcaccttccaaaagcgtcgagggattccttggctttgacatgtgggccaccacccatgattcagtttgcagtgcagcctaatttggagaaaatgggatatgatatcaagaacgatttgcttgtgttttagggcatggagaagtagctagattgctagattgtgttgtgtattgtatttgtttgtgtatcgggtgttattggagtattaatgtttgtttcattctttataagggtaaaaaaagaagtgaaaaattgtatatgaaccgagattgttgggaagtaactcttcatcccttctcacgctttaatgtagacaggtacgtcaagatttttttact

SEQ ID NO: 9969 - DNA, 738 bp, Glycine max
  Clone ID: 700889272_FLI
ctttactcgtcatattaccaatattgacatttgcattccacaagttctgccagagacgttttgagccagcatttaggaagtaccctcttgaggaagcaatgtcaaaggatttattagagaagagcacagaacctgacttgaacatagaggcttatttggctgatgcttacttgcacccaatcttcaggtcatttgaggtagacgacgaattggttgaagtcagagtagataatcaccaaactaatgtagctgattcccaaccaagtgagcctagttcaccatctccaccacatcatgtgcaacaaccatccccaccccatcatatccatgaaccatctccacctcaatatagtgagtatcaaacttcaccaccaagttattactaccaataccatcctccatccccaccccattatgtttatcaatactaagttgagccttcttgaaccagtgcatatcaattaaccatgttgcttgagaccccttaccaaaaatttagtgtttcaatcaacttagatatgttttttttatttttatctatccatcgcaaatgtaaatgtttattttttccttacatgtaaatgctttggattcttctaaatatgcggtggctaaagtaggcaggattttacttgatcaagctgctagagaggtttttatgtttgccaaattgatttgttttgattaatagggtgattgccttgaatattgctattatgaaagtgattcaatttatgc

SEQ ID NO: 9970 - DNA, 1024 bp, Glycine max
  Clone ID: 700889301_FLI
tccgccctcccggaacacctccacgacggtctcctccacaccgcctgcggcacgccggccttcaccgcgccagagatcctccgccgcgtcggctacgacggctcaaaagccgacgcctggtcctgcggcgtcatcctctacaacctcctcgccggccacctccccttcgacgactccaacatccccgccatgtgccggcgcatctcccgccgcgactaccagttcccggcatggatctcgaaatccgcacggagcctcatttaccaattgctcgacccaaaccctataacacgaatttcgttagaaaaagtttgcgataacaataaatggttcaagaataattcaatggtggaagtgaaagagagtgtttgggagtctgatttgtataacaagtgctgcgacggtggttataaatcggggatgaacgcatttgacataatatcgatgtcgtcggggttggatttgcgagggttgttcgaaacgacgtcggagaaggggagaaggagggagaagaggttcacttcggataaaaaagtggaaacagtggaagcgaaggtgaaggaagttggagagaaattagggtttaggattgagatagggaagaacggtgctattgggttgggaaaggggaaggtgggtgttgtggttgaggtgtttgagattgtggctgacttgttgcttgtggcggtcaaagtggtggatggtgggctggagtttgaggagcttcattgggatgattggagaattggccttcaagatcttgttctctcatggcatgatgttggattggagctttagagaatacagtctaaggttttgtacagatggtcctagtagtcctttatgtttatgtgtttggttccttttgaatcagtaaaacagttttatgtcctctttttgttcatatttatatttatactagcctctgtgtgtgagagaatgagaaggaagaagccaattcttaactcgttaagaatgaataagatgtttcataatgaaaaaattagtaattggtttgatgaac

SEQ ID NO: 9971 - DNA, 691 bp, Glycine max
  Clone ID: 700889335_FLI
gattggatgagtgtaattgagaaagaagactggaaaagtgttacggatttggttacaaatgcaaagcagtttgtgtcttcagtgcaagatgtagctcgcagacttgctgattatgcaaatttcaggagaaacaaaagtttagctgttggtactgctgataaggagttgccagttgccactgaagctcctctgccctccaaagctgcaaaggagaattcaggtgtcacgaaagttgagggaactaaacctgcagtgatcgaggagttatttatacctgggactgtttactatcttaagaggaacctggcatcccaaaatgttggaaaggattttttcaccctttacaaaagggagcctggtgagcatttccaaaaggtaatcttttcggggaattttatcacagaccacagatgtgatagccattattatgctttgagagatgtccttaaaggtttgccatggtgtggaaaggaaggtatatttaaatagaaaatgttaattattttaatttaatttttccatatcattttattgtaataaaactgtacattgtgtaactaattttctgtgctttgggggtgccttacagttctttagtctgtgcggaggtgttaacaatagcacagtagattagaagtttggcaattttggctaaatacattaaaaattgtggatagtttggttatatcct

SEQ ID NO: 9972 - DNA, 619 bp, Glycine max
  Clone ID: 700889362_FLI
gggtgaagagcactgtgagagtgccggcgattagttcaaaagtcgccgatattccaccggacgagtactcgtggaggaagtacggtcagaaaccgatcaagggttccccatacccaaggtgagtgatatttaattttgaccgttgatttagttgacttttatctcatcaagactcgttccctgacgtcgattttttttatcatcaggggttactacaagtgcagcacgattagagggtgcccagcgaggaagcacgtggagcgcgcaccagacgatcctgcaatgctgatagtgacgtacgagggggagcacaggcacgcggttcaggctgcgatgcaggagaacccagccggggtggtggggttggtgttcgagtcaacgtagagaatgagaaagaaggtccaataaaaaaataataataaatttggaagtggaggacttttttaaaaaatatatatatataatttttggaaagtgtagtgggaagaaccaagaagtaaggacaatggctgccttgtaaatttgttttatttttatctttattattattgttatattttagttgtcatagactcgtagagaggtgaaaaatggaatctcaagttgtttatttatttct

SEQ ID NO: 9973 - DNA, 742 bp, Glycine max
  Clone ID: 700889465_FLI
gttagaaacctgaaagatggctactcttcctcttctccgaccatgctgcttccttcccactcccaccctcaaaccctcactcacaagacccacacccttcttacctctcaaatcgaagaagaaccctcaaaacggcgccgttgggactcgcatgtcgaacaccgcaactccaccaccgacggagcggctaatctcaatcgcatcctacgcactcccattcttcaactccctccagtacggccgctacctcctggcgcagaaccctaccctcgccgtcctcttcgaccccatcgtgcccctcctcgccttctacagatccatcccttactcctccttcgtcgccttcttcgcgctctacttggggatcgtcagaaaccctagtttcccccgctacgtcaggttcaacgccatgcaggccgtcaccctggacgtcctcctcgtcctccccctcctcttccaccgcatcttctcccccgcccgcggcggccccatcctcgtctggtccagcaacgccattttcatcttcagcctcatctgcttcgtttacagtgttgcttcttgcgtcttgggacgcacgccgcacttgccttttgtcgccgacgctgcttctaggcaaatttgattttcccttttctttgtgctttcttccttgtatgcatacaggttgcaatatgaattctaaagtaattattattgtaaaatgtatgtatttcaattaaatacaatctatcggtttattttt

SEQ ID NO: 9974 - DNA, 582 bp, Glycine max
  Clone ID: 700889518_FLI
gacggatttgtcattcggaacaaagctagggaaaatcctgaaaacccttctattgaactgggaccagaatttaagaaggttagcaacttcttgggccgcttcaagtcaattcctagtatcgttgagcttgacagtctaaaagtggctggtgatgtatggtttggagctggtgttatcctcaaggggaaagtcagcattgtatcaaagcccggtgtaaagctggaagttcccgacggtgttgccattgtagacaaggaaattaatggcccagaggacctgtgaggaagacagatgactttaactaaagaatgaattgtatcagaccgtatcttatctatctatatggtctagtgtttttactactcccatgtttgataggtaaagaaaataagaagtctttttgttgagaggatgtcttggtgtggatctttactccattgtcttggaattctgtttagaacagcaaaaaaatgacaagtttggtgataagtttcatgtcatttggtacaatagcattgtgtccccctgtcgaacaaatcaaggcctaagaaaaaagaagtgttaaaatcaataatccatccg

SEQ ID NO: 9975 - DNA, 951 bp, Glycine max
  Clone ID: 700889682_FLI
atctctctctctcttcattcttgaggtcttctttcattttataccattcttcttatttctttttaccaatcactacttattcaatccaaggatggcttccgccggcgatcttttcaggcatggtttgccggaagttggtggtgccgggaagttacacgtgcttgctgttgatgacagccacgtggaccgcaaggtgatcgagcggttgctcaaaatctcgtcttgcaaagtgacggtggtggaaagtggtagcagggctctacagtatctggggttggatggagaaaaaagttccattggttttgatagtgtggatgttaatttgataatgacggattattccatgccggggatgacaggatacgaattgctcaaaaagattaaggagtcatctgtttttagagaggttccagtggtggttatgtcgtctgagaatatcttgaccagaattgatagttgcttggaggaaggagcagaggagtttctgttgaaacctgtcaagttgtcagatgtaaaacgcgtaacagatttcatcatgcgaggtgaagggatgaaaggagtaaaaagatctaaaaaaagaagccgatcagatgattgcattccatctctatcaactgcatttgcatcagtttctcatccatgtgatctatcatcacctccatcaccatgtgtatcgcaatcgaagaaatctagattgagcatatagattgagcagcaatgtttatgtctccatttttgcctaaccattgttcatattcaaaagcctctgatgtaatttgcgtttttacactaaacattgctgacaacgactactagaattaggaatgaggaagaggatgacagagtcattttgttctttagttcggtcgcttacatatttttttgctgattttgctgctgtacagagaaagttcattaaattaatgaaaccctctattttgaggggtcttc

SEQ ID NO: 9976 - DNA, 949 bp, Glycine max
  Clone ID: 700889690_FLI
attgccttggatgttgccagagggatggagtatctccatactctggctcaccaaagcttcattcacagagatcttaagccgtcaaatatcttgcttgctgatgatttcaaagcaaaagtctccgattttgggttggtaaaacttgctcctgaaggggaaaaagcatctgtagtgacccggcttgcagggacgtttggatatttggcgccagaatatgcagtgacaggaaaaatcactaccaaagcagatgttttcagttttggggttgtgctaatggagttgttgactggattaatggcacttgatgaggatagacctgaggaaagccaatacttggcagcatggttctggcatataaaatcagataagaagaaactaatggctgccatcgatcctgcccttgatgtaaaagaagaaacatttgagagcgtctccatcattgctgagctagcagggcactgcactgcaagagaaccaagccaacggccagatatgggtcatgccgtgaatgtgttggcaccgcttgtcgaaaaatggaaaccctttgatgatgacaccgaggagtattccggcattgattatagccttccccttaaccagatggtgaagggatggcaagaggcagaaggaaaggacttaagttatatggaccttgaagacagtaagagtagtatccctgcaaggcctactggatttgcagattcttttacttctgctgatggccggtgaaacaaattgtttggtgtacccgttttccttttgattttccaatagatgtagatagatagcatgctcttttctttctgtctgtcttaattggcaaagtgtctagtgccagtgttataatagtgtttgagtaaagagatttcacatgcacttgaaatctcagttgcatgctttgtattttccaccaagacatttaagtgttaatggttgtagatattgcgcc

SEQ ID NO: 9977 - DNA, 831 bp, Glycine max
  Clone ID: 700889715_FLI
tgttcgttttgtatctgatatctcggtctgagtggcagatccgcgccgatggtgtgagcgaaaacgttattggggcagaaataaaaaaccatagaatagatagagttattactccctataacatgtggcagtgatttggagatggcagacttaccagggtatcttcatgcctgtttgaacacagggaagcttgcctccttggcaattttggtgtctggaggaatcgtcttgcaaattttggcatgtgccttgtataataactggtggccgatgctgagtgtgttaacgtatgtgcttcttccaatgcctttgctgttctttgcggggtctgatgattctatattttctgaatctgataatagctgggtaaattttactaagttcttgactggagcctcaactgtgggaggcattgccattccaagcatattaaagcatgctggggttatcggttggggagcctttgcaatggaactctcttcctactttgtgtttggaatggccgtaatatgttacctttggatgagtggtgatgatgattacagtatcctatgagatgagactttagcggggcttgcttcgtcagtgtaaaaatggatttactcctttcatgtgctattattgatttccttgcttttgtgagcttcacttcaacatatttcttttcccgtttaaaattttttggcagcctcaacaaatcacagttaatgatttgttgatgcccaattgtaaaggagctttcagccaaatatacgggaattgtatgtaatagatgatttaatgtctgttaaggaatgaggcagcttggttgcgccttcttattgtgatttt

SEQ ID NO: 9978 - DNA, 743 bp, Glycine max
  Clone ID: 700889717_FLI
ttttgatcccaaaatatcagacttcggcttggctcgatcttttttgggagatcaattcgacgcaaagacaaatagagtggctggcacatatggttacatacctcctgagtatgctgcacgtgggcatttctcagtgaaatcagatgtctttagttatggtgtgatactactagagattgtaagtgggaagaaaaacagagaattttcagacccacaacactacaataatcttctcgggcatgcatggagattatggaccgaagggagggcgctggaactattagatgaagtgttaggagaacaatgcacactctctgaaatcatacgatgcatacaaataggcctactatgtgtgcaacaaagaccagaagatagaccagacatgtcatccgtgggtttattcttgaatggtgataaattattgtcaaagcctaaggttccgggtttttacaccgaaaaggatgttacatctgaagcaaattcttcatcggcaaatcacaaactgtgctcagttaatgaactgtccatcacaatattagatgcaagatagggaatggaggcaagcaaatgttagggcttcaccttataatgtgaaacataacagctattttcattatacataactagtgaaagttctattatgattgccagctttgcctttgtttcatgtatccaaataagtgtatgagataagcatactttgaagacaataatattgctatctgcactagaatagagttctg

SEQ ID NO: 9979 - DNA, 1014 bp, Glycine max
  Clone ID: 700889724_FLI
acaaccactcttaatttctctctgccttgctcatttacacacctctccaacctttcactttcagctttatttgaatccctctctctcctttccaaatggccagcgttgaggttgcacatcaaacaccaacaacagttccagaaaatgaaacaaccgaggtaatcaagacccaggaaacaaccccggaaccagtaccagccactgaggctcctgcaacagaacaagcagcagctgaggttcctgctcaagaagaacaacaagcaactgaggttcctgccccagaatcaaccaccgaagcaccaaaggaagaaaccaccgaagcaccaacaacagaaacagtagaaacaacaactacagaagaagccaagccagaggagcctaaagaagttgcagttgagaccgaggaggtggtgacaaaggagacagaggaagagaagccagcagcagaagagaaatcagaggagaaaactgaagaagtgaaagaagaagcagaagagcctaaagaaactactgaaacagaaacagaatcagcaccagcagcaaccacagaggaagagaacaaaccagctgagacagtggaagccccagtagaggttcctgttgagaaaactgaagcttagacttatggacagtgtgagtgagaaaaacaagtttaaaaatggtcctagttgtggggatcattaggtctaccattttgcatgtcatgttgaaaagcttttttttttatttatttctttagtttactttattattaatatattattattatatgatggttaagtctttggttgtattatggagggtatacctacgtgtgagcacaacacttggctccacatcagcgtgcttaccacgtggtgacatgagaaattctaggagttgtgtattgaagtgagcaagctgctgctggtgctggagtttagggatgagggtttattttattggcagggttacatgagtttgtgatgatgtgttattgtgtttctttaggtttgaataaatgatatttacttt

SEQ ID NO: 9980 - DNA, 1479 bp, Glycine max
  Clone ID: 700889733_FLI
ataagtcatcgcttgtgtgggaaaactgccttctattcatgtgcatcatcctgtattaaatatataacgtgttcgtttcattttcttgatgttaggggtggaaattttttatttttcatgtgctatttcatgtacagtattgttgtattgggatgcgaattataatagtactaattgttattaaaaaccctaaacataataaaatgggctaagtagcaaattgtttcagtagtcatgttttttgtactaattttatttgttttcaactcagtttaaggtggttgtgttattgttcacatggagaaaataaacagtgggggttcttccatcagaaggcgttcattgagcatatcaagtcacataagccatcatacagacaatgatgatgatgctgaatgtgagagtgtttcagaggctggagacattggagatcgtgttactattcgaagctgcagcttccgcttgtcttttgacaacaggtcagaaaatgaagctgttgttgtttccaattcagaggaacacagattgcatcccaactctgttaggcctttgcctcctgcactcacatctgaagacaccaaacatgatcctcataaacgtttgccagtgttgctggactatgcttcatttatgattcctttagcagtttttggaattcttggggtcttcacaagatatttgctgcagaagttatttggccctggggttgcccatgtgacaagcgaccaaagtattctttatgttgatcttccttctaatatggtatatttctcgttggctattccatcatatttgggattgaaactgccaagagtttcagggggtttctcaacaggctgaatattagttcaggcaaagaaggctctaagatctttatcaactgcaaagtagacagctaccgctgtcagttgatagttatggcgatatccgtggttgcgttgggcatattatggggtgtcagtggtgcattagttaaggctgagttcaagaatggtggcaatgttgctcagttatggtttgcttgcatggttggacctataggtgtgtggattagatggttcttagccaggctcaacggacgtggattgggaaaggcagggttgtttaaatggattccatttggaaccttaattgccaatgtatcagctgcttgtattatggctgcactttccactgtgaagaatgcagtaaacaccagggattgtgatactgctgtagcgggaatacaatttggtctgatggggtgtctgagtactgtctctacattcgctgcagagtttaatgcgatgagagaaagcagtcgccctatgagagcatatgcatatgctatcattacagtttttttgtcattctctttaggaatcttgatatactgcatacctgtttggacaaaggggttagatattgacacatagcaattgagtaaggcaatcatgttttttgggcactttattggttgaaacatagctgtttcaggac

SEQ ID NO: 9981 - DNA, 859 bp, Glycine max
  Clone ID: 700889742_FLI
cctatcccaccggattccacccccgctccaaatccgacgttacgcgctggcagagcttccttcgagagcgtcagcgccacgcgctcttctgcttcgccggcgcgccgcgccgcgccttccccgacgactttaggggacttctgctgagtcagtgccgcgactcgggcgagtcgtgccgcgccgtgaactgcaccgggacgcggtgctccaacggcacgtcggcgattatggaaacctttctagactcggatttctgcttgcagccgagaggggacagcttcacgcgccgctccatttttgactgcatggtggccggttcgattccggtttttttctggcggcgaaccgcgtatttgcagtacgagtggttcttgccggtcgaaccggagagttattcggttttcatagaccggaacgcggtgaagaatggaaccttaaccgtgaaaaacgtgctcgagaagttcacgaaagaggaggtgaggaagatgagggagaaagtaattgagtacattccgaggttggtttacgcaaacacgaaacaagggttagatggtgtggaggacgctttcgatgttgccatcgaaggagtgttcaaaaggattaaggaacaggaacaaccgcagtttcataagtggaaataacggcgatgcaatgcttcttcgttcgtcttagatttaggagaattattataaataaataaatgaaaaaatacgatatgttttattcaggtgaattccctaggatagagtttcatttttttttctttctattttcttacacgtgttatttatatataggtgcacaatgagatcgatgtatgtaccatattaatattgatatttatattgcgattcttttc

SEQ ID NO: 9982 - DNA, 1052 bp, Glycine max
  Clone ID: 700889792_FLI
cttggatggggtgtacccaacaagattgacatgattgctctttcatttgttcgtaaaggctcggatcttgttaatgtccgcaaggttctggggccacatgcaaagaatattcagttgatgtcaaaggttgagaatcaggagggagtcctgaattttgacgaaatcctgcgggagactgatgcattcatggtggcacgtggtgatcttggaatggagatcccagtagaaaagattttcctggcacagaagatgatgatatacaagtgtaatcttgttgggaagccagtggtgactgctacccaaatgcttgaatcaatgataaagtctcccaggccaacccgagctgaagcaactgatgtagctaatgcagttcttgatggaacagattgtgtgatgcttagtggtgaaagtgctgctggggcatacccagaacttgctgtgaaaatcatggctcgcatttgcattgaagcagaatcatcccttgactatggtgccatcttcaaagagatgataaggtctaccccattgcctatgagtccattggagagccttgcatcatctgctgtccgcacagcaaacaaggccaaagcaaaactcattgttgtgctgacacgtggcgggtctacagccaagttagttgccaagtataggccagcggttccaatattgtcggtggtggttccagtgttgagcacggactcatttgattggacctgcagtgatgagacgccagcaaggcacagcctgatatacaggggcttgattcctatactgggcgagggatctgcaaaggctaccgatgcagaatccacagaggtcattctcgaagctgctcttaagtccgcaacagaaagggccctttgtaagcctggtgatgcagttgttgccctgcatcgtattggagctgcctctgtcataaagatctgcatagtcaaataatgcatgctcaactcaacgtgccgccaactaatgcagggttatgttttgccttttatttctttctttctgctgtttatccgtatcataaaatggaggatttagttactagctgt

SEQ ID NO: 9983 - DNA, 1726 bp, Glycine max
  Clone ID: 700889819_FLI
acaaggtgtgctggaagggaggatgcttcagctccgacattcttgccgctatcgagagggcaatattggacaacgtaaacgttctgtctctgtcgctcggtggtggcatgtcggattattacagagacagtgtcgctattggagctttttccgctatggagaatgggattttagtttcatgctccgctgggaacgcgggccccagtccctacagtctctccaatgtggctccatggataactaccgtgggcgctggtacactggatcgtgacttccccgcttacgttgcgctcgggaatggccttaacttctccggcgtttcgctctatcgcggtaacgctgtgccggattctcctctgccttttgtttatgcgggtaatgtgagtaacggcgctatgaatgggaacttgtgtatcacgggaacgttgtctcctgagaaagttgctgggaagattgttttgtgtgaccgtgggttaactgctagggttcagaaaggctccgtggtgaaatccgccggagcgttgggcatggtgctcagcaacaccgctgccaacggcgaggagctggtggcggatgctcatttgttacctgccaccgcggttgggcagaaagccggtgacgctattaagaagtatttgttttctgatgcgaaaccgacggtgaagattttgtttgaaggcacaaagttggggattcagccatctcctgtggtggcagcgtttagctctagaggacccaactcgatcaccccgcagatccttaagccagatcttatcgcgccaggtgtcaacatcctagccgggtggtccaaggcggtgggacccaccgggttacccgttgataacaggcgcgtggatttcaacatcatttctggcacgtccatgtcgtgccctcacgtgagcggcttagccgcgctgatcaagtcggctcaccctgattggagcccagccgcggtccgatcggctcttatgacaacggcttacacagtttacaaaaccggtgagaagctgcaagacagcgcaacgggaaagccctccacgccgttcgatcacggttccggacacgtggaccccgtcgctgccctcaatccaggactcgtctacgatctaacggtggatgattatttaggttttctctgcgcgttaaactactcagcttccgagatcaacacattggccaagagaaaattccagtgcgacgcgggcaagcagtacagtgtgaccgacctcaactacccttcgtttgcggtgttgtttgaatctgggggcgtggttaagcacacgcggactctcacgaacgtggggcccgcgggaacttacaaagcttcagtaacgtcagatatggcttccgtgaaaatctcggttgaaccgcaagtgctgagtttcaaggaaaatgaaaaaaaatcattcacggtcacattttcatcctcgggttcgccacagcaaagagtgaacgcttttggaagggtagaatggtccgatgggaagcacgtggttggaaccccaatttcgattaattggggttgatgcaaggttcatcactcactcgaatagggggttgacattgatgatagcggggacctcgtgcttgattggtgttggttctgtttgttccctgggagaaatgttgcaaaggggaaaaaatgtttggctcatgtgtttcttttcttcccggtgtacagcgttctaatcattgatgaatatttttcgtcgaccatcttgacatt

SEQ ID NO: 9984 - DNA, 976 bp, Glycine max
  Clone ID: 700889833_FLI
gtccgagaatggaaacagacctaaacagagggtaacaaaacaagcaaacaccatggtgattaagtctgtgttgttcagcttcattttccccccgccaccttctctggtggtttgggggttgactgtgacaagcttcctgatactggctaatgctttcttgtcagaaattagagggaagcatttgaactattcaaagttttggaatgctaatccctctgcagaaaagcaggtcaagttgtctagcaaagctggcatgcttttgctgtacactcctgcttttcttgctggccttgcatccttctgggtctttcctcatcaagggctcagattcaccatccttcaatctgctgttactctgcactacttcaagagggtctttgaggttctgtttattcacaaatatagtggaggcatgacacttgaatctgcaatccccatcactctgagttatttcctctcagctgtaactatggtctattctcaacacctaacaaaagggtttccagaaccaccaatcaatctgttctaccctggcattgtgttgtttctagttggcatcattggcaacttctaccaccattaccttctgtccaaattgaggggaaagggtgaaaaggagtacaagattccaaagggtggcttttttgagcttgtgatttgcccccactacttctttgagattactgtgttttatgggatcttcttcatttctcagacattatattcattcgctttcgctgtaggcactactatgtacttggtgggtaggagttactcaactaggaaatggtatctttctaagtttgaagatttccctaagcatgttaaggctgtcatcccatttgtcttctaaatgttgtaatgaacatctaattctacttgagttgtaagtgtgctgctagattgtgtttattggaattgcagctctccaacatccaagtttgagtgatttaataaactattttttaactttggt

SEQ ID NO: 9985 - DNA, 1291 bp, Glycine max
  Clone ID: 700889879_FLI
ggatggttggatgagaagaccctctccccggccaaagcaggctccggaatggtcgttgccatcaaaaagttgaaccccgaaagcacgcaaggcttccaagagtggcagtcagaagtgaactttttaggaaggctttctcaccccaacctggtcaagttgttgggttattgttgggacgatgatgagcttcttcttgtttatgaattcttgccaaagggaagcttggagaatcatcttttcagaagaaatcctaacatagaaccactttcttggaacacccggcttaaaatagctattggtgcagctcggggattagctttcttgcacgcctccgaaaagcaagtcatataccgagacttcaaggcctcaaatatacttctcgatttggtcagttattttttcgtagttgattttcttatgttgtttgttagtctaccttttccctttttctcttagagatggaagctaaaggaaatgtagtatcaaatagggatgaacagacagcttacaaatttggaccccattgttgttttactaccaacctcatgcggaaaagaatttcaatgcaaaaatctcagattttggcttggcgaaattggggccttctgggggacaatcacatgtaactaccagggtcatgggtacgtatggttatgctgctccagaatacatagcaacaggccacttgtatgtgaagagtgatgtctacggatttggcgtagtgctacttgaaatactgacaggcatgcgggcacttgacacaaaacggccaacagggcagcagaacctagttgaatggaccaagcctcttctctcttccaagaaaaagttgaaaacaataatggatgctaagatagtgggtcaatattcaccaaaggcagcgtttcaagcagcacaacttactgtaaaatgtctagaacatgaccccaaacaacgtccttccatgaaagaagtgcttgagggattggaagccattgaagctatccatgaaaaatccaaggaatccaaaacccgcaattcttatcaatctcctcggcagagagttgtgagagtataagtaaatttgtatacaaaagaagaccactagagagtgagaatagccatatggtccattgaatgttggatcactcacctaatagatgtgatttctttctttcttttttcttgtgttgcttggaaggggagaattttactgggcttttacatgtatgatttttttgtgaattattcacatttttataaaatgggaaaatattttgtaagtgcaataaagtaacaaaattttgatgcc

SEQ ID NO: 9986 - DNA, 780 bp, Glycine max
  Clone ID: 700889880_FLI
atcaaatcctaatgatatgactggggagactggtactcttggttatatggctccagaggttttaaatggcaacccctataacaggaaatgtgatgtgtacagttttggcatctgcttatgggaaatatattgttgtgacatgccatatcctgacctaagtttctcagaaattacttcagctgtcgttcgccagaatttaagaccagaagtaccaagatgttgcccgagttccctagcaaatgtaatgaagaagtgctgggatgccagtcccgataagcggccggagatggatgaggtagtttccatgctggaggccattgacacatccaaaggtggaggtatgatccctcatgatcagcaacagggttgtttttgcttccgcaagcatagagggccttgaaaatttggttataatgatttttcagtatttgaagaatcaatttgtatcatagtcagaaagcaggatttggatactagatgagacaaatacacaatagggggtacaggtaggaggagctggtgacatgtcaatatgttggtgggtgtgtaaaactgtacctctgattttcttttaccttcttttttcccccacattggtttgggttctgtgggtatgagtattactttcagcttggtggcaatgttgccagattggactagtaacatgcaggatcttcattatactattgcatactcgctcgcaatcataattgatgtgattaagttggatccgtttgctttgtaaacaataatatacaagcgttttattgaatgggaaat

SEQ ID NO: 9987 - DNA, 940 bp, Glycine max
  Clone ID: 700889918_FLI
acaaacatagaatcaacataatgtttcgtacatctttaaggacgaaaaacaggaagggatagggtcggatccaagcgcgtaaacaggggtcttggccccctcccttgagaccctttatatatatgagcagaaaagaaaaagaaaaaaaaaacattaatggtggaaaataaataagaaaaatgaggtgttgagttgatatttgtttaattttcttttggtagtggatcttatctctagttttacacaaattttaatcataataaacatctttttgaaactcattatttattaaaaattaaatatttaaataattatgaaaaaaaatctcacctttgatacatttcttcttccatccttcggagggaggagacagaggtctggaaacttttttggatgtgtattagccaacatggatgcataaaaagtatgcttcaattcttctcaacagaacatagatgaagtggtggaaatgatatatcagaagtcagttatggatcaaaactatgatggaaaaatatctctgtccttctatgattggtgtttacgttaattcttgaatacacacaaggatttaatgagtaagggtacccgttgtactccaccatctaatacattttaccctataaaaaaaaaggatataactaagagcaagatactcttatattattccaatgtgttattatatctttttctatgctccttgttgcaggtgtggtgcagctagctgaggagagttattcttcacatgctttgtttccaatctcaccaagtctggcgacttccaaaccttaagcggaacgaatagttattcataatattagaacgggatacacgggaatgatatatatctgcaaatttacgcaactatggatattatagtatcctgctttgtcttgcacatatcatatatataattgttactatgtataattttttaagt

SEQ ID NO: 9988 - DNA, 1458 bp, Glycine max
  Clone ID: 700889930_FLI
ctccatctacaatcatacaaacctttattctaagttctgatggctctgcgatcattctcttacgatgtgttcctcagcttccgaggggaagatactcgttatggtttcactggctatctctacaatgtccttcgggaaaggggaattcacaccttcattgatgacgacgagccccaggaaggggacgaaatcacgacagcacttgaggcggctattgagaagtccaagattttcatcatcgtgctctctgaaaactacgcatcttcctccttttgtttaaactcactcactcacatccttaactttactaaggagaataatgatgtgttggttttgcccgttttttatagagtgaatccttcagatgtccgacaccacagaggtagttttggagaagcactggctaatcatgaaaagaagtcgaactctaataacatggagaagcttgagacgtggaagatggctctgcaccaagtgtctaacatttctggccatcatttccaacatgatgggaacaaatatgaatacaagtttattaaggagatagttgaatcggtgtcaaacaagtttaatcatgatcatttacatgtttcggatgtcctggttgggctagagtcaccagtgctagaagtaaagtcgcttctggatgttggacgtgatgatgtcgtccacatggtagggatccatggactcgccggagtgggtaaaacaacacttgctatcgcggtctataattctattgctggccattttgaagcttcttgctttcttgaaaatgtgaaaagaacttccaacacgataaatgggttagaaaaactccaaagcttccttctttctaaaaccgctggagaaattaagttaacaaattggagagaaggaattcccattataaagcgtaagctcaagcaaaaaaaggttcttcttattctagatgatgttgatgaagataaacagttacaagcacttattggcagccctgattggtttggtcttggcagtagaatcatcataaccactcgagacgaacatttgttagctctacacaatgttaaaataacatataaggtgagagagttgaatgagaaacatgctcttcaattacttactcagaaggcttttgagttggaaaaaggaattgatccaagttatcatgatattttgaatcgagcggtaacttatgcttcaggtcttccatttgttttagaagtaataggttccaacttatttggaaaaagtatagaagaatggaaatctgctctagatggatatgaaagaattcctcataaaaaaatctatgcatacttaaagtaagttatgatgctttgaatgaagatgagaaaagtatttttctagcttgatattgcacccttgcgatttggagcagcccaatacaagcggatctccaattaatgtattactagtcacaatagcagtgaacgatttgatgattgccttacc

SEQ ID NO: 9989 - DNA, 1541 bp, Glycine max
  Clone ID: 700889943_FLI
gaaagaacctgacccaggatgaggatcgcgtgagcactcctcttcagatccgcacaagcattgcatatcaaatcaagcatcctgttccttatctctgtctctgcatttcccttccttcttcttctctctctctctctaaaaccctaattctatacatggaagggaaatctcaaatctaatgactaattaattaatccatcgatcaagcatggagtccgaactcaaagacctcaattcgaagccgccgaacggcaacggcaacagcgttcgcgatgaccgtcctctgctgaagccggagcctccggtctccgccgacagcatcgccgatatggagaagaagttcgccgcttacgtccgccgcgacgtgtacggcaccatgggacgcggcgagttgcctcccaaggagaagctcttgctcggtttcgcgttggtcactcttctccccattcgagtcgttctcgccgtcaccatattgctcttttattacttaatttgtagggtttgcactctcttctctgcgcccactggcgaagaggaacaggaagattacgctcacatgagtgggtggaggagaaccattattgtttcgtgtggacgcgccctctccagactcatgcttttcattttcggcttttattggatccccgaatcgaactctgcctctcaggaagacaagagtcggcagcccgaagagttgaggagacctggcgtaataatttctaatcatgtgtcgtacttggatattttgtatcacatgtcttcctcattccctagttttgttgctaagagatcagtggctaaacttccgctagtcggtctcatcagcaagtgccttggttgtgtctatgttcagcgggaatcaaggtcatcagacttcaagggtgtttcagctgttgtcactgacagaattcgagaagctcatcagaatgagtctgctccattaatgatgttatttccagaaggtacaaccacaaatggagagttcctccttccattcaagactggtggttttttggcaaaggcaccggtacttcctgtgatattacgatatcattaccagagatttagccctgcctgggattccatatctggagtgcgccatgtgatatttctcctgtgtcagtttgtgaattatatggaggtgatccgattacctgtttaccatccttcacagcaggagatggatgatcccaaactatacgctaataatgttagaaggttgatggctactgagggtaatttgatactttctgatattgggctagctgaaaaacgaatatatcacgctgctctcaatggtaataatagcctgcctagtgttttgcatcagaaagacgaatgataatttcatggccccccgtctcaaatgaaatgtagttcccgtcgagttttagtttcaaacttagtatctgcttatgaatggacagcttgtgtgtgaggggtatttatagctaaatagtacacattcacctaaacatctgaatggtacttgtgtaattttcttgtaaataatgtgaccaataatgttttaattgctggtg

SEQ ID NO: 9990 - DNA, 581 bp, Glycine max
  Clone ID: 700889963_FLI
ggtctagttaccacttatgtcaactagcacatccacttctaaaagcatctggatatgggagcatagtgtttatatcctccattgcaggtctgaaagctttgccttacagttctgtgtatgcatcctctaaaggagctatgaatcaattcactaagaacatagcattggaatgggcaaaggataatattcgcgcaaatgctgtggcaccggggactgttaagactgtacttctggattctatcatgaaagctgctgctgaagctgataaagccgttgagtatatagtgtctcaaacaccagttggtagacttggagatcccgaggacatatcaccactggttgttttcctttgccttccagctgcttcatacatcactggccagattattactgcggatgggggttacataatttaaagtgtaatgccaaaaataattataaaataaaataaatgcccaaaacataaatctcaagatcaactaggtttttaagaaggtccgaaactaatgattatctgtagttgttttaagtacaatatttcaagtgttataatgtttccaatgtgtgaagttctttttatc

SEQ ID NO: 9991 - DNA, 686 bp, Glycine max
  Clone ID: 700889981_FLI
gtgactttgtgcgttgaagttatagagagagaggagtttggagagaagagtgaagaaggcaaatcgcgaagactagatctgatctgagagaatggctcctcggtctagcagcaaggacgcccaagaccttttccgcgctctttggtctgcttatgctgcaacccccactaatctcaagatcattgatctctatgtcatctatgccgtattcaccgctttcatccaggttgtttacatggctttggttggatcatttccatttaactccttcctatcaggagtactttcttgtgtaggaactgctgttcttgctgtttgtctcaggatccaagtgaataaagagaataaggaattcaaggatcttgcacctgagcgcgcttttgcggattttgttctctgtaatttggtgcttcatttggtgatcatgaacttccttggttaaattgggtttgtgtggcggttgttgtttctgattgaacccttggataataaaaattaaatagtagtatacctagacttttgtaatagtatttatagacagtagccggcattctactaattgctttagctttatgttgattacccccaccccccatttttggttccctgttttgaacgaagagattttgccatcttttgaagtttaaagtacttttgaatggcgaaataaagaaggtattgttatt

SEQ ID NO: 9992 - DNA, 1569 bp, Glycine max
  Clone ID: 700890029_FLI
gtgcatgccaccaaagtgtccctctctgccctgtgagggtgaagttgtacacaaaggccacacggaaaaagtcatcatattgagtgaatggtggaaatcagatactgaagctgtaataaatgaagctttgaaatctgggtcggctccaaatgtctctgatgctcacacaatcaatggtcatcctggatctgttcaaaattgtgcatcacaagggggatacaaactccaagttcaacctggaaacacctacttgctaagaataatcaacgctgcactgaatgaagagttgttctttaaaattgctggtcaccaactgacagttgttgaggttgatgctgtctacacaaaaccttttaaaactgacactatagttatagcacctggccaaaccacaaatgtgcttctaaaagcaaaccgtgctgctggcaaatacttagtagcagccactcccttcatggattctcctattacagtggacaatgtgactgccactgccacattacactacacaggctcacttggttccaccatcacaaccctcacttcattgcctcccaaaaatgccacaccagttgctacaaacttcactgactcactcagaagcctaaactccaaaaagtaccctgctagagtgcctcaaaaggttgaccattccttgttcttcactgtcagccttggagtcaacccttgccccacatgtgccaatggtagtaaagtggttgcagccatcaacaatgtgacctttgttatgcctaaagtttctctcctccaagcacatttcttcaacataagtggagttttcacagatgattttcctgggaagcctccagtggtttatgacttcacagggacacaacagccaacaaatttgaggactaatagagggacaagggtatatagacttgcctataactccacagttcaattagtcttgcaagatactggaatgataacacctgagaaccatcctattcatctccatggattcaacttcttcgtggttggtaggggacaagggaatttcaaccccaaaaaggacaccaaaaagtttaatcttgtggatcctgtggagagaaacacagttggtgttccatctggggggtggactgctatcagattcagggctgataatccaggtgtttggtttatgcattgccatttagaaattcatacaacatggggattgaagatggcatttgtggtagacaatggtaaaggaccaaatgagtctctactaccacctccaagtgatcttcccaagtgttgagaagaggactaatatacaatcttcgcttaaggagtaagaaggggaaacacgtaaagaagatataatttccaaagggagtgtgtaccatcaaggctaataacaagattttcttggagcaaataaaaaggataagctgctaatagggaaaataagaccaattagcatgtcttcactttctctgttttttccctgtcattttttcattttttttgcattatttgtacttctcatctctccttgaaagatagttttgacttcatgtaattatatatacagtgtgaatcaaaatttacaggattttc

SEQ ID NO: 9993 - DNA, 843 bp, Glycine max
  Clone ID: 700890042_FLI
gctaaacggaaccctctagaacccaaagtttttctctttcaattcttcctcagtcaattcaactccctttcaatttcaaccctatctctgctctcttcttcttcttcttcttcattttttgggtctctctgtttacaagcttttcagttatggcatcgaaacgcatcgtcaaggagctcaaggatttgcagaaggaccctcctacttcctgcagcgcaggtcccgtggcggaggacatgtttcactggcaggcaacaatcatgggacctcctgatagcccatataccggtggtgtattcctagtttcaattcattttcctcctgattatccattcaaaccaccaaaggttgcatttaggactaaggtattccacccaaacatcaacagtaatggaagtatatgccttgacattctaaaagaacaatggagcccagcactaaccatttctaaggtccttttgtccatttgctcactgttgacggatcccaaccctgatgacccgcttgtgcctgaaattgcccacatgtacaagactgacagggctaagtatgaagccactgctcgtagctggacacagaagtatgccatgggatgatcatgctcctcctttagctgcacaatcatgatttttatgaagaaacaaaatttacttttaatgaatgttttatctttttttgtcagtgtaaatcaaccatggtaagggaattgattgtcactttgtgaatatttctttgcaagacatcggtcatggtctcatggaagaaattgtattataatgtcacaatttttctgcttgttgactagctattctaaatgatggtaatcaaattatagttaggaac

SEQ ID NO: 9994 - DNA, 191 bp, Glycine max
  Clone ID: 700890070_FLI
gcgattggccccaacaagaaactcttggagtatacttgagaaattgcttggttcattactcattctatagaaatatttttccaatgtgggctttggctgaataccgcacaaatgttttattgccttcctttactatttaagttgaaaaattgtgagctcaaaaagataatgtcataccaataaaagtctag

SEQ ID NO: 9995 - DNA, 909 bp, Glycine max
  Clone ID: 700890117_FLI
gtcatggggaaaactgacttcaatgcagtgaagcataaacagcaatctatgatcttagtggatgtccagactcctggcgttcacataaagagaccattgacagtgtttggctttgatgatgcaccgcatgggcatgcagaagtaacatttgaaaatgtttgtgtgcccgcaaaaaacatcatacttggcgaaggacgtggatttgagattgcccaaggtaggcttggtcctggaaggctccaccattgtatgagactgataggtgttgccgagcgaggcatgcatatgatgattcaaagagctgttggcagaagaacatttgggaagttgattgctcaacatggttcatttatttcagatatggccaagtgccggatagagctagagagcaccagattgttagtgttggaagcagctgaccaacttgacaggcatggcaacaaaaaagctcgagggatattagcaatggcgaaggtagccgcaccaaacatggcactgaaggtgcttgacatggcaatacaagtgcatggagcagctggtgtatcatctgacacagtcctggcacatctctgggcagctgcaaggacactgagaatcgcggatggtccagatgaagttcacttggggaccatagccaagttagaactacagaaagccaaactttgagaacctgaacatttttctccacaggactaaatggaagtcaccaaataaaaactaagcgaaacgggaaattaaacttaaaccaagaaaatgttccaaggagaaaacctctgaaaatagccgtgtttcaaaatgctgtttgaagcattatgtaacatgaggttgttcaaaataagctttctctgtgtattccaggtttgaaaattgtaactttcaattccttgtttaatagtaaatatcactttc

SEQ ID NO: 9996 - DNA, 851 bp, Glycine max
  Clone ID: 700890120_FLI
atttctactttctttagctgccaaacgaaacttcccttgttcctgttcctgtgttctccttgcagctccaaaattctatgtggtggtggagatggtgatgattactgcttggatcactgaccttttcgcttgtatgggtggttgttttggatgctgtgtgaaacccacaccaattattgccgtggatgagccagcaaagggactaagaattcaggggcagacagtaagaaaaccacacatatcagatggtttctggagttcaagcacttgtgatctggataacagcaacattcaatctcagagaagtatctcgtctgtcagtacatcaaatcaaattctctatcatagcggtggaacttctaccccaggggccaatcctgaatttgtaaacccaggccttcttctctggaatgagagcaggcttcagtgggttggaagtggcaaatctaggaagcatggccaacaaaaaagagaacccagactaaattggaatgcaacttatgaaagtttgcttggaactagacaacctttccccaagcccatacctttatctgaaatggttgaattcctggtggatgtttgggagcgtgaagggatgtatggttgaaacttgataggttaaaatgctgagtgccttcaagtttgtttatactttcaatgatgtatttgactcctgaaaggttttcatgtatagttgtgcagagaagattaaaagatcaaacacaagtttgttctccctttgtaatttcaaacactaaaggcaatccttttgtttttgccctcctgtaaatgactgtatatcattttcaaactataatctgaattgctgaatgcagaagttgttacttttt

SEQ ID NO: 9997 - DNA, 736 bp, Glycine max
  Clone ID: 700890165_FLI
actaattcaataacatagaagaatatggaagatggaagcgtcaaccttcctcctgggtttttcttctctcctactgatgaagaacttgttcttcactttctctattgcaaggcttctctcattccatgccatcctaacatcatccccgatctccatccgtctcagcttgctccttgggaattaaatggtaaggcgttgttaagtggaaatcagtactatttctttaccaaagtgaatgaaaacagagccagagaaaatgggtattggaaggacacaggtgtcacggaacctatattgtcaacctttgataagaaagtgggaatgaagaagtacttggtgttccacataggtgaagctccacaaggtactgaaaccagttgggtaatgcaagaatattatatatgttcctctgggtttgacactgcctcatatcgaagtgctaggagaagaagaaaacatgatcaaagttggagcaagtgggttttgtgcaaagtctatgagaagatcaggtctcaacaaggtgtaaactgctatagcgatgatgatgacagtggatcagagctttcttggctagacgaagtttatctgtcgttggatgatgatctggaagaaattggcatgcctatttagattgaatgtatactacccaatgctaatatatatatatatatatatatatatatatatggacttgtatattaattactatgtctcaattaaatacgtgcattgtttg

SEQ ID NO: 9998 - DNA, 973 bp, Glycine max
  Clone ID: 700890182_FLI
gtggatccggctgatgtggatgctatatcaaagactgtcaaaagggcccttgcagtctatggaactccagcttttacagaaattatcaagaactgcatggctcaagatctttcatggaaggtgagtaaaggaagaacctgagtaatacaccataagctgtgatgagatttaaatatattttttgaatttaatttctatgcactgattatcagtgtcaatcaataagaaatcatgataaatatgacttttaaggtagtttcgttaaaagactttaatggccacacacaggtaatgcaaaatagttttaatattgtcatttgatcacattatcattagtaagacttttaagatagctattataaaaatcaacaaattatcattcatggtgataagtgattagatgagagtgcaaaattatttcacattgcagtgcataacttttttttttctttataaaatcaataaacttatcatatataaaaactctttacgctctcaacagacaattttctcatggtttttccccacaactatttcaagctaccaatccaaaccatatttatctctttaatcttagtaactgaattttgttttggaaataggggcctgctaaggagtgggaggaagtgctgctaagcttgggagttcctggcagtgaacctggaagtgatggagaagaaattgctccacaggcaaaggaaaatgtggcaacaccataataataagaacaaagatgtgagggaagcctctcctagtctgagtctcgtgaagttctcccagccccttgcttgttattaatattatgttttatatccttcttccaaatttttgttttcttctaaatagattatagaaatgtacatggacacggaaattacactattcgaatcagtgtaatgagtgcaggtctttcaagattagcataaattaaagcgtttcttaatagtctagatatgacacaggttcccaggct

SEQ ID NO: 9999 - DNA, 1290 bp, Glycine max
  Clone ID: 700890204_FLI
ttcctgttgtgtgaagcaaaattaaggaaaggcttatggtccccctgaagaagatgagaagctatttaattacataacaagatttggagtcggatgctggagctcggttcccaaactagctggattgcaaagatgtggaaagagttgcaggttgagatggataaactatttgaggcctgatttaaagagaggcatgttctcacagcaggaggaggatcttataatcagtcttcatgaagttcttggaaacaggtgggctcaaatagcagcacagttaccagggagaacagacaatgagattaagaacttctggaactcatgtttaaagaagaagcttctgaagcaagggattgacccaagtacacacaagcccctcacagaagctcatgtgaaggaagaaaagaaaatcatagagacatcaccaatgcaaacaccattgtctcaaggcccttcagttccattaatctttccttcatcacagggatcatcacttctaataagtgattccagttactatgatggagggctaacagaagcctcaagagaaattttcatgaccaagccagcattggaccctttgtcctactatgattttccaatgggtgttgcacagtctggttttaacttacctgttagtcagtatcagacaagccttaaagcatctgatcagaacccctttggacccaattcaagctatgtattctcttcaatgccaagtctaaccaattctgatcacgggaacgtgtcggtgactgagttttcagacaacaattcagcttccaaaataagttcattgttcatgaatgaccaggtgaaagaaagttccagcaacagctcaaacttgagcaccatttaccatggaggagggtgtcatatcagcagcatgatggaaaatgcagggttctcgtgggagggtgacaacaagtttgaccctttgtttcagttccaagtaaatgccacaaaatcagaggattttaagacaagttcatgggaagaagggcagctgcatactcaaaattccatagatttcacgagctttccgttaacgtcactttcagaagatctaacaggagcaaattttgatgtattccagcatatatgaactgtaaattcttttctttctttcttttgattttttgaactctttttcatgttagcaaaaatagaatgatgttgatagtacaggagatttgtagcaaaagatttgagatgagatgattccccccctcccccgcatctattattaccattgatgtatctgttttcatcacccaaagtttgaataacgat

SEQ ID NO: 10000 - DNA, 1464 bp, Glycine max
  Clone ID: 700890247_FLI
cctccatatagttttatgaacatacagttgcagaagttccaacataaatggtgatcatcactcgcagttctgctggtagaaaaccaagtgaaattatgaagtttttcttgacaacttttattggtatagttttcggattctttataggagtatcaattccaacattgtcaataacaaagttgaatctcccatctggcctgcttccctccattgatctttcttacattgaagacagatatgcaggtcgccaggcttggtcttttatgaataatggtaacaaaagaagttcatcgcaagttcaattatcaagtgatacatcaaagatttgggttccctcaaatccaagaggtgcagaaagattacctcctggcattgttgaagccgagtcagacttttatttgcgtagattgtggggcaagcccagtgaggatctaacgtccaggccaaattaccttgtaaccttcactgttggctatgatcagaaaaataatattgatgcagctgtgaaaaagttctcagggaacttcactatcctgctatttcattatgatggccgaactactgaatgggatgagtttgaatggtcaaagaaggctattcatgtcagtgttcacaaacagaccaaatggtggtatgccaagcggtttctgcatcctgacattgtggcaccatatgactatatattcatatgggatgaagacctgggtgttgagcattttaatgcggaagagtacataaaactggtgaggaagcatgggttggagatttcacagcctggcttagagcctaataaagggttgacatggcaaatgacaaaaagaagaggtgatcaggaagttcacaaagtgacagaggaaaaaccaggatggtgttctgaccctcatttgcctccttgtgcagcgtttgttgagattatggctccagtgttctcaagagatgcatggcgctgtgtgtggcatatgattcagaatgacttggtccacgggtggggtcttgattttgctcttagaagatgtgttgagcctgcccatgagaagattggagttgttgattctcagtggattgttcaccaaggtcttccctcactagggaatcagggtgaatctcaaacagggaaatcacggtggcagggggtgagggagcggtgtagaaaggagtggaccatgttccagagtcggttggcaaatgccgaaaacgcgtattacaagtccatgggaactgatacatctaattccacagctcattagggtgactaaggccaaagttgacttgtacacagatatcattactacccttacgcgtagaattttcccttgaagaaaaatatatattcctatgtaacgttacgtacatgcaatgcaatcacaatagagtcctagctggggaccaaacatcatttcaatgtagaattttgcagtactgaacagtgagtaaatcaagtgaagagaattattattgctgctt

SEQ ID NO: 10001 - DNA, 1220 bp, Glycine max
  Clone ID: 700890292_FLI
aaaaattctcagaagctaacaagctaggtgaaggtggatttggtgaggtttacaagggcttgcttccaagcggacaagaagtggctgtcaagagactctctaaaatctctggacaaggtggggaagaatttaaaaatgaagtagagattgttgcaaagcttcaacacaggaatttggtgaggcttctaggattttgtttggaaggggaagaaaagatacttgtctacgaatttgtagtcaacaaaagccttgactatattctttttgatcctgagaagcaaaaatcattggattggacaaggcgatacaaaattgttgaaggaattgctcgaggcattcaatatcttcatgaagattccaggcttaagattatacatcgtgaccttaaagctagcaatgtcttgttagatggagatatgaatccaaaaatctcggattttggcatggcaagaatatttggagtggatcaaactcaagcaaataccaacaggattgtagggacatatggttacatgtctccagagtatgcaatgcatggagaatactctgctaagtctgatgtatatagttttggagtcctagttttggagattttaagtggcaagaaaaacagctctttctatgaaaccgacgttgctgaagatctattgagctatgcctggaaattttggaaggatgaaacacccctggagttgctagaacactcattaagagaatcatatactccaaatgaagttatcagaagcatccatattggtttgctttgtgtccaagaagatccagcagatagacctacaatggcatcagtagttctcatgctttctagttactctgttactctaccggtacctaatcagcctgcattatttatgcatagtagaactgaatcaaacatgctgaagtgggtgcaaattgatcagtctattaccaagtcaacaacaaagtctgtcaatgagatgtcgcttagtggagatattcctcgataagtatgaaaatgcaaggaggttttaaagaaagtgtatccatggaaaaaaaaaaaaaaaaccttttggtgagtagtggcttctttcaacgtggaataaatacgagcgggtcttttaggccaatttgcatttattgtgtggcactgagagacgactttacttaattgttttctctctgcaaaatgtaaactttacctagtgcaagtttaataaagattggcagtgtaagttggcaac

SEQ ID NO: 10002 - DNA, 1739 bp, Glycine max
  Clone ID: 700890310_FLI
gtatttcctctctcccatcaatactagctgagactgttggaagaagcattgaggaagtttatagagggagtgacaaaggaatactaaaggatgtagagcttcttcggcagataactgaagcttcgcgtggagcaattacttcctttgtgcagaggactactaataagaagggtcaagttgttgacgtagctgataaacttacctcaatccttggatttggcataaatgaaccatgggtcgagtacttgtcaaacaccaaattttaccgagctgatagggaaaaactcagaaccttgttcgatttcttgggagaatgtttgaagttggttgtagccgataatgaattgggaagtttgaaacaagccttggagggtaagtatgtggagccaggacctggtggcgatccaattagaaatcctaaagttttaccgacagggaagaatattcacgccctggacccacaagctattcctactacagcagcaatgcaaagtgccaaaatagtggtggatagattgattgagaggcagaaagctgaaaatgggggaaagtatcctgagactgttgcacttgtattgtggggaacagataatattaagacatatggtgagtccctggctcaggtcttgtggatgattggtgtgaatccagtagctgatacctttggaagggtcaaccgggtggaacctgtaagtcttgaagagcttggaaggccaaggattgatgttgttgttaattgttcaggagtattcagggaccttttcatcaatcagatgaatcttctggatagagcagtgaagatggttgctgaattggatgaaccagcagagcaaaactttgtgaggaagcatgcactagaacaagctcaagcccttgggattgacgttagagaagcagcaacaagggtcttctccaatgcctcagggtcctactcctcaaacataaacctggcagtggagaattcttcatggaatgatgagaagcagctccaggacatgtaccttagccgaaagtctttcgcttttgactgcgatgcgcctggtgcaggcatgacagaaaaaagaaaggtctttgagatggctctgagcacagcagatgccacattccaaaaccttgattcatcagaaatctccctcactgatgtcagtcattactttgactcagatccaacaaacctggttcaaagtctaagaaaagatgggaagaagccaagtgcatacgttgctgacacaaccactgctaatgctcaggtgcgtacccttgctgagacggttcgacttgatgcaagaaccaagctattgaaccccaagtggtatgaaggcatgctgtctactggatacgagggtgttcgcgagatagagaagaggctcactaacacagttggatggagtgcaacctcaggccaagtcgacaactgggtgtatgaagaagccaacacaactttcattcaagatgaggaaatgttgaagaagctaatgaacacaaatccaaactcctttaggaagctggtgcagacattcttggaagccaatggacgcggttactgggagacttcagaagacaacattgacaagctcaggcagttgtactcagaagtggaagacaaaatagaaggcattgatcgctgaagtgataattgagatgaacagcagaaacattaactgttttttaactatgccttctttgtatctggagcttctttcccacactgaattgaaagttgttgatggtgtcctttt

SEQ ID NO: 10003 - DNA, 602 bp, Glycine max
  Clone ID: 700890409_FLI
atctaattacctcaattaatcccttaattgcaagcatcatggctgaggagaaacaccaccaccacttccaccaccacaagggcgatgatgtgcctggcgaggttgattataagaaggaggagaagcaccacaagcatcttgagcaccttggggaacttggtgctgcggctgccggtgcttatgccttgcatgagaagcatgaggccaagaaagacccagagcatgctcacaggcacaaggtagaagaggagattgcggcagcagctactgttggtgctggtggttttgtcttgcatgaacaccatgagaaaaaggaagttaagaaagaagatgaggaagctcatggaaagaagcaccaccatctgtttggctgaacatgataaatattcatatataattaatattcaagctccaaagtatcaccatgcctgtgtatctctatcatatcttccatttctagtgtgcctttgaataaattctgtgcgagcttgaagagtgtttaattatgcctatggtgttacttcatatatatatttgcgtatatataatgtatgctatgttggctatattgataataagattgtaaagtaatttgagattgt

SEQ ID NO: 10004 - DNA, 816 bp, Glycine max; identical to SEQ ID NO: 9821
  Clone ID: 700890412_FLI

SEQ ID NO: 10005 - DNA, 1052 bp, Glycine max
  Clone ID: 700890413_FLI
atcgacgaatgcttgcctattctacagttggaacacctgattatattgctccagaagttcttctgaagaaaggatatggcgtggaatgtgattggtggtctcttggagctataatgtatgaaatgcttgtggggtatccacccttttattcagatgaaccaatgttgacttgtagaaagatagtaacttggagaactactttaaaatttccagaagaagctaaactttcagcagaggcaaaggatctcatttgtagactcctatgtaatgtggagcagagacttggaaccaaaggagctgatgaaataaaggctcacccatggttcaaaggtgttgaatgggacaaattgtaccaaatgcaggctgctttcatacctgaggtcaatgatgaattagatactcaaaattttgagaagtttgaggagggggacaagcaaactgtaccttcctcaaaggcagggccgtggagaaagatgctgccatctaaagatattaacttcgtcggatacacatacaagaattttgaaatcgtgaatgatcatgaaatacctggaattgctgaattgaagaagaagaacacaaaacctaaaagaccatctattaaggccctatttgatgatgaatcagctacggctgccaatcaacctgtcagagggagcttcttaaacctcttacctcctcaaatggaagttcctgaaaaaagtgaatcacaatgatttacaccaatattttgcaggatttctatatggccatggtcacaaccaaatgttgatgactactgattgttatacattttctcacattcttttgttagatgggagttgatggatttggaagccaggtccctgaaatttctggttttggatggctgaattttttggctgactgggatattttccgtgtagaaaaatcaattaaggtgtatattcttcaatccaccttctatcaaactgcaatgtgttaaatatcatagttttctctctctcctgtaattaagttactgttgaagttgaaatgctgataaggatgtgcaattcacatttttgtacaat

SEQ ID NO: 10006 - DNA, 956 bp, Glycine max
  Clone ID: 700890457_FLI
gaagaacttaaccgggttagttgaatggtatggcaagaacaagagactgagaaatttggtgaaccttgtcatagtaggaggcttctttgacccttcaaaatcaaaagatagggaggaaatggcagaaataaaaaatatgcatgacttaattgataagtaccaactcaagggtcaatttagatggattgctgctcagactaataggtatcgcaatggagagctctaccgttgcatcgctgacacgaggggagcctttgttcagcctgctttgtatgaagcatttggattaactgtcattgaagcaatgaactgtggcttgcccacttttgctaccaatcaaggaggtccagcagaaattattgttgatggggtctccggcttccacattgaccccctcaatggagatgaatcaagcaataaaattgctgatttctttgaaaaatgcaaaatgaatcaatcacaatggaacgtgatttctgcagctggattgcagcgcataaacgaatgctatacctggaagatttatgcaaacaagatggtaaacatggggaacatttataccttttggagacaagtgaataaggaacaaaaggaggcaaagcagagatacattcagatgttctataatcttatattcaagaatttggttaagactgtacctgttcctagtgatgaacctcaacaaccagtgggcaagcagccgagtctcaaatcacgtagcacgggacgttcacattccagattgcaaaggttatttggaaattaatgtctcaaccatgaagcaggtcaattagtacgatgcatcttgtcactctggatattgatatttctctgatgtatacccctaatattttattttttttgttattattaaacggagcagctctgctgttgtggaataataacaattattttatgtgatcattaaaatgccctatgtgaggaaatttaaaacg

SEQ ID NO: 10007 - DNA, 1441 bp, Glycine max
  Clone ID: 700890591_FLI
gtgaatgtggatgatacaattgcacaacagatagttgtacacaaaaatagtccaagagggacccattttcgtcgtgctgggcctgctcagaaggtatattttgattcagaggaagtacacgcttgtattgtcacgtgcggtggactttgtcctggtctaaatacagtgataagagaaatagtatgcggcttatatcatatgtatggggtgcacaaagttttgggaatacagggaggatatccaggtttttattctcgaaatacagttcctttgacaccaaaggttgtgaatgatatccacaaacgtggtggaagcatccttgggacatcatatggaggccatgacacctcaaagattgttgatagcattcaggaccggggaattaatcaggtttatatacttggaggatatggaactcagtatgaagcagctatgatttttgaggaagttagaaggcgtggcttgaaagttgcagtggtcggaattccaaaaactattgacaatgatatcccagttattgacaaatcaattggtttcgacactgctgttgaagaggcacaacgagcaatcaattctgctcatgtggaagcagaaagcgcggagaatggaattggtgttgtaaaattaatggggcgttacagtggatttatcgccatgtatgcaactcttgccagccgtgatgttgattgttgcttgattccagaatcacccttttacctggagggtccaggaggactgttggagttcattgagaaaagactcaaagagcaaggtcacatggttatagtcatagctgaaggtgcaggtcaggagcttctttctggcaacccctccattgttaataagccagatgcttctgcagacaaattatttccagatgttggcctgtggttgtcccagaaaattaaggatcactttgaaaaacgtcaaaaaatggctataaatctgaagtacatagatcctacttacatgatccgtgctatcccaagtaatgcatctgataatgtatactgcaccctccttgcccaaagtgctgttcatggtgcaatggcaggatacacaggcttcaccgtgggcccagttaatggcagaaattgttacattccattccatctgataaacgagggagagaagagggttgtgataactgatcggatgtgggcaaggttgctatcttcaacccatcagccttgcttcttgaacccaaaagaaatcacaggagaaagagaggaaagaacggaaaaccaaaccacagatgggcagaaccattcagaaatagcagactaaacagggcatatacagagcacaaatataacaccaagttaaaatgcctttaaaatgtggtgatcaagttaaatgatcaaatttaattaacgtaagatcaactgattgatcattgacgttggacaaaaccaaatctagtacatcttttgcagtattt

SEQ ID NO: 10008 - DNA, 1984 bp, Glycine max
  Clone ID: 700890624_FLI
ggcagcaagaatcttggtagtgctcttgtgcaaacatgagtttgatgtgagataccagatgcctgaagataaattgtatattgctcagctatatttcccacttgttggacaggaattaagtgaagaagctgccatgtgccttcttgcacaatttgatggatagtcttaaaacggtggaggaatggacaatctgtagagtcgtgggaggctcataaggcaccggtccaaactatcataaagctgccctcaagagagcttgttataggccctagttgttcctcaattggttatggagaagcagaggagttaggacccttgtttcctcaggacaacagccaaccaaagctaaagttaaatccttattcttggaataacgctgccaatcttttgtctttggaatcccctgttggggtgaggttctcctacaccaacaccagcagtgatataagtgagcttggtgacaccattaccggtaatgttaaatgttgttgtcatctaaatatttgtactttttttatcttgcttttactaaatgtgatttattgatggaacgttatttgtcaacatcagctaaagattcacacacctttatcatcaagtggtttagaagatttccacaattcaggtcacacaaattctacatttccggtgaaagctatgctggtatctagcaatgttctaaagcaggctattgcttgcttcaactcccaagttgcttcctacacctcctttataacttctagaataaacaatgcagaatgtaaaattacattccggaatacacattttttttttttacttctagaatgaccaattcaaaaagtaaaaaatcattccagcatttggttcttagcaacaagtatgactccaaattgctagaaatcattgatgcaaggtgagttcatcagttcatgaataggtggaatatgtcagcatctagttttccttattttacaagtacttttaaattatgagggtaggcctacaatccattttattttgcatttcccccctttgcttctcaacttagaactttagttgataactcatgtaccatgtatggatccggattcctaaacttactattatgcaaatgcagatggtccagaatggtgaccacaaatgttcaaaaagtgggaaggagcaaatgctgaatgcatctataactcgagccgatgacatggagcaaatgagcatttatatgaatgtggtttggctagtgcttgcagcgtcttgaacatgctcattctcaaggtgtcacaagtgtttccttctctcgtgatggaagtcagttattaagcacttcatttgacaacacaacaagtgagtgcggctaagaggaagtaaaacatatccaaatgtcctttgttcaagtttcctgggatccatcctggcatctcatcagtggcagaaatcttcatcacaattgcaacaagcaagctactaacagagtttcctagtgatattgaagtcatgcaaagtgcactaccaaagctctttaatccaatgacatgggcaaaagttactcgaggacttgagaaaaagtgatgatatggattccagtgacatgattctttcaaattgtaaaagaagtagagcttatgatggggcggatttggaggacaatccaccagggaatgcagcagatgactgtatggaaaccagtagacaaaatagtctattgtgttgatcgatgtcccgatgtgcagttgaaggttgtctatctaaggaatttgcaggactactctcaactcgttcctttgtgcagcttggtagggagagaagagcttccttttgatgaagaacccccacctatagttaaagaagtatatagaagtttattttgctagttgatacctgttgatgtattcattttgaatgttggcggcattgtaatttgtaacatcatcatggtgagtgttaaataacttaactatccattgcctttgataaaatcaataaaaatgagttgtgttttggtttt

SEQ ID NO: 10009 - DNA, 1079 bp, Glycine max
  Clone ID: 700890673_FLI
cgaaggtggctttggttgtgtatacaagggccaacaatcagatggtacaatgatagcagtaaagcagctttcttcaaaatctaaacaaggaaatcgtgagtttgtgaatgagatgggactgatatctggacttcaacatcccaatcttgttaagctttatggatgttgtgtggagggcaaccagctaatactgatatatgagtacatggaaaacaattgtctatctcgcattctttttggcagggatccaaacaaaacaaaacttgactggccaacaaggaagaaaatttgtcttggtatagctaaagctttggcttatcttcatgaagagtccagaataaaaatcatacatagggatgttaaggcaagtaatgtattgctcgacaaggattttaatgctaaagtctcagattttggtttggcaaaacttattgaagatgagaaaacccacattagcactcgagttgcaggaaccattggttacatggctcctgagtatgcaatgcgtggctatctaactgacaaagcagatgtttatagctttggggtggttgcactggaaactgtcagtggaaagagcaatacaaatttcaggccaaacgaggattttgtttaccttcttgattgggcatatgttttgcaagagagagggagtcttctggagctggttgatccaaatttgggttcagaatatttaactgaggaggccatggtggtgctaaatgtggctctcttatgtactaatgcatctcctacacttagaccaacaatgtcccaagtagtgagcatgcttgaaggttggactgatattcaagatctactttctgatccaggatattcagctattagctcaagttccaaacataagagtataagaagtcacttctggcagactccaagcggaacacatagcatatcaatacctagtatttatactgattcctctggctcacatgttgaaacagaaaaaaactatcatcctgtaaccgttaattcagatggatcagacaagtcaaattagtttcttaatgccacatacttaatacaaaactcgtggtgtattcaatgcaagaaaagag

SEQ ID NO: 10010 - DNA, 875 bp, Glycine max
  Clone ID: 700890686_FLI
ggttgatccagataagtgggagtttgctaatgagatgtttcttagagggcaaaggattcttctgaagaacattagaaggaggaaagcaaatcatcatcaatcccatcagcacgcgatgcagcaaggtgtagaagagccttttgttgaggtggggcagtttgaattagatggagaaattgatcggttaaggcgagacaggcaagttcttatggtggagttggtgaagctcagacaacagcaacaaagtaccaaatctcacctccaagaaatggaaggaaggatcaaaatgactgaacagaaacagaaacaaatgatgaatttcttggccagggcaatgcagaatccaaatttcgtgcaacaattggctcagcaaaaggagtggagaaaggagcttgaggaagttttttccaacaagaagaggaggcctattgatcaagggcctaatgttgttgaagttgccgatgacgatgatgagttattaggttgtgctgaagagtgttcagatttcgttaaacttgaaccgcaggaatattacagtgatgacaaggtattagagtttgaggtacctgacttggaccttgctttgaatctcgatgaggagaatattgaaagccagaagagaataatggaggaagaacatgttcaactagaaaatagtagagagagatatattgatgaagtgttttggcaagatttgctcaatgagggtatagaagatcaaggtgtactaggtgttgaagatgtagatgtattggccaagcaactaggttatttggcctaaataggagattatcaaggctgtattttctattattcattgaactagctgggtgacagtatctccttataattccttagatgtatactttctgacc

SEQ ID NO: 10011 - DNA, 1345 bp, Glycine max
  Clone ID: 700890767_FLI
ctagaactagtcactccttttagcaagttaacaacacttttgtcttcgttccattatctagttctcaattctcttcaccctttgcctctgaaagaaatgggtagtcttgaagcggaaagaacaacagtaggattggcagcaagagacccttcagggattctctccccatacacctacaatctaagaaacacaggccctgatgatgtttacattaaagttcactactgtggaatttgccattctgatctccaccagattaaaaatgatcttggcatgtccaactatcccatggtcccaggacatgaagtggttggtgaggtactggaggtgggatcaaacgttagcaggttcagagtgggagagttggtgggagttggactcctcgtaggttgctgcaaaaactgccagccatgccaacaagacattgagaattactgcagcaagaagatctggtcttacaatgatgtttatgtcgatggaaaacccacacagggtggctttgctgaaaccatgatcgttgagcaaaagtttgtggtgaagattccagagggtttggcgccagagcaagtggcaccattactgtgtgcgggtgtgacagtgtacagtccactggtacactttgggctgaaagagagtgggctaagaggtggaatattggggcttggaggagtgggacacatgggggtgaagatagcaaaggcactgggtcatcatgtgactgtgataagctcttctgacaagaagaaacaagaggcacttgaacaccttggagctgatcaatatctcgttagctctgatgccactgccatgcaggaagctgctgattcacttgactacatcattgacactgtgcctgttggtcaccctcttgagccttatctctccttgctcaaacttgatggcaagttgatcttgatgggggtcatcaacacccctcttcaatttgttagccccatggtcatgctagggaggaagtcaataacgggaagcttcattgggagcatgaaggagacagaggagatgttggagttctggaaagagaagggtctgagttcgatgattgaaatggtaaacatggattacattaacaaagcctttgaaaggttggagaagaatgacgtgagatacaggtttgttgtggatgtcaaaggcagcaaacttgtcgatcagtaaaagaaagaaagtatactactagcacgacacacgcaacatccatccttccatcatgaagagtctggaaaagttattaattaattgagaactaaagctgtatttgttgttcactctaaaaaagaagctgtgttttgtttattaaaaagagtgctctgttttctctgttttggtt

SEQ ID NO: 10012 - DNA, 714 bp, Glycine max
  Clone ID: 700890801_FLI
aaacaggtgtcgcttgctgattgggcgaggcactgctgccaaaatgggaccataggccagattgtggaccccactttaaaggggaggatggcgccagagtgtttgaggaaattctgcgaggttgcggtgagttgtttgttggacgacggaacgctgaggccgtcgatgaacgacgtcgtttggatgctggagtttgcgttgcagttgcaggagagtgctgagcagcgtgaaaatactaatattgttgataatgaaattaatgagagaagagaggaggaggctagtgatgatttgtttagtactggaaccagtgtgggccaggtttcggattttaacaagagtagcggtgtggtgagtgtgagtactgatagcgaagagcttagtagtagctacaaagagagtgataagttgatgtctgggactgttttctctgagattgtggatccaaagccacgttgagagaatcaaattgatctcaagaatgaagacctaatactactagggctagcttgaggctcgcaagttatgtgtttagtttcataatatatagttgtaatattacaatgtctgtgtacagaaatcaagttgcttctatctcttgggaatctagacaagtgcaaaggttaattggttggtaagtcataaatttcaatcatttttgtaaccagcctatgtgttacgtgttcaatcattattataacattttttttgtcc

SEQ ID NO: 10013 - DNA, 557 bp, Glycine max
  Clone ID: 700890821_FLI
ggggaagcttccaggggacaccacatcccttttgaaagcttggtggcaatcacattctaaatggccttaccccactgaggaagacaaggctagattggtgcaggaaacagggttgcaattaaagcagataaataattggttcataaatcaaaggaaaaggaactggcatacaaataacccctcatcctctagcaactccaaaagcaagcgcaagagtagtgcaggagaagccagtaaccagagcttcatgtgaacggtcgcatattttgaacaaaaattattggtattgttctcccttttaatgcatgctcgtgggattcatagatcttacggtccagcgtgaacgtgatggattctggatgaaaaagggaaattcatgatatataaaaccactgtattggttgaattacagaaaattatccctggtattgttgtatatgaggctgctgcatgccgcttgatatctgatattgatgcagtcgcattctattcgatttaatgggtagcatgctgatattattctgcttatttaaaaatattatggatccaattagtat

SEQ ID NO: 10014 - DNA, 1760 bp, Glycine max
  Clone ID: 700890843_FLI
tcgcgattttacctttccttccttccacttccaattttcaataattcacgactccttccgagatctctctctctctcccacaatccaaccatggcgaatacggggaatttagacgcggcgatagagcaattgctgaacgtggagaagcagatgaggctcgccggtgacgtggcgggtaccagaaaagcagccaccgatattttgcagctctgcttcgatgcacgagcctggaaaacactcaatgaccagattgtcgttttgtcaaaacgacgtggccagctcaagcaggctgtaacagctatggtgcaacaggctatgcaatatattgacgagacaccagatatcgaaactcgcatagaactcatcaaaacgttgaacagtgtgtctgcagggaagatatacgtggaaattgagagagctcgattgatcaaaaaacttgcaaagattaaggaagaacaagggcttatagctgaagctgctgatttgatgcaagaaattgcggtggaaacattcggtgccatggccaagactgagaaaattgcgttcattcttgaacaagttcgtttgtgtctagaccgccaggattatgttcgtgcacaaatactctcaagaaagattagcccaagagtatttgatgctgatttatctaaggaaaagaaaaagcctaaagaaggtgataatgttgtagaagaggcccctgcagatataccatctttgctggagttgaagcaaatctattacgaactaatgattcgatattattcccataacaacgattatcttgaaatttgccgttgctacaaggcaatatatgagattccatctgtcaaagaagaccctgccaagtggattccaatcctaaggaaaatatgttggtacttggttctagcgccctatgatccaatgcaatcaagctttctcaattccaccttggcggataagaatctatctgagattccaaacttcaagctactcttgaaacagctggttaccatggaggttatccaatggacaactctatgggatacatataagagtgattttgagaatgagaaggcctctgggaaatctttgggagaaaaagcagcagaagatctaaggcaaagaataattgaacataatattcttgttgtatcaaaatactatgcaagaattacattgaagagacttgcagagcttttgtgcctcagtgtacaggatgctgagaagcatctctcagatatggttgtgtctaaggcgctggtggcaaagattgatagaccattgggaatagtctgtttccaaacagcaaaggatagcaatgacattcttaactcatgggcagcaaacttggagaaattacttgatcttgtggagaaaagttgtcatcagatacacaaggaaaccatggtccacaaagctgctttgaaggtttaagaaggttcgaatcagcagttactgtcacaggggcatctcaatgatgtgattttgtactgaagttgccttttcaggaaaatgttcttttgaactgtcaccgactgagttggtgaggaatttcgttaaacgattatgcctttttcacttttatattctgtcactcatgctttcagggtagagctggatatatgcatcatagtactgaaagtagcattgttgtatactaccggtacataccttaccactgacttatgacaggatcgtaaaagatcttgattgaagcagtggctggaaattgagtgtttgctcatttatattcttttgcctggttgatttttttcccc

SEQ ID NO: 10015 - DNA, 1112 bp, Glycine max
  Clone ID: 700890845_FLI
ctgaagaagttcatggagattgcatgcaccaattgcacacaaatcaaacagtcctattggattctcatttttggtggcatccatttctttctttcccagcttcccaatttcaattctgttgccggggtttctctagcagctgctgtgatgtcactgagctattcaactatatcctgggtggcttgtttggctagaggtcgtgttgagaatgttagctatgcatacaagaaaaccacttctactgacttaatgttcagaattttcaatgcacttggtcaaatttcatttgcatttgctggccatgcagtggcccttgaaattcaggccacaattccatcaacccctgagaagccctcaaagataccaatgtggaaaggtgctattggtgcctatgtcatcaatgctatatgctatttcccagttgcacttgtaggatattgggcctttggaagagatgttgaggataatgtgcttatggaatttgaaagacctgcatggcttattgcctcagctaacttgatggtgttcattcatgttgttggtagctaccaggtttatgctatgcctgtttttgacttgattgagagcatgatggtcaaaagatttaagttccctccaggagtagcacttagacttgttgctagatctgcttatgtagcttttacattattcgttggggtcacattccctttctttggtgatctgcttgggttctttggtggatttggttttgctcctacttcatactttcttcctagtataatgtggctgataatcaagaagccaaaaagattcagcaccaactggttcatcaattggatttcaatatacattggagtgtgcattatgttggcatctacaattggtggcttaaggaatattgccactgatgcttctacttataagttttacacctaaactattttatattattgcaaaaatatgtagcatgagcaattaatctagttaattagactggagttggtgaatgtctagttgataatgtcctttgttcctataagcaactagccttttagtcttctttctctccttttattttatcttagtgagatgttaatttattaatagaacaaatagttttaattggcttc

SEQ ID NO: 10016 - DNA, 1118 bp, Glycine max
  Clone ID: 700890865_FLI
aaaaaatgatataagaattcacaaaaatgtttgatctgttattttaatagttattgcaatatatttttattctcttacatccacataggatggaactataatacggggacaaaatgaaatttctcatccaaccagtggaacaatggagcttattaagaagcttttcagctccagcacttccttcgaaaataaaacgggtgttctacatgtctagcgagggaaaaaatttgctccatgaggtctttccctcagctaatgcggctgtattagagcagttaaataatgtagactgcattgtgtatggcatgggctccctttttacttcaatctgcccctcactggtgttactgggaattggggagattatttcttcaaagtcctgcctcaaggtacttgtgctaaatggaacacgggaccgggaaactaatgggttttcagcttcttgttttgtaactgccattacggatgctctaaatcgaacatatggagagcctaacaatcgcttacagaatcccccaagtcactatataaatacccttttggtaccaagaaatggtgaaattccagttgatgtggactgtctggctgcccaaggaatatttgacgtgatagttgttgactccctaagagatcctaaagtaggtataatttatgacccgaggtcactgataagatctctagttgacttaatagacagatacatgaagtcgcaagttaatggcttaattgataccagacgttaatgattaacgagaagagccagtgaaattaccatcatttgactctgaatcttactgttgctgtctgtatttcacaagatacaaggtgaattgacatgtttatgcgaaatcttatatggcaagttcaaattcccccctacctggtgttcctgtttatttactaccatcagaatacagcgactggtgataacgctcgagtactctgaatgcgataatatttttgtgaaaaatattttttgtttgttgggttttgatctagttgacgataaacaaagacatgtcagagctgttgtattgttgagaatattgagaacaaaataatctagtttctgttgtatataaatatctcgttctttaatttttgctgttccattatag

SEQ ID NO: 10017 - DNA, 2311 bp, Glycine max
  Clone ID: 700890951_FLI
gttatgtactagtaaatagtaattttattgtaaactatccagtacctgagagagagtagcatctgagtcttgtgtttagcgtaggggattgaaaatgagtatgtacggtagggatccgtggggagggccgttggagatccacgccacagactccgccaccgacgacgagcgcagccggaatctccaggagctggaccgaggcgctttagacgagacacaacagagctggctcttgggcgccggagaacagaaaaagaagaagaaaaggtacgtagatcttggctgcatcatcgtcagccgcaagctcttcatctggacactcggcactctcgccgtctgcgccttcctcgccggcttcatcaccctcatcgtcaaaaccgtcccccgccaccaccacaagccaccccctcccgacaactacaccatcgccctccacaaggccctcctcttcttcaacgcccagaaatccggaaagctccctcgccacaacaatgtttcctggagaggcaactccgggttgcaggacggcaagggtgacggcgtgccgcccgtcattaaggatctggtgggcggttactacgacgccggcgacgccataaaattcaacttccccatgtccttctccatgaccatgctgagctggagcgtgatcgagtacagcggcaagtaccaggctgcgggtgagttgggtcacgtgaaggacatcataaagtgggggaccgattaccttctcaagaacttcaacagcaccgccgacaccatcacccagctgggcatgcaggttggatcaggggacacctcccaaggtagcaccactcccaacgaccactactgctggatgcgtcccgaggacatcgactacgaccgccccacccagacctgcaccacatgctccgatctggccgccgagatggccgcggcgttggcggcggcatcgattgtgttcaaggacaacagggcctattcgcagaagctggttcacggggcgaccacgctctttaagttctctagggattcgagaggtaggtacagtccaaatgggagggaggcttctgtattctacaattccaccagctattgggatgagttcgtttggggaggggcatggatgtactttgccactggtaattcctcttacctcaagctcgctaccactcctcgcctcgccaaacacgctggcgccttctggggaggccccgactatggcgtcctcagctgggataacaagcttactggtgctcaggttcttctcagtcgtttgaggttgttcctcagtcctggttatccctatgaagaaattttaagcacatttcacaatcagaccggcatagtcatgtgctcctacctcccaatgttcaccagctttaatagaacaaggggtggcttgattcaattgaaccatggcaggcctcagcctctccaatatgttgtcaatgcagcctttttggctgctctttacagtgattatctcgatgctgctgatacacctggatggtattgtggacccaatttcttctcgactgatgtccttcgagactttgcaaagacccagattgattacatccttgggaagaaccctcggaaaatgagctatattgtaggttttggtaatcattatccaaaacatgttcaccatagaggtgcgtctataccgaagaacaaggttaagtacaactgtaaaggaggatggaaatggagggactcatccaagccaaacccacatacaattgttggtgctatggttgctggtcctgacaagcacgatcatttccatgatgtccgaaccaactacaactacactgagccaactctagcaggaaatgcaggtttagtagctgcacttgtggcattgtccggtgataaaaccaccggtatagacaaaaacacccttttctctgctgttcccccaatgtttcccacaccaccaccacctccagcaccatggaaaccatgaggtgttgtattgtgtcattcattgtcctcctttccatcaagtgccaaaagtgacttcatgattttgaagatggaggtagtagatcgaagaagtcaaggacggccgcacgtgaaaaaatggaagtagtgaaaactaggcctagtgattctagtttgtctaggaacaatctttggtttaagattagcattaaaatttcataatggtacttgagactgtcttttgtctacttgtttttttgttgttgtgatatacatagtatgtatgtatcaaatcttgaattctttaaacgtgcaaaacgaacagcatgtaatgtaggtgtcacgttttgatttataatgtcttatagttaccttgctc

SEQ ID NO: 10018 - DNA, 1234 bp, Glycine max
  Clone ID: 700891028_FLI
tgtagacatgctttttccgtcaatttgggcattctgtggttcttgcggattatcttacgcttcgcaaaggcttcatcatgaatcacaacctttcattcaaatatgattttcacagctacatgattcgatcaatggaagaggaattccaaaggatagttggtgtgagtggtccactctggggatttgttattgccttcatgcttttcaacattaaaggatctaatctatatttctggatagctatcattcctgtatctcttgtgctcttggtgggaacaaaactacagcatgttattgcaaccttggcattggagaatgctggaattacaaggttcttcccagaagcaaagttgaggcctcgtgatgaacttttctggtttaataagcctgaactattgctatcgttgatccatttcattctcttccagaatgcatttgagctggcttcattcttttggttctggtggcagttcggatattattcctgctttattaggaatcaccttctcctttatataaggctaatattggggttagcaggacagtttctttgcagctacagcaccttgccactctatgcacttgttacacagatgggaacaaactacaaggcagcattaatcccacagaggataagagaaacaattcatggttggggcaaggcagctaggaggaagagaagacatggcatgttcactgatgactccaccattcacacagacacaagcactgtgttgtctattgaagaagatgatcaattaattgatacccctgaagtagaattacaaccagcaacagctgttacagctaccccttctcccattgctaatgaaacttcaagtagggctgttacacccctcctaagaccctctgcctcaatatcttcagtgcaatgcagttctaaagctgaagcaattccaagatgctcctctatgccaagtggaagataaattgtgaacaatggagactaatgaaactagttaaatggtacattgataaagatggcttttgtatgatcatcaaagatgtataagataactacttatagttcccttaaagaaagctttacaagggaatagtgcttttggacattactaatttatgtgggacaactatacaatggggtgacttttgtatcttgatgccgagaagtaacactggagaattggccaagtatattgtaattttctttttttggatttgaaatagtgtaaattaaagttgattgtacgtc

SEQ ID NO: 10019 - DNA, 1360 bp, Glycine max
  Clone ID: 700891088_FLI
gcaagttagttggatgtggctctgctgtgccagctcttcagatttccaatgacgacctttcgaaaatggttgatactaatgatgaatggatatctgttcgcaccggaattcgtagacgacgagttctttcaggcaaagataacttgacaagtttagcagtagaggcagctaggaaagctcttgagatggcaaaggtagaccctgatgatcttgacctaatattgatgtgcacatctacgccagaggatctttttggtagtgctccacagattcaaaaacagcttggctgcaaaacaaatccattgtcttatgacattacagctgcatgtagtggatttgtgttgggtttaatatcagctgcttgccacattaggggaggtgggtttaataatgttctagttattggggcggatgctctttcacgatatgttgattggacagacagagggacctgtattctttttggggatgctgctggtgctgtactagtacaggcctgcaacagtgaagaagatggtttatttggttttgatttgcatagtgatggcagtggtcaaaggcacttgaatgcttccattaaagaaaacgagtcaaataatgcattggattcaaatggttctgtggttggctttcctcccaagcagtcctcatattcatgcattcaaatgaatggcaaagaagtctttcgctttgctgtacgatgtgtgccacagtcaattgaatctgctcttcaaaaggctggtctccctgcatctagcattgattggctacttctccatcaggcaaaccagaggattattgacgcagttgccactcggttagaactcccctcagaacgtgtgatatcaaatttggccaattatggtaacacaagtgcagcttccattcccttggctttagatgaagcggttcgaagcggtaaggttaaggcaggccagactattgcaacggctggcttcggtgctggtcttacttggggttcagcaattcttcgttggggctgaatgcttttctttcacggcagaattgcaaatagagaagaatcagttgcaagtgcagctgtccaaataccccacattcttacacaattgtagaaaatggggtttggggaatttgcaaacggatagatatcattaacatccagcactccctaaacatttccctttctttttgtcttcaagttattttgtcttcaatttacattctccttgggcttcctttctcaagtaccatttttttttctttttgaggcatgtatttgtcattcagatttatttgaaacgaggcttactatttatgtttctcaatggtacttgtaattaaaaatgcagcatgccaagtgtttgcttgcttgtacttt

SEQ ID NO: 10020 - DNA, 964 bp, Glycine max
  Clone ID: 700891140_FLI
gtgggataaaaaatggaacttgaaaagttacatgattcaatcaatttgatactgtcacttcagagtaaaaatggaggtatgactgcgtgggagcccgcaggagcttataaatggttggaactactcaatcctacggaattttttgctgacatagtagttgagcacgaatatcttgaatgcactgcatcagcaattcaggttttagtgttgttcaaaaagctttaccctgagcatagaaaggaagagatagagaacttcattgctaaagcagtaacattcattgaagatacacaattagagaatggttcttggtatgggaattgggcagtttgtttcacttacagctcttggtttgcacttggaggtctagttgctgctggcaagacttacacaaattgtgttactattcgtaaagctgtgaaatttctactcaaaatacaaaataaggacggtgggtggggagagagttatctttcttgcccaaggaagatgtacgtacctcttgaaggaagtcgatcaaatgttgtacaaacatcatgggctctaatggctctaattcatgctgagcaggctgagagagatccaactccccttcatcatgcagcaaagttactcattaattctcagttagaagatggcgattggccccaacaagaaactcttggagtatacttgagaaattgcttggttcattactcattctatagaaatatttttccaatgtgggctttggctgaataccgcacaaatgttttattgccttcctttactatttaagttgaaaaattgtgagctcaaaaagataatgtcataccaataaaagtctagaaaaaaaaaagttggtaatgaagtttaataggcttattcatattcccatacttttgtaattttgaaacaaatatttcgtatacattgtcagggactccaaaatttatcatacataacgaggggctctttttgcacc

SEQ ID NO: 10021 - DNA, 740 bp, Glycine max
  Clone ID: 700891158_FLI
gtggtttctacagacgaaaatcaacaccaggggagaatgtgtagccttcaagacataggaggtcatttcatgaaagtaccaattattgtattccaggttcttctttgtatgcatctagagggaacacctgcttgtgctgtacatatacctcttccagttattttctctccccttttcctactgcaaggagctggggtaatgttatctgcatctaaattaggggagaaacttgtgcttctgctacgaagtggagctggtggaggaatatattttagattttcttcaagagctcatgattgcttggggttcttgcatcatggttctagattattaggttggtggtcaattgatgaagggagtcgggaagaacaagcacgactataccatgagggagcaattgggtataatacattttgtggttatcctcctgagattgttaagaaaatgccaaaaaaggaacttgctgaggaggtttggagactccaggcagctcttggcgaacaaactgaaattacaaagttcagccaacaggagtatgaaagacttcaaaatgagaaagtgttatgcagagtttgtttcgagggagagattaacgttgtactgctcccatgtaggcatcgtgttctttgcagcacttgctcagagaagtgtaagaagtgcccgatttgccgtgactccattgctgagcgtctgcctgtatatgatgtttagatgttaacttggtcaacttttttcgtgtt

SEQ ID NO: 10022 - DNA, 1469 bp, Glycine max
  Clone ID: 700891270_FLI
gtttggtgtttagtgggtacccttgccttcataggaagtgagaaactaggctagttagtcccattggaattttttttttttgtggctgaagaaggtgaaaagggggcaagtttcactcttcaaggagtttgaagggtgtcaacttgtgttttgagactctgaggttgaagctgcattttttttaagggtggggatgggttctagttgtggttgtggtgtgacacttgttcttgttttctgcttatggggtgtgttgatctccctatcttctgctgctaggctcagtgcttcaaggcagaagcttgaggttgctaagcatttgaatcgcttgaacaagcctcctgttaagaccattcagagtccagatggggatacaatagactgtgtgcctatttcgaagcagcctgcatttgaccatcctttcctcaaagatcacaagattcagacaaggcctagtttccaccctgaagggctttttgaagagaacaagttatctgaaaagcctgatgcaaaaacacatacccccatcactcagctgtggcatgcgaatggtagatgccctgaggacacaatacccgtcaggagagccaaggaagaggatgttctgagggcaagttcagtcaaaaggtatggtaggaagaagcacagagcaatccctaagcctaggtcagctgagcctgatcttattaaccaaagtggtcatcagcatgcaatagcatatgttgaaggagacaagtattatggagcaaaagccactctaaatgtgtgggaacccaggattcagcagcctaatgagttcagcttgtctcagctttggatattaggaggctcatttggtcaagatcttaacagcattgaagctggctggcaggttagcccagatttatatggtgataacaacacgcggctattcacctactggacgagtgatgcatatcaagctactggctgctacaatcttctttgctctggatttattcaagtcaacagtgaaatagcaatgggtgcaaccatttccccagtttctgcataccgaaactcccaattcgatatcagtatacttatctggaaggatcctaaagagggacactggtggatgcaatttggaaatgactatgtattggggtattggccttctttcctgttctcatatttggctgacagtgcttccatgattgagtggggaggtgaagttgtaaattctgagcctgatggtcagcacacatcaactcaaatgggaagtggtcatttccctgaagagggttttggcaaagcaagctacttcagaaacattcaagtggttgatagctccaataatctcaaggctcccaaaggcattggcaccttcactgagcaatcgaactgttatgatgtccaaacaggcagtaatggggattggggccattacttttactatggaggccccggtaaaaatcctaattgtcaatgagtaatgatgagaggaaagt

SEQ ID NO: 10023 - DNA, 1081 bp, Glycine max
  Clone ID: 700891278_FLI
tggaaacctcagagtatctaaaaaatgattgccttgtcatgcattgcactgttggtgttgttaaaactcgttttgagggatctaaacagggtgttattgtgccacagtcagacatgggccgggattttaaggacttgttggaatctgaggtcggttgtgacatacttttcaaggtcaaaagtgaaagcttcaaagctcataagttgatacttgcagcccgatctcctgtgtttagagcccagttttttgggcttgttggggatcctaccttagaggaagtagtggtagaggatattgagccctttatcttcaaggcaatgcttctcttcgtttactctgacaaacttcctggcatatatgaggttatggactcaatgcccttgtgctcatacaccgtcatggtgcagcatctcttggctgctgctgatctctataatcttgatcggctcaaactgctttgcgaatcaaaattgtgtgaagaaatcaatactgacaatgtggccacaacacttgcgctggcagagcaacatcactgtccacagcttaaggcaatctgtttaaaatatattgcaaatcctgcaaacttgggagctgtaatgcagtcagaagcttttgtgcatttgaaagagagctgcccctcaatgctgttggaattgctggagacatttgcatcagtggatgataactcaggccagacattgagcagaaagagaagtggcagtagcatatatgggcaagatttagcagacggggcagctgctgaatcagttaatccaaatggcaggcgagtaaggaggcggacataagcatagtttacaatctgaatctgcaacctttaaaacttaaaagtgtgatatagttaaccccctagtcctgtcaatgtaagtgattcaccattttcatttccacctgatccctgagattttatatgtcaagttttctggccttcgcaccttgtctcaaggggctactttggacagcattttcaatggtagtttgacattagagcagttctaatgtagggtatatcatgtttgatgacgttaataaaaagtaaatagctgatatatttgttttttat

SEQ ID NO: 10024 - DNA, 739 bp, Glycine max
  Clone ID: 700891309_FLI
ggaggttatatggaggtgactgggttttctgcagaagtgagggaacaaatatataaagtggcatctgtcaacctttgctctaatatctctggtcaaattcttgcaagcttggtcatgagtccacccaaggttggagatgagtcctatgactcattcatggctgagaaggagaatattttggcgtcccttgccaggcgtgcaaagacactagaagatgcattcaacaaattagagggtgtaacatgcaacaaagcagaaggggcaatgtacctgttcccccaaattcgcctgtccgaaaaggctatcaaagctgcagaggctgcaaatgcaacacctgataacttctattgcaaacgcttgcttaatgccacaggagtcgttgttgttcctggttctggttttggacaggttcctggcacatggcattttaggtgcaccatattgcctccagaagaaaagattccggccatcgtcacccgcttgactgagttccatgaaaaattcatggatgagttccgtgactaagtcctacttgaattttatccgtcaatttaagggtacccaattgatatttgatgaggatggattttgtagttagagaaaatagtctcttttgttttcaggaataaatttgtcaactccttatagttgcattttgaatatgcaagacttgaaaggatatttgattttctccattcttatacttgtattaggtcctatataaatctctttttaatcg

SEQ ID NO: 10025 - DNA, 1651 bp, Glycine max
  Clone ID: 700891365_FLI
gggtgaaaagggattgaaggattgttgttcttttctattggggttatatctgtgctttatgggaagccctatctgtcttcttgttgttttatttcgattcgatgtggcacattctacctttcatttctgtggcgtctcattgattggtattatgaatctcgaatttgcagggttttagaaaggttgacccagatcgatgggaatttgcaaatgaaggatttttaagaggtgaaaaacaacttttaaaaagtatcagtaggcggaaatctgctcatgtaaatggtagtcaacaagcatctcaagtgcataaatcagctgctggagcatgtgttgaagtggggaaatttgggcttgaggaagaggtggaaagactgaaaagggataagaatgttcttatgcaggaacttgttaggttgagacagaaacagcaagggactgataaccaattgcaaaatgttgggcaacgtgtgcagtcaatggagcagcgtcagcagcaaatgatgtcattcctggctaaggccatgcagagcccaggcttcttagctcaatttgttcagcagcagaatgaaagtagtaaacatatccctgggagcaataaaaagaggaggctccagcgacaagaagaagatagtttagccaccaaggatctccatagttctcttgatggacacattgtcaagtaccagagttccataaatgaggctgcaaaagcattatttcgccagatattgcaaataaacaattctacaacacaatcatcaattaagaaccctgatgttttccttattgatgatattccttctgccattgcatcagatagcagtagttcatccactcaggtttctaatgtgatggttccacctatatctgagctgacgtctatggaagtaggatcacagtttcctctcagttgtatgcccagtaacatatctgaggtgcagtcttcacctgctgttttgggtttctgtagaagtcaggggttggagacagaaagcagtttattgaatcatgagctgaatgttatgggggctgatactaggaacatgggggagatagatatgatgtcaactgttttagatgaggcagacgaagctgatcatttttcacctgacacagatggaatttctaaactcccagaaatcagtgatgaattctgggaactgtttttaaggccaagcccacttacagaagacacagaggaaactaaatgtagctctctaggatgtggtttgactgaagatcagggtttgccttcagaaatgggaaataagcaggaaaattttgatacaatacaacatgttgactgtcttactcaacagatgggacttcatgcattggagtactgattgtgtgtatatatgttactcacaactgaaggttgaggtcccctttgctactgagcagacaaagccatcttacttatacaacaaagaaacctgacagatccaacaacttgatcggtgcttttatccgcttgtaatgtcgtcgtgtgttctgtttgtcattgggggcttaaaaacatacaagttcacgaaacttcatatatctccatgtattttgaattttaataactatgcccccgtttccaatgcgatgatatttttgtggggatgttccgtataattggatcataactcttgaattgctgttg

SEQ ID NO: 10026 - DNA, 991 bp, Glycine max
  Clone ID: 700891386_FLI
aacaaaaacaaagaaaaaaaaaaacccttagccaacacaaccatcatggccacctctgctattcagcaatcagcattcactggtcaaactgctctgaagcagctcaatgagttcgtccgcaagaccggtggcgccggcaaaggtcgcactaacatgcgccgcaccgtcaagagtgctcctcagagcatttggtatggccctgaccgtcccaagtacttgggtccattctcggagcagattccatcatacctgaccggagaattccctggtgactacggatgggacactgctggattatcagctgacccggaaaccttcgccaggaaccgggagctggaggtgattcacagcagatgggcaatgcttggtgcccttggctgcaccttcccagagatccttgagaagaatggtgtcaaattcggcgaggccgtgtggttcaaggccggtgcacagatcttctcagagggaggccttgactacttgggcaacccaaacctgatccatgctcagagcatccttgctatctgggctgttcaggttgtgctcatggggtttgttgaaggttacagagttggtggaggaccacttggtgaaggacttgacccaatctaccctggtggtgcttttgaccctcttggtctggctgatgaccctgatgcattcgctgagttgaaggtcaaggaactcaagaacggtcgcttggctatgttctccatgtttggtttctttgttcaggctattgtcactggcaagggccctattcagaacctttacgaccacgttgctgatcctgttgccaacaatgcttgggcttatgccactaactttgtccctggacaatgaggatgcctacatgcaatgcaatcttctgctcccttttgcagttcccttgtgtttaactccattttcactaatgtaactacacctgtgtagcagaaaaatctgtatgagaaccattatatttttatatattagaaatttgggtccccag

SEQ ID NO: 10027 - DNA, 1762 bp, Glycine max
  Clone ID: 700891389_FLI
ctatgttgagagactcagggatgagcccttgtttctggttcttgcccagaatgttcaggaatatcttgaaagagttggaaatttcaaagctgcatctaaggtggccttgaggagggttgagctcatttactacaaaccacaagaggtttatgttgcaatgaaaaaattgactgagctgacagaggatggagataatggagtggaggcaagtgaggagaaaggatttgaggaatcaagaattcccactgcatttgttgctaccccagaggttgtggcccggaagcccaccttccctgagaatagcaggaccataatggatgtattggtatcattgatatacaagtacggcgatgagcgaactaaagcacgtgcaatgctctgtgatatataccaccatgctcttcttgatgaattctcaattgcccgtgatctgctgcttatgagtcatctgcaagatagtgttcaacatatggacatttcaacgcagatactttttaacagagctatgtcacagttgggtttatgtgcttttcgggttggactgatttctgaagcccatggctgcctgtctgaactgtactctggtgggagggtgaaagagttacttgcacaaggtgtgtcacaaagtcgctattatgagaagactccagaacaggaaaggttggaaagaagacggcaaatgccttatcatatgcacatcaatcttgagctcctggagacagtacatcttgtatctgctatgctgctggaagttcctaatatggcagccaatgttcatgatgcaaaacgcaaactcatatctaagactttccgtcgcttgcttgaggtgagtgacagacaaacattcactggtccaccagaaaatgtaagagatcatgttatggctgccacgaggtttcttagcaagggagacttccagaaggcttttgacattattgtgtctcttgatgtgtggaaatttgtgagaaatcgagacactgtgcttgaaatgcttaaggacaaaatcaaggaggaggcattgaggacatacctctttaccttctcttcatcttatgaatccttgagcctggatcagctcacaaaattttttgatctccctgtttcttgcactcatagcattgtcagtaggatgatgatcaatgaggagcttcatgcaagctgggaccagccaactgggtgcattcttttccaagatgttgaacactctaggctgcaggccttggcattccagttgacagagaaattatctatccttgcagagagtaatgaaagagcaacagaggcaaggataggtggtggtggattggatctgcctctaaggcgcagagatggccaggactatgccgctgccgctgctggtagtggaacagcctcgtcaggtggtagatggcaagacctgtccctttctcagccaaggcaaagcagtgggcgtgcaggatatgttggtggtggtggaaggccaatggcattaggccaagggagtggctattccagggatcgatcgggacgaggatcaggtgctggctatcagagtggacgatatcaggggggttcagcattgaggggaccccatggcgatgtatctacacgcatggttagccttaagggtgttcgtgcttagagaagttcaaaattatcttctgtacgccagttttgataatttgactaaatgcactatagcatttctggttttcatttctgtaacattttacttctggattttgtctaaatttgcattgaaatgtatgatcggagcttgtgg

SEQ ID NO: 10028 - DNA, 1585 bp, Glycine max
  Clone ID: 700891395_FLI
ggcgaactcttcaacaaggtcgcaaagggaaggttaaaagaagaagtcgccagaaagtacttccaacagttggtttccgcggtggagttttgccacgcgcgcggcgtgttccacagggatttaaagcccgagaatttgttgctggacgaggatgggaaccttaaagtctccgactttggactcagtgccgtgtcggaccagataaggcatgacgggctgttccacacgttttgcggaacacccgcgtatgttgctcctgaggttttggcgcggaaagggtacgatggtgcaaaggttgatatttggtcttgtggggttgttttgtttgttttgatggcgggttatttgcccttccatgaccgtaacgttatggctatgtataagaagatttacaagggtgagtttcggtgtcccaggtggttttcttctgaacttacaagacttttctctaggcttctcgatactaaccctcagacaaggatttctattcccgaaatcatggagaatcgctggttcaagaagggtttcaagcagattaagttttatgtggaggatgatagagtttgtagttttgatgagaaacagctgcagcatcatgatggcgatgattatttggcaacatcggattctgaggttgagattagaaggaagaatagtaattgcaatagtactagtaatggtaattcgttgccgaggcctgcgagtttgaatgcgtttgacataatatcgttttctcaaggctttgatctatcagggttgtttgaggagaagggtgatgaggcgaggtttgtgtcttctgctccggtgtcgaagattatatcgaaattggaggaggttgctcagttggttagcttcactgtgaggaagaaagattgcagggtgagcttggaggggtgtagagaaggtgtgaaagggcctttgactattgctgctgagatttttgagttgacaccttccttggtggtggtggaggtgaagaaaaaaggaggggataaggcagagtatgagaagttttgtaactctgagctgaaacccgcgttggagaatttggggatggaggattctgcttcttcttcttcttcttgtcatcaatctacacacactcaatctgaattccaacaacaacatcgaacattttctgactctgcccttaacagacattcagataataatgaatgcttatatgatcaagagttgggtctagcagaagagactagtatcccacaacttggtgaaccaaagttcgaatttcaacaggaaaatgtgcccatgtttactatttgactgtgtctacaacactattgttttcaaagaatgaaacatgtggaaaaccaaaaaaagataatgaatgtttgcattaattaaggtaccaggagaatgacagaagatgacaacatactatttctctcttgttatttttaggctgtgtgtaagttaaattttactttctttttccctcaagaattttccggcatttttaggtttgctccttgactggagcattagatgctactgtatttctttgtccaaatgttgtattattgtaaggctaatttaattttaaatatagtgaatgaagaagttt

SEQ ID NO: 10029 - DNA, 1186 bp, Glycine max
  Clone ID: 700891438_FLI
aaaaaaaaacagaattacacagaaactcaatcaaaataaaaatttattatggatcataggttacgttgttttgtgacaatacccaaaattccttttctattgctactttctctgattctcgtcttcagttacgttaacgcagccttcgacctcgctactatacccttcaacgatggctattctccgctcttcggagatagcaacgttgttcgctccgaggatggcaacggcgtacaactccgcctcgatcgctacacaggttcgggtttcatttcctccagtatgtaccagtatggattcttcagcgcgagaatcaagttgccatcgaattatactgctggtatttgcgtggccttttatacatcaaacggtgatgtgttcgagaagtcccatgacgagttggactttgaattcctaggtaatgtcgccggaaaaccatggcggtttcagacgaacttgtacggcaacggtagcacaaaacgtggccgtgaggagcgttaccgtctgtggttcgatccaaccaaagaatttcacagatacagcatcctttggactgcaaagaatgtcatattttacattgatgaagttccaattagagaagtgttacgaagtgaggaaatgggaggtgactacccatcaaagccaatgtcattatacgccaccatatgggatgcatcaaattgggctacatccggtggaaaatacaaagtgaactataagtatgcaccttttgtgaccgaattcaaggacctagtcctaaagggttgctccgccgatcccatccaagaggtttccggcaccgagtcttgctccgaccaacacgctgatctcgaggctcaagactatgccgccgtaacccccatgcgccgcctcgccatgcagcggttccgccagcgttacatgtattattcatattgctatgatacattaaggtaccccgtgccacaacccgagtgtgtcattgtaccctcggaaaaacaaaggtttaaggagaccggaaggttgaaattcggtggcagccaccgcaggcaatctcgacggaggggccgtacaacaactccggtggatgataccgatcagggtgatatgtgatgattgatattgagatgtatataacagtgtccattttttatgtctttattggtcttttttttacattatatattatttatttgttgacaggcat

SEQ ID NO: 10030 - DNA, 1874 bp, Glycine max
  Clone ID: 700891441_FLI
cgattattttcttttcttcttcctctctcttcgttctctctctctctctcttattcctttctctccgaatccacgtcctagatccgttgttctcttcccacagttctcactgaatcaggatccattttgataccaagttgctgttgaatatcgagtttgctctttagagatctgtttccctctagacaacggtctgtgtgacctgttattttagttgaatcgaagccgcgaccaaatcttcctgatctttgcctgaggtgatggcatcggcgggtgtagcacctgcttctggagtaagagatgtgaatgcaaattcggttgctgttgaaaggttgcctgatgagatgaatggcatgaaaattagggatgaaagggaaatggaagcaactgtggtagatggaaatgggactgaaacaggacatataattgttactaccattggtggtaaaaatggccagccaaagcagacaataagctatatggctgagcgagttgttggaaatggatcatttggtgtagttttccaggcaaagtgcttggagacaggggaaactgtggctataaagaaggttcttcaagacaagagatacaagaaccgggaactgcaaaccatgcgtcttctggaccatcccaatgttgtaactttgaagcattgtttcttttcaacaactgaaaaagacgagctttatcttaatttggtacttgagtatgttcctgagactgtccaccgagttatcagacattacaacaaaatgaatcaaagaatgcctttgatatatgtgaaactctatttttaccagatatgtagagctctagcttatattcacaactgtattggagtgtctcacagggacataaaacctcaaaatttactggtcaatcctcacactcaccagctaaagatttgtgactttgggagtgcaaaagtcttggtcaaaggggaaccaaacatatcttacatctgctctaggtactatagagcacctgaacttatatttggtgcaactgagtacaccacggccattgatatttggtcagctggttgtgtacttggtgaactaatgcttggccagcctctattccctggtgagagtggagtagatcagcttgttgaaattatcaaggttttaggtaccccaacaagggaagaaatcaagtgcatgaatcctaattataccgagtccaaatttccacaaattaaagctcacccatggcacaagatctttcacaagcgcttacctcctgaggctgtggatctcgtctcaaggctactgcaatactctccaaatcttcgatgcacagctctggaggccttggttcatccattctttgatgaactgcgtgatccaaatacccgcctaccaaatgggcgttaccttcccccactctttaacttcagagccaatgagcttaaaggagtgcctccaggcatgctggtgaaactgattccatctcatgcaagaaagcagtgtgccttgtttgcgtcatagtgtagcctcgtgtaaatattatctactctgcctgtagaagtgtatgtagtctgtttcaggttgttaatagttggttccttccacctagttctgttaatttgtccccctcacccaaagaaagaaaaatcctccttccaatttcttatatttcttgctgcctgaagaaagccgtttgagaagaagcttcaagttgatataattggtttcctcatcttcaaagttttaacagattgtattaagtattaatactattaattagaagaaccattgtatactcatgtagtatactagaacactagtacgatgtgatccgggaggggatgttttaaagcttgtttgtatatccctgcctccccttaattatgagaaattttactttggatg

SEQ ID NO: 10031 - DNA, 864 bp, Glycine max
  Clone ID: 700891472_FLI
aaactatactgcaaaagtttctgattttggtctctccaagtctatcttagatgatgaaaaagattacgtctccactcaagttaaaggaacaatgggctacttggatccagattattatactagtcagaagttgactgaaaagagtgatgtctatagttttggagtgctaatactggagctgattactgcaagaaagccaatagaacgagggaaatacattgtgaaagtggtcaggagtacaatagataagacaaaagacttgtatggtcttcacaaaattattgacccggccatctgttcaggatcaacactggagggttttgagaagtttgtggaccttgcaatggagtgtgttgaagattcaggagctgacaggcccgcaatgagtgatgtggttaaagaaattgaagacatgttgcagtctgttggtatgcacctaacatctgaatcagtaacatccacaacatctagtcatagatatcaggaggtaagtatagtgagtttccatctggaccaaccttacagcaatgagtcctttggttcaagtgcagaacatattcaaaaattgaacctagttagttaagttagtcttttttctcaagattgaagtcaagagagacttgtttattagtatttcttggccaaaacacagaaaagtagaaattgtggaatttagagtttgtggctgtgagcttcagagtataagtgtggtagcaaggttaacatttccttgactatcatttcttttccttctttctctcccactaaagatgtgaaatgtacaatgaatataggttttgatatggaacatgtagaatataaagtataaacagttttaatatgggcatgatttctcattttttg

SEQ ID NO: 10032 - DNA, 1577 bp, Glycine max
  Clone ID: 700891492_FLI
ctcctgtagagcttatcagatgtttgaggtctattaaggatcatgcctttgtggcatcagaatatccagttgtaataaccctagaagaccaccttacaccagatcttcaggctaaagtggctgagatggttacccaaacatttggagacatactatttactcctaactcagaaagtgtgaaggaattcccttctcctgaatcacttaagaagagaattattatatcaaccaaaccacctaaggagtaccttgaggcaaaagaaaaggaaaaaggggatgattcacagcacgaaaaggagaaaggggatgattcagagcatggaaaggcatcaggtgaagatgaagcttgggggaaggaagtcccaagcttgaaaggtggtactatagaggattacaaggacaacaacgtggatgaagatcttaatgatgaggaagaatttgatgaatcagacaagtcacatcataatgaagctccagaatatagacacctaattgccattcatgctgggaagcctaaaggtggattagtggaatgcctcaaagtggatcctgaaaaagtgagacgtctaagtttaagtgagcaacagcttgaaaaggctgctataaattatggacaacaaattgtcaggtttactcagcggaatatactgagggtgtatccaaaaggtactcgcattgactcatcaaattataacccattaattgggtggatgcatggagctcagatggttgcatttaatatgcaggggtatgggagatctctttggttgatgcatggaatgttcagagccaatggagggtgcggttatgttaaaaaaccaaattttctattggagactggtccagatgacgaggtcttcaatcctaaagctaagttacctgtgaagactactttgaaggtgactgtatatatgggggaaggatggtactatgatttcaagcatacacactttgatcaatattcacctccagacttctacacaagagtggggattgctggagtccctaatgatactataatgaagagaactaaggcaatagaggataattggttacctacatggaatgaggcatttgagttccctctcactgttccggagttggccttgcttcgcgtagaagttcacgagtatgacatgtctgagaaagatgactttggtggacaaacatgcctacctatctgggagcttagaagtggcattcgagcaattccactgcatagccaaaagggagataaatacaacactgtaaagcttctcatgcgctttgagtttattaataattgattctgtgcaatgtgcatccttctgctccccattattattattattattatgtacagtcattaagatgtgttagtagcaagagtttgtatgtagtagctggatgatatcgtgaattatgtgccccgttaaatgatgtaagaaacaaaatgtgttgtgtattttgttttcttgaggagacttgttggtcttgtaaggcttgtcaatatatactacttatatatatatatatatataaacataaggaaattgttcgtgttttgtatgagaatactttttaagtcatctgtactc

SEQ ID NO: 10033 - DNA, 291 bp, Glycine max
  Clone ID: 700891569_FLI
gttgggttctgtgggctctggctgggcctattgtcggcccaggtttgttgtgcgggcctcatgttgtatatgattgggaccaccgattgggagtaccaggcctgtcgggcccagttacttacggcccttgatgaaggatccgacggccacaaacaaccgttgattgccactttggacaacaacaactactcttgatgaaataaaaaaaaaaattatgatgattgttgattgacggtgtaatattctttttcttttgtaataattcttacttattattaaagggaatttgtg

SEQ ID NO: 10034 - DNA, 708 bp, Glycine max
  Clone ID: 700891583_FLI
aaagaagccagtgctaggatttgttagtgaagcaatggctcaaaccatgttgctcatgtctagtgtctctagcagttattccgtggatttggttttactaagcagaacgagctctttgtgggtcgtgttgctatgcttggttttgcagcatcactgttgggtgaaggaataactgggaaaggaattctagcacaattgaatctggaaactggaattcccctttatgaagcggagcctcttcttctgtttttcatcctcttcaccctgctaggagccattggaggtttaggtgaccgtggaaaatttgttgatgacgaacctactactggaggtgttattcctccaggcaaaggcttcagggaagctcttggtcttggttcaggtcctttatttggattcacgaaagcaaacgagctatttgtgggaagattggctcaattgggtttcgttttctcattgattggagaaattataaccggaaagggagcactagcccaactcaacattgagactggggtaccaatcaacgaaatcgagcccctagtgttgttcaatgttcttttcttcttcattgctgctttgaatcctggaactggcaaattcgttacagatgagggggaggatgattagacactaacccttttgtttgtttgtgtttaaacaaatactcgtttgctcatctatcataaaatgcattgagttcatcat

SEQ ID NO: 10035 - DNA, 1030 bp, Glycine max
  Clone ID: 700891618_FLI
ctaaagagcagctgcagacaaacaagcctcttttggggttggattagctggtgagatccatggaagatataggtccgaattcatgcacaaggccagtgacagagaagaaagcaagaccccaagaacaattgaattgtccaaggtgcagttcaaccaacacaaagttctgttattacaacaactacagcctcacacagccaagatacttctgcaagacttgtagaaggtattggacagaaggagggtctctgagaaacgttcccgttggaggtggctctaggaaaaacaagagggtcacctcatcaaaggttcctgacttgaatccaccaattagcctctcatcagtctcagccatttcttcccaaaaccctaaaatgcaaggagtccatgaccttaatctggcttttcctgcagctatggacaagtatcatcatggcacgtctccgtatgttgagatgccaaaacttgaaattggtggtgatcacagtactagtcatcatagtcaccaccatagccatagcccttcttctgcagttgagctactacggtctggcatggattctaggggtttgaatccttatgctcctaattccttgatgtcaggctcagatcattccctttatacacctggctatcccatgcaggaaattaaaccaaaccttagcttttcagttgatgatggatttggaaatagatcatatggggttcaagagaatggtggagggaggcttttgttcccttttggagacatcaagcacctttctgcaggtcttgaagtggaacacaataaagaacaaggaaataattcaactggatattggactggttggtgaagggtcttcatggtaaggaaagaaaagaaatattgggagaacataaatatcaacctgcattgttttctttctcttcactgtttctatctatccgcttgaagttgttcagatcactaacaataggatacacatggttactctattttgtatacattattattattattacatttctattcgagcaatgtgaggatttt

SEQ ID NO: 10036 - DNA, 1566 bp, Glycine max
  Clone ID: 700891669_FLI
cagccatgctcatgtgggatctgcatctgtgttggttggtgatattgatgatgcattggactctgaaaaaaggtacttgaaaaggggtgtgaatgatcgggggagggttgctaatgatgttgagacagagcagattgtccttgatgaagaatcaggctcttgcaagggaaagatgagttcagttgtgcaaatgcgtggatcaataccacttttctggtcacaagaagcatccagatttagccccaagcctgatataattttgcagaggtatgatccaacataccaagcaacaaaattgcattttgaagacctagctaagagatatggcaatccaattattgttctgaatttgattaagacagttgagaagcggcctcgagaaatgatgttgaggcgtgaatttgcaaatgatgttgggtatctgaaccaaattctaccagtggagaaccatcttagatttattcactgggattttcacaagtttgcaaagagcaagtctgccaatgttttggaagttttaggagctgtagcaagtgaagcgctcgatttaactggtttttactacagtggtaaacccagcatcattaagagagccaacaagagcaatcaaacaagcacagggaggtgaatggttcagtgatccactcaccatcagagtttgatgcagcttcagtggcttttgagatccctctcctaacctatggttaagaggttagttgattttcagcccttgtgtttgttcttgtcttggttgagaatacacatgtattgcataataagacagaactctgaaaaaatgtctccattcattttcacctactacatcatatacatccttaatccttcaatgactagttgtagttgtaagcccctaatctttgtctgatttctgattaatcaaatgggaaaactagtttttgtttgcattttaatctatgtggtttgacagatttttttattgaattcagtgggactaattgttggagatgttgtgttctcaagttaaacgtatgtttttggattggttgaaaaaggttttgatggagtctctagtacataactatgtagaaattatgaacagatttttctatttactggtggtatttatcaagttgatttaagtgattatttaaaaaatttgattttttaatcttagaattaatttatgctaattctaatattcaaatagataaatgaccaggaaaattaataaaagttcaagaaaaacacaaatgaactataacggaagtttgtgaaatatttgagataacattaaagtttgaaaaaaatgcctagcagaaagaaagagtatttatggtggaaaaaaaatgcctagcagatagaatatttagtccatttattattttctttatttatattttttaatttccttctatccttcttccctgcatcccattttgggtggaggtctaccattttactcaaaaccatacaaaaaaaaaatcaattccagtggatatttaatttaattttataagtggtaataaaccgtgttctctaaaaatggggtgtatttagctgaaaagaagacaggaaagaagtaat

SEQ ID NO: 10037 - DNA, 1318 bp, Glycine max
  Clone ID: 700891850_FLI
ccaaaactccaattggttgttccaggaaagcaaggaagcaagatggactgcagaagagaacaaactgtttgaaaatgccttggcttactatgataaggacaccccagatagatggatgagggtggcagccatgattccagggaaaactgttggtgatgtgatcaaacagtacagagagcttgaggaagatgtgagtgtcattgaagcaggtttgatcccagttcctggctatactactgccagttctttcacattggagtgggttaacaatcaaggctatgatgagttcaagcagttctgtaatgttggtgcgaaaaggggtgcatccacgaggccaactgagcaggaaaggaagaaaggagtgccatggactgaagaggagcacaggcaatttctgctgggtctcaagaagtatggtaaaggggattggagaaacatctctaggaactttgtgaccacaaggacaccaactcaggttgcaagtcatgctcagaagtacttcatcaggcagcttacaggagggaaggataagagaagatccagtatccatgacatcacaatggttaatctccaagaaacaaaatctccttcatcagacactaccaaaccctcttctccacttcagaatcaggcattgtctagcatggttaaggaggaatatgagtggaaattgccatgtgagggcatgcccattgttttcaattccacaagtggaaacgttcatgtcagcaccactgcatggcatttcttcatatgaatctagaccacaggagcaaaatttacttagacaatctccatggatgccagttttcaccttgtgatgctattttgcaaatgcaattgatgcgacatcggtgatctatacaagtggtgcagggattagagttttgaagttagatggaaggtttgtgtgagctagcatccgatgttcatcttcctatataggcagccaggagttatctgcagatcgccctgaggaagaggagctatctcttgcctttttaaaagatgcttcaaataaatatattcagttccaagtatacataaagaattaaataaaggcatcaatcatgttgatgtactagtggtgtaatataaaacaatttggactgttaatttttataaccctatattaggagtgtatttcaagccataaagttatgattataccagaaagattttccaagtgtggtgaggagttggacagagctttggtcctcatgtaaaaatgtgatcataaagcatttgatatgaaacataatgtcttggaagcatttgttccacaacatggtggacattaagatccaagctgaaagtc

SEQ ID NO: 10038 - DNA, 725 bp, Glycine max
  Clone ID: 700891856_FLI
aagtaaggtgcacctgccatgctaacttaaggaaggtagctcttgtaaacatttagatctatcttccttaagtaaggtgcacctgccatgctaacttaaggaagatagatctaaatgtttacaagagctacccagaacttctcaaggccttgggaaatatgttcaagtgcacatttggtgaatattcagaaagggaagggtacaatggatctgaatatgctccaacttatgaagacaaggatggggattggatgctggttggagatgttccatggaacatgtttgtgtcatcctgcaagagactgagaattatgaaagcatcagaagcaaaggggttgggttgtttttgaccaaaataaaaaaacaaagcaggaccatcatgcatgcccatatccaaaacatggagcaaagcaattttcagtgacgtcatccaagagaatttcttctgtttggaatatgcaagagctaggcacttggcctctgtgaaatggttatatttagcttattaaaaagagagatgcacatacacgattttattttccctttatttgtttatttcaaaagctaggtgactttttagacctgcttaattaagtatactattccaaattctcaatgcctaaaccagaattgaaaactgtaatgatgaaatgagaagaaaataaaaagcaaaaatgctattttaattgtatagactatatatagagaggataaacatatatatg

SEQ ID NO: 10039 - DNA, 1512 bp, Glycine max
  Clone ID: 700891859_FLI
ccaggatttatattatcgttttatctgagaattttgcttcttcctggtattgcttagttgaagttgttatgattcttgatgagttcgctaaggggaagggtagatggattgtgccgattttcttctacgtggatccctctgttctggttcgtacttatgaacaagcattggctgaccagaggaagtggtctagtgatgacaaaattgaagaatggaggactgctttgactaaattatctaaatttcctggcttctgtgtcagcagggacgggaatatatttgaataccaacatattgatgaaatcgttaaagaggtctctagacatgttatctgcccaattggacttgatgaaaaaatatttaaggttaaattgcttttgtcctctggatcagatggagtccgcatgattgggatatgcggagaagctgggattggtaaaacaactttagcccatgaagtttttcaccacgctgacaagggatttgatcactgtctcctcttttatgacgtgggaggaatttcaaatcagtctggaattttgtcaatactccatggaaaaagggtttttataatttttcaagatattaaacatttcaagcagttggaagacattcgagaactaactaagcagcttggttctggcagcaaagtcatcattacagctcaagataagcatttgcttgatagatatgggattggatttgaaagtatatgtgaaataaaagggtttagtgattcagaagctgatcgattgcttgaattcaaagttcttaattctgcaactgttagtcctaagtatgtgaacattctaaaccgaatcaagtcttatgcccttggtcatccatggactttggaagtaatgtgttccaacttgagtggaaaatcaatagaagaatgtgaatctgcattactcaagtatgaatctataacagatagagacatccaaaagatactagaagtaagctttattgctttggaaaaatgtcagcagcagatgttgattcacattgcattgtacctcaaagaccagaaattggtagatgttgaagctgaactttgtaataagtataaagtgtgccccagattagatattagagtgttgcttgataaatctcttataaaaattaatcaccacggtcaagtgacattgcatacctctacacaggaaatgattaaagataaagcttcacgttttgaggagcatggaaaccaagaaatgcaatttgtcttaaatgatggaagcggggattgggatccgatggaattggattgacaattaccagaaatcttgctgcttcaaagaaaaaagtttacttctgctcctgttcatcagtagttaataattttttccttgtgtgtgtatcatggtttattttgaaatttacatttctgaaaatctggtctttaaccaagctgaatggtgttgtttgatgcatgtaactgacttcacctagcgggaaaaggctttttgttgttgttcttgtattttgaggtttacacttcagtgtgtt

SEQ ID NO: 10040 - DNA, 597 bp, Glycine max
  Clone ID: 700891870_FLI
cgagtccattcgatattatgttcgagcacttgccatgaatccaaaagcagagaatgcatggcaatatttgagaatttcattgagctgtgcttctaggaatgacatgttggaagcttgtgatagtcgtaatttggaccttctccagaaggagtttccactacagtaagggagggtcagttccactgtggaggtggttgcttgaacatgaatcctaattttccttaaaacttttggatgagtaaatggcacattttctgccattaaagctcgcagtagatgcctgcttctatagaaatttcttggtgaaatgaaaggctgatcaagtgactaagcctgcaggtgaatacgatgcattattctagcaatctttgaacatatggtgtatatcatgaaagtacatcaacctgttacactgaatttaggcacagttacagactccatttcttaatgttacaaaagctatttatcataaaacagctgcagtactaaagttaaggattgtggcttccattataaagttgagtttattgtgtatgtacatatatatatacaggtatacaagattaatcgcatatcatgtatctaatttgttatatt

SEQ ID NO: 10041 - DNA, 1515 bp, Glycine max
  Clone ID: 700891875_FLI
ggccaggcaagccccactcaaccaccacacctctcctcgttcacgctacccctttctgctcttcttctacctttcaagttttaaaagtataaagatggcagagacattcctatttacctcagagtcggtgaacgagggacaccctgacaagctctgcgaccaaatctccgatgctgtcctcgacgcttgcctcgagcaggacccagacagcaaagttgcctgcgaaacatgcaccaaaaccaacttggtcatggtcttcggagaaatcacgaccaaggccaacgttgactacgagaagatagtgcgtgacacctgcaggaacatcggcttcgtctcaaatgatgtgggactggatgccgacaactgcaaggtcctcgtcaacattgagcagcagagccctgatattgctcagggtgtacacggccaccttaccaaaaaacctgaagaaattggtgctggtgaccagggtcacatgtttggctatgccactgatgaaacccctgaattgatgccattgagccatgttcttgcaacaaaactcggtgctcgtctcaccgaggttcgcaagaacggtacctgcccttggctgaggcctgatgggaagacccaagtgaccgttgagtattacaatgacaatggtgccagggttcctattcgtgtacacaccgtgctaatctccacccaacacgacgagactgtcaccaatgacgaaattgctgctgacctcaaagagcatgtgatcaagcctgtgatcccagagaagtaccttgatgagaagaccattttccacttgaacccttcaggccgttttgtcattggtggccctcatggcgatgctggtctcaccggccgcaagatcattattgatacttatggaggatggggtgctcatggtggtggtgctttctccgggaaggaccctaccaaggttgataggagtggtgcttacattgtgagacaggctgctaagagcattgtggcaagtggacttgccagaaggtgcattgtgcaagtgtcttatgccattggtgtgcctgagcctttgtctgtgtttgttgacacctatggcactgggaagatccatgataaggagattctcaacattgtgaaggaaaactttgatttcaggcctggtatgatctccatcaaccttgatctcaagaggggtggaaataacaggtttttgaagactgctgcctatggacactttggaagagaagaccctgacttcacatgggaagtggtcaaacccctcaagtgggagaaggcctaagtaattcattccactgctctatgctggaagttttttgagcgttgcccttataatatgtctaatatccataactttccacgtctcttactctgtgtgtttctctcctcttcctcctattttgttatttgtatgttcttttgtaattttttacgtgatcaactaaaaacatgtactctctgtttgtatgtatgccctaccaatgtgtctcttaatatcaatatcaaaaagagagtgttcaagtt

SEQ ID NO: 10042 - DNA, 897 bp, Glycine max
  Clone ID: 700891906_FLI
gctgccacaaattgggtcaacaagtacgtgaaagcatactcacaaaacgtgaaattcaagtacattgcagttggtaacgaaattcaccctggtgactctttagcagggtctgtacttccagcacttgaaaacattcagaaagcaatttctgccgccaatttacaaggccaaatgaaggtgtcaacagcaatagacaccactttacttggcaactcttacccaccaaaagatggcgttttcagcagtagtgcaagttcatacataagaccaattgtaaactttttagcaagaaatggagccccacttctcgcaaacgtgtacccttacttcgcctatgttaacaaccaacaaagcattggtcttgactatgccttgtttactaaacatggtaacaacgaggttgggtaccaaaacctgtttgatgcattgttggattctctatacgctgctcttgagaaagtaggggcaccaaatgtgaaggttgttgtgtctgagagtggttggccatctgaaggtggagttggagcaactgttcaaaacgcaggaacctattaccgcaatttgattaatcatgccaaaggtggaacccccaagaggcctagtggacccatagagacttacctctttgccatgtttgatgaaaaccagaaggatggtcctgaaatcgaacgacactttggtctcttcaggcctgacaaatcacctaaataccaactcagtttcaattgaaacagtggatcataaactcggtgctgattactcagaataattaagggtatctcattacatatatatggttttaattagtttaatttgcaccgacctcaatgtactacgtactagtacgcaagtgatgcttctaattattaataaatgcatctctaccactttatatct

SEQ ID NO: 10043 - DNA, 1067 bp, Glycine max
  Clone ID: 700892002_FLI
ggaattgatgccggggtggagcccaaactgaatttcaagggttacatggttggaaatggtgtcacagatgaacaaattgatggcaatgctcttgttccatttgtacatgggatgggacttatcccagatgaactgtttgaggaggttaaccgtgagtgcaatgggaatttttatgatccaacaagtgctaattgttctagcaagctttcaaaagttgatgagttggttgatgagataaacatatataacattctagaaccatgctatcacggcacagaagcagagaagattacagaatcctatattaggatgccatctaccttccggaagttgggtgagaccgaaagaccttttcctgtgaggaaaagaatgttcggtcgtgcttggcccctaagagctcctgtgagagatggaattgtaccaacttggccacaactgatgaatagtaaatctgctccaccatgcacggacgatgaggttgcaaattcatggttaaacaatgaagcagtcaggacagcaattcatactgcacagaaaagtgtggtcagtagttgggatttatgcactgacagaatttacttcgatcatgatgctgggagcatgatcaagtaccacaagaacttaacttccaaaggttatcgtgcacttatattcagcggcgatcatgacatgtgtgttccatacacggggagtcaagtgtggacgagatcagttggatacaagattgttgatgaatggaggccttggtcatccaatggtcaagttgctgggtatacacaaggatacgacaaaaatcttacttttctgaccgtaaagggatctgggcatactgttccggaatataaaccacgagaggcattggacttttacaaacgctttctcgctggattgccaatatgatatagaggaaaagagaagatggagtaacgctgcttcttattttgtttgtactttgttaataataatgatttaaggatgtatgaagacacattttatatttgtgttctatgtttaccttattaatttattaccatattaatattaaactagatgtcaacctagtttgc

SEQ ID NO: 10044 - DNA, 999 bp, Glycine max
  Clone ID: 700892015_FLI
aaaccctaagaagctacctctcatcgttttcttccacggcagcggcttcatcgtaaccagcgccgcctccactatgttccacgacttctgcgccgccatgtccgccgccgtccccgccgtggtggcctctgtcgaataccgcctcgcgccggagcaccgtctcccggcggcgtatgacgacgcggcggaagccttggagtttatccgagacagcagcgaggaagaagaatggttgaccaaacacgccgacatgtctaattgctatctcatggggagcagtgcgggggccacaatcgcctacttcgcgggtctacgcgcgaccgacacggcgagcgatctctcgccgttgaagatcagagggctgatattgcggcaggtgtttttcggtgggacccagaggagcaaatccgaggttaggctggagaacgacgaggttcttccgctgtgtgtgacggatttgttgtgggagctggcgctgccggttggcgttgaccgtgatcacgagtattgcaatccgagggctgagaagtgggttgggaaaatggggaagatgagggagctagggtggagggtgttggtgagtgggaatggaggggaccctgtgattgatcgtgagaaggacttggtgttgttgttggaggagaagggtgtggttgtggtgagtgattttgatgaagaagggtgccatggggtggagtttggtgatgaatccaaagcaaaccaactcattcaggtagtcaaacgttttgtttcatgaatccaaggatagtacaagctcatgatttttctcttttctttttgagatcatcctagtatgaaccttatgttagttcttgtcttgtgcttacctttcctcttcatatatggttgatagagttattatcttagggaaatgctactagtacttttctttccaggcatctaagaaattgcagaaattgtctgaaaagtgagtcatgtaatggaaaagtgatcaaactaataaattaaatttatagg

SEQ ID NO: 10045 - DNA, 1089 bp, Glycine max
  Clone ID: 700892068_FLI
gttaaaaatgagttgccaagtactttcaaggcctaccgctaccaacagcaccgttggtcttgtggtccagccaatctttttaggaaaatggtcatggagatcataaataacaagaaagtgtcattgtggaagaagatacatgtgatttacagcttcttctttgttcggaaggtcgtagcacacataaacacgtttgtgttttattgcattgtattacctgcaacagttttggtgcctgaggttgtggtcccaaagtggggagctgtctatatcccttccatcatcactattcttaatgcagttggaactccaaggtcactccatttgatggtcttctggattctctttgagaatgtcatgtctctgcatcgaacaaaggcaacgattattggtttacttgaggcaagtcgagtgaacgaatgggttgtcactgaaaaacttggtgatgctctcaagactaaagcaggaggtaaagcacctaaaaagcctcgattcaggattggagacaggattcacttgttggaacttggtgtcgcattctacctcttcttttgtggctgctatgatattatgtttgggaaaaaccacttcttcatcttcctctttatccaatctttggccttcctcatcatggcatttggatatgttggcaccattgttcccaactcctaagaaggattcggcacttcattcggctatttcagcttctgtgccttcatgtcaacgtgtattgtagtgttttcaacatagttctggaaaatcacagcttgttactataaaaaagaaagggtggtcattcttcaaggtgttgcataatcagagtcagtgactccaaagagttacttttcttgtgaatataccgcaaagatatataagcaaattactgaaattcttctcatgaaaggtaagtatacagaacaagatcgcagcaatcatgtggcatcgatcctccggggagcaaacattggatggattgtttataagattttgtagttttttttttttaacttttgcttttctttacattgtatttgtttgaagaaataaacagcttcaagaaatgggataaaatacacagtttcattttgc

SEQ ID NO: 10046 - DNA, 1315 bp, Glycine max
  Clone ID: 700892070_FLI
gtggcaagacctatcttctacgcataataaacgctgctttgaacgatgaactgttcttcaaaattgcggggcacaagttaacagtggttgaagcagatgcatcttacgttaagccttttgaaacagacacaattttcatgagcccaggccaaaccaccaatgtcctattaaccgctaaccaagttgttggcaaatacctaatagcagttactcctttcatggacgcccctataggctttgacaacgttacttcaattgctacacttcgctacaaaggcacaccaccttatcccaaaaacaacactaaccaccattcctgcactaaatgcaactcctttaacaagtgacttcattgattccctaagaagccttaactcaaaagaataccctgcaatagctcccttaaccgttgaccactctcttttcttttccataactgtaggccttaacccatgtcacacgtgtctcactggggccaggcttgtgtctgctattaataacatcacctttctaatgccaacaaccacatcacttcttgaagcacattactataacataaagggtgttttcactgatgatttcccttcattcccacctatagcttttaattacactggtactcaaccagctaatattcagacaaataatggcacaagactatacagattggatttcaattcaactgttcagattattctccagggcactgcaatgatagcaccagaaaatcacccttttcatttgcatgggtacaatttctttgttgttggccaggggctagggaactttgatccagagaaggacccattgagttttaatcttgttgatccagttgagagaaacaccattggggtaccaaatggtggatgggcagcaatcagattcagagcaaataacccaggtgtttggttcctgcattgccacttagaagtacacaccacatggggacttaagatggcattcatagtagacaacgggaacggtccccatgagtcctcgcttccaccacccaaagaccttccaatgtgctaaagtttctgatgaaatttggaatctgagagagacaatgagagtgtacattattatgctggagaggtgatgtcacggcctaaggggaagacatcaaattgtttgtgacagtttgtgaagttggatttgtagcagaaatcaataaaaacttgctgtagatagcaattcaaggcctttttattctattgtcaagtttaggatactaatgtaagttttgggttcataaaaatgtgatgtatgtgcttggtaaaatttcaatttgataaaaatggtcttttagaattcc

SEQ ID NO: 10047 - DNA, 1055 bp, Glycine max
  Clone ID: 700892119_FLI
gcaagaatggcacttcgttgcttggtgatgtccctttctgttctcttcactcttggtcttgcgagagaaagccatgccagagacgaagatttttggcatgctgtttggccaaacactcccattccaagttcattgcgagatcttctaaagcctggccctgcaagtgttgaaatcgatgatcaccctatgcaaattgaagaaacacagtacccgaaaaccttcttctataaagaagaccttcatccaggcaaaacaatgaaagtacaattcagcaagcctccctttcaacaaccatggggtgttggtacatggttaaaggaaattaaagacactactaaagaaggatatagttttgaagagctatgcatcaagaaagaagccattgagggagaagagaagttttgtgcaaaatccttgggaacagtaattggttttgccatttcaaagctgggaaagaacattcaagtactttcaagttcctttgtcaataagcaagaccaatacactgtggaaggagtgcagaatcttggagacaaagcagtgatgtcataggctaaatttcagaactgcagtattttactgccatgaagtccgtgaaacaacagctttcatggttccattggtggctggtgatggaaccaaaactcaggcacttgctatttgccactcaaatacttctggaatgaatcatcaaatgcttcatcaacttatgggagttgatcctggaactaaccctgtttgccatttccttggaagcaaggccattttatgggtacccaatttatctgtggacactgcctatcagaccaacattgttgcttaattagtccatgcatcttgagcaccatgagaatgagattgtgtataaaataaattatcatgtgctgtgtgttgtgcaagtactaccttctctagctagattgctagagctagaatttcaacctacctatgtgtactgataagatctgcttccctacttaaagagagcatcatcctgtgatcagtgtgcttcgtattctctctctctatatatatatggtaaaaagtggttatct

SEQ ID NO: 10048 - DNA, 1257 bp, Glycine max
  Clone ID: 700892170_FLI
attcggtcgagatcaggagcataagctatgtgtgaagatgctttccatacactatttgtttttcttatttctatataattaattatgccctcttatccctccattccttgattctctctctcacaaatggaagcaaaattggttgcacagtgcaatagtccaacactaactttagctcactggaaactaaaacaaccttgtgtggttggagtgctggcaaggcctgctgatgacatttcaggagaagcaagaaaaactaatcatgtgtacaaagatggcttgtttgatcgcatagccataaactatttatcaaaatgcgttcaagaggcaacaggactcaaaaatagtaagagtggttatgagagcctggtagaggcagctaccctggcttcgcagagatttagtcctattgaacagcatcaacttgtcattcaatcccttgacagagcctttcccaagccaatgcttttactgataaggacactgctaccaccctctaaattcgcaaggaaattgtttgccatcttcaccactttgttctttgcttggttagtcgggccctctgaggtgagagaatcagaggtggaggggagaagagaaagaaatgtagtccacataaaaaagtgcaggttcttagaagagacaaattgtgtaggaatgtgtatcaatctttgcaaactcccatctcaatcgtttataaaagattctctgggtatgtcagtcaacatggttcctaattttgatgacatgagttgtgagatgatatttggcgaggatcccccagaatcaactgatgatccagcactgaatcaaccgtgttttaaactatgcaaggcaaaaagaagccatggaaccaattgcctcgttataaattaatgcagcagggtttgaggtcagcaaggaagaaacaataatggcccacctttcatatgctgacaaagctgagactcatcacgcatcatttttttatctcattattattaggaaaacagctaagtggtccaatgcactttaagccattaacgtctcatgtgcaagtggatttctgtcatttcattcaacagttagaaagttactaattggcgctctagtgtgtagaactagaagtagagaaagtggacactggaatttttatatatatagtatactgttctttccaatgccactttcctcctcccttttttattcttatttcacatattgttatagtacagaatatataatggttaccataaataaatgactattgattatttt

SEQ ID NO: 10049 - DNA, 911 bp, Glycine max
  Clone ID: 700892242_FLI
tcctaacataacattttttcagaaaaaatcaagccatcagatgtaggtcttgaacaagaggcacaagtggttcagaattggtccggttcaatgcttgaacgtaatgggagccatcaatctttgccacctatcaaatatttgcatttgcatgaaagtgattccttctctataggaattttttgcatgcccccctcttctatcattcctctccataatcatcctggaatgacagtgttgagcaagctgttatatggctcaatgtatgttaaatcctatgattggattgatgcacctggatccactgatccatctgaagctagacctgcaaagcttgtcaaagatactgagatgacagcgctgattcccacaacagttctctatcccaccagcggaggaaacatccattgtttcagagctataactccatgtgcaatctttgacatattgtctcccccctactcttcagaccatggaagacactgcacctacttccggagatcccaacggaaagatcttccagttaatgttctgttgaacggagtgacggtttctgaagtgacttggttggaagatttccaacctcctgatgactttgtgatccggaaagggcagtacaggggtccagttattagaacttgaaaattttattgtttgatgtgtcttactacaccaaaaggaaattggcttatgtttaggttacaacaaaggaaactgtggaatgtggaataattatattctttgtctatgtcctttaggcattggagtatgtacataataatgcattagtgtaattatttacagacctcagcttaatccattagaatagttaactgtatgttgaaatagtacttccccgtggccatatcaaaatttgttttcgtggagaataagagggtattgtgacttggtcc

SEQ ID NO: 10050 - DNA, 1015 bp, Glycine max
  Clone ID: 700892272_FLI
gaacttcaaagaatatgacatctggctggcagcagagaatgggatgtttttaaacccttcaaagggagaatggatgacaacaatgccagagcaactgaatatggaatgggttgacagtgtgaagcatgtttttgattacttcacggacagaacacctcgatcatattttgaagaaagggaagcttcacttgtatggagttacagacatgcagatgctgagtttggaagattgcaagcgagggacatgctgcagcatctctggacaggtccaatttctaatgcatctgttgacgttgttcaagggagccgatctgttgaggtgcgagctgctaatgttacaaagggagcagctattgaccgcattctaggtgagatagtccacagtaaattcatgacaacaccaattgattacgttctgtgtataggacattttctgacaaagttgcagcaggatgaagatatatacgccttttttgagccagagctaccttcaataggtgtgggtcttcaaagaagcaagggaacagaaggagtaaagtttccagttgagagggtatcgtcattgaagaacccagcaagtagaaatggagcagcaaagtcgtcatcccaaaaaaagggacaacgccctgtgtcaaataatgagaagaaaagaaacaatcatgtctgccgcgggccacgtcggctggctcccgaaaagatatcttggaatgtccttgacctgaagaaggagaattacttctcgtgtgccgttggacgaacacagaccaatgctcggtatacgcttggatcaccagatgaagttgttgcatttctcaaggaactagccaatgtctgagacttacccagcttcagaaattccctatattgccaacattgcaacttgccaaatttactctcttgtacacgatttgcttttattctacgggggcaccccataatcataacttcacatcctaacctttttagacaatataataatcaaattaattatcgtaaaaatatttttttttaaatt

SEQ ID NO: 10051 - DNA, 1266 bp, Glycine max
  Clone ID: 700892405_FLI
catagactatagactaaagtgtgtcaaactcactatgatactgacactactgcctcctccaaaatcaccattcttgaatacccttttgctcctctgcactactctcctcctcccaccttgctacctggctctccctgaccctgatgctgatgcggttcagccaatcatcccaaacccctcatcttcaacaggaacaatccctgcattcccagaacaagctgatgctgcagggtgccctctcagcctctcagatgagcactacgaaggcataaagagtgcatgtggctccaacaaacatgctgcagatgatgatgatgacctccaccgtagcagatgctgtcctgtgctggcagcgtggctctattctgcatactcagccactgcccttagtggtggaatgcaacatgaacgtgcctcaaagggccataccacatcctatgacatgcccttgttgcctgatgattcagaaacatgtgtgagtgacttggggaaggccttgaaaattagaggaatccagctttttcagcccaatgagacttgtgatctggtctattgctactgtggcattaggcttcaccctttgacctgtcctgagtcattctcagttactccaagtggaactcttgttgtcaatcaaagtgtgaaaagattggagagggattgcttcagtagcagcaccaatgtcaataagtttcccggcctgggaggatgctccaagtgcttgcatagtctctattcgcttaggaagaattcttcaaattcaagcaagtcagaagataggaccaccaagatccataacaaagattgtgaactaatgggcctgacatggcttctggctaagaatagaacagcttacattcacacagtttctggggttcttcgagctttgatgttgagcactgaaggctctgacccacaatcatgcactctaaacagtgatggaatgcctcttgccgttgattcctctgaaatgtcagatgaatcttcatcaaccaacctacaagcaccaattttcctctctttgttactatttctacattatttcactctattatggcacctaactgaaaacgagtgcaaagagattgatccccattccccaacatggcatttgtaaatttgaatctgtgctttggtgcttaggagtgtatttttattttctttcttgggtgttaatttgtttgaaagaaaattcataatggttttgttttggtggtcctggattgccatgtgctaatagcgaccggtgtttcgtttcggagggac

SEQ ID NO: 10052 - DNA, 491 bp, Glycine max
  Clone ID: 700892446_FLI
cgaaaactttctaacaagcctaattgctggaacctcactactaagcattcaaaaagcatatatataattcgatggcaggtattgcgtatgggatcagcgtgcttgccgttggtgcaggtgaagctccacggcgaccaacacaagcccaaactactactcccaacactcatcacaataacaacactacttctgaagagttcacttatttaaattctgggaagcaaaatatcaagggtcttaccaaccagactggttacgttaagggcagcgctaatggtgccatcaactttgggacgctcacaacctcttcttctgcccagatgcaaccatgaatcctttaataacatgcatgaagaaacaagaggcaactcaatacaattagttatctaaataataatttctgctgttattgcctccattttcatgtaatcttactcgccaaacccatcattgtatacatatcaagaataaaacgtgggtggatttctcat

SEQ ID NO: 10053 - DNA, 1508 bp, Glycine max
  Clone ID: 700892447_FLI
agcacccttaggagcaaagggttggaaggtactcgcagtttatgaaaaatctaccagaagttggtcatggactggcccagttattcataattcacctgactatgataccactgaggaggtgacatctcctgaagcttggggtcttccacataagatgcttgtcaagttggttgattcctttgccaattggttgaaatgtggtcaggaaactcttcaacaaataggaagtcttcctgctccgcctttggcattgatgcaagtcaaccttgatgagaaagaaaggtttagggatctgagggctcagaagagtcttaacaccataagccctagctcagaggaagtgaggacttattttcggaaggaggaggttctcaggtactcaattcctgacagagccttttcatatactgcagctgacggtaaaaaatctattgtggcacctttgagaagatgtggtggtaagccaacatcaaaagcccgagaccattttatgttgaaacgtgatcgcccaccacatgttacgattctttgtctagtaagagatgctgcagctagattacctggaagtattggcactagagcagatgtttgtactttaattcgtgattctcaatatattgttgaagatgtttctgatgcacaaattaaccaagtagttagtggagccttggatagattgcattatgaacgtgatccttgtgtacaatttgatggggaaaggaaactgtgggtttacttgcatagagaaagagaagaagaagattttgaggatgatggcacttcatccacaaagaaatggaagaggcagaaaaaggatgctgcagatcaatctgatcaaggaacagtaactgttgcttgtcctggaactggggagcaaagcggatatgatttgtgctcagatctcaatgtggatccaccaccatgcattgatgatgataagggaatggaacctttgtctactgatacaaggccaaatgcagaggcacatgttgatgtcaatcgagcttctgaagaaggcaatgtttgtgatggtaattcaatggcttgggaggctcttgatttaaatcctactcgagagttatgccaagaaaattcaacaaacgaagattttgatgaagaatcctttgggagagaaaggcccgttggactattaagtgcaagcttgttgtgaagaattcttcaggcttttggtccatgggcactcgagttcggtcatgcttgttgtagctgtgccacctttgtatattgatttgatctcgaagaatagaatagaatgtgatcttgttgaagatcataaaatttggttagtttaggtggatgttttaacgactttacatcccataaataataccttttgagttgaaatttctaatgatctgtagcttcttgtgcgatgtggcgttgttgtattgcatcgcaaaattctgtagatatggcttaattaagacaatgatgtcagtaaatccaataaatctgttcacccaaatgaacaggacaaaatattaatt

SEQ ID NO: 10054 - DNA, 1107 bp, Glycine max
  Clone ID: 700892495_FLI
cggccacaagaaatggattactggtatctcttgggaacctgtccacctgaatgctccatgccgtcgctttgtaagtgccagcaaagatggggatgctcgtatatgggatgtttctttaaagaaatgtgttatgtgtctcagtggccacacacttgcaataacatgtgtaaaatggggtggagacggcgtgatttatactggctcgcaggattgtacaattaaagtctgggaaaccacacaagggaagctaatccgtgaattgaggggacatggccattgggttaattcgttggcattgagcactgagtatgttcttcgcactggagcttttgatcatactggaaaacagtattcatctccagaggaaatgaagaaggttgctcttgaaaggtatcaagcaatgagaggcaatgcccctgaaagattggtctctggatctgatgatttcactatgttcctttgggaacctttcatcaacaagcaccccaaaactcgcatgacaggtcatcagcagcttgtgaaccatgtctatttttcacctgatgggcaatgggtggcaagtgcatcttttgataaatctgtgaagttatggaatggcaccacagggaaatttgttactgccttccgtggtcatgttgggcctgtttaccagatcagctggtctgcggacagtagacttcttttaagcggcagcaaagattcaacacttaaggtttgggatattcgaactcgtaagttgaagcaagatcttcctggtcatgctgatgaagttttttctgtcgattggagtccagatggagagaaggtagcctctggtggtaaggataaagtgttgaagttgtggatgggctaggctaatttttggatgaatattgcatagggttcattagtatgaactcagaaatttttgggcattttgacccaggatgattttttgttgtccctgtcactatagtagtgtttaaatggagtattttaatttaagatggaagaaaattaagttgtgtctacttagttcttttcattttataaaattgtgtttggattgttatttgttaaattaaaactccatacatgaaaaataaatgtgaaaaggcttggaaatct

SEQ ID NO: 10055 - DNA, 1207 bp, Glycine max
  Clone ID: 700892511_FLI
gatggaatgaccatgcagggtattggtactcaatcatgggatgttggtttcattgttcaagctttacttgctactaaccttatagatgattttggacctacaattgcaaaagctcacgatttcatcaagaaatctcaggtaagagaaaatccttcgggagattttaagagtatgtatcgtcacatttgtaaaggctcatggacccttgccgatagagatcatgcatggcaagtttctgataccactgcagaatgtttgaagtgttgtctacttttatcagtgctgccacaagatattgtgggagaaaaaatggaacttgaaaagttacatgattcaatcaatttgatactgtcacttcagagtaaaaatggaggtatgactgcgtgggagcccgcaggagcttataaatggttggaactactcaatcctacggaattttttgctgacatagtagttgagcacgaatatcttgaatgcactgcatcagcaattcaggttttagtgttgttcaaaaagctttaccctgagcatagaaaggaagagatagagaacttcattgctaaagcagtaacattcattgaagatacacaattagagaatggttcttggtatgggaattgggcagtttgtttcacttacagctcttggtttgcacttggaggtctagttgctgctggcaagacttacacaaattgtgttactattcgtaaagctgtgaaatttctactcaaaatacaaaataaggacggtgggtggggagagagttatctttcttgcccaaggaagatgtacgtacctcttgaaggaagtcgatcaaatgttgtacaaacatcatgggctctaatggctctaattcatgctgagcaggctgagagagatccaactccccttcatcatgcagcaaagttactcattaattctcagttagaagatggcgattggccccaacaagaaactcttggagtatacttgagaaattgcttggttcattactcattctatagaaatatttttccaatgtgggctttggctgaataccgcacaaatgttttattgccttcctttactatttaagttgaaaaattgtgagctcaaaaagataatgtcataccaataaaagtctagaaaaaaaaaagttggtaatgaagtttaataggcttattcatattcccatacttttgtaattttgaaacaaatatttcgtata

SEQ ID NO: 10056 - DNA, 1301 bp, Glycine max
  Clone ID: 700892519_FLI
aaaggagttatctggcggtagaaaccattttgtggagagttgtggcttgcctattagcacatacttcagtgctttgaagctgctgtggttgatggaaaatgtagatgccgtaaaggaggccataaagaaaaaggatgcgctgtttggaactattgacacttggttgatatggaatctaactggtggggtgaatgggggattgcatgttaccgatgtttcaaatgcatctcgtacaatgctcatgaatctaaaaacccttgactgggatgcatctaccttaaaaacccttaatattcctgctgaaattttgcctaatattgttagtaatgccgaaattataggagaggttgggtctggatggccaattgctggtgtccctattgctggatgtttaggggatcaacatgctgcaatgttaggacaatcatgccgtaaaggggaggctaagagcacttatggcacaggtgctttcatactactaaatactggtgaagggataattcaatcgaagcacggtcttttatccactatagctttcaagcttggcccaaaagctccaaccaattatgcattggaaggatcagttgctattgctggagctgcagtgcagtggcttagagacggtcttggcatcatttctagtgctgcagagatagaggagatggcattacaggttgaatccactggtggggtttactttgttcctgcttttaatggattgtttgccccatggtggcgtgaggatgctcgcggggtttgtattggaataacaaggtttacaagcaagggtcacattgcccgagctgtgcttgagagcatgtgtttccaagtgaaagatgtcttggattcaatgcataaagattcaggagaaagtgaatcccaaaaaacagagtttttgcttagagtggatggtggggcaactgtaaacaacctgctgatgcagattcaggcagatttggtgggatgtccagtaattagacctgctgacatagagacaacagcacttggagcagcctatgctgccggattagctactgggatttggaaagaagattttattttcaatactgaggagaagttgaagaatgctagagttttccgtcctgtaatgactgaggaagtaaggaaaaagaaagttgactcttggtgcaaagctgttagtaaaactttcgacttagctgatcttgctctttgatggtaaaacacagtttatgtttctttttatttttattttttatgtcctttacttctgggtataactttatttttagccttactaaaatgaagggagtaattatgtc

SEQ ID NO: 10057 - DNA, 228 bp, Glycine max
  Clone ID: 700892521_FLI
attgagtctgaattcagtgaggttggttcgcttgacgaggccatcaatttggtcaagagttgtgggggcattgaaagagcacaagagttagcaaaagagaaagctgatcttgcaattcaaagtctccaatgcctacctcagagtgtgtttcgtttagcccttgaggatatggtggcatataaccttcaacggattgcataagcttgtgcatgccgaggacactttgtt

SEQ ID NO: 10058 - DNA, 1429 bp, Glycine max
  Clone ID: 700892569_FLI
agatatgtgctgcaaaaacccttcactgaagaacaatgcagacaatcttgtatggaagattgtttgtgttctgttgctattttcaggttaggtgacagctgctggaagaagaagttgccactttcaaatggtagagttgatgccacacttaatggtgcaaaggccttcatgaaagtgaggaaagacaactcctccttggttgttcctccaatcattgtgaaaaagaatagtaggaacactttgattgtgcttttgagtggttctgcttgtctcaatctaatattggttggagcaatctgcttgagcagtttttatgttttttggtgcaagaagaagcttagaagagttggcaaaagtggcactaatgtggaaaccaatttgcgttgcttcacttatgaggaacttgaagaagctaccaatggctttgagaaagtgctaggaaagggagcttttggtattgtgtacgaaggagtcatcaacatgggttcccttactctcgtggcagtaaaaaggttgaacacttttctcttggaagaggttcaaaaggaattcaagaatgaactgaatgccattggcctcactcatcataagaacttggtccgtttacttggattttgtgagactcaagacgaaaggttgctggtttatgagtacatgagcaatggaactttagcaagccttgttttcaatgtggagaaaccaagttggaaactgaggctacaaattgcaactggggttgctagaggacttctatatctgcatgaagagtgcagcacacagatcatccattgtgacataaagcctcaaaacatactccttgatgattactataatgcaagaatttcagactttggattggccaagattttgaacatgaatcagagcagaaccaacactgccataaggggaacaaaagggtatgttgcacttgaatggttcaaaaacatgccaatcacggccaaagtggatgtctatagttatggggtgctgctacttgagatagtttcatgcagaaaaagtgtagaatttgaggcagatgaagagaaagcaatcctaactgaatgggcttttgactgctacactgaaggtgttcttcatgacttggttgagaatgacaaagaggcattggatgacatgaagaccttggagaaattggtgatgattgccctttggtgtgtgcaagaggatcctggtcttagaccaacaatgagaaatgtgacacagatgcttgaaggtgttgttgaagtccaaattccaccatgcccctcctcacaacttagtattcaatattctctagactaatcagttggtgctaatcctagttgtggtatctagattctagtgtgaactgtaaaatttacatatatgtatgtgtatctatttgaagctttatgttccttcagcattatagcattcggggtttgagatc

SEQ ID NO: 10059 - DNA, 1890 bp, Glycine max
  Clone ID: 700892694_FLI
caagaacaatgggaatagagattctggagcctaacacgtgcattaggggttgctgcaccagcccctctattccccttcatctccctccctcttcttatacccttctctctcctattgcccgagcaagttagatcatccaggaatagcaacaccgattgcggcccatgcaaaaccgcccaattacatgtttttcttcaagttatttgaatctccaaatctagcacaaaagttacatgtggaagagtggatcccaactctgaacgatgcacttatgatagcaatgcacttgacaaaaacctttgtccacacctcacagattttggtttggcagaatacaagaatgatcttaagagagtttctactgagaattggaagtcttctggaaagcctactggtggtttccacaaaaagaatatggttggaacactcatttacatggcacctgaaatattaagaaaagagttacatacagaaaagtcagatgtatacagttttgggatatcaatcaatgaactcctaactggtgttgtgccatacactgatcttcgtacagaagcgcaggctcacacagtgcttgagatgaactatactgagcagcaattaacagcagctgtcgtttctgatggattacggcctgtccttgctgccgaggacttgggtataccgtcaagattattatcaatgattaaaaaatgctgggatgcagatcctaataacagacctgcttttgatgacattgttgaggaacttgatttagttatggagcatggtaagttaaagaaggcagaagatattcatatcagaccttataacttgcatgttgttcaacctgcgggcaagactgatcactttaaggcttatcaagagagttttagctggttcactcgtggcgaacttttggccaggagtgcctctagtgcaaatgattctggtttgataactaggtgcgagtcttctgacaagccttcagcataccacccaacaatgtcttggggatcttatgctacctgtgggagaagggagactatggaggatacacatttcattcttccccatatttgtgatgaaaaggatgcctatgcttttggtatctttgatggccataggggtgcagcagctgctgccttttcttctagagctgtaccagcagttttgcagacttcagatttcatgggcagtcctgctaatgcactagcggaagcattcattaagacagatgctgccttcagaaaagagcttgattcctatcgcaaatccaacagatgtatccagaaggattggcatcctgggtgtacagcaattgctattcttatagtcagaaacaagctatttgttgctaacattggtgattgcagggtaatcttatgtcgtgctggtaatccaattgctctaagtaaggatcatgttgcaagctgtcttcaagagagagagcgtgttattcggcaggggggccaagtacattggcaagttgatacttggagggttggtcttcctgcacttcaggttactcgttctattggtgatgatgatttgaagcctgctgtaactgcagaacctgagataactgagagtaccttgtgcccagaggatgaatttctggtcatggctagcgatggcctgtgggatgccataagcagtatggaggtcataaatataataaaagatactgttaaagagcctggaatgtgctccaagaggttagctactgaagcagtggaacgaggcagcaaagataatatcacagttatcgttgttttcttacgtcctgtgtctacagcagagagaatttattagcataccttcttgcatgctctttgagacttgccacaaatagcacatacttatattcctttattggataataaaagataaattatgtttttagtctct

SEQ ID NO: 10060 - DNA, 1026 bp, Glycine max
  Clone ID: 700892840_FLI
cacaaccactcttaatttctctctgccttgctcatttacacacctctccaacctttcactttcagctttatttgaatccctctctctcctttccaaatggccagcgttgaggttgcacatcaaacaccaacaacagttccagaaaatgaaacaaccgaggtaatcaagacccaggaaacaaccccggaaccagtaccagccactgaggctcctgcaacagaacaagcagcagctgaggttcctgctcaagaagaacaacaagcaactgaggttcctgccccagaatcaaccaccgaagcaccaaaggaagaaaccaccgaagcaccaacaacagaaacagtagaaacaacaactacagaagaagccaagccagaggagcctaaagaagttgcagttgagaccgaggaggtggtgacaaaggagacagaggaagagaagccagcagcagaagagaaatcagaggagaaaactgaagaagtgaaagaagaagcagaagagcctaaagaaactactgaaacagaaacagaatcagcaccagcagcaaccacagaggaagagaacaaaccagctgagacagtggaagccccagtagaggttcctgttgagaaaactgaagcttagacttatggacagtgtgagtgagaaaaacaagtttaaaaatggtcctagttgtggggatcattaggtctaccattttgcatgtcatgttgaaaagcttttttttttatttatttctttagtttactttattattaatatattattattatatgatggttaagtctttggttgtattatggagggtatacctacgtgtgagcacaacacttggctccacatcagcgtgcttaccacgtggtgacatgagaaattctaggagttgtgtattgaagtgagcaagctgctgctggtgctggagtttagggatgagggtttattttattggcagggttacatgagtttgtgatgatgtgttattgtgtttctttaggtttgaataaatgatatttactttataacttgctt

SEQ ID NO: 10061 - DNA, 1456 bp, Glycine max
  Clone ID: 700892843_FLI
gtgtaggtagctttcagaaacctgattctgattctggttatgtttcttacattaaggtctcgacagatggaggcgctggcacgggttctgggggcggcggaggtgtccataagcacaccatagttgttgtggtcattgtcataatagccttggttgtcatttgtggtctggtctttgggggagttagataccacagaagaaagcaaaggttgcctgagtctcctagagaaggttcagaagaggacaatttcttggagaatttgactggcatgccaatccgttacagctacaaggaccttgaggcggccactaataacttctctgtgaagcttgggcaagggggttttgggtcagtgtacaaaggagttctacccgatgggactcagttagcagtgaagaagttggaaggtattggacaagggaagaaagagttcagggctgaagttagcatcattggtagcattcatcatcttcatttggttaggcttaagggattctgtgctgatggaactcataggctccttgcttatgaatacctgtctaatggctccttggataaatggatattcaagaaaaacaaaggtgagtttcagttggattgggatactaggttcaatatagctctgggaacagcaaaaggacttgcttatctgcatgaagattgtgactcaaagattgttcattgtgacatcaagccggaaaacgtgcttctggatgaccacttcatggccaaggtttcggattttgggctggctaagctcatgaaccgagaacaaagccatgttttcacaacactgaggggcaccaggggatatcttgcaccggagtggataacaaactatgccatatcagagaaaagtgatgtctatagctatggtatggtgctactagagatcattgggggaaggaaaaactatgatcccagtaagtcttcagagaagtcccatttcccaacttatgcttataagatgatggaagaagggaagctgagagatatttttgactcggagttgaaaattgatgagaatgatgataggtttcaatgtgctataaaagttgcattgtggtgcatacaggaagacatgtcaatgaggccatctatgaccagagttgtccaaatgttggagggtatttgtattgttcctaacccaccaaccagttcttcgttgggttctcgcctttatgccactgtgttcaaatcctccagtgaaggggccacctcttctggtccctcagactgtaacagtgatgcttatctctccgcggttcgcctttcagggcctagataacaatacctgtctcttttgtttattttctgtgtgttgtattgttgagtaaattagtttgtgtaatacagcagagctactctggattgtgtgggctttgcatgcttccagctcttgtacattttgttcaagttcctcaaattttgtaatataaatagctattcataatc

SEQ ID NO: 10062 - DNA, 371 bp, Glycine max
  Clone ID: 700892854_FLI
aaaggcttcctttgaaagatttagagagagactgaagaaactagaaacactgattgatgagaggaatggaaacacaaagttgaagaacagaaatggagctggcattgtaccgtacgagcttttgaaacctttctcaaagccaggtgtgactggaatgggggttccctgtagtatatctatttaagttgacaaagtcaaactgatattatgtgtgaagtatgatcctaaaccggtatgggtttttaatttaaacataagatagacacatagtcacataaactggtgcctaaaccaccagaatttccataaacacatattactagtgtttctttaggatgttcttgaaccaatgagataattttttttagctt

SEQ ID NO: 10063 - DNA, 192 bp, Glycine max
  Clone ID: 700892877_FLI
gtccatctgagatgcctcatatattatttcattattgtgtaccacttttcaaacttgcttggggtttgtaacaacaacaaccaccaaaaaaaaaaaaactcgtttagagtttgtttgtgtacgtttatattaaaataataatacgtgtttggtggctttttagcctaattatcaataacaggcatttgtttt

SEQ ID NO: 10064 - DNA, 631 bp, Glycine max
  Clone ID: 700892909_FLI
cgaagccagcacttctcagcttcacgctccgattttccactaccctttaatgagaggaaatcttcacaacactatgcatcatcatcatcctcagcaacaacaaggagggagcccaactagctccactggtgaagttgaagccataaaagctaaaatcattgctcaccctcagtactctaatcttttagaagcctacatggattgtcaaaagataggagctacacccgaagtggtggcgcgtatggttgcggctaagcaagagtttgaggcacggcaaagatcttcagttggttcaagggaaacttctaaagaccctgaacttgaccaattcatggaagcatactatgacatgcttgtgaagtatagagaggaattaacaaggcctattcaagaggctatggatttcatgcgaaggatagaaactcagctaaatatgctttgcaatggacccgtgcggatcttgtctgatgataaatgtgaaggtgctggttcatcagaagaggatcaggacaacagtggaggagaaacagaacttcctgagattgatcctcgagcagaggaccgtgaactcaaaaaccacttgctgagaaagtacagtggttacttaagtagcctaaaacaagaactctcc

SEQ ID NO: 10065 - DNA, 940 bp, Glycine max
  Clone ID: 700892916_FLI
gaatttggattagatgtggatcatcacaatgcagttgagccagcagcaagctttttcaacaaaaaagtgaaaatcagaagggcaattgaagctgaaggaatcccttacacttacgtttgctcatatgcctttgctggttacttcttgtctacattgggacaagaaaatgtcacagcccctccccgtgataaggttgtcattctaggaaatggaaacgtcaaaggagtttatgtcacggaggaagatgttgggacttataccataaaagcagtggaagacccaagaaccttgaacaaaactctgcaccagaaaccccctgccaatgttttgaccttcaacgaactcgtgtccttgtgggagaacaagattaagaccaccctccacaaaatctacgttccagaagagcaaattcttaagaaaatccaggagtcttctttccctgccaatttcttaatagcattaggtcacgcaatgctggttgaggaagcttttaacaatgaggttgacccttctgtcagtgtggaagcttctgaactttatcctgaggtgaaatacactaccgtcgacaactatttgaatgcgtttgtctgaaatccagcgaatgcgttattattgccaataaactattgcacccaagttgatcaataaaatcaaagcatcttgttgtgtatggctgtagaatatgtactgtctttctattatttagttacttgtgcttgtgttggcgtcaaaagagttcttccttactttacactgtaaactgtactgttgttcgcttagcttggtgctgcttgcaagttcttctagtatttattatggctccgttgcaatttgttcatcaccactctgatcctagtggatgtgcgttgaaactcaattgccaacaagtattacagtgtgattatctcgaagttcttataaattaatgtcaaagtttttc

SEQ ID NO: 10066 - DNA, 133 bp, Glycine max
  Clone ID: 700892949_FLI
gttaatttgaaaatcgagatgatactggataaatctgaagttatatgtgtgtgttgtggtgtatagggagctgtaatttgatgtattattccagtagattgaaaataaccgggttcataatactcccctcccc

SEQ ID NO: 10067 - DNA, 676 bp, Glycine max
  Clone ID: 700892951_FLI
tgtcaggggatacacagcacctgagtatgcactccatggtcaattatcaaaaaaggctgatacatacagctatggaattgtagtgctagaaatcataagtggtcaaaagagtactgatgtgagagttgatgatgatggtgaggaagagtcccttcttcgacaagcatggaagttgtatgagagaggcatgcacttggagttggtggacgaaaccttgaatgataactatgatgcagaagaagtgaagaaaatcatagaaattgctttgttgtgtactcaagcatcggctgcgatgagaccagctatgtctgaagtagtagtgctactcagtagcaatgcacttgagcatatgagaccttcaatgcctatctttattgagtctaaattaaagccccacagagatatttttgcctcaactagttcctctacatctaatgctactgcctccagttctatagtacctgctcgatgattaattatgtatatgatgcacatgttagaggggcagaatgatgttgtagagcatacagatgcatgataagtaattaaagtttgttgtgatgattaattggtagttgtaattagttattcctggtagcactctttggtagtgttggatgtttgtataaatgccatacatagatttgttgcactgaatcaataattgatttcattc

SEQ ID NO: 10068 - DNA, 859 bp, Glycine max
  Clone ID: 700892963_FLI
ggcatctgcgacgcgtctggtgcactgcgagctgcgctcggcgaggcccgcggttcggccgagggaaccggccggtccggttcaggttacgatccccaaacccaaacccaaagcggcggaggcggaaggcgcgaacatcgttttgcagccgcggttgtgcactctcagatcctacggttcggatcgagccggggtgcttatcaagactcgcaaggagggtgaccatgatgacgtgtcacccttcttcgccgcgctttccgactatattgagagctctaagaaaagtcaagattttgagatcatctctggtcgtctagctatgatggtgtttgcagcgacggtgacaatggaagtggtgacagggaactctgtgttcagaaagatggatattgaaggaatcacagaggctggtggggtgtgtttgggtgcagtaacttgcgcagcactctttgcatggttctgcagtgcccgaaacagagttggtagaatcttcaccgtaagctgcaacgcattcattgactctgtaattgaccaaatcatcgatggtttgttctatgaaggcgaccctactgattggcctgatgaaccgtgatcattaagtatatataattcttaccatctttgcagatttaatgtgtctaaaaatcatagacacagttagaagatgcaatactaataatatttataaatatataggcagaggaagaatagcaaaattgatgccatcccgatgcagaagaaaaaatagtaacaaaaataaatgatgaagcatcatagatgttgaacctaaatggatactgtaaacgattgttttcactttcttaagaagcactcttagatgatgaaatatgttttattt

SEQ ID NO: 10069 - DNA, 1082 bp, Glycine max
  Clone ID: 700892968_FLI
caaaggtgttcggatgcggaaatggggcaaatgggccgcggagattcgtgaccctttcaagggcacgcgaatctggttgggcactttcagcactgcagaagaggcttctcaagcctatgagaccagaaggcttgagtttgaggtcatggccaaggctctatctgatgagaagagcaacaatggcagcagcaacaacaatgttgttgcttctgctgaaactgaaactgtggctgcccctgaaaataacagttcaaactattatgtttcttctgctgcaggttctgtatcagactccaagtctgcttttatggatgaatcagagagtgtgttgtcacacacatcaccatcttctgtgcttgaattggatacatctgcttccaatttgattgggagtggtaaggtttcaagcaatgaaattgttgagactaaagggttggaggccgaagttgctgagactaaaagtttggcagctgaatttgccgagctggaaatccaagatttgagtatgctgaatgtaccatccccatctgctgttgctgctgctacgtctgagtatgaattggatttgttggcatttgacagtttcaaatatggatttgattatgaacatggctttgatgatgattttgctgccctggaagacattcacatttgcagttttgatgataatgagcctagcgagcttcctgattacgattttgatgactttggtgctgatgagtttgctggttggattgaagaacccctcaatataccttgcgtatagattttgcagctacataggaatgagttctatccaagagaattacaagttttgtgtcattgcttaaaaatgctctacagttttgtgagatctcaggaaaaaactagttcctgggggtgttgttttgttttaatttatttgtttctttagggagatggaagatcaatgagaggttaagagagaatgccttggttttccttgtgctattagagccgtccaagggtttttcaatttctattatcatgaaagttctgagtgtgtagaagtctatcaaacttgaattctattatctttatgaaaaattctatggtatccttgg

SEQ ID NO: 10070 - DNA, 1549 bp, Glycine max
  Clone ID: 700893040_FLI
gtttaatatagttgggtatggatgcaccacatgcattggaaattcaggggatattaatgaagctgttgcatctgcaattactgaaaatgatatagtagctgcagctgtactgtctggaaataggaactttgagggccgagttcacccattaacaagagctaattatcttgcttctcctcctcttgttgttgcctatgcccttgctggcacagtggacattgactttgacactgaacccattgggatagggaaggatggcacaaagatcttcttcagggatatttggccatccagtgaagaaatagcaaatgttgtacaatcaagtgtgctgcctgctatgtttagggacacatataatgcgatcacccaagggaatcccatgtggaataatttatctgttccaactggcactctttatgcttgggaccctacatcaacttatattcatgagccaccttattttagagatatgagcatgtctcccccaggctctcatggagtgaaagatgcttactgtttgctcaactttggagacagtatcacaactgaccacatctctccagctggcagcatacataaggacagtcctgcagccagataccttatagaacgtggggttgatagacgggacttcaactcctatggaagtcgccgtggtaatgatgaggtgatggcccgaggaacttttgccaatattcgcattgtcaacaaatttttgaatggagaagttggacctaaaactattcatattccttctggggagaagttatcagtctttgatgctgcagagaaatacaagagtgaggggcatgatatgattatcttggctggtgctgagtatgggagtggaagctctcgtgattgggctgcaaaggggccaatgctactgggcgtgaaagctgtcatagcaaaaagttttgaaaggattcaccgaagtaatttggtgggaatgggtatcattccattgtgttttaagcccggggatgatgctgattctcttggattaactggccatgaacgttacaccattgatctaccaagcaatgtgaatgaaatacgacccggccaagatgtcacagtggtgacagatgccgggaaatcatttgtatctacactgagatttgatacagaggttgaactagcttacttcaaccatggaggcatcttacaatatgtcatcagaaacatggtcaatgctaaacattgaatcagatataaaccaagtttgcaggttgaattgatagcactcactggcgctgattcttaactttggtcttaataatctagtatggcctgctacaaggaaatccattgctattcagctattgtatcaataaaccaaggaactagatggctactacgaggaagagttatgactgtcgtttgttgaagaaatgtgattttctttttcaaaaattctattggtcattgaggatgaaaattccttgttacatttttactggttttacagttgagtttttaggaaacatttgccttctattgctgcctcccgactcttgagaattaaggaaatcaggaacattttttg

SEQ ID NO: 10071 - DNA, 1855 bp, Glycine max
  Clone ID: 700893044_FLI
ggttgaaagcgctcgtgccggcgctgaagacattgatagttgacaagaatctagggtttcctgtgttctcggccatagatgaccttttcgatgaaggcctttacttgcctcctctaaaaggtatcaggagtatcttgcccaggctcgttaggcatattaaggatattcaggaagacattctcctttttgatcctcccgcaacaatgaacaaggacagatttttctggttaagggacgaagaatttggaagacagactctcgcgggtcttaacccttgctgcatccaattggtcacggaatggccattgaaaagcaaacttgatcccgaaatttatggccctgcggaatcagccatcactaccgaaatagttgagcgggaaataagagggttcaatacggtggaagaggccataaaacagaagaaactgttcatcctggactaccacgatttgttgttgccattagtaaaggatgtgagagaacttgaaggcacaacgctatatggatcaagggcattgttcttcctaacccgcgaaggcacattgagacctctggctattgagctgactcggccaccaatggacggaaaaccgcaatggaaggaagtcttcacgccttgctggcactcaactggtgtctggctttggaggctagccaaacttcatatcctcgcccatgactctggttaccatcaacttgttagtcactggctacgaactcactgtgcaacagagccttacatccttgcaacaaacaggcaactgagtgcaatgcacccaatctacagactactgcatccccatttccgttacaccatggaaatcaacgcgcttgctcgcgaggccctgataaacggcgacggaataatcgaaagcagtttctctccggggaagcactccatcctcttaagctcaatcgcctacgaccaacaatggcaattcgacctgcaatccctcccaaaggacctcatcagcagaggcatggccgtggaggaccccaccgcaccccacggcctcaagctaatcatcgaagactacccttacgccaacgacggcctcgtcctctgggacgccctcaaaacctggttcaccgaatacgtgaacctctactacgccgacgatggttctatagtgtcggacactgagctccaagcctggtgggaagagatcagaaccgttggacacggggataaaaaagacgaaccttggtggcctgtcttaaaaacaaagttagatttgattgacattgtgacaacaattgcgtggacgacttccggccaccacgcggctgtgaacttcggacaattctcctttgcggggtatttcccaaacagacccaccattgcaagaaacaacatgccctcggaggacccttcggacgccgaatgggagctgttcttggagaagccggaggtgattatgctgaagtgcttcccgtcgcagattcaggtcaccaccgtgatgacggtgctggacattctgtcaaaccactcgccggacgaggagtatctcggggagacagtggagccggcgtgggaggaggagccgcttgtgaaggccgcgtttgagaagtttagagggaagttgattgagcttgaagggattatcgacgccaggaatgcggataggaccaggaggaaccggaacggtgccgggattgtgccctatgaacttctcaagccttcttcggagcctggtgtcacaggaaagggagttccttatagcatctctatttgattctgagttatgcatgactgtgtatcgtcactagcctctctgctagtattaaggtgtattatttgagacacatgtgacttactaataaataaaagataactcatgagaatagtgattat

SEQ ID NO: 10072 - DNA, 729 bp, Glycine max
  Clone ID: 700893088_FLI
gcctcctcaaggagaaagacaacttaaaagctgaggtggcgagcctcaatgagaaggtgcttgcaagagggaaacaagaggggcacatgaagcagcaggctgaaagtgaagaagaaacaaaaagattattgcatttgcaggaacaggaaccaccccagaggcttttactggaatcagtttcggagggagaaggatccaaagtctcttctgttgtcgggggttgtaaacaggaagatatcagttcagccaggagtgatattttggattcagatagtccacattacaccgatggagttaactccgcactgctagagcatggtgattcttcttatgtgtttgagcatgatcaatcggatatgtcacaagatgaagaagataacctcagcaaaagtctctacccttcgtacctctttcccaaacttgaagaagatgtggattactccgacccgcctgaaagttcttgtaattttggattttctgaggaagatcacgccctttggacctgggcatactaagttttcttccatgttcatgtgtgtgtttgtgtcatatgtttttttagtaattagtatttagtatttgcactttttgtccaggcttcaaaaatggctatagctttagctttatcaggaaagaaatgtttgttttctttttgcctcattttgttagtacttgtaatcaaactgttggttccaatgtaattaaataatgtcttctcgttgagaatgt

SEQ ID NO: 10073 - DNA, 891 bp, Glycine max
  Clone ID: 700893121_FLI
cgagtatttgcccaatgggagcttgtgggaccggcttcacacgagtaggaagatggagcttgattgggaaaccaggtatgaaatcgctgttggggcagcgaaagggttggagtatttgcatcatgggtgtgagaggcccgtcattcatagagatgttaagtctagtaacatattgttggatgagtttttgaaacctaggattgccgatttcgggcttgctaagcttgtccaagccaacgttggcaaggattcctccactcgtgtcattgccggaacccacggctacattgctcctgaatatggctacacatacaaggtgaacgagaagagtgatgtgtacagctttggggtggtgttgatggagttagtaactgggaaaaggccaattgaaccggagtttggggaaaataaggacatagtgagctgggttcataacaaggcacgaagcaaagaggggcttaggagtgcggtggattcgagaattccggagatgtatacagaggaaacttgtaaggtgttgagaactgcagttttgtgcacggggactcttccagctttgagaccaaccatgagagctgtggttcaaaaacttgaggatgctgagccttgtaaattggttgggattgttattagcaaagacggcagtgaaaagaaaataggagtcaatgacaagtaatgtattgtattctatactccatagtttttgacaccagattgaaggttatggatcatgaaatggaaccaaccatttctacgagttagctagaattaatgtaaattttgctggaaagagggaacacggtaaaatattagtcatggcttctttaatgtgtattttgaagtgagaagacagtgtagtaaaagactataagggtctccatcaataaaagg

SEQ ID NO: 10074 - DNA, 758 bp, Glycine max
  Clone ID: 700893145_FLI
cacagaccatgaatcagattcttggggtcaataatgagcagcgtggcatgcctgatttaaattctctaagggaggtgatgcaaaacccagagtttctacgcctgttttcctcacctgagacactgcagcaactcttgtctttccagcaaactcttctgtctcagcttggtcagcaacaatcagcacaggaaccaggtcaaacaggtggaggcactggaccattgaacaacatggggctggagatgttatcaagcatgtttggtggacttggagctggtagcctggctgttcctaacagatcaaatgagccaccggagcaattgtatgccacccaactttctcagcttcaagagatggggttctttgacacgcaagagaacataagggctcttattgctacatcagggaacgtacatgcagcagttgagcggcttttggggaaccccggacagtagcaggtggtagggacacaagactagcaattaaatcccaaacactagaatctggtgtgagatatttgtccatttagctttgattttcgtcatggagttatgttcaaacaaatctattgatttttttttcattttacatgatatccagagtttagtattatatccaatgctcaaatatccaatgattaattataccttcagctacaagaaagtacaaagccttttgtaccatatacatgtaattctaacttgcctgtttgcaaggattgggttcatagatacattcaaaagaaggggttatattgg

SEQ ID NO: 10075 - DNA, 1348 bp, Glycine max
  Clone ID: 700893149_FLI
gacgaaggttgaatgtgaaaaagcaaagaagcgttagcgaactgaacagtgtaaaataaattaagaggaaccctcgatttgtgcttttcaattttctgccccttctcttgcgttgcgttgatttgattaatactatcaactaagcccttttctgtttgcaatctggagctatgagttcgtcttcggcagatgtttttccagcaattcaggaagttatgctggagttccgtgctggcaaaatgtttcttgaggaaaaaagggttgttcccgatacacggaaaggacttgttcgaattgctaggggtgaggagggattagtacattttcagtggcttgatcgcacacaaaatgttgttgaagatgatcagataatatttcccaatgaggctatttttgagaaggttaatcaaacatctggaagggtttacatactgaagtttaatagcgatgacaggaagttcttcttctggatgcaggaatcaaatgctgatggtgattcacaactgtgtagctcagtgaatgattacattaatagaccattagagttgcttggtgaagaggagcctgatggatcccttccacttcaaatttctgaagatatgacagaggatgacatctcgtccagagctgcaaacttaggtatcccaaacttgggtgtggaagcaactagtgatgtaacatcttctggtccggttaaattggaagatctccaaagaatattgagtaacattggacctgcagatagtattgttgatcctgatggaggcttgggactcggagatatattgaagcctgatctaataatgccattgatggacatgttacctttggagcagcgtttagctccctacttacctgagggtaaatggtctccagaagagatattggagttgttgcagagcccacctttccgtcagcaagtagattcgtttacttatgtacttcgaacgggacagatagacttgtctcaatttggaattgatccaagtaaatacaagttcacagttttgtcttttcttgaggctcttgaggattctgtttccaagtcggttgagtctgaagaggctaggcaagatgatcaggatttgagatctcaatcttgtaaccgtcatgacccaatggatgaatctcagtagcgtggttcgttcagcattgttcttttttctatatatacaagaaacatctcatgtttttatttttatttttattttatccgacacattttctgcttgaaaaaggaaatttaaaatgcagtgagaaaaaagtacaaatattatttgagatcttttaaggttatacgttgaattattgatcaataaaggccaagccatttgtttccctttccttc

SEQ ID NO: 10076 - DNA, 666 bp, Glycine max
  Clone ID: 700893160_FLI
attggaatggacttgtggaatgcatcttctggtggcgctgaagctgcaaaaatgagacataatcaatctggtgccccgggagttgcccttggtgatcaatgggtacaagatgaacgtgagctgaaaagacagaagaggaaacagtcaaaccgagagtcagccaggaggtcaagattacgcaagcaggctgagtgtgaagagttacaaaagagggtggaatcgctgggaggtgagaatcaaactctcagagaagagcttcagagactttctgaagaatgcgagaagcttacatccgaaaataattctatcaaggaagagttggagcggttgtgtggtccagaagcagttgctaacctggattaaacagcaacacatttcagttcctcagtgtagtgtttgatggtaacggcaaaatttgatagattcttaattaagacgaatctgcagctggaattttcttatcaatggcccggccttcttaattgagaataggatataatgtttttttttttctttgtcatactaatttatatcattaaccctcaattgtaattgcccttgtgattttacatgtcatttgtttgtaatattaaccagtaccgtagaatagaaaatgtaggctacttgagcactttttgtttagaacttagtattgcaagtgatgtt

SEQ ID NO: 10077 - DNA, 1928 bp, Glycine max
  Clone ID: 700893164_FLI
atgggccataaccttgttctctctctccaccctcccaaacactttggttatgggcatccctttgctcaaagggatgtatggtgacttctcagggagcctcatggtgcaaattgtggtcctccagtgcatcatttggtacaccttgatgctcttcttgtttgagtttagaggtgccagaatgctcatctctgagcagttccctgacactgctgcctccattgtctccatccatgtggactctgatgtcatgtcattggatggaagacaaccacttgagactgaagctgagatcaaggaagatggtaaactccatgtcactgtgaggaaatccaatgcttcaagatcagacatcttctctagaaggtctcagggtctctcttccaccactccacgcccttccaaccttaccaatgctgagatatactctttgcaatcctctaggaaccctacgccgagaggctctagtttcaaccacactgatttctactccatgatggctgctggtggcaggaactcaaactttggtgcctctgatgtttatggcctttcagcttcaagagggccaactccaaggccttctaactatgatgaagatggtgggaagccaaagtttcattaccatgctgctggtggaactgggcactaccctgcacctaaccctggcatgttctctccctctaatgggtccaaaagtgttgctgctaatgctaatgccaagaggcctaatgggcaggctcagctgaagcctgaggatgggaatagggaccttcatatgtttgtttggagttcaagtgcttcaccagtttctgatgtgtttggtgcccatgagtatggaggaggtcatgatcagaaagaagtcaaattgaatgtatctccaggaaaagtggagaataatcatagagacactcaagaagactacctagagaaagatgagttcagctttggtaatagagaaatggacagggagatgaatcagcttgaaggtgagaaggttggagatgggaaaccaaaaaccatgcctccagcaagtgtgatgacaaggcttatattgattatggtgtggagaaaactcatcagaaaccccaacacctactctagcctaattggtctcacttggtctcttgtttcattcaagtggaatgttgagatgcctgccataatagcaaagtctatctccatattgtcagacgcagggcttggcatggccatgttcagtcttggtctcttcatggctttgcaaccgagggtcatagcatgtggaaattccacagcagcttttgccatggctgtgagattccttacaggtccagctgtcatggcagctgcttccattgctgttggactcaaaggtgttctcctacacgttgccattgttcaggcagctcttccccaaggaattgtcccatttgtctttgctaaggaatataatgtacatcctgatattctcagcacagctgttatttttgggatgctgattgctttgcccataactctagtgtactacatcttgttggggttgtgaatgaaagaaatgatggatgatacagaagattcacgtgtggcatccatgcaaagcttggttgaggttgttgagaatgagagaaaaaaaaggtcataaagcaacaatagaaaagaagcatcacgagaatttggataggaagaagaaccccaggatcagttttttttatttatttgttttctttttcttttttgaatgaattgccctttcttagtgaaaattaatgtaaaatcatgatgtagctaatttacaaaatgattatctcgttaaaattttatattataatgacctcggattccatgtcactcatcaattgaaggataagaaagcatgagaaacttagttgatgaaaatggtagtgctatgatcatttttcccaatataatattaaacttcatattgctttttc

SEQ ID NO: 10078 - DNA, 779 bp, Glycine max
  Clone ID: 700893192_FLI
ggagaaagcaaaggctcgtgctttgaaacgtgttgttggggatcccttcaaaaagggtgtcgaacaaggacctcagattgatgtggaacaattccagaaggtccttaggtacataaagtccggtattgaaagcaaggccacccttgaatgtgggggtgaccaaattggctcaaagggcttctttgtccagcccactgtcttctcaaatgttcaggatgacatgttgatagcaaaagatgaaatatttggccctgtacaaaccatcttgaagttcaaggacatcgacgaagtaattcgaaggtcaaacgcaacgcactatggtctagctgcaggagttttcactaagaatgtgcacacagccaacactttgatgcgagcactgagggttggaacagtatggatcaattgctttgatgtttttgatgctgcaattccctttggagggtacaaaatgagcggcattggcagggagaagggtatctacagtctcaacaattacctgcaagtgaaagctgtggtttcaccagtgaagaaacctgcatggttgtgatttgtgaattgctcaaactgctatgaccgaaatcctacgtggctatcatctttttccgctgaggcaatggcatgcaataaataatgtgatgttactaagataaaacctgattaggtacctgaacattataccagttgaatttatgtatttttcacttgttaattgctcaaacacaaacttggatactgtaatgacactgttgctgtaggtaataaattttgcaccattc

SEQ ID NO: 10079 - DNA, 1638 bp, Glycine max
  Clone ID: 700893202_FLI
acatcacctaccccttctctgttcattgctcaattgtttccctcacaactcataacctctttcccatttaacctttgaaaaaattccatactgtaacaacagatcaccatggctctatcacgtttgtcccaccgcagcatcggatccactctcacaaaacccttctccgccgccgccgcctcctcccgttcgatctccacctcggacacccccttaacaatcgagacctctgtccccttcaccgcgcacaactgcgaccccccgtcacgcgcggtcgcgacctcctcctcggagctcctcaccttcttccgcgacatggccctgatgcggcgcatggagatcgccgctgactccctctacaaggccaagctcatccgcggcttctgccacctctacgacggccaggaggccgtcgccgtcggcatggaggccgccatcactaaaaaggactccatcatcaccgcctaccgcgaccattgcatcttcgtcggccgcggtggcacgctcctggaggtcttcgccgagctcatgggccgcaaggaaggatgctcgaaggggaagggcgggtccatgcatttttataagaaggagagtgggttttatggtgggcatgggattgttggggcgcaggttccgttggggtgtgggttggcgtttgctcagaagtattctaaggacgagagtgtcacttttgctatgtatggagatggcgctgccaatcagggacagctctttgaggcgcttaatatcgccgcgctttgggatcttcctgctattttggtctgcgagaataatcactatgggatggggactgcggagtggagagctgccaagagtcctgcttattataagcgtggggattacgtgcctggcttgaaggttgatggtatggatgttcttgctgttaaacaagcttgcaaatttgcaaaggaacatgctttgaagaatggaccccttattcttgaaatggacacttatagataccatggacactctatgtctgatcctggcagcacataccgtacacgtgatgaaatttctggtgtgagacaggagcgtgatccaattgagagagtaagaaagctggtattgtctcatgatattgctgctgaaaaggagctaaaggacattgagaaagaagtcagaaaagaagttgacgaagccattgctaaagcaaaggagagtccaatgccagatccatctgatctatttaccaatgtctatgttaaaggttacggagttgagacatttggtgctgataggaaagaagtgagagctactttaccataattcagaactttgtcctttgaatatcttgccaccttgtcgtagcagactcttcaaaatagtgaagaataaaaggttctacagagggtcatctctctcccctattcgttgagtttctgcccgcgtgtatagtgtgaatttattcatatgcttggttagcaatggggcggggtttgttatttttttgtcatgtaatatttgcggatctaacagccaaagcatcattgtgattgatgcaactggggtgttctgcaaatttgaggaatacattgtgcactactgaagatatgtagttcagaatattttagacacgtcaaacagttcaaaaatctatatagatatatattaaag

SEQ ID NO: 10080 - DNA, 1088 bp, Glycine max
  Clone ID: 700893223_FLI
acattattgtcaaagttgtagctgctgctctcagaaatgtaccagaagcaaacgcatactggaatgttgagacgggtgaggtggttttaaatgattctattgacatatgcatagcagttgccactgagaagggcttgatgactccaataataaaaaatgctgatcagaagacaatatctgctatctcctcagaggtcaaggaactagctgcaaaggcacgtgctggcaaattgaagccacatgaattccaagggggaacttttagcatttcaaacttaggaatgtttcctgtggataaattttgtgctattataaacccccctcaggcttgcattcttgctgtagggagaggcaacaaagttgtggaaccagtaattggaactgatggaattgagaagccatcaattgccactaagttgagcttaacattgtctgctgatcatcgtgtttttgatggcaaagttggaggtgcatttctctctgctttgcaatcaaacttcagtgatataagacgactgcttttataatgacacaacacaaattttcacgttacttgattggacttctcacgaccaattatgtggatccaccacaaccaggatcaaacttgcatagcatccccatttttgtctttttcacttttatctcatcatctgaaacagttttcgattgttgtgcctcattagtttttgtataataatgtcttgggtctaattactaaatatcctgagaaaatacccaccaaggtaccatctaacattaggttttcaacaattgagattcaagcacgttggaatttttgttcattaggcactttgctgctctttgatgggtagttttgtatgaagagctttgtatagacagtcattcaaataccaacatttggatgaataaatattcttttcatgtgctgcatatctgtcatccgatttaagcgacggcatgatctggcacaatggtacttttggttcaatgttcatctataagcctggtctggctctttctccccagcattttatctttaacttttgtactaggatttggcctagtggttggattaataatgggaaatttggttaaatctcttc

SEQ ID NO: 10081 - DNA, 649 bp, Glycine max
  Clone ID: 700893391_FLI
agatgatgacctatattagagaaagcaatagggacggagattgagtggcatccaggaaagtgtttgacacaaaagattcttaagaagaagccaagtaaaggatcaaagaatgctaaacccatcacaaaaacagaaaaatgtgaaagtttcttcaactttttcaatcctccccaggtccctgaggatgatgatgatattgatgacgatgctgttgaagagctcgagaatttgatggaacatgattatgacattggttctacaatccgggacaaaattattcctcatgccgtgtcatggttcacgggggaggctgcacagagtgattttgaggatatagatgaagatgattatgaagatgaagaaggtgatgatgatgatgatgaggatgaggatgaggatgaggatgaggaggatgaggaggaaaagaaagggaagagcaagagtaagtctaaactgcagagtggtggcagggccatacctggtaaagatcagccgatggagcgtcctcctgaatgcaagcagcagtagtgtttggctgtgtacaaacagacctgggtatatttagtttcagagaagtaatcactgtagagtctgggttatttcagtcataatttgcaatttaattattattattattatgattattatt

SEQ ID NO: 10082 - DNA, 858 bp, Glycine max
  Clone ID: 700893415_FLI
gaggatccttgtatctgccaaaggaatatttgaaacaactggggtgaaactatcagggaaagttgcaggaatccactggcattacagagcaagatctcacgcagctgaactaaccgctggctactacaacacacgaaataacgatggatatctgcctatagcaaggatgctcgcaaaacatggagttgtcttcaatttcacctgcatggaaatgaaggacagagagcagccagactttgcaaactgctcacctgaagggttagttcaccaggtgaagatggcaacaacaacagctagagcagagcttgcgggggaaaatgcattggagagatatgatgcagatgcatatgctcaagttttatcaacaagtaagtcagaatccggcagtggattggctgcattcacatatctaagaatgaacaagaggttgtttgaagctgacaactggcggcacctagtggatttcgtaagaagcatgtctgagggtggtcggagagagagacttccggcagctgattcccatgggagtgatctttatgttgggcacatcaaagcaacacaggaaaagcacacacaagaggctgctcttgtgtaattgcatatttttgcaagttcaggcatcttggtatatagttaaaagcatcataagatatttttttatagaaaaagggaagctacagaaaaaaaggagaaatgacataggatcatgatacagaacactggcatatgtcatgccaacacctgagatgatcgagaagatattattttatttcatgtaatgtataactccaactacaatggagaaaaaacagtttatctgctgacgttataaacccaataatacagatattggtctct

SEQ ID NO: 10083 - DNA, 606 bp, Glycine max
  Clone ID: 700893437_FLI
tgcgcgttgggatttatggatgatcattacccgattcggagtgcgttttctcttctcaaccaggtaatagatgaatatcaaaaaaactttggcgagtcatggagaaatgctcaggaagacagtactcaaccatggccctatttgaatgaagctctggcaaaattccaggatcctgcagaggctgacaagttgatgaaaattcagagagagttggatgaaacaaaaatcatccttcataaaactattgatagtgtgctggctagaggggagaagctggacagtttagttgagaagagttctgatctgagtgccgcatcgcagatgttctacaaacaggccaagaaaaccaatcagtgttgtaccatattgtaagcaagctttcaagctgtcagtatgcagcgtgctcgtcttgaatcctgttccgacatggagactgttggtaggagaaaatagcctcatatgtctatatcactccattgtttgcttgttgaaaattatgttatataccctatacatgtattgtcttaccgtgttgacaaattcaaattcccatttaccttgtgatgtttactatgataatttattgtatgcatatattattgtttt

SEQ ID NO: 10084 - DNA, 1061 bp, Glycine max
  Clone ID: 700893453_FLI
attaatttcaggaaattccagcaagatagatgacgactttgaaagtgaagtaatgcttataagtaatgttcatcatagaaatctggttcagcttcttggttgttgcagtaaaggccaagatagaatccttgtctatgaatacatggcaaacaacagcctcgacaaatttttatttggtaacagaagatgttcccttaactggaaacaacgctatgatataattttgggcactgcaaggggattgacttatctacatgaggaatttcatgtttctatcatacatagagatatcaagagttgcaatatcctcttggatgaagaacttcagcccaaaatttctgattttggcttggtaaagctccttcctgaagacaaatctcatctcagtacaagatttgcaggaacagtgggatacacagcacctgagtatgcactccatggtcaattatcaaaaaaggctgatacatacagctatggaattgtagtgctagaaatcataagtggtcaaaagagtactgatgtgagagttgatgatgatggtgaggaagagtcccttcttcgacaagcatggaagttgtatgagagaggcatgcacttggagttggtggacgaaaccttgaatgataactatgatgcagaagaagtgaagaaaatcatagaaattgctttgttgtgtactcaagcatcggctgcgatgagaccagctatgtctgaagtagtagtgctactcagtagcaatgcacttgagcatatgagaccttcaatgcctatctttattgagtctaaattaaagccccacagagatatttttgcctcaactagttcctctacatctaatgctactgcctccagttctatagtacctgctcgatgattaattatgtatatgatgcacatgttagaggggcagaatgatgttgtagagcatacagatgcatgataagtaattaaagtttgttgtgatgattaattggtagttgtaattagttattcctggtagcactctttggtagtgttggatgtttgtataaatgccatacatagatttgttgcactgaatc

SEQ ID NO: 10085 - DNA, 1139 bp, Glycine max
  Clone ID: 700893490_FLI
gagggttttgttcttcaatggaaagccagaagcagaacagtaaaaagcggaaacaagttttcccatacggcaactacaagagctactatggctatcgaattggtcaaggcgtggatgaggaccctcgattgaaggtgctgaggaaggaatggtttgaaggcaaggactgtcttgatattggctgcaacaatgggatcatcaccatacagattgcacagaagttttgctgtcagagaattctcggagttgacattgattctgatcgagttgaggatgcatattggaatctcagaaaaactgttaggttgaaatctacagggaataaacctgtgaaagcctccaaacttcaggacaaggaccatgctgatgattcagagaacagtgttactactttgttgaatgttaaaacggaggagatttcaaaggaacattcttcttcagagcaaattgatcttcttaaaatagtttcgtttaaacgagaaaattttgttcagactcaacacccaccaggaaagcagtatgatacaattctttgtttgagtgtatcaaagtggatacatctaaattggggggatgatggcttaattactttatttgcagaggtttggaaactgctccgtccaggtggcatttttgtgctggaacctcagccatggaagtcatatgaaagcaatcgtaatgtctcagagaccactgctgccaactaccgtaatattatgattcgaccagaacagtttcaggaaatattactagataagattggatttcgaacagttgaagatatcacttcaggtttgacagatagcaagactggtttcaacaggccaattctggttttttgcaaatgatccgtgcatgcaaaatagtcagccaatgttcacgatgaggacttaatatgcgcgaggcattcttggtgaatagcagcagtaaagcaaattctgaattgaggggtttgaatgtaaagaatgaaaatacataccatgtctttttgtttgttgctagcagtctcaattagatccgcacacaaaagaggtagatgtagtaatgaacatgttttgctagagtttacaacttgcagataccacaacttgagaattttatttacaaaaagaaatgaaatttatagtccatttggtttg

SEQ ID NO: 10086 - DNA, 1714 bp, Glycine max
  Clone ID: 700893503_FLI
gttctaagaaaaaatagcttcaggtctggtattcctgctgaattgagttcatactatcagcttgagcgattggatatttcatcaaattcatttgtggggccttttcagccaggattgttgtcacttccttctattacttatctgaatatttctgggaacaaattaaccgggatgcttttcgagaatctttcttgcaattctgagcttgatgtagtggatttatcctcaaatcttttgactgggagcttacctagatgtttagtgtcaaattccagcgatagcactgtcctgtatgctagaaattgtctagacaccacgaatcaaaatcagcagccgcagcccttttgccacactgaagctttagctgtgggaatattacctgagacaaagaagcacaaacaagtatctaaggtagttctttcccttggcatagtaggggggactcttggaggagtagcacttgttttgctagttttctttattgttagaagaggaaatgacagaagcaaaacgaagaatcctccaactagattaatatcagaaaatgctgcgtctggttacacatctaagttgttttctgatgcaaggtatatatctcaaacaaagaagttgggagcagttggcctgccgacttatcgaagtttctcattggaagagattgaatcagctacaaactattttgacacagcttctttaatgggtgaagattcttatgggaagaaatgaaaaagagacacagcactcaaaactttgtgcaacacatagagctgatatccaaacttaggcatcgccatctagtcagcgctattggacactgctttgaatgttctttagatgattcaagcgtcagcaaagtatttcttgtcttcgaatatgtaccaaatggcacgctcaggaattggatctctgatgagcatgctagaaaatcctttagttggactcaacgcataggagctgcaattggagtggcaaagggaatccagtttttgcatacagggattgtccctggtgtatattccaatgatctgaagatagaagatgttttattggatcagaatcttgttgcaaaaatcagcagttatcacctgcctttgttgtcaaacatggggaaggttcggcgtggaaattcttccagtggattaaaaaattcaagcaatagtaaaagtgtaaagcaggaagataagtctgatatatacaactttggagtgatactactcgaacttattctaggaaggcaaataaagacagtaaatgatgcagatgcttttagggatctgttgcaagcaagcttaggaggtgatgaagagggtaggaggggcgttgttgatccagcatttcgcaaggcatgcttggatcaatcattgaagacaatgatggagatttgtgtgaggtgcctggttaaagagcccgcagataggccttctatagaggatgttttgtggaacttgcagtttgcatctcaagtacaagatgcatggagaggggattctcaaagtagtgaagggtcaccaggctcagaatctcgagggctacccttccattagtgtcaaaccacaggttttcactttttttattttgtatatttcactgtaagcctaaaaggttaatgcttgcagttgcagatacagcagcatcagaatagtataagttctttatgttggaacacctttgctaaaaaatctgctgagcttccaatgaaaaactatgttgtccg

SEQ ID NO: 10087 - DNA, 806 bp, Glycine max
  Clone ID: 700893559_FLI
gctctatgtccatttgaagctgttaaagtgagggttcaagcacaaacctgttttgctaagggattgtatgatggctttccaaagttatatgcatcagaaggcacacgaggattctaccgtggactaattccacttttgggtcgaaacattccattttccatggttatgttctcaacatttgagcattccgttgattttttgtatcggaatgtggtcaaaagaaaaaaggaggactgttcaataggtcaacaacttggtgtaacatgtttagctggatatgcagctggatctgttggtagcttcatttctaatccggctgacaatattgtatcttctctttataacagaaaggctgatagtcttgcactggctatcagaaatattgggctagccaatctatttaccaggagccttcctattagaatgttgctagttggtccttctataactttgcaatggtttttttatgacaccatcaaaattttaggtggaatgtcaactagtggtggagttagaactgacatgagaggaaatggggcaggctagattcagaaaaatggaaatctgcagttacatttttcaggctgacttgtgtattgcaagtcattttatactatatacagggttagttttgtggtggcttttgctttctgctaccatttagtccttttgaatttgtcattataggctttcattgatgcctttgaaatttgctttccaaaaagaacgaggagcccatttatattctcacgtgtactagcatattaggtgttgcacataacaaaagaaaatacaaatttacttgc

SEQ ID NO: 10088 - DNA, 1126 bp, Glycine max
  Clone ID: 700893606_FLI
cgaatccccaataaggccattattagttctagggagatttcatcaaacagtactgcatctgatgatagacgatttgtgagacacatcattactttttcaaagatctggagcagcgaacaagaatacaacggtcgatgctcgttatgcagcagaaaacagatctcgcaagatggcagaatatgtagcatttggaggcctgtgtgtcctgttggatatatatatattggggatattgctcgtgttggtatccatcctccaaatgttgctgctgtctaccgcaagattgatggattttttgctctcccgatgggatatgacctggtgtggcgaaattgtccggaagattatgttactccattatcaatttggcacccacgggcaccagatggatttgtggctcccggatgtgttgccattgctggttatttggaaccagagcctgatcttgtttactgtatcgcggagtcacttgttgaggaaacagaatttgaagagttgaaggtttggtctgcacctgactcatatccatggacctgtcatatctatccagtacagagtgatgctttgcattttgttgctctacgacaaagcaaggaagaatccgactggaagccaaagagggtccgtgataaccctcactgtcagttgcaatcaccttagtctttaaactggttaacctccgttttttatttctttggaggtcagctccaaagaatgtgcgtgtgccatctccgaaagaagacagtaatgtaagttggacgatgtttataataggagaggctgtgtttgtcgcgtgattattattactactttccagcatccaatggtgatgggactcagattgggatcatgtatattctctctgattctgtggtatatagtgtataaaagcaccacgtcggaaactgccaaaaggcacatgtaacttgtctacttatccttgtgtgtgttttgctcatgtctcagactattttgcgaagatgcgttggcgttttctttttcaaaagccacatacatacttgatttgcgagggatagaatattacatggttgacaatctaggcaaagactggccaccgaggtctatttttgaagatatgccaattttatgatgcgattcgaacatt

SEQ ID NO: 10089 - DNA, 202 bp, Glycine max
  Clone ID: 700893691_FLI
tatatatccctatatgtataggactgcctctttaatgaagacagggaatgttcaaggtgcactggctgaaatcaaccggattcttggctttaaactttcgttagagtgcttggaattacggttttttatctatctggcccttgaggactacaaagcagcagtccgagatgttcaagcaattcttaccctgtgtccatcttat

SEQ ID NO: 10090 - DNA, 945 bp, Glycine max
  Clone ID: 700893735_FLI
caagaatggcacttcgttgcttggtgatgtccctttctgttctcttcactcttggtcttgcgagagaaagccatgccagagacgaagatttttggcatgctgtttggccaaacactcccattccaagttcattgcgagatcttctaaagcctggccctgcaagtgttgaaatcgatgatcaccctatgcaaattgaagaaacacagtacccgaaaaccttcttctataaagaagaccttcatccaggcaaaacaatgaaagtacaattcagcaagcctccctttcaacaaccatggggtgttggtacatggttaaaggaaattaaagacactactaaagaaggatatagttttgaagagctatgcatcaagaaagaagccattgagggagaagagaagttttgtgcaaaatccttgggaacagtaattggttttgccatttcaaagctgggaaagaacattcaagtactttcaagttcctttgtcaataagcaagaccaatacactgtggaaggagtgcagaatcttggagacaaagcagtgatgtgtcataggctaaatttcagaactgcagtattttactgccatgaagtccgtgaaacaacagctttcatggttccattggtggctggtgatggaaccaaaactcaggcacttgctatttgccactcaaatacttctggaatgaatcatcaaatgcttcatcaacttatgggagttgatcctggaactaaccctgtttgccatttccttggaagcaaggccattttatgggtacccaatttatctgtggacactgcctatcagaccaacattgttgcttaattagtccatgcatcttgagcaccatgagaatgagattgtgtataaaataaattatcatgtgctgtgtgttgtgcaagtactaccttctctagctagattgctagagctagaatttcaacct

SEQ ID NO: 10091 - DNA, 877 bp, Glycine max
  Clone ID: 700893754_FLI
gagactacatgaagcaaaatgttcaatgtccagaagcaaattatccaacatttctttatgcaatgcccatgtcccatacaaaagtgttctttgaggaaacctgtttagcatcaaaagatgctatgccttttgatttactaaagaagaagctcttttcgagattaaatacaatggggatcagaattaagaaaacttatgaagaggaatggtcttatatcccagttggtggatccctaccgaacacagaacaaaagaaccttgcatttggtgcagctgccagcatggtgcatccagctacagggtactccgttgtgagatctttgtcagaagctccaaaatatgcttcagtaattgctactattttgaaagatggtcatgccaaggacatcattactcaagaaagaagaaaggagaatctatctatgcaagcttggaatacactttggcctcaagaacggaaacggcagagagcattctttctttttggattagccctaattctgcagctggacattgagggcattcgaacattctttcgtactttcttctgcttacctgattggatgtggcagggatttcttggctcctccctctcatctacagatcttgtattatttgcattctacatgttcataatagcaccaaataacttaagaatgggtctagtcagacatctactttcggatcctactggtgcaactatgataaagacttacttaacgatatagtacgtttctataacttatttattccccaccctaggtaccctgtattgggacacgggttagattactataggagcctcaatagtagttcgtagattcttgtatagacatacatattttattaaaaccagagatatgttcttatgattttt

SEQ ID NO: 10092 - DNA, 997 bp, Glycine max
  Clone ID: 700893784_FLI
ttcaagaataagtgtaatgtgggttatgcttttatcaatatggtgtctccttcacacatcatcgccttctacaaggcctttaatgggaaaaagtgggagaagttcaacagtgaaaaggttgcttcactggcatatgcacggatacaaggaaaggctgcgcttgtgatgcatttccagaattcaagcttaatgaatgaggacaaacggtgccggccaattctctttcattcagagggccaagatactggtgaccaggaacattttctatccagcaatttgaatatttgcattcgccaaccagatggatcctattcaagtgatttgttggagagcccaaagggcaatttggatcagaagctagagaaagattaaccatttattagacatattgttcctagcccacaataaatgggttctaggattgctaactatttgcataggtgatcctaaggtgtacaaagccaattcatgaaaaaaggaaaaaaaaaagttgtataaaaatgaagggagcaacccagttatcagcgggtggagactccaaatatgtcaataatcataaaagatgcagagagcagtttgttgatgtgtagagaaacaattgttttacaatcagtggaaaagaataacttggagtgtattgctggatggttggttcctaaagcagcatgcatgccagattgtgcaggattgactctgtctgggatttgttatttttttcttcctctgttgaggctgttgtggccatttgcggatatgaaactattgtgtatatggggaaaaaaaatcaatttatgggggaatggtttgtatagaatgggaacaaggaactatcctgttatttatcaatgttgtttatcatgtagccaaaaaatgtgaatgtctgtaaagatgtgaagttgtgaactggtttcttgccattgtagttgtgattttaaatattggatgcactgtaaagcactgttttatcaacccctatttataaatctgagtcttactc

SEQ ID NO: 10093 - DNA, 981 bp, Glycine max
  Clone ID: 700893826_FLI
gaggaattaaccggcataaacgatccaatattagcagggcaggagtttctcaaaagagggattcgcacaaaatgggtgattgtaaaaatgggttctaagggttcaattcttataacagcatcgagtgtagcttgtgcacctgcattcaaggtgaatgttattgacactgttggatgtggagacagttttgttgctgctattgtctatggttttatacataatatgccactggttaatacattggcaattgcaaatgcagtgggtgctgcaacagccatgggctgtggtgctggtaggaatgtagcaacactggagaatgtagtacatatattaagatcatcaaacctcagcgaagatgatgaattttggattgaaatacttgaaaagaatgtggttgctcaggaaataacatacctgtcaaatgttatgaacggaaacaaaaaccgtctcaaccttgtctcatttgacaaggttgcctctgagctcttgcctaagcttgaacttccacaaacagtggggaatgcgccaacttgataggttgtggaaaaatagattgaagtgcattcatgcgaaagaacacttctgattcttgggttcttggctttatcctgtaaaagtaaaaatttaagcattaagactgcagagttttatctctcttgggttacataaattgccgtagctaaattgctttgagcaagtacatgaaaggtagctagcttctcatcaagcactttaactgatttttggcatttcagtctcaacaggattcctttgattttgatgtcaaaggtatttttactccctgaaccagtggagcagagctcttatcctctgagatcccaatgtttttgcatcattttttgcatgaatgcttctcaaacagtgtatgtaatagtcttcatcttatcatagttgattgttgacgcagacagggaaagattgtttgtatgacttaaaatatttgattagggattactctac

SEQ ID NO: 10094 - DNA, 1601 bp, Glycine max
  Clone ID: 700893829_FLI
ttaaaggagcaagtgggactagtattgattgaatgattgatagaggagtgagtctcggggcatcaaagaagaaagatgggagacgtagcagataaattggcgtatttccaagcgataaccggtttagaagatccggagctctgcacagaaatcctggctgcccacaattgggacctggaactcgctatctctactttcacctcttcctcaaaccctaacaaccctccaccgcctcccgctctggcttggaaactcatcaccctacccgtttccgtcatctccgccagtctaggcttagtttccgccgctatcggcttgggcctatgggccgcggggggcgtcctctcctattccctcggcctcgtgggcctgggctcgccctcggccccattggtttccgtcacggccgccgcttccgaggcgatggatttcgtggccgctttcgagagggactacggctccggtgggcccaatttcgtgggcgagggcttcatggacgctcttcagcgatccaggaactcgttcaagcttctcttcgtttacttgcattcccccgatcaccccgacacgccgtcgttctgccagaggacgctctgctctgagaccattgcgccgtttgtgaacgagaatttcgtgtgctggggtggcagcattcgcgccagcgaagggtttaagatgagtaacagcttaaaggcttctcgcttccccttctgcgctctcgtcatggccgccaccaatcagaggatcgcgctccttcaacaggttgaaggtccaaaatccagtgaggagctgctggtgacactgcagagagtgcttgaagaaagctcccccgtccttgctgcggctaggcttgatgcagaagaaagaagaaataatatgcgcttaagggaggagcaagatgctgcatacagggctgcacttgaagctgatcaagctagggaacgacagagaagagaagaagaagaacatcttgcatgggaagctgctgaagccgagagaaagcacaaggaagaggaggcggctcgtgaaagagcagcacaagaagctgcagagaaacaagctgcattggctaaaatacgtcaagagaaagcccaatctcttggtgaagaacctgaaaaaggacctaatgttacacaggttttggtacggtttccaactggtgaacgcaaggaaaggaggttctacagcacagcgacaattcagtctttgtatgactatgttgactcacttggatgtttagaagccgagagttacagcctggtctccaattttcctcggactgtttatggacaagagaagttgacattgtcattgaaggaagctggattgcatcctcaggccagcctgtttgtggagctcagttcatgaaaatcaagcttgcctaatgttcttatgaatacaagatgtggcctgcaaataattctgatgtttcattcttctgtttaaaagaatcgacttgctgaacaattataaacgttagataaataggttgtcgtggtttatgtagttttgatttctcttattttcaattgaatcaatcaagcagatagcgttacatggagatgatttagaataatgatatatataatatacatatttgg

SEQ ID NO: 10095 - DNA, 715 bp, Glycine max
  Clone ID: 700893844_FLI
ctggggttggctatgggcagtggcttcatggagaggctgttgcagctggcacggtattttttaaaaaacaaaaatatcatgaattgtacttatatttgtgtttaatactaaagtctataggtctattttgatgaatctgtatgccaatgtacacaggtaatggctgttgacatgtcatatcgcctaggttggattgatgattctctagtgaagagagttggagatattttaaaacaggctaagttaccttcagcccctcctgagaccgtgactgtggacatgtttaaatctgtcatggcagtaagtactgattctcaatacccttttaatgttcagtttgtttatattaaggcttatagttttttttattttttattttggtgtattaggtggataagaaggtagcagatgggttgctaaggcttatccttctaaagggccctctaggcaattgcgttttcacaggggattatgacagaaaggctctagacgatacgcttcgtgcattctgtaaatcctgatctttgtgctccatgtttctattgcagctttatccaattccttttagtgagtttttgtatgttgtgataacctcacttgtatttttcttatgtactttggatgccaaccatggtccccattatatacgcaagagtctattacaaagttgtattattagaaattgaggcatgatcaataattatcatttgagcat

SEQ ID NO: 10096 - DNA, 883 bp, Glycine max
  Clone ID: 700893905_FLI
ggaactcagaagagaacttaggggagaaaatgatgatcacagaagatgaaacgactcttacagcaagcaaagaacaacaaagtgaaatgatgaacggagacgaggacaatcatggaagcgaagatgacaactccaaagagtggttgaacctgagcataggtggaactactactttactctcaacagctgtaccaccagccactgccaaagttttttcatgcaacttctgcatgaggaagttctttagctcacaggcactaggaggccatcagaacgctcacaagagggaaaggggtgctgccagaagataccaatctcagaggtcgatggcaataatgggattctccatgaacacactaactatgtgtcgatcacttggtgttcagccacactcacttgtgcacaagccatgcagagatggtatcatggtggcaccgagctttcatgatgcatatgcaaggattgggatggcatggacacctttctggaccgaggatcaagcggatatggtgtggccaggcagctttcgcttggttccaaaacagccacagtcaccacaggagccactcaagcttgatttagacctcagactctgacaagaggtttggtctcagcttggagccttatcctcctttttagccaaaagagcttgttcgttagtgagctgggagagtcaataactcagatgctgctgctactgcatagtaaatggtaggagatttttgtttttcattgtctatatgactacatgtttagcaccagaaaacccaagttataactccctggctatctattttagttccttcaagtttgatataactcctgatatgcagtgctcacttgacaatgttactgacttggggagatttagcttttcgacatt

SEQ ID NO: 10097 - DNA, 1323 bp, Glycine max
  Clone ID: 700893909_FLI
gtttacaaaagggagatcgtactcttgctgattacatgaaagatcgcaactttccttcaaacttggaatctgtgatgtttggacgtgtcttgcaaggagtagactcttcgaaacgaaatgcattgatcatcaaacaaataatgcgccagatcattacatctcttaggaaaattcacgatacaggcattgttcatagggatgtaaagccagccaacttagtggttactaaacgagggcagattaaactcattgattttggtgcagcaacagacctgcggattggaaagaattacgttcccaatcgtacccttttggatcctgactactgccccccagaattatatgtactccctgaagaaacaccaagtccaccaccagagccaattgctgctttcctttcaccaatcctgtggcagctgggattgtactcctgcaaatggcaataccaagcttaaggtctcctgctgctttgaagaatttcaacttggaactgaaaacctgtggatatgatttgaaaaaatggagggactatactcgcctccggcctgacttccaaattctagatagtgaatctggtagagggtgggacttagcaacaaagcttgtatctgagagaggttccctaagaagaggacgtttatctgccgctgctgctctgcgacatccttattttcttctgggtggtgatcaagcagctgcagtcctttcaaaattaagcttgaacagaaagtgagctgctaagcaaagaggagcacagttgaattcaaaggtgtcccacaccaagcctgcctagtttgtgaattgacaaccatcaattataagattttgttccattttttttttgtttttgggttttcctccccaagtttaaattggggagattttctactcaatttcaggcaagcaataagcctgaggacatcaaagcttacagaaggaaaaattttccctgcagtatacatttacatcttttgtgtaacctatatgacaacaatctcaagcaggagcacaatgtggttttaagagcttaatcagttgtctcctatggtttctttctacaagaggtgaatgcttgaagattggtgggacctcacttgtaatacctaagcttaagttctatgccttgaaacaggacatacagctaagtagagctgcttgctatgacacttattagacgaaacttacatacttacatccaagatgagattatatattgagttccatatagctctgtcatttgaatagtattcttgtacgaaattgtgcttcttgtggctttcaaagagttgtcattgatataataacacaatagttcttcatacc

SEQ ID NO: 10098 - DNA, 2300 bp, Glycine max
  Clone ID: 700893911_FLI
agctacaccagtcaagctttgagccagaacctacaaggactaagggcgagaagtccgatacgtaggatgagccgcagaatgctgtactacttgcaagaaaattggcggagactttgggttttagcattgtggatttccgctatgattggactgtttacctggaagttcatcgagtacaagagaaaaaatgcttatcatatcatgggtaactgtctactagcggccaaaggtgctgctgagactctgaagttcaacatggcacttatactcttgcccgtctgcagaaataccataacttggctcaggtccaccaagttggcttacgttgcacctttcgatgataatatcaactttcataagacaattgcggcggcagtaatgatcggtgttatacttcatgccgggaatcaccttgcttgtgattttcctagacttgtaagttcgtctgaaaaagattataagacgtatttggatggcgtatttggtgatcatagacccagttacggagacctcgttaaaggggttgaaggtgtgacaggaattctgatggtgattttgatggcaatagcatttactcttgcaacaaaatggttcaggagaaatctcattaagctgcctaaaccgtttaataggctcactggtttcaatgcgttctggtattctcaccatttgtttgtgattgtctatgtcctgctcattattcatggtgtaagtctttacctcgagcgcagatggcaccggcaaacggtatgcaatttgtagtatcagattccaattatttaggagcattatcagaggtttttctttccttgtcggttattggttacttgacacattgatctctgttttcagacatggatgtatcttgcagttccaattttactttatgcgggagaaagaacgctaagattcttccgttctggtttctatacagtccgtcttataaaggttgccatttatcctggaaatgttctgacattgcaaatatcgaagccctctcaatttcgttacaagagcggacaatacatgtttgtgcaatgtcctgctgtttctccatttgagtggcatccgttttcgattacctctgcccctgatgatgactacctgagtgttcacatacggcaactgggagattggacacaggagctcaaaagggtattctctgcggcctgtgaacctcccgtagctgggaagagcgggcttctcagggctgatgaaaccaccaagaagtgtttaccaaagctaaggatagatggaccttacggtgcgccagcacaagactacagaaactatgatgtcctgttacttgtcggtctcgggataggagcaacaccttttatcagcattctgaaagatcttctcaacaatattatcaaaatggaggagctggcggattcagtctctgattcaagtagaggttcagaccttagcactgggagtgcagattcaatatcttctaataagatttctcctaaacggaagaagacactgaagactacaaacgcttatttttactgggtaacaagagaacaaggttctttcgattggtttaaaggggtcatgaatgaagttgctgaacttgatcaaaggggtgttattgagatgcacaactacttaactagcgtatatgaggaaggcgatgccagatccgcccttattacaatggtacaagccctcaaccatgcaaaaaatggagttgatattgtttctgggactagggtgagaactcattttgccaggcctaactggaagaaggttttctcaagaatatgctctaagcactgcaatggacgaataggggttttctattgtggcgcaccggttttggccaaagaattaagcaagctctgcttcgagttcaacgaaaaaggtcaaacaaaatttgagttccacaaggagcatttctaagggaatttggagggagcttcatatctgtatctagaatcaacacaattaattttagcaactagtcgtagtcaattataagatatggttcaataagctaaaaccttaagtatagaatatgaggcattgtacatcccggccggccggcaagatggctgggcattgatcatacatgtggctgcagctcaaaggagatattgcccttacaaggctccagcaacttcagatacattctgccgaaccgcatagattattggccgatacatcccatagaaaatatacaacagttttgaaagtgataaaaaggaattagttagtgttctgcctcaggagcaatgcattggtttgtggataatttatttttttaaaaattatcgttttctaatatttatttt

SEQ ID NO: 10099 - DNA, 1079 bp, Glycine max
  Clone ID: 700893952_FLI
atagagattttaagacttcaaatgtcttgctggattcagtatgtgaactttgaatctttttcattgaatgcataatgaaagaaaaaaagatctgacgagtgtagaaaccatttggatagcagatctgaaatatgtgttgttgatttgatcacagaaatataatgcaaaactttctgattttgggctggcaaaggacggaccaacaggagacaaaagtcatgtctccaccagggtaatgggaacatatggatacgcagcacctgaatatctagccacaggtattgttgggttcatattacagaagcattggtgaatcatttcatctgagtttgtcaagtggctaaaaaaacaaaacattttaactgtaggtcatcttactgccaagagcgatgtgtacagttttggagttgtcctgctggaaatgttgtctgggaagagggcagttgacaagaatagaccatctggacaacacaatttggtggaatgggctaaacctttcatggcaaacaagcgtaagatattccgcgtgttggacacccggctccaaggacaatattcaacagatgatgcctacaagctagccacccttgccttgcgctgcctatcaatagaatccaagttcaggccaaacatggatcaagtggttacgacattggagcagttgcagctttctaatgtaaatggagggcctcgtgttcgtagaagaagtgctgatgttaatagaggccatcaaaatccttcttctgttaatggatctcgagttcgtagaagaagtgccgatgatattagccgtttggagactcccaacgcttatccccgaccctctgcatcccctctttatacttgacattgcaaacacacacacccttcaaatttatcatcatgcaatctgtttcgggtgatcacatccacgatctcaggcacctgtgtagctattagcctattactctctagtactgtacatatcgtatttcacctaatatattcaatgttgctagtccaccaattaatatttcacatatcatattttgtgtaactactaaactagattgcatttgtattatagctctagttagctc

SEQ ID NO: 10100 - DNA, 709 bp, Glycine max
  Clone ID: 700893966_FLI
agcagccacacctcccgcagcagccatggttctcaaaactgaactatgccgattcagtggtgccaagatctacccaggaaagggcatcagatttgttcgtggtgattctcaggttttcctgtttgcaaactcaaaatgtaagaggtatttccacaatcgcctgaagccttcaaagctcacctggactgcaatgtacagaaagcaacacaaaaaggacattgctcaagaagctgtgaggaagaggagacgtgctgccaaaaagccttactctaggtccattgttggtgcgaccttggaagtaatccagaaaaagagagctgagaagccagaagttcgagatgcagctagggaagctgctcttcgtgaaattaaggagaggatcaagaaaacaaaggatgagaagaaggctaagaaagcagaagttgcttccaagtcgcaaaaagcaggagggaaaggcaatgtttctaagggtgctatgcccaaaggtcccaaacttggcggtggaggcgggaaacgctgagcttttagttttgttcctaattttggctacaatttaaatagttgttttgacactgctgtactgatatttcatttggaagattaatcttttattttactgttttactaaacctgtgtttggatattcagaaggtacttggttattgaatggatttcccaatctgtgctagttttatattctttttacgcc

SEQ ID NO: 10101 - DNA, 1435 bp, Glycine max
  Clone ID: 700893974_FLI
caaaaagtcaaatgtccaaagctcagctggccctaaatctgataaagtgcaactgattgagcataggcgagcatataattgtgaaatcatgctttcaaaagtgaaagtgccattgcatgatttaatgagctcagtgttagcactggaggagtcagcactcgacactgatcaggttgagaacctcataaagttttgtcctacaaaagaggagatggaattacttaagggttataatggggaaaaggagaagttgggaagatgcgaacagttcttaatggaattgatgaaagtaccacgggtggaatccaagctcagagttttttcgttcaggattcaattcaactctcaggttctgctattggattcagattggatagccttcttaaactcacagagacacgtgcacgggacaagaagatgactcttatgcattatctttgtaaggtgctagatgaccaactaccggacgttttagacttctccaaggatgttgctaacctagagccagcagcaaagatgcaattgaagtttttggctgaggagatgcaagctataaacaaaggattagaaaaagtggtacaggaactatcaacctctgaaaatgatgggcctatatcagaaactttctgcaagaaattgaaaaaattcctcggttctgctgaagctgatgtccgttctctggcttcactatattccagcgtgggtaggaacgtggatcaattgattctctattttggtgaagatccagctcgttgcccatttgagcaagttgtgtcaactttgctcaactttactaggatgttcaacaaagcccatgaagaaaaccgcaagcagctagagcttgaaatgaagaagacagcagaaagtgagaaaaagaaatgtgaatcagaaagaattttacctacagctatccggactggcaatgtcaaatagatgctactagctttgagaatcagtatatactctaacgtgaataggatttgactggacaaaaacgggtctggtgtatggtgtttttgaagagcatgtatagttacacaagtagtagtagctgacattgataaccaaaacgaagagaactgcaatactgcaatacactgcaaagtttagaaatggtgtagtttgcacgagttgtgttatttaccagccaacctgtatatatcttcctcttccctctccgctcagcaactgtatgattgtaagtattttcaggaaacctgggcattcgttattaattttttctctctccctcaggctctgttagcaacactgatttcacatctgtaatgcaatgcttgatttcttcttgtatagcttatatatgatttttttccccctagcaaaatatcttcttaggtgccccaaaaataagggaaatttcttgctcggtattattgaatgtgtactaccccagctataacactaaaatattgct

SEQ ID NO: 10102 - DNA, 773 bp, Glycine max
  Clone ID: 700894015_FLI
ccaaaggagaagagttgaaagcaatgcaagtagatacaaccgtgttgggcctttcaaaggatgaggctcagaagaaaccatacattgcttccatgggagtgtacgtcttcaagaaggagatacttcttaatctattaagaaatatgcaccgagaataaattgatcttgttccaaagcttgttttttaagtgctacaaattaatttaatttagatggcgatttccaacggcaaatgattttggatcagaggttattcctgcgtcggctagagaattttacatgaaggcttatctcttcaatgattactgggaagacatagggactatcagatccttcttcgaggcaaatcttgccctcactgagcatccaccaaggtttagcttttacgatgcagcaaaaccaatgtatacatcaaggagaaacttaccaccatcaaagattgacaatagcaagattgttgattcaatcatatctcatggaagcttcttgaataattccttcatagagcatagcgttgttggaatcagatccagaataaactcaaatgttcatttaaaggatacagtgatgcttggtgctgattactatgaaaccgatgcagaagtggtagcactcttagctgaaggaagagttccaataggaataggagaaaatacaaaaatcaaggactgtattattgacaaaaatgctagaattggaaagaatgttgtcatagcaaattcagagggcatacaagaggctgacagatcttcagaagggttttacatccgttc

SEQ ID NO: 10103 - DNA, 2114 bp, Glycine max
  Clone ID: 700894016_FLI
gaagacccatatcaagttttatccaattgggatacggtggaatcagatccttgtaactggtttggcgtcttatgcactatggttcgagatcatgtcatcaagctaaacatatcaggatcatcattaaaggggtttcttgcaccagagctggggcaaatcacctacttgcaggcactaattttgcatggcaacaatttcattggaacaatacctagagagttgggtgtgttggaatctctcaaggtgttggatttgggaatgaaccaattaacgggaccaattcctccagagattggaaatctaacccaagctgtgaaaataaacttgcagtccaatgggttgactggtaggctacctccggagcttggaaacttgagataccttcaagaacttcggctggataggaataggcttcaaggacctattcctgctggtggtagctcaaattttgcttcaaatatgcatgggatgtatgcatcaaaggagaatgtaactggcttctgtcgttcgtctcagttgaaagtagcagacttctcatttaattttttagttggtaggatacccaaatgcttggagtatcttccaaggttaagctttcaagggaattgcctccagggtcaggagttaaagcagcggtcttctatacagtgtgcgggtgcctcacctgccagtgccaagagccagccagtggtgaatccaaatcaccaacctgctgaatatgtgtccaagcatcacagagcatcgaagcctgtttggcttttggctctagaaatagtaactggaactatggtgggctctctctttctggttgctgttcttgctgcttttcagagatgtaacaaaaaatcatctatcattattccttggaaaaaatctggaagccaaaaagatcatacagcagtatatatagaccctgagtttttgaaggatgtgagaaggtatagcagacaggagcttgaagttgcctgtgaagacttcagcaacataattgggtcctcaccagatagtgtggtgtacaagggaacaatgaaaggtgggcctgagattgctgtgatttccctctgcatcaaggaggagcattggacaggatatcttgagctctattttcagagagaggtggcagacttggcaaggttaaatcatgagaatataggaaaactactgggctattgtagagaggacactccatttacaaggatgttggtttttgattatgcttcaaatgggacacttcatgatcacttacattgttatgaagaaggatgtcaattctcttggacacggcgtatgaagattgccataggtattgcacgtggactcaagtatttgcatacagaagtggagcctccattcactatctcagagctgaattctagtgctgtataccttacagaagaattttcccctaagttggttgattttgaaagttggaagacaatccttgaaagatcagaaaagaattctggttccattggcagccaaggtgctatctgtgttcttccaaattcccttgaagcacgccatcttgataccaaaggaaacatatttgcttttggggtacttctgctagagataatcagcgggagacctccatactgtaaggacaaagggtacttggtggactgggccaaggactatcttgaaatgccagatgaaatgttatgtgtagtggatcctgaaatgaaattttttagatatgaagacctcaaagtgatatgcgaggtaataactctttgtgtcaatcctgatacaactgtgcgcccatctatgcgagaattatgtagcatgctggagagcagaattgacacatcagtaagcgtggagctcaagtcatcatctttggcttgggctgaacttgcacttttatcgtaatgtagtcaaaactcaaaattaacagatctacactaaagcagagacatacacagcagttatactttttctgattacttttttttttttttttttcattttactcctcaatttcatttctactgtaaatgattgctcaaaaagggtttctgttaggcttaagcacgacaaggtctcgttgtatagcactagcggactagtggaagtccagaaattgttaaaatagaacaagattgtattggacc

SEQ ID NO: 10104 - DNA, 846 bp, Glycine max
  Clone ID: 700894068_FLI
agctgaaggcggtgtcggaggagaaccctaacgagactgtgaaaagggaaacggtggatctcggaaacggaagcgacgtcgtttacattcagaggttaataccctccgatcaatcatggaaatggttccattatctcgacaaacacatcccatggaccagacccaccattcgcgtcttcggaaaatctttccttcagcctcgagacacatgttatgttgcaactccaggattgactgagttgacttacagcggatatcagccgcatgcatattcttgggatgattatccaccacttaaagacatgctggatgctgtccataaagctctccctgggagtagttttaatagcttactcttaaataggtacaatggtggtaatgactatgttggttggcattctgatgatgagaagctttatggaccaacgcctgaaattgcgtctctaacttttggatgtgaccgcgactttgttttgaagaagaagccatgtaaaaaatcctgtgatggaagtgatgaacctgccagcaagagattgaagaagggtagccatgatgctgatcagcatacatttagacttaggcatggatcccttttggtgatgagaggctatacccaaagagattggattcactctgtgcctaagcgtgcaaaagctgaagctacacgcattaaccttacctttaggagggttttttgattggcttgagaccaaagcaagtttgtggtaaatctacttctggcattctagaaggtatctgtttttttttctttcttttttttgtgacagattgatatgaaaattataatttcgcaatgagtaatatgatagtatgtctcgattttat

SEQ ID NO: 10105 - DNA, 911 bp, Glycine max
  Clone ID: 700894080_FLI
tagggccattgatgggcttaacgtgtacaacatactagagccatgctaccatttccccgatgctgccacagccaaagaaaatggaaccttaccaaggagtttcaagcaattaggagttactgagaggcctctcccagtgagaaagagaatgtttggtagagcttggccttttagagcaccagtcaaacctggtcttgttccattatggccccaattggctcaaactaggcacgtcgcatgtgttagtgatgaagtagcaagttcatggctaaacaacgttgcagtcaggaaagccatccatgctgaatcggaaaaagtggcgggtccgtgggaattatgttcgagtaggatagagtaccatcacaatgctggaagcatgattccttaccacaagaacctaaccaggcttggctatagggcacttattttcagtggcgaccatgatatgtgtgtaccgtttactggaagtgaggcttggacacgatctttgggttacaagattgtggatgaatggaggccatggaactcaaataaccaagttgctgggtacttgcaagcgtacgagaacaacctcaccttcctcacaatcaagggagctgggcacaccgtgccggaatataagccgcgggaggcgttggatttttacagccgttggttggaagggaagctaatataaggaaatgcatcatgtggcgtaaaataaaacatacatgatcgattattaatgaatagaagttacagcagtgtattttagctttttcgttagtgatttatcctttacattaaatcatatatgcatgggatttcgcaaaaaggaaacaaaaagaaatcatatgtaagggattattattatttaactgtaatttgattgatatatcaatcctttcgaagagaggatgttggaagcttgt

SEQ ID NO: 10106 - DNA, 1361 bp, Glycine max
  Clone ID: 700894095_FLI
gaagtattattatttcatccgtcttatgggacgcaaggcatcacacgttgctttggaatgcaccctccagtcccatccaaatatggtaattcttggtgaggaggttgctgcatcaaagcttaccctttctgaaattgcaaaacagattactgatgcaattcaggctagagcagagcaagacaaataccatggagtcattctccttccagaagggctgatagagagtattcctgaagtgtatgccctcttgaaggaaattcatggtttactcagacaaggtgttgaagttgacaagatatcttctcagctaacaccatgggcatctgctttatttgaatttctgccaccctttattaggagacagttgctcctttaccctgaatccgacgactcagcacagttatcacagattgaaactgagaaattactagcatatcttgtggaagtcgagattaacaagcgtctgaaagaaggcacatacaaggggaagaaattcaatgccatttgccacttttttggttatcaagctcgtggatctctgccatcaaaatttgactgtgattacgcatatgtccttgggcacatctgctaccatatactggccgctggtctaaatggatacatggcaactttaactaacctgaagaatccagtaaacaagtggaaatgtggggctgctccaattgcatctatgatgactgtaaagcgctggtctccaaatccaggagctacatcaattggaaaacctgctattcatccagctactgtggacttgagaggcaaagcatatgagctgttgagacaaaaggcacaaagctttcttatggatgacatctacagaaatccaggtccacttcagtttgatggtcccggcgcagatgccaaggttataactctttctgttgaagaccaggactacatgggccgcattaagaaacttcaggagtaccttgaacaggttcgaaccattgtcaagccaggatgccctcaggaggttttgaaagctgctctaagcgtcatggcgtcggttaccgaagttctagctgcaatgtcaacatcttataccaacaccctggcatccctgtgagagtagcagatggaagttgtattcttccataaaaattctacattttatagccatggaagtagtttttgattggaaataagagttatagctgacatggtgcacgtcaacgtgagatgagatttactgtaatcaaagttttggctctctatgttcccaactgggtaatttttttgttttttgttttttgttttttgttttcaaagacatgtgggatccatgtgaaattgtttgataacttagcttgctgcttgaaattattattgttctttttagg

SEQ ID NO: 10107 - DNA, 1426 bp, Glycine max
  Clone ID: 700894101_FLI
ctcagaattctctaaaagagatctttttctgctctttgaagaaagaagggtctttgcttgattttggagatgtctctgctctcagatctcatcaaccttaacctctccgataccaccgagaaggtgatcgcagagtacatatggatcggtggatcaggaatggacctgaggagcaaagcaaggactctcccaggaccagttagcgacccttcagagcttcccaagtggaactatgatggttccagcacaggtcaagctcctggtgaagacagtgaagtgattttatacccacaagccattttcagggatccattcagaaggggtaacaatatcttggttatctgtgatgcctacactcctgctggagaacctattcccactaacaagaggcacgctgctgccaaggttttcagccatcctgatgttgttgctgaagtgccatggtacggtattgaacaagaatacaccttgttgcagaaagatatccaatggcctcttgggtggcctgttggtggtttccctggacctcagggtccatactactgtggtgttggcgctgacaaggcttttggccgtgacattgttgacgcacactacaaagcctgtatttatgctggcatcaacatcagtggaattaatggagaagtgatgcccggtcagtgggaattccaagttggaccttcagttggaatctcagctggtgatgagatttgggcagctcgttacatcttggagaggatcactgagattgctggtgtggtggtttcctttgaccccaagccaattaagggtgattggaatggtgctggtgctcacacaaactacagcaccaagtccatgagagaagatggtggctatgaagtgatcaaagcagcaattgacaagttggggaagaagcacaaggagcacattgctgcttatggagaaggcaacgaacgtcgtttgacaggacgccacgaaaccgctgacatcaacaccttcttatggggagttgcaaaccgtggagcttctgttagggttgggagagacacagagaaagcagggaagggatattttgaggacagaaggccagcttccaacatggacccatacgtggttacttccatgattgcagacacaaccattctgtggaagccatgagcaaaacctgcatgttttctccctttggatggaaaggaacagttatgcttttcttagtaggatttggtctctctctctttttaccttttgattggtactatggttggtgccttgttggttggtgcaactaactggcaagggttgttcattgttttcttctattcctttccctcgttttccgattgttacaatgacaataatttaatggttattatcagtcttgaacaaagaaatgctgattgtgaagtataataataatatatgaaattgtcatgttcattggagt

SEQ ID NO: 10108 - DNA, 1199 bp, Glycine max
  Clone ID: 700894116_FLI
aagacaacgactgttgtctgacatttcgagattggaggccaaagtggagaggcttgaaggtcaactacaagtcaaagacagggagatagcgactattactagaacggaagctaaaaacactgcagctctgaaggcccaaattgagaagctgcaacaggagagggatgaattccagagaatggttattggtaatcagcaagtaaagactcaacaaatgcatgagatgaagaagaaggaaaaagaatacataaagttgcaggagaggctaaaccaagtgttgatggagaagaagaaagagtctaggtcaggcatggagataatgaatttgcttcagaaggaagggaggcaacgtggaacatggaatgggaagaaagctgacaatgatttttataaaaagattgtggatgcttatgagtcaaaaaatcaagaactgatggcagagaatgctgatttaagagcattattgagatcaatgcaggtggatatgcgtgatttcttaaatgctcctaatggactaccaaagcaatctttcactggcaatgaaagagttgaaagtgatccttcacaatctccattggttgggaaaatggatgtatttgaccttccttttcacatggccagagatcaaatagaagaaagtcttcgcaacaaaatggcttctataaaggagcgtatggttcaattgcaagatgctcaaaaagaagcagaagttacttcagaggctactgagagggaacttgagcttgaagctcaacttgtcgaagcaaggagcatcatacaggagcaggcatcaataatgtctaaacatcttgcaaaatctgacaggccaagggaatctatcatcccagcaccggctgaggcagtatgcaattaacaaagctgaggatactcacatttgatgcctggcatgattaattgagttggctctgcagtgtaacaggaacggacagcatgcttttagcctgtgtttctaatcttgcttgttcatcttgcactgccctagtttatgataagaggcccgagtatggtcgaatatcattgtaattattagcatggtgttgtaattagtgttattgtacccttggaactgctagaagaaaaaatagatcatatttatgtcacaagaaccattcaaactacatactaacatttaagattgacagctagaaatattttataatatcactttgggctcttcc

SEQ ID NO: 10109 - DNA, 2099 bp, Glycine max
  Clone ID: 700894129_FLI
aagcacaaaaaaaaagtgtctggtcccaaaatacaacaagagtgtaaaatggtggtggcagagttcactagtggtggcttgaggggaatgaaggccttcagctaccatgttctcacggggcgttggttcatgctatttgcatctttactcatcatgtccgttgcaggggcaacctacatgtttgggatatactctaacgaggtcaaaacctcattagggtacgaccaatccactctcaacttgctaagcttcttcaaagacctaggtgccaacgttggagtcatatccgggttggtcaacgaggtaacaccaccctttgtggtactctcaattggggtcatcatgaacttcttcggctacttcatgatatttcttgctgtctctgggcgcattgccaaaccccaagtgtggcaaatgtgtctctacatttgcattggtgcaaattctcaaacttttgccaacactggtgctttggtcacgtgtgtcaaaaacttccctggaagccgtggcagtatcttaggcctactcaaaggctacgttggtctaagtggtgccatcatcacacagctttaccatgctttctatggtaatcataactctcaagctcttatcttactcattgcttggctccctgctgctgtttcctccctttttcttccaacaattcggataatgaacacagtactgcaccaacccaaggagggcaacagagttttctaccaccttctatatatttcacttggccttgctgcttttctcatggttctgatccttgtacaaaacaagcttagtttttcaaggattgaatacatagtagatggccttgtggttttcttctttcttcttctcccacttgttgtggtgtttagagaggagataaaccaattgaaagcaaatactcaatgtttgaccgattcaccaccccagttgaaagtagtcactgaagctattccaccaccaaacgtggagcaagaagaagtaccaccaactaccacaagttcccacgagaaaagttcttgtttaaggaacatattcaaccctccaaagaggggagaagactacaccattttgcaagcacttttcagtattgacatgctgattttgttcattgcaacaacgtttggtgctggaggaacattaacagccatagacaacctgggacagattggacactcattaggatacccgaacaaaagcacaacaacctttgtgtccttagtgagcatatggaactacttgggaagagtagcttcaggttatgcctctgagatcttcttgaccaaatacaaaatccctcgtccctacatgctcactctagttttgcttgtctcttgtgttggccatgttctgatagccctcggtgtcccaaactccctctacttcgcttcggtgattatagggttttgttttggagctcaatggccactaatgtttgcaatcatatcagaagtttttggcctcaaatactactccacgttgtacaactttggagccgcggcaagccctcttgggtcttacattctgaacgtgaaagtggctggtgttttgtatgataaagaggctttgaaacagttgaaggcgaaaggactcactagagaagaagggaaggacctaacttgcgtgggagtgcaatgctataaaatggcttttatcataatcacggcttcaacgttggttggttgtttagcttcggtcattttggcgctgaggactagaaagttttacaaaggggatatctatagaaaatttagaatggaacatgaagcaatggagattaccaagactgctaattaattaattaattaattaatgttctgtttgaaaaagtcgcgtaattaaaccttgagcagcaccagcgctagtactccaccaacacaagcagctcggaggaacaagacaaaactatagataatgaagtgtgcttctaagttttagctacaattaatgcctggctttttcttgtacattataagtttgattctgtaaaattagtaaatggggaatgaacagtaagaagtgctgttagagcatttttatatctaaggaaagaattgtatatttttctctttgattcaaatttatatttgtgtttataaagg

SEQ ID NO: 10110 - DNA, 1035 bp, Glycine max
  Clone ID: 700894132_FLI
gtccttgaagtacagctctgcagtgtcaactcttcttgcagtggcatttgttggcatatgttgtgggttggctatcacagctctggtgcaaggaaaaacacaaactcctagattgtttcctcggctagactaccaaacctcattctttgatctgttcactgcagttcctgttgttgtcacagccttcacatttcactttaatgtgcaccccattgggtttgagcttgccaaggcatcccaaatgacaacagcagttcgattagcattattgctttgtgctgtgatctaccttgcaataggcttatttgggtacatgttatttggggattcaacccagtcagacattctcatcaattttgaccagaatgctggttcagcagttggttccttgctcaatagtttggtccgtgtaagctatgccctccacatcatgctggtgtttcctctcttgaacttctctttgagaaccaacatagatgaagttctcttccctaagaagcctatgctagccacagacaacaaaagatttatgatcctcactctggtgctgcttgtattctcctaccttgcagctatagcaatcccagatatttggtacttctttcagttcctgggatcctcatccgcagtgtgccttgccttcattttccccggctctattgttttaagggatgttaaaggtatatcaacgagaagagacaaaattattgcactgataatgattatactagctgtggttacaagtgtgcttgccatttccaccaacatatataatgcttttagtagcaagtcataaatacaagctggttctctcatttctccccttctattgttttttttatatgtatagaaaattttatttggggagagagggtatggctggggagattctagaggcatttggttgctgtggcgattgtgttacttttgtattttggatcccttgttgtttattgtagaattcatgtcttgtggcagcatttctatgtaaaataccaaatattaaagaaatgaaatcaacttgatggggtgacg

SEQ ID NO: 10111 - DNA, 1018 bp, Glycine max
  Clone ID: 700894185_FLI
ctccgttggctgcgccacgaggtgggcttccaggattttcgatttgattttgtaaaggggttttcaccaaaatatgtgaaagaatatattgaaggagcaaagccattgttttgtgttggggagtactgggattcttgcaactacaagggttctaccttggactataaccaagatagccatagacagcgaataatcaattggattgatggcactggacaactttcaactgcatttgactttacaacaaagggaattctccaggaagctgtcaaaggaaatttttggcgtctgcgtgatcctcaagggaagcctccaggtgtgatcggatggtggccctcaagatctgtcacatttgtagataatcatgatacaggttcaactcaggctcattggcccttcccaaaagaccatatcatggaggggtatgcatacatattgactcatcctgggataccaacagttttctatgaccacttctatgactggggtgattcaattcgggagcagattgtgaagttgattgatgttcgcaagcgtcaaggtattcaaagtagatcatctgtgagaattctggaggccaagcacgacctttactctgcagtaatcggagagaaggtgtgcatgaagattggaaatggttcatggtgcccaactgggagggaatggacactatcaacttctggtcacaattatgctgtgtggcacaagtagtgttctgttggcatgtcatgacccttctccactggaatcacagagaagagaaaggaattacgtgcttatatgcttctggagtcttaagcttgataaaattgaagctatttccttaatctcgcaggctttggaaagctctttaatttcctttcaacttacgtgctacccagttaaataaacagtatgtaactataactaatttacagtagctgctttgtttatgtaatacataacaataaaaataagcagctttgtctatgtcatatatgtaaaataaattaataataaaatttctattagtacctat

SEQ ID NO: 10112 - DNA, 1494 bp, Glycine max
  Clone ID: 700894196_FLI
ccaccacacctctcctcgttcacgctacccctttctgctcttcttctacctttcaagttttaaaagtataaagatggcagagacattcctatttacctcagagtcggtgaacgagggacaccctgacaagctctgcgaccaaatctccgatgctgtcctcgacgcttgcctcgagcaggacccagacagcaaagttgcctgcgaaacatgcaccaaaaccaacttggtcatggtcttcggagaaatcacgaccaaggccaacgttgactacgagaagatagtgcgtgacacctgcaggaacatcggcttcgtctcaaatgatgtgggactggatgccgacaactgcaaggtcctcgtcaacattgagcagcagagccctgatattgctcagggtgtacacggccaccttaccaaaaaacctgaagaaattggtgctggtgaccagggtcacatgtttggctatgccactgatgaaacccctgaattgatgccattgagccatgttcttgcaacaaaactcggtgctcgtctcaccgaggttcgcaagaacggtacctgcccttggctgaggcctgatgggaagacccaagtgaccgttgagtattacaatgacaatggtgccagggttcctattcgtgtacacaccgtgctaatctccacccaacacgacgagactgtcaccaatgacgaaattgctgctgacctcaaagagcatgtgatcaagcctgtgatcccagagaagtaccttgatgagaagaccattttccacttgaacccttcaggccgttttgtcattggtggccctcatggcgatgctggtctcaccggccgcaagatcattatcgatacttatggaggatggggtgctcatggtggtggtgctttctccgggaaggaccctaccaaggttgataggagtggtgcttacattgtgagacaggctgctaagagcattgtggcaagtggacttgccagaaggtgcattgtgcaagtgtcttatgccattggtgtgcctgagcctttgtctgtgtttgttgacacctatggcactgggaagatccatgataaggagattctcaacattgtgaaggaaaactttgatttcaggcctggtatgatctccatcaaccttgatctcaagaggggtggaaataacaggtttttgaagactgctgcctatggacactttggaagagaagaccctgacttcacatgggaagtggtcaaacccctcaagtgggagaaggcctaagtaattcattccactgctctatgctggaagttttttgagcgttgcccttataatatgtctaatatccataactttccacgtctcttactctgtgtgtttctctcctcttcctcctattttgttatttgtatgttcttttgtaattttttacgtgatcaactaaaaacatgtactctctgtttgtatgtatgccctaccaatgtgtctcttaatatcaatatcaaaaagagagtgttcaagtt

SEQ ID NO: 10113 - DNA, 862 bp, Glycine max
  Clone ID: 700894234_FLI
caagaaattacgtccagaggtagaaattaagggagtttcgtgccagagtaagaaggagaattcgggaagtgatggaactgtggttgatcaaggaaaaggtggtagcccagttgcatcgtctcatgcaacaacaaccacaaccactagcagtgcacaaactcataggaaagctagaaggtgttggtcaccagacctgcaccgaagatttgttaatgcccttcaaatgcttggtggatcacaagtggcgaccccaaagcagataagggagttgatgaaggttgacggtttgaccaatgatgaagttaaaagccatttgcagaaatataggcttcacacaagaagacccagtccaagtcctcaagcggttggagcagcaccacagcttgtggtcctcggcggaatctgggtcccaccggaatatgccacggcagcacacacagccacccctactctctacggcgcccaccctacctcccacgcgccgccgccacattactgcgctgccactcccatgccacaagacttctacaccacggcgccgccacagccgctgcttccgccgcctccgccgcaccacaacgctctgcaccacctgcacatgtacaaggcggcaccgcacggccaaggctcgccggaatccgacgttcccagcaacggagagcgatcggagagtattgaggatgggaagtcggagagtagcagctggaagggggagaatgaaggggagaggaaagggattagtaaagggagcaatgggagtgagatcactctcaagttctagggttttagaattagggttttgcttgcatcccataaccgatgcatgttcaactactattcattattgttcaacaaaaatggg

SEQ ID NO: 10114 - DNA, 781 bp, Glycine max
  Clone ID: 700894355_FLI
ctccagcattgtggacacaaatttcacagtaggcaccatctttggtgtgtggcctggagataagttgactgggatcaccggaagagatcaagttgctgcagccatgggggttttgggtcctagaacaacatatgtgcttgctctaaaagacttccctggcacccatgaatttcttctgcttgatgaaggaaaatggcagcatgtcaaagagaccacagaaattggtgaaggaaaactgttctccccaggaaatttgagagccacatctgacaaccccgattatgctaagttgatcgattactatgtcaatgaaaagtacacattgagatacactggaggaatggtgccagacgtcaaccagattattgtaaaagaaaaaggaatcttcaccaacgtgtcatcaccatcagccaaagccaaactgagactgttgtttgaggtagctcctttggggttcttgattgaaaaagctggaggttacagcagtgatggtcatcagtctgtgctagacaaagtcatcagtaacattgatgacagaactcaagttgcttatgggtccaagaatgagataatccggtttgaagaaaccctgtatggtaaatccaggctcaagggtggtgtagctgttggagcagctgcttaatctgttaaacctgcaattcattgtctatttttatctgcttttagaaaaagatatatgctatcttcagacaagtacctgcaatttagtcacatttctgtttatcactataataacaaggtaaattatgttggtatggct

SEQ ID NO: 10115 - DNA, 1301 bp, Glycine max
  Clone ID: 700894372_FLI
gaagtgtgaggcttctggattttgctatgttaatgatatagtccttgcaatcttagaacttctcaaacaacatgagcgtgttctatatgtggacattgacatccaccatggagacggtgtggaggaagctttctacactactgacagagtcatgactgtttctttccataaatttggtgactattttcctggtactggggatgtacgtgatattggatatggaaaaggaaaatattactctcttaatgttccacttgatgatggcattgatgatgagagttatcattttttgttcaaaccaataattggcaaagtaatggaagtgttcaggcctggtgcagtagttctccagtgcggtgctgattctttatctggagaccgattgggatgtttcaatctttcaattaggggtcatgctgagtgtgtcaaatacatgagatcattcaatgtgcccctcttgctactaggtggtggtggctacaccattcggaatgttgctcgttgttggtgctatgagacaggagttgctcttggaatagaagttgatgacaaaatgccacaacacgggtattatgaatattttggtccagattatacccttctgttgccccaagtaacatgggaaaacaagaattcccgtcatttacttgaagaaattcgatctaaactacttgagaatctttacaagctgcagcatgctcctagtgtccaatttcaggaaagacctcctgattctgatcttggagaggccgatgaagatcatgatgatggagatgagccttgggatccagattctgacatggacgttgacgttgaacgtgagcttgtctcgagcaaagtaaagaaagaaattgctgaacctcagcccaatgatctggaggaccagagaagtggagagcatttgagagactctgatactgcagttgcggaaacctgcatgaaggctctagatatttcttctcagaaagctgatgaagataatgtgaaagtagaacagaatactgtgaatgatttggccaaagagacggacctgaagggttaagcaacataggctttaactgattggtgaacagttaaattgattttccatttatgctgtcgcatttccaaattaattgagatgtggctgctgcttggttccatcatagtccattgtatacaccagtcgcattttcctaatgttaggggcaagtttgcaaatttaaattggttttttttttatctcatccagatggttttttgtactgttacattacatcttgttacagaatagtattacgtgctattattgagccgggttt

SEQ ID NO: 10116 - DNA, 632 bp, Glycine max
  Clone ID: 700894402_FLI
ctatccctttagcttaattttttggctacgttatggggatccttagcgatcatcataatcagaagcatcaccaccaccaccaacaacaagagaagaaggaggatctgaaggacattccaaaagggtgtttggccatcttggtagggcaaggggaggagcaacagaggtttgtgatccctgtgatgtacatgaaccacccattgttcatgcagttgctgaaaaaagctgaagaggaatacgggttcgaccagaaaggccccatcaccattccttgccacgtggagcacttccgctctgttcaaggcttgattgataaggacaaatccctccaccatggccatcaccaccatgcttggtgcttcaaagtttgattcatcagtcacactctagcaacatgaatttttaaattttaaaatcatgtacatgatatttcttgtttatttttattttagttttgtcattgttttcctaattttccacgacaccttgaatgtggcgttgtactgttggtataatgatgtgatgacgacgaaaatctttggatcttaatttgcatgatttttttcctttctgggtactattaatgtttgatcaatggaaaatgaaacgagaattataggatttgtgatgtg

SEQ ID NO: 10117 - DNA, 808 bp, Glycine max
  Clone ID: 700894463_FLI
tcattcttctttcgttgctacttctactgtttcttcctccgatccctcattgccgcaaatgactcctcctgctagtgttaggtgaattccctcgcttcacatgcatgatcgcaccttcaactctcttcttcttcttcttctccatggctttttttcaaggttttggcgccgtggagttcgttttgtagcatcaccgtatcatcagcttcagcttgctttcaccaaaacggctttactatttggtgtgttccatgtcacaaaaaacgaaaggagatattccttttacccactcctcgtcagggaagatctgaagcagcgctagcagcacacgtcctctaatggacgccgactcctctggagaagaagtggttattaaaacaagaaaaccatatactatcacaaagcaaagagaacgatggacagaggaggaacataacagatttctagaagccttgaagctatacgggcgagcatggcagcgcatagaagagcatataggaacaaagactgctgtacaaatcaggagtcatgctcagaaattctttacaaagttggagaaagaggcctttgtaaaaggtgttccaataggacaagctcttgatatagacatcccccctccacggccaaaaagaaaaccaagcaatccttatccccggaagaccaatgttggtgccccaacattacatagcgaagcaaagcatggaaagtctctcatttcaattgcatcttcacatggtaaacaagcactggacttggagaaagaaccacttccagagaagcataatgtcgacctaaggccaacgactgt

SEQ ID NO: 10118 - DNA, 493 bp, Glycine max
  Clone ID: 700894562_FLI
gagagcgagagagagagagagaatggcagcacttggtggcaatcgtgatgtggcaggaagccagaacagccttgagatcgatggtttagctcgctttgctgttgaagaacacaacaaaaaacagaatgcccttttggagtttgaaaaggtagtaagtgcaaaacagcaagtggtttctggtaccttgtacaccatcactttggaggcaaaagatggtgggcaaaagaaggtttatgaagccaaagtttgggagaaggcatggttgaacttcaaggaggtgcaagagttcaagcttgttggagatgcacctgcatagtctagtgcttaattaggttgcagaagagtgaagagtgagacagcctggctcgaaggggaaagcctaaggatatatcaaagcatgctatatgtataaaataaatgtagcttttctaccttcggtattgatatttgaaatcgtgatttggcatcttatatatgatctctgtgtttgtct

SEQ ID NO: 10119 - DNA, 1223 bp, Glycine max
  Clone ID: 700894679_FLI
aaaaaacatacagaatataaacttggttcagccaattcatctcatgctgatcctgctattcatttgaactcttcagtgaattttaaccaagatcggggatttaaaaacagtgatacaactcaaaaaagagaagtgactgatgcaattgaaaagccaaacataaacgagtcaaatgctgttcaggataatgtttttcagcatcaccttcccttgcgtcaggaaattttggctcataaaaggaaggcagttactttgaaaagagaagggaaactaacagaagctaaggaggaacttcggcaggccaagctgttggagaagggcttggaggatggaaatatgctgccagacactgcctcttcctctgcctctgccactgtgaactatgcttcccatgcatcaaatgttgtacaaaagaaacaagaatcgtcaaatgttagtgcaaagccattgagtagtcgtgatcgatttaaattgcaacaggagtctctagggcacaaacgtcaagccctaaagctacggagggaaggccaaatagaggaagctgaagctttgtttgaactagcaaaggcaattgaaacccagctggaggagttgacagctcaagattccaataagtcagagggtgtagatgatgtggctgttgaggattttcttgatcctcaactcttgtctgctctgaaagctgttggacttgatgatgtaagtgttgtgtcaaaaccccacccagaaagacaagagactgtgaaatccaatgctaaagttgagaactctaaccaagagagaattcagctagaagaaagaatcaaagaagaaaaagtcaaggcacttaatttgaaacgttctgggaaacaagccgaagccttagatgctcttcgacgtgccaaattgtatgaaaagaagctaaattcattaacatctggttgatgatgaagtaaagactgcaacttcaaggtgggcaaaaagtcctctcgtgttcaaattgttagttacttttaggatagtttagtttgtgagttttcattgaaggaggactagaaggtgcccaggaggttgctccttccatttcatgcatgtttgctttattttgttcataaatattggagaatttatacgtgataattctcaagttacaattttcaaatgtggttctaaacatgaatcaatgttgtataatgtgtttatataaagtgttaaacatggccattcccatgagatattgccag

SEQ ID NO: 10120 - DNA, 1455 bp, Glycine max
  Clone ID: 700894722_FLI
gttatattgacctcagtttcaacaagttgcaaggagatctcccaattccacccaatggaattcactactttttagtctcaaataatgagctgaccgggaacattccttcagcaatgtgcaatgcaagctccctcaaaatactcaacttggctcataacaacttgacaggccccattccttcagcaatgtgcaatgcaagctccctctatatactcaacttggctcaaaacaacttgacaggccacattccacaatgtctcggaacatttccttctctttgggcattggatttgcaaaagaacaacctttacggaaacatacctgcgaacttttctaagggaaatgcattggagactataaagttgaatggcaaccaattggacggacaattacctcggtgtttggcccactgcacaaatctggaagtgttggacctggcagacaataacatagaggatacatttccccattggctagaaagcctccaggagttacaggtactcagtttgcgatcaaataagtttcatggtgtcatcacttgtttcggtgccaagcatccatttcccaggctcagaatttttgatttgtcaaataacaattttagtgggcccttgccagcatcatacatcaagaactttcaaggaatggttagtgtgaatgacaaccaaactggtttgaaatatatgggtaaccaatattcctataatgattcagtagtggttgtaatgaaaggtcaatacatgaagctcgagaggatattaactatttttacaaccattgatttatcaaataatatgtttgaaggagaacttctgaaagtccttggagaattgcattctctcaaagggcttaacctttcgcacaatgcaattactggtaccattccacgatcctttggtaatttaagaaatttggaatggttggacctctcgtggaaccagttgaaaggagagattcctctggctttgatcaatttgaattttctggctgtgttgaacctttcacaaaaccagtttgagggtatcatacctaaaggtggacagtttaatacatttggaaatgattcctatggtggaaatccaatgctatgtggattccctttgtcaaaatcctgctataaggatgaagattggccaccacattcaacatatcagcatgaagaatcaggatttggctggaaagctgtagccatgggatatgcatgtgggttggtatttggaatgcttttgggatataatgttttcatgactgggaaaccacaatggcttgggagacttgttgaaggtgtgcttaattaatgaagagtgaaaaggacaaatcataaggaaaggaaatagtttagtttaatatggttcttttgtgtgtgtctgtatgttttctgtaattttaacttctgtcctttgtgtaacaaatctcatctctcttgactcgagtgatgtatttcatgttgtttac

SEQ ID NO: 10121 - DNA, 1276 bp, Glycine max
  Clone ID: 700894771_FLI
cccatctggcctgcttccctccattgatctttcttacattgaagacagatatgcaggtcgccaggcttggtcttttatgaataatggtaacaaaagaagttcatcgcaagttcaattatcaagtgatacatcaaagatttgggttccctcaaatccaagaggtgcagaaagattacctcctggcattgttgaagccgagtcagacttttatttgcgtagattgtggggcaagcccagtgaggatctaacgtccaggccaaattaccttgtaaccttcactgttggctatgatcagaaaaataatattgatgcagctgtgaaaaagttctcagggaacttcactatcctgctatttcattatgatggccgaactactgaatgggatgagtttgaatggtcaaagaaggctattcatgtcagtgttcacaaacagaccaaatggtggtatgccaagcggtttctgcatcctgacattgtggcaccatatgactatatattcatatgggatgaagacctgggtgttgagcattttaatgcggaagagtacataaaactggtgaggaagcatgggttggagatttcacagcctggcttagagcctaataaagggttgacatggcaaatgacaaaaagaagaggtgatcaggaagttcacaaagtgacagaggaaaaaccaggatggtgttctgaccctcatttgcctccttgtgcagcgtttgttgagattatggctccagtgttctcaagagatgcatggcgctgtgtgtggcatatgattcagaatgacttggtccacgggtggggtcttgattttgctcttagaagatgtgttgagcctgcccatgagaagattggagttgttgattctcagtggattgttcaccaaggtcttccctcactagggaatcagggtgaatctcaaacagggaaatcacggtggcagggggtgagggagcggtgtagaaaggagtggaccatgttccagagtcggttggcaaatgccgaaaacgcgtattacaagtccatgggaactgatacatctaattccacagctcattagggtgactaaggccaaagttgacttgtacacagatatcattactacccttacgcgtagaattttcccttgaagaaaaatatatattcctatgtaacgttacgtacatgcaatgcaatcacaatagagtcctagctggggaccaaacatcatttcaatgtagaattttgcagtactgaacagtgagtaaatcaagtgaagagaattattattgctgct

SEQ ID NO: 10122 - DNA, 992 bp, Glycine max
  Clone ID: 700894779_FLI
cgtcatcttaggtgatccttcacccgttttgttttatcccatcagtagcactgagattcgctgtttggttgatgtgcccggccaaaaattaccttccctaggtggtggtgaaatggcctgttatttgaaaactgtggtggctcctcaggttcctccagagctgtatgattcttttatagcagctattgacaaaggaaacataagaaccatgccaaatagaagcatgcctgcctcaccttatcccacaccaggtgcacttctaatgggagacgccttcaatatgcgtcaccctttaactggaggaggaatgactgtggctttatctgacattgttgtgctaagggatttacttaaacctcttcatgatctgcatgatgcttctgctctttgcagataccttgaatcattctacaccctacgcaagccagtggcatctacaataaacacactagctggggcattgtacaaggtcttttgtgcatctcctgatccagctagaaaggaaatgcgccaagcatgtttcgattacttgagccttggaggtgttttctcagatggaccaatagctctactctctggtctaaatcctcgtccattgagtttggttctccatttcttcgcagtcgctatatacggtgttggccgcctgctcataccatttccttctccaaaacggatgtggattggagctagattgatttcaggtgcatcaggcatcattttccccattattaaggctgaaggagtgagacaaatgttcttcccagcaactgtgccagcatattacagaacccctcctgtccattgaacacacatgaaggaaatacatggaatatataaaattcccttttcccacattcttttcacctgttgtattccacttttgccaagaagaataagagagggaactcattccataattaggatactcattttgtgcaactgcaaccaatattattgtattaaaaaaacattttttaatttgggacccg

SEQ ID NO: 10123 - DNA, 2127 bp, Glycine max
  Clone ID: 700894830_FLI
gtcaagggaaagactttgatgttgaatgacagaattcaaaacccagatgcactccaacatgttctgaggaaagctgaggagtatctgggcacagtgcctcctgaaactccctactcagaatttgagcacaagttccaggagattggtttggagagagggtggggtgacaacgcagagcgtgttcttgagtcaattcaacttctcttggatcttcttgaggcccctgacccttgcacccttgagactttccttggaagaattcctatggtcttcaatgttgtcattctttctccccatggttactttgcccaagataatgtcttgggataccctgacactggtggccaggttgtttacatcttggatcaagttcgtgctttggagaacgagatgctccatcgcattaagcaacaaggattggacattgtacctcgtattctcattatcacccgtcttctccccgatgcaatcggaactacttgtggccaacgtcttgagaaggtgttcggaaccgagcactcccacattcttcgagttccctttagaactgagaagggaattgttcgtcagtggatctcaagattcgaagtctggccatacttggaaacttacactgaggatgttgctcatgagcttgccaaagagttgcaaggcaagccagatctgattgtcggaaactacagtgatggaaacattgttgcctctttgttggcacataaattaggagtcactcagtgtaccattgctcatgcacttgagaagaccaaataccccgaatccgacatttactggaaaaaattggaagagagataccacttctcttgccaattcacagctgatctatttgccatgaaccacacagatttcattatcaccagtaccttccaggagattgctggaagcaaggacactgttggacagtatgagtctcacacagcctttacccttcctggactctaccgtgttgtgcacggcattgatgtctttgatccaaaattcaacattgtctcccctggagctgatcaaaccatttacttcccccccaccgaaactagccgtaggttgacctccttccaccccgaaatcgaagaacttctttacagctctgtggagaatgaagaacacatatgcgtgctgaaggaccgcagcaagccgattatcttcaccatggcaaggttggaccgtgtgaagaacatcacaggactcgtggagtggtacggtaagaacgcgaagctgagggagttggtgaaccttgtggttgttgccggagacaggaggaaggagtcgaaggacttggaagagaaggccgagatgaagaagatgtacggcctgatcgagacctacaagttgaacgggcaattcagatggatttcatctcagatgaaccgtgtgaggaacggagagctgtaccgtgtgatctgcgacaccaagggagctttcgtgcagccggctatatacgaggcttttggtttgacagtggttgaggccatgacttgtgggttgccaacattcgccacatgcaatggtggtcctgctgagatcattgtgcatggcaagtctggcttccacattgacccttaccatggtgaccgtgctgctgatctccttgttgacttctttgagaagtgcaagcttgacccaacccactgggaaacaatctcaaaggctggtctccagcgtattgaagagaagtacacatggcaaatttactcacagaggcttctcactctcactggtgtctatggcttctggaagcatgtgtctaaccttgaccgccgtgagagccgccgctatctcgagatgttctatgctctcaagtaccgcaaattggccgagtctgtgccccttgctgttgagtaaactgaggatgaagagttggataaagaaatggaggaaccggctttttgtttctcatttggagtttgtcttacttgagttctataaataatatgtccctgatgattttaattttgtgattaagctttcgataagagacagagagagaaaaaaaaggaaaaaaaaaaaagccttttactttttttcttttgcatgatttgaatcttgattggaaaagcttcgaattggggtgttttacccatcaattcaattttaagccgtgccttcttc

SEQ ID NO: 10124 - DNA, 771 bp, Glycine max
  Clone ID: 700894831_FLI
attaggatgaattactaccctccatgtccccaaccagaacgagtcattggaatcaatccgcattctgattcgggtgcccttaccatccttctccaagtcaatgaagtggaagggcttcaaataagaaaagatggaaagtggattcctgttaaaccactctctaatgcttttgtcatcaacgttggagacatgttggagatactgaccaatgggatttaccgaagcattgaacatcggggaatagtcaattcagaaaaagagaggatttccattgccatgtttcaccggcctcaaatgagcagagttataggtccagcaccaagcctcgttactcctgaaagacctgcattgttcaaaaggattggagtagcagattacctcaatggattccttaaacgtgagctaaaaggaaaatcatacatggatgtcattaggatccaaaacgagattggtaaataatttatgttcataggactaagcctgaaattgaatgatagaacaagtacacagaacaataatgtcacagatggtagccaatgtgcaaccattgtagcaataaaagttaaatcactgttcatggtatcaagctgaacatatataccttggaagctaatgtgggttagtaaaaatatgtcatggaacatcaaatgcatgttcttgaactaattgtctgaattgagctataggcgtgtctcaaacattttagtatctgtattcattactatatataaactcttttagtaatgaagttcaagtaaacacttattcgat

SEQ ID NO: 10125 - DNA, 1332 bp, Glycine max
  Clone ID: 700894858_FLI
gacataatggaaccttactattatttaagaatgaaactacgctgatgcttccactagagaaaaaaagtcatgtaggtggggttgagtgaataatagttaataatttaaaattcacatcataatggaaccttagcatcgaaggacaaattatagaatgttgtgtgtgtataaattccaccaaagccaccccaccaaattcctcctcatcaaaccaagacatagcaaacgatccaaactcttttttcatttgcagcatcaaaatgagtggtagcaacgatggtagcggcagctggagctctaggtttttgaaggtggctagtgcagctgccgctacagccgccgttgccggcggtttatatgccattctttcatcctcaacctctgctagctctgagatggaagtgccgtttggcagcgcacggcgtgagagcaaagaacgtgacgatggtggctccgggtctcatcctcgcgagggtgccaccacggtcagtcgttggaagaaacctgagattggttgggtgaagctgaacgtggatggttcacgcgacccatacaaaagttcctccgctggttgtggtggtgttctgagggacgcatcagcaaagtggctccgtggctttgctaaaaaactgaaccctacttatgcagtgcaccagacagagttagaagccattctcacgggcttgaaggtggcttcagagatgaatgttaagaaactaattgtggagtcagacagtgactctgtggtgagcatggtggagaatggggttaagcccaatcaccctgactatggtgtcgtggaacttataaggacgaagcggcgtcgttttgactgggaagtgaggtttgtttctgtctccaacaaggcgaatcgtgtggctgataggctcgccaacgatgctcggaaattggcttgtgatgatgtttgtgaggagtatcttcatcccccggctaactgtaaccagttgctcttggaggatgagataggctgtgagagcttttagtccttttttttttttcttcttctttcaaaaataagaaaagaaaaattactatgacaaggtttttgaaggacaccatgggctacttaattaatttggcaatcatggaagattaagtgctttaatttgggtgggaattaagtatgaaattgaagccactgcttcttcaactagtttgatgcatgtatgatgtatctattattaggttgtcgatcttctgggaaatatgtgtatttatatctagtactatatatatggtatcttaatcaagtttgtattgattttcttgtttgttgagataacatatatgtaatatgctctcctttcagcc

SEQ ID NO: 10126 - DNA, 589 bp, Glycine max
  Clone ID: 700894874_FLI
gtggagggcttgaaaaatgcactagccgctggtgctgacaaggatgaagaagattcagagggaagaactgctttgcattttgcctgtggatatggtgaggtgaaatgtgctcaagttctccttgaggctggagcaaaagtggatgctttggataagaataagaacactgctctccattatgcagctggttatggcagaaaggaatgtgtggcccttctccttgaaaatggtgctgcagttactctccagaatatggatggtaaaactccaatagatgttgcgaagctaaacaatcaaaatgaagtcctgaagctacttgagaaagatgcttttctgtaattgcaatgcatgatgccatgctgtcaccaacaagcaaaggggaaactgaggggaagaaggcacgactttgttatttatcttttggtttcttccaaccgttgtgtgttaaactaaattgattaacgttgttggatgtgagtcaccatagaatttgttatctatgttcttgtaatgcatttattgtcacactgcatgattttgaagattagtgccgtcatgattttattcatgcttcaattttacttgtact

SEQ ID NO: 10127 - DNA, 1360 bp, Glycine max
  Clone ID: 700894885_FLI
tgactatggaaatccgggaaggccgtggtgtaggacccctgaaagatcacatctatctccacttgaatcacttacccccagatgttcttaaggagaggctacctggtatctctgaaacagctgctatttttgctggtgtggatgttactaaggaacctattcctgttttgccaacagtgcattataacatgggtggtattcccacaaatcatcatggagaggtgattactattaaaggtgatgatcccgatgcagtagttcctggattaatggctgccggggaaacagcctgtgcttcagtccatggtgcaaataggcttggtgcaaattcacttcttgacattgttgtttttggtagagcttgtgcaaatagagtttcagaaatccaaaggccaggagagaaacaaaagcctttagagaaggatgctggtatgaaaacaattgcttggctggacaaattgagaaattcaaacgggtcgttgccaacttcaaaaattcggttaaatatgcaacgaataatgcaaaacaatgctgctgtgttccgtacacaagaaacgttagaagaaggttgtcaattaattgataaagcatgggagagctttcatgatgtcaagttgaaggatcgaagtttgatatggaactctgacttgattgagaccattgagttggaaaatcttctgataaatgcctgcatcaccatgcactctgctgaagcaagaaaagagagtagaggtgctcatgcccgtgaggacttcacaaaaagagatgatgagaaatggatgaaacatactttgggatattgggataatgagaaggtgcggttagattacaggccggtgcacatgaatacgttggatgatgaggtggaatcattccctcctaaagctcgtgtttattaggatacttactgaattattactatggatgatttatacggattggttcacgaagtatgaagtatggaatggcaagtgcaggtgaaaaaggattcaataaagtgtcgtagatgcatgactttgatgataatcgttttattcatcatcaatgctgaacatgatctattccaggcaatcctcaatgatgtacgatgtctgtatttaaagctgaaaataatagccataaaatcccaataagtgttcactttgttgatcaactttgaccagtgtacaatgtgctaagggtttattttctgctccctagtagttttagtctgttttatattcatttttatttttctaaccaaagtagcaaatggaagccagctgctaaagtggcttatgggaagtaaattgtggaaaataattgaagcattattttaaattgagtttgttaatcaattcgcacgtagttatttaagttt

SEQ ID NO: 10128 - DNA, 740 bp, Glycine max
  Clone ID: 700894905_FLI
ctgtgctattggttacgggcccaggttgattcaggtcattaccggatcgccgcccaattgtcctcggaggaggcccttgccggagaatctcaattacccgtcgtttgtggcggtcttaccggtgtcgtcgtcgttgttgagcaagacgttcttcaggacggtgacgaatgtgggcccgccgagtgcggtgtatcgggtgagggtggagacgcaggcggagggggtggcggtgacggtgaggccgtcgcagcttgtattttcggaagcagttaagaagcggagttttgtggtgactgtgacggcggatggacggaatctggagctgggtcaggctggggcagtgttcgggtccctttcgtggacggatgggaagcacgtggttcggagccccatggtggttactcaagctcaaccgctttaatttttgcgaaacttgcgctcaggcacttttaatcgatgtggccattcgtcaaaggtcaaacaaagatgccttatagtttcttcttttcttttaattttctagtgtttttacttttacatgatgatgtgtctctcttgaatgcctctctcatcaagaatgtggcaacgtgctttagttatagcatgaaatagttgcatttttccttttttgttttgggtttcccttaaatttcattgtgtatgttataggctagaagattacttatactccatgcaacgaacttaatttatatatgtaatctcagtcaagattattgcgt

SEQ ID NO: 10129 - DNA, 485 bp, Glycine max
  Clone ID: 700894927_FLI
gtaagaaagctgcagtggaggcggacctgaaaaagattgaagaagaactggagaagaaaaaggcagaagctgcagagaaaataaaaaacaaaattgctacaatccacaaggaagctgaagaaagaagagcaataattgaggcaaagaaaggggaagatcttcttaaggcagaggagcaagctgcaaagtatagagcaactggaacagctccaaagaaactccttggttgtttctaatgctttaaatcttaagcattgtgggaaacaaaaaaaaatggttaatttttattgagtatctttggttattaactctcatcaatacaagtgtgtttttagtttatatgttggagatttagttcatgttcatttattatgcgtgaaaaccgacatgttggcgtgtatataccaactactttgtggataaagaaattaaattattcaatctgtgtattagttacttgtcgcttgaagtcattgacctacttc

SEQ ID NO: 10130 - DNA, 1467 bp, Glycine max
  Clone ID: 700894941_FLI
tggatttggaaacttctcctattattatgttagaaaagattttagccttccacgttttgctcagatgatgtggcggcttaatttttttgtggccttctgttgtattgtgcttaacaatgactatatgctctactatatatgcccaatgcacacgcttttcactttgatggtgtatggagcattgggtatatataacaagtataatgaaattccctctgtaatggctgcaaagattttggcatgctttcttgtggtgatcttggtttgggaaatccctggattctttgacatattttggagcccatttgctttatttttgggttatactgatcctgcaaagcctgatctccctcgaatgcatgagtggcatttcagatctgggcttgatcgctacatctggataattggaatgatttatgcctattttcatccaaatgttgagaaatggatggaaaaattggaagagagtgataccaagaggagagttaccatcaaaactggcatcgtttctgttgcattatttgttgggtacttgtggtatgaatacatatacaagctggacaaggtctcatacaacaagctccacccctacacctcttggattccaattactgtatacatttgcttgagaaatttcagtcagcggcttcggaatttctctttaaccctctttgcgtggcttggcaagattactttggagacatacatttcccagtttcatatttggttaaggtctaacatgccaaacggacagcccaagtggcttctttctcttatcccggagtatcctatgctcaacttcatgctaacaactgctatatacgtctttgtatctcatcgactttttgaattaacaaatacacttaagacagtgttcatacctacaaaagacaatcggaggctgctgcataattttattactggtgttaccctttgcatttctctgtattgcattgcacttattctgcttctgattcctcattcaacggtttgaaattcaagataccaaagagagattacagagacagtaccctttgaatttgctgtgctgaaaggagactaggagatttggattaaaataagggtacatggaaatgtgggatctcttttggagcagtgtttctatagttgtgggaaatagtatcctcgatggcggcatcaaatataaacgttgagtgttggtttgcatcggaggttggcagatgaaaagggggattaaccccgaaggaatttgaaccaattttctataaattcattttgctcacacttaaaaggaggaaaaggtaggatcgtcatacaaatccgtcgtcttggcttcgaagaaattcaagattcatttcattacctctgttcttgttcaattttcgttgtattttttgactttttcttctgtgaaggataaggaaatatatgtatattcatttttacaatcttaccagaaacgccttgtcatacccttgtaacact

SEQ ID NO: 10131 - DNA, 792 bp, Glycine max
  Clone ID: 700894978_FLI
gatcaaagattttgcaagtggggaaataaagcaggcttcgagcttgtttgattgtgatgtacaacttgatgagtatctaattaagagctattacaagacagcgtcgttgattgctgccagcacaaaaggagctgcgatctttagtggttctgacagcagtgtcactgagaaaatgtatgaatatggaaagaatcttggtctatcctttcaagttgtggatgacatattggatttcacgcaatcagcggagcaactgggaaagcctgctggcagtgaccttgccaagggcaacctgactgcaccagtgatttttgcactggagaaagaaccaaaattgagggatatcattgagtctgaattcagtgaggttggttcgcttgacgaggccatcaatttggtcaagagttgtgggggcattgaaagagcacaagagttagcaaaagagaaagctgatcttgcaattcaaagtctccaatgcctacctcagagtgtgtttcgtttagcccttgaggatatggtggcatataaccttcaacggattgcataagcttgtgcatgccgaggacactttgttaaaaaaaaaaaacacaaacctttttttggtcctaatatagggatgagagagccttgaactttttgtcatttcaagaatatccagcaaatctacacttgtgctacttttggggtacttatatagtcattgaagggcaaagcaagtgcgcattctcatcatttaatatatttgcagcttcctgcaaagtccaataacataatatattccattattgtatc

SEQ ID NO: 10132 - DNA, 893 bp, Glycine max
  Clone ID: 700895010_FLI
gcttttttgcagcataaccagcgaggattcgagcttgttggtgtacgagtatttgcccaatgggagcttgtgggaccggcttcacacgagtaggaagatggagcttgattgggaaaccaggtatgaaatcgcggttggggcagcaaaagggttggagtatttgcatcatgggtgtgagaagcctgtgattcatagagatgttaagtccagtaatattttgttggatgagtttttgaaacctaggattgcagattttggacttgctaaggttattcaggccaacgttgtcaaggattcctccactcatgtcattgccggaacccacggatacattgctcctgaatatggctacacgtacaaagtgaatgagaagagtgatgtgtacagctttggagtggtgttgatggaactagtaactgggaaaaggccaactgaaccagaatttggggaaaataaggacatagtgagctgggttcataacaaggcaaggagcaaagagggacttaggagtgcggtggattcgagaattccggagatgtatacagaggaagcttgcaaggtgttgagaacagcagtgctgtgcacggggactcttccggctttgagaccaaccatgagagctgtggttcaaaagcttgaggatgccgagccttgtaaattggttgggattgttattaccaaagatgacagtgaaaagaaaataggagtcaacgacaagtaatgtattgtattccatcctccatagttggttacaaccggactgaagattatggatcatcatgaagttgaaggggaaccaaccacctccacgagttatctataattgatgtaaattttcccggaaagagggaacactgtaaaatattagtcttggcttctttaatgtctatttt

SEQ ID NO: 10133 - DNA, 400 bp, Glycine max
  Clone ID: 700895020_FLI
tgtgaaaagacttggttgaaccggccagaccttgtgtctgaaatctggagtgttcttgaaccattcaaagcaacttgcattgacacgccaccacatttgatttctaagaagcttcgtcggattccttcccattttgtctgccccattgtccaggaagtaatggaagatccatacatagctgcagatggctttacgtacgaagaagaggcaataagaggatggttgaatagtggccacgacacttcccccatgacaaacctcaaactagaccacactgatttggtacctaactatgctctacataatgcaattctggagtggcagcaacagtgattcagtgaaccttcattggccattacacttgcacatattacactggtgtaaatcatacttatcctgt

SEQ ID NO: 10134 - DNA, 1033 bp, Glycine max
  Clone ID: 700895047_FLI
gtttggaattactgtagttccatctgttctgttagcacttggaatgactatctctccagaaagtcctcggtggctctttcagcaaggaaaaatatctgaagctgaaaaagctgttaaaacactatatggaaaagaaagagtggctttggttatgcatgacttgacagcagcaagtgaaggttcttctgaacctgaagcaggatggtttgatctgtttagtagtcgatataggaaagtggtcagtgtaggggcaacacttttcttgctccagcagttggctggaataaatgctgtggtctattattcaacttctgttttccgcagtgctggaattacttctgatgttgcagcaagtgcactggttggtgcatcaaatgtttttggcacaattgttgcgtggaggttaattcgagatcgattgccgactaagtctaatctacggagaaggcaaatagatataagtgacagcctatgtcctttctgcagtattaaggacgaaactgcatctcatctcttttttgaatgcagcaaaatacaacatctgtggtgggaatcccaatcatggatagggacttcgggggcataccctataaatcctaggcaccattttttgcagcacaacattgggatgaaaggtgggaagatatacaagaggtggaagtgctggtgggttgctctaaattggtccatctggcagcagaggaataaggttatttttatgaacgccccattcaatggtagtaagctgttggaagatgcactatttgtggcatggacatggttcagagcaatggaggaaaactttacaatacatttcaacttttggtcaagcaatcttccagctggttttcagtaaactaggatgacaccagctgtggttctgtaatcgttgtagctttatagtaggctagtaatctcctatcagtctgtactcagcctgatatgaggatttactagctttacttacatactcttgtatctatagtacctctggtactttttcatatatcaatatatattatttttgctgacc

SEQ ID NO: 10135 - DNA, 2345 bp, Glycine max
  Clone ID: 700895059_FLI
caggagtcatgctcagaaattctttacaaagttggagaaagaggcctttgtaaaaggtgttccaataggacaagctcttgatatagacatcccccctccacggccaaaaagaaaaccaagcaatccttatccccggaagaccaatgttggtgccccaacattacatagcgaagcaaagcatggaaagtctctcatttcaattgcatcttcacatggtaaacaagcactggacttggagaaagaaccacttccagagcataatgtcgacctaaggccaacgactgtaaaagaaaataaggacggaagctgcttaaacgtatttaccattatccaagaggcaccctgttcatctgtatcttccgccaacaagaattcaacatcaatatcagtgccactgagaaattcatgtgccctaagggagtttataccttcggtaaaagaggtaataactcgagatgaaaccaacgaatcttttgttactgatgagcttgaaaatcagaagttggagatagatgatggcaagcacacacaaaagactaatgacacttgtgaagtctctaagttggagaattctggtgcttcagaattggttcaaactgagaaaacagatggtcgtaattgtgcattaacaatagatggggtgccaggcaatcagaattacccaagacatgtccctgtgcacgttgttgatgggaaccttggaactagtactcaaaatctatccccagatatggtgtttcaagactccatatttcagccgaagggaggggttaataggcaacctaaccttgtcaccaattctgctacatcacacataagtgaatgtcaaaacaacgccgcacggtcctctattcatcaatcatttcctcctagtcctcctttcgcacaggatgattatcattcatttcttcacatgtcctccacattttcaagtcttattgtctctaccttgctgcaaaaccctgcagcccatgctgcagcgagttttgctgctacattttggccatatgcaaatgcagaaacttctgcagattctcccgtgtgcactccagattttccatcaagacaaattggctcgcctccaagtgtgacagctattgcagctgctacagtagctgctgcaactgcatggtgggctgcccatggactgcttcctttatgtggtccactccatacagcttttgcctgtcctcctgcatcagcaactacagttccatcaatgattattgatgaatcaccacaaaaaacagaacgaggagagattaaaccacaaaatcctcctctgcaagatcagataccggatccagaacactcggaagctcaacattcagctcctaagtcaccagctgtttcttcatccaaatctgaggataggggagatgccaatttagatacttcaccaaaggctactaatcatgagatgaaccaagcaatttctgagaaccccgattccaacaaaatgaagggcagaaaacctgtagaccgttcctcatgtggttccaacacaacctctagcagtgaagagactgagttactagagaaggatgagaaagaaaaggaagagcccaaaacacctgatgcgaacgttttagataccgagcttagtaatcgtcgaagtagaagcattagcaaccttactgattcttggaaggaggtctctgaagaggggcggcttgcctttcaggctctattctccagagaggtgttgccacaaagcttttcacctactcatcatttgataaataaagataatcagatagatagcatcaaggataacgagctaaacacagactacaaagatgaagaccttgaaagcaagaaatgcagttctatttgtgatggggtgcagaaaaatctgctatttgtcaaagataacaatgaggaggagggactgctaaccataggtcttggaccaggaaagctaaagactcgtcgaacagggtttaaaccttacaaaagatgttcggtagaggccaatgaaaacaggatcggaacagcctgcatccaaggtgaagaaaaaggtcccaagagattacgcttgaatggggaggcttcaacttgatgcctgatattcccatgcaaccacacaaagaaaatctctagttttgcatatatttctaagtttccttgttcattgtctgtattgcttattttctaattctgcagctcacgaaacttgtcgtgtaggtctgtgtaccatattaaattactacatacacactttttactttcttggcctgatgttactgcagttaaaaactccgctaaaatagacttagacaagaaacattaagtaccgtttgagcatttgatcatttaagtaatttatgatgcttcattcagtc

SEQ ID NO: 10136 - DNA, 835 bp, Glycine max
  Clone ID: 700895068_FLI
gagatgcaccatgaggctctcacagaggctcttccaggtgacaatgttggctttaatgtgaagaatgttgcagtcaaggatctcaagcgtggttttgttgcatccaactccaaggatgaccctgccaaggaagctgccaacttcacatctcaagtcattatcatgaaccaccctggccagattggaaatggatacgcaccggtgcttgattgccacacttctcacattgctgtcaagttttctgaaatcttgaccaagattgacaggcgatctggtaaggagcttgagaaggagcccaaatttttgaagaatggtgatgcaggtatggttaagatgattccaaccaagcccatggtggttgaaactttctctgagtatcctccccttggtcgttttgctgtgagggacatgcgtcaaactgtggctgtcggagtcatcaagagtgttgagaagaaagaccccaccggagccaaggtcaccaaggccgctgccaagaagaagtgattgcatttgggcaattttgctagcacatgtgatcatcatcgtggttactcctttatagtagttttatccttgcagagtcttaggtgttttgtttaagttatatttttaagtttctgccgatttcatgtagccgtaactttcaaaactaggttcttgatcggcggtggtcaattttcattgctgtttgtttttgatgagtactgttttttgttttgatggtaagaagagtctgagatatttcgaatttcacaagcagctatagggttttagtccatttcctttgctgctgagggatgttttaagttgcatttaatttataacgaagttttat

SEQ ID NO: 10137 - DNA, 1337 bp, Glycine max
  Clone ID: 700895076_FLI
ctcttttggtctttcctctttcgttctctctctttcactcgcgtcttcgagtttcacagcgaagtcgtaggagggtttcaaaagatggagaacatgcagagcttctggcaattgggcgatgaactccgtggacactcaaaagcatcggaggatcacaaatggttaatggttgcttcgaaattggcggaacagacaagattgaagggggagcgtgtgaacaaccttgatctttcaaagggccccattgaaacaaggtcaagggataaatttgggttccaggaagagaacaaatttgattctcttaacttaagcatgttgaacctggactctaaatttactgagaatgtgagcaaaagctcgcttcgaaatggtgtttatggtatgaatgcagtgtatcagaaaaacaatgcaaacttggtgagtaatgtgatcagtaacaagtacaatggtaatattcttcataacaaagagatcaacaacaacaccaacaatgaaagcaacaacacaaatgcaaccgacaaaaggtttaagaccttgcctgctgcggagacactcccgcgcaatgaggtgtttggaggatacatctttgtctgtaacaatgacacaatgcaggaagacttgaaacgtcagctatttggtttgcctccaaggtatcgagattctgttagggctataacacctgggttaccattatttctttataactatactactcatcagctgcatggtatttttgaggcagcaagttttggtggctctaacatagatccaactgcctgggaggataaaaaatgcaaaggcgaatcaaggtttccagctcaggtaagaatccgtgtcaggaagctctgcaaggcattggaagaagattctttcaggccagtattgcatcattatgatgggccaaagtttcgtcttgagctgtcagttccagagactctggatctgttggacctatgtgaacaagctggttcagcagcataagcaagaatcgcacaaggaatgaatgtgcaaaataggtagtaggttttggtgtgccagctgtgtggttttggcagattttccgtgaagcgtaagcttggaaagtggatcatcatcttcttggggaagtaaagggagcgtgttgagagtgagagaccctttgttggtgaataaaaatggttgtggtatctatccccttaaaggtgctttgtagcatttgcatgaacatttaatacctttgtatgattaagtaaaagtacagacttggtatgcaatcaaagagactactgtttgtactgctaaaacatgaatctgttgaaccaagaaaaaaattgaagtcaaaagcttcatgtattact

SEQ ID NO: 10138 - DNA, 1026 bp, Glycine max
  Clone ID: 700895196_FLI
tttacttcatcacaagcccaatatcaaacggcaaaatttgaagagaaacccaactgccccaatactctattaaacaagctcaagagagaagaatcaccagacgcagcgaagaaaaattctcctgagcctgcattcaagaggcaaagaattgagactccatctccattaccaacttttaaggttaggaaagaaaagctgggggaccgcatcactgctcttcagcaattggtttcacctttcggaaagacggatacagcatccgttcttcacgaagccatcgagtacatcaagttcctccatgaccaagtcagtgttttgagcactccatatatgaaaaacaacggagctcccattcaacaccagcaggattgtgataatctgaaggactcagaaggggcaaaacaagatttgagaagccgagggctgtgtttggtgccgatttcaagcacattcccagtggctaatgagaccagtgttgatttctggacgtctacatttggaggcgcactcattggcaggtagagacaagtggagaactcgtgacaataataactatatatttataaataaactaaaaggaagaagaagaagaagaaaacacgattatgctaaagagaaaattaaagctgaagagaacaaaagagcaaaaaagaaaaaggaagctactcttcaaagaggacacgtaaagcagaatgatgtacactagtaaatgattagtgactactggaagagatcgaataatagattaattagctataggtgctttaagaagttttagtgtttttattattaacatcgatgaggggcaggaacaagtgctaaattcagaggcatttgacatattagattagagtttttgttgctgctgtggttagagagtcagtattatatgcctgaatttagcagatggggctagctagctaacacgccttttgttcctgctataatcgatgtattattgtagtatatattttgaatcattaaaggggttttacaccaactttaattttttttattatttatatg

SEQ ID NO: 10139 - DNA, 667 bp, Glycine max
  Clone ID: 700895271_FLI
aaatgttataattcatcgagacctaaagccaaggaatgttcttttagtcaattctagtgccgaccatttaaaagttggagattttggattgagtaagcttatcacggtccagagttctcatgatgtatacaaaatgactggtgaaactgggagctaccgctacatggctcctgaagttttcaaacatcggagatatgataagaaggttgatgtgtactcctttgcaatgattttgtacgagatgcttgaaggtgaaccaccttttgcaagtcgtgaaccttatgaaggagcaaaatacgctgctgagggacacaggcctcattttcgggcaaagggttatactcctgaattgcaagagttaacggagcagtgttgggctcatgacatgagtcagagaccatccttcatagagatcctaaaacggcttgaaaagatcaaggagaatttacctacagagaatcactggcacttgtttacctcataaatgtctaatagcattaatttgttcagaaattcagatgatttatttaacattaccattctctggtttggtgccggatttatggataggttgagcatactggaaaacctgcaaagtcaatacttgttttcaactgtttggattaatgagcagaaaaaggtgatgttgattgccctgcctttggtt

SEQ ID NO: 10140 - DNA, 1211 bp, Glycine max
  Clone ID: 700895313_FLI
gtgaaattggagagaaaaaaaaaaatacactcaaacatggagggctatgagatcctcaaagatattggttctggaaattttgctgtggccaagcttgttagagacaactgcaccaatgagctttttgctgtcaagtttattgagagaggccagaagattgacgagcatgtccagagggaaatcatgaaccacagatcattgaaacaccccaatattattagattcaaagaggttctgttgacaccaactcatttagccatagtaatggagtatgcttctggaggagaactctttgagaggatatgcaatgctggtagattcagtgaggatgaggcaagatttttctttcagcaattggtatcaggagtcagttactgtcattcaatgcaaatttgtcatagagatctgaagcttgaaaacacacttttagatggaagcactgcaccacgagtcaaaatttgtgactttggttactcaaagtcatcagtattgcattcacaacctaagtctacggtaggaactccagcttacattgcacctgaggttcttacaaggaaagaatatgatggaaaggttgcagatgtttggtcttgtggagtcaccttatatgtgatgttagttggggcttatccttttgaagaccctgaagatccaagaaacttcaaaaaaaccattggtaagatacttagtgtccagtactcggtccccgattatgtacgagtttccatggaatgtagacatcttctatcacaaatatttgtggcaagtcctgaaaagagaataaaaataccagaaatcaaaaaccatccatggtttttaaggaacttgcccatagaacagatggaaggtggaagctggcaaatgaatgatgtaaataatccatcacaaagtgttgaggaagtcctgtctattatacaagaggcaagaaaatctcttaatgttcccaaggttggaggccttcttattgggggcagcatggacctagatgacttggatgctgatgaagatcttgaagatctacaaacaagtggtgaatttgtgtgtcctatttaagtgtgtacatgaacaagctgagttagctgtgaaaatgtaaatagatttttctgtaggggctaaaattccttgatggttaacttaattttcaattaagatcagtagccccatttgtatggcttgttatttattagttttgacatttgaaggttttgttt

SEQ ID NO: 10141 - DNA, 1005 bp, Glycine max
  Clone ID: 700895340_FLI
atgccgacaactgcaaggtcctcgtcaacattgagcagcagagccctgatattgctcagggtgtacacggccaccttaccaaaaaacctgaagaaattggtgctggtgaccagggtcacatgtttggctatgccactgatgaaacccctgaattgatgccattgagccatgttcttgcaacaaaactcggtgctcgtctcaccgaggttcgcaagaacggtacctgcccttggctgaggcctgatgggaagacccaagtgaccgttgagtattacaatgacaatggtgccagggttcctattcgtgtacacaccgtgctaatctccacccaacacgacgagactgtcaccaatgacgaaattgctgctgacctcaaagagcatgtgatcaagcctgtgatcccagagaagtaccttgatgagaagaccattttccacttgaacccttcaggccgttttgtcattggtggccctcatggcgatgctggtctcaccggccgcaagatcattatcgatacttatggaggatggggtgctcatggtggtggtgctttctccgggaaggaccctaccaaggttgataggagtggtgcttacattgtgagacaggctgctaagagcattgtggcaagtggacttgccagaaggtgcattgtgcaagtgtcttatgccattggtgtgcctgagcctttgtctgtgtttgttgacacctatggcactgggaagatccatgataaggagattctcaacattgtgaaggaaaactttgatttcaggcctggtatgatctccatcaaccttgatctcaagaggggtggaaataacaggtttttgaagactgctgcctatggacactttggaagagaagaccctgacttcacatgggaagtggtcaaacccctcaagtgggagaaggcctaagtaattcattccactgctctatgctggaagttttttgagcgttgcccttataatatgtctaatatccataactttccacgtctct

SEQ ID NO: 10142 - DNA, 864 bp, Glycine max
  Clone ID: 700895371_FLI
gtgatgaaattgcttctcaatataatgctggtggatatatacctcagcaagatggagctggagatgctgattctcaaatttttgaaattgaagtgtatggagggggcatctccattgatgcaggtcactctacttctaatggaaaaatgccagcacattcagacaggccagcttctcagattcctcaatttgatggaccaattccttacgatgatgatgtggtttctactccaaatatgtacaattatggagtgttcaatgaagactacaacattgcaaatacaccagcttcttctgatgtaccagcaagtacccctgctcctgttgctcaaaatgaggttgatgaagaagatgatgatgatgatgagcccctaaatgaaaatgatgatgatgatgatttggatgatttggatcagggagaggatcaaaatacacaccatcttgttttggcccagtttgacaaggtgacgcgtaccaagagtagatggaagtgcaccctaaaggatggtatcatgcatataaataataaggacattctcttcaataaggcaactggagaatttgaattctgattttgtcggggattggtcttgccatttttgtggcagtgctttggtgaattacaggtgccattgagtattttgtaatctttctttgattataattattaaattaaagctggaggaggaagagaaaagtccgtaatactttcgtcactgttatattgatgtgggcctgttgtacataaaggatgagcaaattttggcctttttacatggataggtactctgaggcatttcctgaagtttgccatttgtcaagttggatatgtatgtctattagctctgcatacttggacagttt

SEQ ID NO: 10143 - DNA, 799 bp, Glycine max
  Clone ID: 700895420_FLI
cagagaaagcttcgcaggtgctggtcacaggacttgcataagcgcttcttgcatgcccttcagcagcttgggggtgcagattgtgagtatctcaatatatactgccacaccaaagcaaatcagagagctgatgaatgttgatggcctcacaaatgatgaagtcaaaagccatttgcagaaataccgtttgcacactagaaggccaattcccatggttcacaacagttccgatccacaagcagcaccttttgtccttgtagggaacatttttgtccaatcaccagaatatgcagctgtagctacctcaacagcatcaagagaagtggccacagttgcagcacctgctagaatttatgcaccagtggccacacatcctacacctgtttcacacccaccagatgattcaattaagaagccacagtttaagaaagtaaagctgtttgagctttcaaattcagatgatagggctaatcacagtgaaggagctgttcattcaaattcccctacctcatcctcctccacacatacctctacttcccctggctactgagttttaagatgttgcacaagttttgtgaccaaaattgctgtagaaagtcctctgatatttttcttctgacttttttttttgtactaaaatgttctttactcctgttatctgggatttaaatcatagaggttacacagaaagtgacagttttgatgttaaataaagtcccaccctcgatgctagctggttaccatgttatctccttggcacagaaggtgaactgaaatttcaaaatttaaatttggaagc

SEQ ID NO: 10144 - DNA, 1047 bp, Glycine max
  Clone ID: 700895496_FLI
gtttggtagaaaagcagcagaggggcagtttggggctccgacgggaaactaggaatttcttctttataaatttcgccgacaattaaacgctctttctcctttcttttccttttcaatgctcagagaagagagaaaagaaaaagaaaaatcccagtgagagagagaaaagaaaagaacgaaaaaccaagaagcttcgaaacgatcgtgtgagatgaacaagtgcgaactgtgcaaagttccggcgaggatcttctgcgagtcggaccaggcgagcttatgctgggactgcgacgctaaggttcacagcgccaacttcttggtcgcgagacacgcgcgaaccttactctgccgcacgtgccgctctcccacgccgtggaaggcctccggcgcctcactcgccagcgccgtctccgtctgcgaccgctgcgccgcctccgaagaaccggaagagagtgaagccggcaatgacgacgaaccagacacggaggacgacgacaacgacgacgaggacggcgacaatcaggtcgtgccgtggtcctcctccccgccgccgcctccgccgtcgagctcctccggcagcgaatggtcggagtgcaaaaacgacgacgcttctatttccgcctcggaacaggaaacgacaacatgctcgttgaaacgacagcgcgaggacgatgatgatgcttcttccgatcgtgatcccagggtgttgagaagggttgggcgtctcaacggaggttgcgtgtgacggagaatcgtcgttgaaaggaaggagggagtggtctggcacacgacgtcgtttcctgattggggaaagtaagattttcacagccgtacgatcgaccaagatattttttaagctctttcatcattaacttctaatctaaccgcttagaagttacaatggtttttgacatataggtttagtgttgtgtattaactattaatgtggaattttctgttttcctttatcggttttttaagataaacattgcgatgtcatcttgatgtaacctttttttttatatataaaagaatctctattttttt

SEQ ID NO: 10145 - DNA, 705 bp, Glycine max
  Clone ID: 700895518_FLI
accatttcatactttccgacacctaaaacttgagcatgctgagtaagtacctagctccaatttatactcatctcaaatgggtattagattttgttctctactaccctttttacatgctttatgattctcatccacccataaatcttggaactgaattgagtacatttcattatgaattttcctctggctcagaggaacatgtggattgtgctgtgtgtctaagcaaatttggagaaggagatgaggtgattagagttatgagatgtgagcatgtcttccacaaaggttgtttggatagatgggttggtttcgagaatgccacgtgtcctctttgcagaggatcactgactccaaaaaggcctatcactaactctggagctgaggttgtgctatttcagttttgttctgtccaaaagtgtaatgatgagacatggtggctacgctgagtacattaatgggggcttcaaggcttttgcatcctacaccagcacagtgtgtagattgttagtttttttttttttttaagatatggtttagaaattcgagttctagtcatgtgtataaaaaaaatattttgttgagataaaattcaatacaataactctacgtctgaaatcaaattagtctcagactatcgttagaaggatagtgggaaaaaacttttggatccaatgaaataaaccaatcgcagagtttagtttatct

SEQ ID NO: 10146 - DNA, 1348 bp, Glycine max
  Clone ID: 700895587_FLI
cagaattctctaaaagagatctttttctgctctttgaagaaagaagggtctttgcttgattttggagatgtctctgctctcagatctcatcaaccttaacctctccgataccaccgagaaggtgatcgcagagtacatatggatcggtggatcaggaatggacctgaggagcaaagcaaggactctcccaggaccagttagcgacccttcagagcttcccaagtggaactatgatggttccagcacaggtcaagctcctggtgaagacagtgaagtgattttatacccacaagccattttcagggatccattcagaaggggtaacaatatcttggttatctgtgatgcctacactcctgctggagaacctattcccactaacaagaggcacgctgctgccaaggttttcagccatcctgatgttgttgctgaagtgccatggtacggtattgaacaagaatacaccttgttgcagaaagatatccaatggcctcttgggtggcctgttggtggtttccctggacctcagggtccatactactgtggtgttggcgctgacaaggcttttggccgtgacattgttgacgcacactacaaagcctgtatttatgctggcatcaacatcagtggaattaatggagaagtgatgcccggtcagtgggaattccaagttggaccttcagttggaatctcagctggtgatgagatttgggcagctcgttacatcttggagaggatcactgagattgctggtgtggtggtttcctttgaccccaagccaattaagggtgattggaatggtgctggtgctcacacaaactacagcaccaagtccatgagagaagatggtggctatgaagtgatcaaagcagcaattgacaagttggggaagaagcacaaggagcacattgctgcttatggagaaggcaacgaacgtcgtttgacaggacgccacgaaaccgctgacatcaacaccttcttatggggagttgcaaaccgtggagcttctgttagggttgggagagacacagagaaagcagggaagggatattttgaggacagaaggccagcttccaacatggacccatacgtggttacttccatgattgcagacacaaccattctgtggaagccatgagcaaaacctgcatgttttctccctttggatggaaaggaacagttatgcttttcttagtaggatttggtctctctctctttttaccttttgattggtactatggttggtgccttgttggttggtgcaactaactggcaagggttgttcattgttttcttctattcctttccctcgttttccgattgttacaatgacaataatttaatggtt

SEQ ID NO: 10147 - DNA, 1426 bp, Glycine max
  Clone ID: 700895650_FLI
ggctgctaaaagtcctttcttctacaaggtagatgtctattttttattggttagatttgaaaatttctgctaaaaatgtgtttgcttagttgtgtttattttgcagcttttttcaaatggaatgagggagtcggagcagaggcatgttgccctaagaattaatgcttctgaggaagctgctcttatggagcttctgaatttcatgtatagtaataccttgagcattacttcaccccctgctttattggatgtgttgatggctgctgacaaatttgaagttgcttcctgtatgagatactgtagccgattattgcggaatatacctatgacacctgagtctgcattgctttaccttgagcttccttctactgtcttaatggctgatgcagttcaaccattgactgttgcagcaaagcagtatcttgccagtcgatacaaagatataacaaagttccaggaagaggttatgggcttgcctctagctggaatagaagcaatattgtctagtgacgaacttcaggttgcatcagaggatgcggtatatgactttgtgttgaagtgggttcgaacacagtacccgaaactagaagagagaagagaagtcctgggtacacgacttgcccgtttaattcgcttcccttacatgacctgtcgaaaacttaagaaggtcttaacctgcaatgactttgaccatgatgttgcatccaagcttgtactcgaagccctctttttcaaggctgaggctccacaccgccagcggatactagctgctgagtctgcttccttcaatcgactttttgtggagcgggcatacaagtatcgccctgttaaggtggtggaatttgaacttccccggcagcagtgtgtggtttacttggatctgaagcgggaggaatgtgccaatttgttcccatctggccgagtatattcgcaggcattccatttaggcggacaagggtttttcttatcagcacattgcaacatggaccaacagagctctttccattgctttggcctgtttttaggaatgcaggaaaagggctctgttagctttgccgttgactatgaatttgctgcgaggtcaagaccaacagaggaatttgttagcaagtacaaaggcaattatgtattcactgggggaaaggccgttgggtatagaaacttgtttgcaattccatggacaacgttcatggctgaagatagtctttactttatcaatggtgcactccaccttagagctgagctcaccatcagacactgactgggatttatatgtgtaaaccttttcttctagttggtagctctgactttttttgggcaatgtgtctcattttccgataacctgctgtaatcttaactaatattcaggcaatgtgcactaggtggttagtgctggatgtgagatcaaatgaattttcgggacctt

SEQ ID NO: 10148 - DNA, 780 bp, Glycine max
  Clone ID: 700895654_FLI
atggagtctgggatgtactgtgttggagatgttaacgggccaaattccatactctcacttagaatgtatgcaggcattgtttagaattggaagaggtgagcctcctcatgtgcctgattctctttcaagagatgcacgggattttattctgcagtgtctaaaagttgatccagatgaacgccccagtgctgctcaactcttaaaccatacctttgtccaaaggccactgcattcccagtcttctggttctgcatctccttatattagaaggggttaaacttgtcacctccaactgtgaaagataatgaagatctgacattcattggatataaaagtatctccaatgttcaatcttcaagttgctagagttggtctcgggtgtattgttgtaacaatagttcattgtgttgtgccttcagaattcagagtttgcttgcttgtaactttactcaattttttaagcactgctttggatctagcaatggataggcaatccagagagataactcaccctttggctttaacgccatatttgagaattatggtccacgtgttatctaattaatgtgataatttgtctgttgtagcagtgtaaaatatcaacgtcaagctgtaataggttgttcgaggcttccccttttgtttgtttagttagcatatgaaagaattcttaggctaaacctttgggagcggtagtaacaaggattagataccatgctatatgtacatatcacctttattagtaagcaattgtttgtttatatctttattttgttcccg

SEQ ID NO: 10149 - DNA, 1176 bp, Glycine max
  Clone ID: 700895705_FLI
atcaatgattgcaatgagtatgatgttgaagggggtgacgatgagccaaactttgacgtcgaagatcgcaaacctgagaatcttcatgcaccgaatcttgggatggacagaatgatgggaagactgccttctttcccaatcaagggagaggctgttacaaatttggatttcattcggaagaggaagatctctggtgacttcaacatgataatggatcagaaaatttacacatgcgaacaacctcagtgcccttacagtgaaattcaccatggttttgctgacagaaattctagggacaaccatcgattgagttgtccttatagaggcagtgcttcaacagattatggaggttcaaattttcatgttaatgaggcaaagccggtcatattcccccaacagtcctttgttcaaccaaaacctactactactccgtctgttgttaacttggttccatctgttattgatctaaccggactcggagttccagaagatggcaagaaaatgatcactgaccttatgtcaatctatgatacaaatgttcaaagcaacaaaaatctaagttccagtaaccatgtatctgcagaaaatccaaaccttcctcagccaggcattcagcagcaacatgacaacttctttcgcagtcaaggaatcagtatggaaggaaacttctttgaagaagccaacatgtccaacaacaatcatcacatgtttgcaagggaggaaggtcaatttgaccggttcaaagctttgaatgcaccaccctttgagaccaatcacaacaacaacaacttccatttgatgtttggttccccttgtgatttggcatcctttgatttcaaggaggatatgcaaggaggagtagtagggatggatgctcttcagaaacagcctgatatctctatttggtaccagtgaaaatgacagcttaaagcttgaaacctcctcatcatcttcatctatcatggactcttttattttccttctaaaagggttggcacccccctaatcatgtgaagttcctttggccgaaaaagggtttcactgcaattttcttcacatgtaatcctgtaggcccagtagaactaaataatattttaagcttggcaggtctagtatgtgttatatacataataataataatatataataaaaacttgcatgttacccattatatgt

SEQ ID NO: 10150 - DNA, 625 bp, Glycine max
  Clone ID: 700895707_FLI
gttcaaacctctgtcgttgtgattgagcaaaaggcaaagaagcagctcgtttttgtcattaacaagctcatgtggatggcttgccttttcatttccattgccttcatttctcttacatacgtggtggtgggatcacactccagatggcttgcaatatatgctactgtgattggaagcttgataatgctctctacaattggctccatgtgctattgtgtaattttgcataggatggaggagacaaaattgagggccgagagtcgatcgttctctatgtctcatgcatcagaccaagagattttaaacagtgaatacaagagaatgtacgcactgtagtctgtaggatagttgatatatcagaatggaatggcttttatcctcctcatattcttgaagtgatatgtagtttctactatcagtatcagattttaccaagacaagctgtctatgttagactacaggtaccgtgagaaaagagggaaaagaagaaaatgggtggggaattctcgtcacatccactcgtaattataaatgatgtcaaatttagcatcatgtcagtgaaatgattgtggtgttgaagaatgaagacttatatccatttgtatttactctagtattctattat

SEQ ID NO: 10151 - DNA, 940 bp, Glycine max
  Clone ID: 700895783_FLI
attgtgctagccttcagaggacacaatgttttgcccgaaatacaggggacgctgccttcaaatttcgaacaaacatccaaaagaccaatgcgaagaggagttagcatatcatatgtactcatttccatgtgcatgtttcccctcgcaattgccggattttgggcctatggaaaccagataaatgacgggggattgttaacttcgttcccacaattccacaagaggcaaatcacaaaattctctatgggtgcaatatatgttctagtaataatacattgtttaaccagctttcaaatatatgcgatgcctgtttttgacaacctggagataagatacacgagcataaagaatcagagatgtccacgattggtgagaacatgcataagactattctttggggggttgacattttttatttcggtcacgttcccattccttccacgcctatcagcactactcggaagcatgacccttgtgcccattacatatgcatacccttgtttcatgtggctatccctcaagaagcctcgtccaagaggttttgtttggtgcttcaacgttgcactcggttgtgtagggatgcttctcagtgctcttttggtagctgcagctatacggactctagctctcaatggcctagatgctaacttcttcaaaccataacaattaatattatgccatccaacagcaactagtatattgccaacaatttattttaatctactgttagtgatatacagaaaatcatttttgaacatgatactccagtaatacaaacgttaagttttgaatttttgtatctctcttaattattatcatatattcatattataatactgatcatatttatcatttttctttatcttttatgtacgccaaacatacttatcattcgagtttattacattttcttctcaacacgttaaacatatttgtgttc

SEQ ID NO: 10152 - DNA, 1305 bp, Glycine max
  Clone ID: 700895907_FLI
gtccatcttcttcttctcttcctcttcgcacaaagcagcaagcatccttgagatggaaactttcctcttcacctcagaatctgtaaacgaaggccatcccgacaagctgtgtgaccaggtttcagatgccatcctagatgcatgcttggagcaagacccagaaagcaaggttgcttgcgagacctgtacaaaaactaacatggttatggtctttggtgagattacaaccaaggccagcgtgaactacgagaaaatagttcgagacacttgcaaaggcattgggtttgtgtcaccagatgttggtcttgatgctgacaactgcaaagttctggtcaacattgagcaacagagccctgatattgctcaaggagttcacggtcatatgaccaagaaacctgaggaaattggtgctggtgaccaaggccacatgtttggttatgctacagacgaaacacctgagttaatgccactcactcatgtgcttgctactaaacttggtgccaggctcactgaggtgagaaagaacaaaacatgcccctggctgaggccagatggtaaaacccaagtgacagttgagtacaagaacgatggtggagccatgattcctattcgggttcacacagttctcatctcaactcagcatgatgaaactgtcacaaatgaacaaatctctaaagaattgaaagagcatgtgatcaaacctgtcatcccagctaaataccttgatgataagaccatcttccacctcaacccctctggtaggtttgtgattggtggaccccatggagatgcaggactcactggaaggaagatcattatcgacacctatggtggttggggtgctcatggtggtggtgccttctccggcaaggacccaaccaaggttgataggagtggtgcatacattgttaggcaagcagccaagagcgtggtagcttcagggcttgcacgacgttgcattgtgcaggtttcttatgcaattggagttccagagccactttctgtgtttgtagacacataccaaacggggaagattccagacaaggacatattggctctaattaaggagaaatttgatttcaggccaggaatgatagcaatccatcttgatctcatgagaggaggcaacttcaggtaccagaaaactgctgcttatgggcattttggacgtgacgatcctgatttcacttgggagaccgtgaagatcctcaagcctaacgcttgagttagccacccattacggtgttcattgctacaagtggttatcatcgtagccatctttcggattttgggtaaaagggaaat

SEQ ID NO: 10153 - DNA, 931 bp, Glycine max
  Clone ID: 700895939_FLI
caagagcttgcggggcccacgtgcggggatgatcttttaccggaagggccccaagccgccgaagaaggggcagccggagaacgcggtttatgatttcgaggacaagattaacttcgcggtgttcccttcgctgcagggtgggccccacaaccaccagatcggtgctctcgccgtggcgctgaagcaggccgcgtcgcccgggtttaaggcctacgcgaagcaggttaaggcgaacgccgttgcgcttggaaaatacttgatggggaaagggtacagccttgtcactggcggaacggagaaccatcttgttttgtgggatctgagacctcttggattgactgggaataaggtggagaaactctgtgatctctgtaacattactgttaacaagaacgctgtttttggtgatagcagtgccttggcccctggtggagtgcgaattggtgcccctgccatgacttctaggggtttggttgaaaaagactttgagcagattggtgagttccttcaccgtgctgtgactctcacactggagatccagaaggagcatggcaaacttctcaaggatttcaacaagggtctcgtcaacaacaaggctattgaagatctcaaagctgatgttgagaagttctctgccttgtttgacatgcctggcttcctggtatctgaaatgaagtacaaggattaggttcaaccataccactttctactaaattgtgtcactcaagttcgacacaaagtgcagaaatggagaaaaaggaaatatgtgtcttcctttcctgggagtgatagggtttatcgccatggtgtttcaattcaaaagtttgaagtttctttgtctttgatttcatgtttaattttgttagcctgattgatatcatattttttttcttatttaacaattgaaataatacgtgctgcctttctttct

SEQ ID NO: 10154 - DNA, 1163 bp, Glycine max
  Clone ID: 700895960_FLI
gtttgaaaatgagttgaagtggtattggactgagccacaacaaggaaatttcaattacaaagatgctgataatctgctaagcttgtgtcagaagcacaagatacaaactcgcggtcattgtatcttctgggaagtggatgaaactgttcagcagtggatcaagtcactgaacaaaaacgatttgatgacggctgtccaaaaccgcctaaacggcctgctgactcgctacaagggcaagttcagtcactatgatgttaacaatgaaatgctgcatggttcattttaccaagacaggctaggcaaggatataagggcaaacatgttcaagactgcaaaccaactagacccttctgccacactctttgtgaatgattaccacgttgaagatggacgtgacaccagatcgagtccagataagtacatccatcacattcttgatttgcaagagcaaggtgccccagttgggggaattggaattcaaggccacatagatagtccaatagggcctattgttagttcttcccttgacaagttgggtattcttggtctacctatatggttcactgagcttgatgtgtcttccgtcaatgaatatgttagagcagatgatcttgaagttatgctacgcgaagccatggctcatcctacggtggaaggcataatgctgtggggattttgggagttgtttatgagtagggacaattcacacttggtgaatgcagaaggtgacatcaatgaggctgggaaaaggttcttatctcttaaacaagagtggctttctcatagccgtggccatgttgatgagcaaggtcaatacaacttcagaggctttcatggaacatatgatgtgcaagttgtgaccccatcaaagaaaatttctaagacatttgtgcttgacaaaggtgactcgccactagtggtatccattgatttataaccataatgcttcgccccaagaactaatatcatgtcttttatatatatatatatatttgggttggctgaaaaactacattggtggtgttatgttatcttaaaatagttgggatttgagttgtctgcacaattgcacaaaatctaaacacttaaagattgtctcactttattataaatatacttgtaagaaatgaaaaataaataaaaagtgatacttgtttgcttat

SEQ ID NO: 10155 - DNA, 1514 bp, Glycine max
  Clone ID: 700896016_FLI
ggcaggcaagccccactcaaccaccacacctctcctcgttcacgctacccctttctgctcttcttctacctttcaagttttaaaagtataaagatggcagagacattcctatttacctcagagtcggtgaacgagggacaccctgacaagctctgcgaccaaatctccgatgctgtcctcgacgcttgcctcgagcaggacccagacagcaaagttgcctgcgaaacatgcaccaaaaccaacttggtcatggtcttcggagaaatcacgaccaaggccaacgttgactacgagaagatagtgcgtgacacctgcaggaacatcggcttcgtctcaaatgatgtgggactggatgccgacaactgcaaggtcctcgtcaacattgagcagcagagccctgatattgctcagggtgtacacggccaccttaccaaaaaacctgaagaaattggtgctggtgaccagggtcacatgtttggctatgccactgatgaaacccctgaattgatgccattgagccatgttcttgcaacaaaactcggtgctcgtctcaccgaggttcgcaagaacggtacctgcccttggctgaggcctgatgggaagacccaagtgaccgttgagtattacaatgacaatggtgccagggttcctattcgtgtacacaccgtgctaatctccacccaacacgacgagactgtcaccaatgacgaaattgctgctgacctcaaagagcatgtgatcaagcctgtgatcccagagaagtaccttgatgagaagaccattttccacttgaacccttcaggccgttttgtcattggtggccctcatggcgatgctggtctcaccggccgcaagatcattatcgatacttatggaggatggggtgctcatggtggtggtgctttctccgggaaggaccctaccaaggttgataggagtggtgcttacattgtgagacaggctgctaagagcattgtggcaagtggacttgccagaaggtgcattgtgcaagtgtcttatgccattggtgtgcctgagcctttgtctgtgtttgttgacacctatggcactgggaagatccatgataaggagattctcaacattgtgaaggaaaactttgatttcaggcctggtatgatctccatcaaccttgatctcaagaggggtggaaataacaggtttttgaagactgctgcctatggacactttggaagagaagaccctgacttcacatgggaagtggtcaaacccctcaagtgggagaaggcctaagtaattcattccactgctctatgctggaagttttttgagcgttgcccttataatatgtctaatatccataactttccacgtctcttactctgtgtgtttctctcctcttcctcctattttgttatttgtatgttcttttgtaattttttacgtgatcaactaaaaacatgtactctctgtttgtatgtatgccctaccaatgtgtctcttaatatcaatatcaaaaagagagtgttcaagtt

SEQ ID NO: 10156 - DNA, 661 bp, Glycine max
  Clone ID: 700896030_FLI
ctttgtttgcttctcaagtctctcgaagcctctttctctctcttctagaagctatctgtgtttggtgttactaagtctccaacaagcaaagtacatggttgatttggaaatccaggtccccaccccattcgacccgtttgccgaggcgagagaatcggatgcccccggagcaaaggagtatgtgcatattcgaattcagcagaggaatgggaagaagagtctgaccacagtgcaagggctgaagaaggagttcagctacgagaagatcctcaaggacctcaagaaggagttctgctgcaacggaaccgtggtgcaggacaaggagcttggcaagatcatccaactccaaggcgaccagcgtaagaacgtctcccacttcctcgttcaggctggccttgtcaggaaggaccagatcaagattcatggtttttgaccaattggtcttgtttttgttagtagtaatttcaagttgttcttgagtttgtgagttttgaaagtttggattgtttttctgtttgatgagtggtgttggaataagtttggtttggtttggtttggtttggttttccaatttttaatgattggatttcatggatgttgttagtgaacttgaattgttccaaagcaagttacagttaataaatgataattcggttttcag

SEQ ID NO: 10157 - DNA, 1723 bp, Glycine max
  Clone ID: 700896089_FLI
ctcgagtggagggtgatgaagatgaagatgactctgatgatatcgagaatgagttcaattatgcccaaggaaaagccaaggccaggcgccagtgggaagatgacgctgacctgtcgtcgtcttctagacgcgaatctcaacagccaattcccctcctcaccaatggccaaacgatgtctggtgagattccgtgtgccacacctgatactcaatctgtgcgaactacttcaggtcctttgggcccatctgaaaaggttcactcacttccctatgttgatccaaggcaaccagttccagtaagaattgtggacccatcaaaggacttgaattcttatggtctgggaaatgttgactggaaagaaagggttgaaggttggaagctcaagcaggagaaaaatatggtgcaaatgactggtagatacactgaagggaaaggtggagatgttgaaggaactggttctaatggagaagaacttcaaatggtagatgatgctcgacaacctatgagtcgtgttgtgccaattccttcatctcagctgacaccttatcgtgttgttatcatcctccggttgattattcttggtttcttcttacaatatcgtgtaactcaccctgtgaaagatgcataccccctgtggttgacatcagttatttgtgagatttggtttgccttatcctggctcttggatcagtttccaaaatggtctcccattaatcgtgagacttatcttgaacgacttgctttaaggtatgatcgtgaaggagaaccatcacagttagatcctgttgatgtgtttgttagtacagtggatcccctcaaagagccgcctcttgtaactgcaaacactgttttgtctatactttctgttgattaccctgtcgacaaagtttcctgctatgtatcagatgatggttcagctatgttgacctttgaagcactatcagaaacagctgagtttgcaaagaagtgggtgcctttttgcaaaaagcacaatattgaaccaagagccccagagttttattttgcccagaagattgattacttgaaggacaagattcagccctcatttgtaaaagagcgacgagcaatgaagagggaatatgaagaattcaaagtacggatcaatgcccttgtagccaaagctcagaagatgccagaggaaggttggacaatgcaggatggaactgcttggcctggaaataatcctagggatcatccgggaatgattcaggtgtttttaggtcatagtggggggctggatacagatggaaatgagctgcctagacttgtttatgtttctcgtgagaagcgaccaggcttccaacatcacaagaaggctggagctatgaatgctttgattcgagtttctgctgtcttgaccaatggtgcatatcttctgaatgtggattgtgatcactatttcaataatagcaaagccctcaaagaagccatgtgtttcatgatggatcctgttattggaaagaagacatgctatgtgcaatttcctcagaggtttgatggcattgacttgcacgatcgatatgccaatcgcaatattgtgttctttgatatcaacatgaaaggtcaggatggtgttcagggcccagtctatgtgggaactggttgttgtttcaataggcaggctttgtatggttatgatcctgttttgactgaggaagatttggaacctaacattattgtaaagagttgttggggttctag

SEQ ID NO: 10158 - DNA, 1675 bp, Glycine max
  Clone ID: 700896124_FLI
agcttttttgagagaggaagatagccagctcttgagaaatgggttgagtccaaatgcaaaggggaaagtgaggcctgaagcagttattgaggctgcaactcttgctgccaatatgcagccatttgaggttgtttactatccccgggcaagtgccccagagttttgtgtgaaggccaatttagttagagccgcattgcaggttaggtggtgtcctggaatgaggttcaagatgccctttgaaacagaggactcctcgcggataagctggtttatgggaaccatctcttctgttaactttgctgatccaagatggcccaactctccttggagacttctccaggttacatgggatgaaccagagttacttcaaaatgtaaaaagggtgagcccgtggctggttgaaattgtatcaaacatgcctaccattcatctttcccattactcaacacaacaaaagaagccaagattccctcaacacccggatttttcttttgatggtcagatttcattgccagcatttcccagcaactttctaggtccaagcaatccgtttggttgtctagctgaaagtactcctgctggcatacagggagccaggcatgctaattatggtatatccctatcaaatctccacttcaataaactgcagtcaggcctatttcaagctggtttccctccacttgatcacactgcttccccagtattgagagtctcctccaacaatgcagcaacaatgcaaaaggtcggcacgggtgacaacgtctcttgcttactgtccatgtcaactgctactcaaccttcaaagaaagtggatgatgtgaaggcaccccaattggtgctttttggccaaacaattctcaccgaacagcaaatttctttgaacacctctgctaagacagatcctactcgaaataattcatttgatggaaatgctgataaaatgtgcaagttttcagatggttttggttatgctcttcacccacaaggctcttctcttgagaggttacagtggtacaaggatcaacaaaaagaaaccatggctagtttggagacaggtcactgtaaagtttttatggaatctgaagacattggtcggactatggatctcacaatgcttggatcttatgatgaattgtatagaaagctggcagacatgtttggcatagaaaaatctgtggtgctaagtcacatgctttaccgtgatacaactggggcagtcaagcacattggagatgaagcattcagcgaatttaccaaaactgcaaggaggttgaccattctaatggattccaacagcgatggtagaggaatctagaggaagaaataaacaattatcatttcaattgtacagctggttgatcaatttctctggagagtctcatctaatttatggatattaatgtttttctcgaagggcctatttggatttgttttttttcttttagtgatgatagctcgtggttttccttctctttttggatcataacatggtttacttgaggcttttgtttaataattctgatgtgaaaaaaggtgggggagagaagagaaagggtagtgatcatatatccctatgaatacgattggttcataggagtttcctgtatacaatggtttttaagtgtaaaaaaagctacctaggcttaatggttattgagacagtagttacctattt

SEQ ID NO: 10159 - DNA, 445 bp, Glycine max
  Clone ID: 700896136_FLI
gtgtatgacaacatgagaaaaccagcatttgtttttgatggaaggaacattgtggatgtggagaagctacgtgagattggtttcattgtgtactcaattggcaagccattggatccatggctcaaggacatgccagctgtggcataagagagacatttcatctcaaggattttgaggcattattcagtttggttcaattttattactactggcaattgttttttggaacaattttcttggttgccatttttcactttcccataatagttggcataaatgagtataaattttgggaaagtaggaggtcatatgttttgggtttccttgtactgcaagtcatcactactatttggatgttttgagtttataaggatttttttattttatttgattagtatggtgttactatcagtttgatgaatgaattggaaattccagcatgagg

SEQ ID NO: 10160 - DNA, 875 bp, Glycine max
  Clone ID: 700896232_FLI
atctgtggtgcctccattttttacgtggcgtgtatgaaccatttgggagacatcatgaagattccaagttccaagcaactggttgtgggatttgcacttggaaatgaaggataggcaacgttggagagctgaagaggatgctttactacgcgcatatgtcaaacagtatggtcctagggaatggaatctggtgtctcagcgcatgaacacacctcttaacagggatgccaagtcatgcttagaaaggtggaagaactacctcaagcccggcattaagaaaggatctcttacagaggaagagcagcgtctagtcatcaaccttcaagcaacacacggcaacaagtggaagaaaattgcagcacaagtccctggtcgcacagcaaagaggttagggaagtggtgggaagtgttcaaagagaagcagcaaagggaaacaaaggggaataactgcaccattgacccaattaacgatagcaagtacgagcatatccttgagagttttgcagagaagctagtgaaagcaaggagcaaaagttggctgaacaatgggctgcaaaacacttgcgacttactaagtttctagaacaggtagggtgcagatcaaggctcactgaaccaaatggaagatagagtgacatcaatcattcacaaattgggaaaatctagtttgcttttacttattattatgtcttgaatttatatgatatgaactttatagtcatagtagttttgttcctgtcatttttctaaaatatgttgttacatatggttattgatatcatccctatcttttcatacaacttgaggacttgcattagcggttgagttatgtttaaatataacatcctttatgaatatgaactttgttgttattc

SEQ ID NO: 10161 - DNA, 855 bp, Glycine max
  Clone ID: 700896269_FLI
ccattcaatcccctcccatttctctctcacccccaaaaccaagaaagcgaatcgattccgattcctctcaatggctgcggaacccaaggaatcgccttccaacaaccccggtctccatacaactcctgacgaagccaccaagggttacatcatgcaacaaactatgtttagaatcaaagaccccaaagtgagcctcgatttttattctcgagtcttgggcatgtctttgcttaagagattggattttccggagatgaagttcagcctgtacttcatgggctatgagaatacggcagaagctccaagtaatccaattgataaagtggtttggaccttttctcagaaggctacaattgaactgacacataattggggtactgaaagcgatccagagttcaaagggtaccacaatggcaattctgaacctcgtggctttggacacattggtgtaactgttgatgacacatacaaggcatgtgaaagatttcagaatctgggagttgagtttgttaagaaaccagaagatgggaaaatgaaaggtatagcatttattaaagatcctgatggatactggattgaaatctttgatcggaaaacaataggaaatgtaacacaaactgctgcttaggcttaagataacaccttaaggcccggcttttctgtgatatgttcttatctctgatttaattgggtcttttgctcgtatgtggagtatgtaggatttttcgagcttcacctgaatgaataatttgttgtcaaaccagaacgaaaaacaagattgtgttgtgaatcttgtattttttttttctttaatttcaaaaacctagccaatatcgaaactggtgacttgagtct

SEQ ID NO: 10162 - DNA, 792 bp, Glycine max
  Clone ID: 700896352_FLI
gataaactaagggatgagctttcctgtgctatttgtttggagatatgctttgagccaagtaccactccttgtggtcacagcttctgtagaaaatgtctaagatctgctgcagacaagtgtggcaaaaagtgcccaaaatgcaggcagctaataagcaatggccgaccatgcactgtgaacacagttctctaacacaatccagcttctgtttccacaagaagttgaagcaagaaaagaagccagtgccttgaatagtctccaacaagctcaaaatctgattctggactcagattttgagctaatctaaggaatgacagacgacagccttttaggggggcatcaacaacaacatcatcaacacagcaggatgaggatgctgcattggctagaatgttgcagagacaaattgatgaacaaagaagcccgggaacaactcgaactcggtttgcaagattgagggcaagaagaggaggggtttctactagccaacatgaggatgcagctttggctctaaggatgaggagagaagagttcatgcaaacttatagagggagcagccagtctagcaggctaccctcatcattattagctagagaaaaattgagggctatggtatctagagccatgaacagaagagaagatcttagacaagggtgaatgttgttaacaactaaactttttttttctgaatgtcattttatggttatattcgtgtctcataatttgtgaggtgtgcattgttttgattttcaaggtacaaattgaattattcaaaactgaactggcattctg

SEQ ID NO: 10163 - DNA, 1621 bp, Glycine max
  Clone ID: 700896419_FLI
atttttgcactgccacgtgagtgccgtgtggcgaaagagtaaacaaaaccgttactccctgccgatggcgatctccgatgtgcctgcagccgctggcacgaccgccactaccaccagcgactcagatctccgacagccttctctgcggcgcaggtcctccgccggagtcctcttcgacgctgccagagattccggctccgacaattccctgaccggcaaaatcaccgacgacgacaacatcaaagatcacaagccgaataatcacgcagcctccgacgacaatgtgggcgccgccgccaatgacgctgggcaggagcaccgacaaccggtcgccgatttcaaatacgcttaccgtccctccgttcccgcgcaccgcagaatcaaggagagcccccttagctccgacaacatcttcagacagagtcatgcaggactgttcaatctctgcatagtagtgcttgttgccgtgaacagcagacttatcattgagaatttaatgaagtatggttggttgatcaagtatggcttttggtttagttcaaaatcattgagagattggcctctcttcatgtgctgtcttagtcttgccatatttccacttgctgcctttgttgtggaaaggttggcacaacaaaagtgtatttctgaaccagttgttgttctacttcatctaataatatcaactgttgaactgtgctatccggttttagtaatactcaggtgtgattctgcttttgtatctggtgtcacgttgatgctattaacttgcattgtgtggttaaaattggtgtcatatgcacatacaaactatgatatgagagcacttactgtttcgaatgaaaagggagaaacattacccaatactttgattatggagtatccgtacactgtgaccttcaggagtttggcatacttcatggttgctcctacattatgctatcagacaagctatcctcgcacaccttcagttcgaaagggttgggtgtttcgtcaacttgtcaagctgataatatttacaggagttatgggatttataatagaacaatatatgaatcctattgtacaaaactcaactcatcctttgaagggaaaccttctatatgccattgagagaattctgaagctttctgtcccaaatgtatatgtgtggctctgcatgttctactgctttttccacctttggttaaatatacttgcagagcttgttcgatttggtgatcgtgagttctataaagattggtggaatgccaaaactgttgaagagtattggaggatgtggaatatgcctgtgcacaaatggatggttcgccacatatattttccatgcttaaggcgtggtatacccaagggtgctgcttcattaattgcattcctggtttctgctgtgtttcatgagttatgcattgccgttccttgccacatgttcaagttgtgggcttttataggaattatgtttcaggttcctttggtcttgatcactaattacctccaaaataaatacagaaactcaatggttggaaatatgattttttggttcatattttgtattcttggtcaaccaatgagcgtactattgtactaccatgacttgatgaatagaaaaggagaagttgactaaggt

SEQ ID NO: 10164 - DNA, 1465 bp, Glycine max
  Clone ID: 700896469_FLI
ccacaccactctctctgctcttcttctacctttcaagtttttaaagtattaagatggcagagacattcctatttacctcagagtcagtgaacgagggacaccctgacaagctctgcgaccaaatctccgatgctgtcctcgacgcttgccttgaacaggacccagacagcaaggttgcctgcgaaacatgcaccaagaccaacttggtcatggtcttcggagagatcaccaccaaggccaacgttgactacgagaagatcgtgcgtgacacctgcaggaacatcggcttcgtctcaaacgatgtgggacttgatgctgacaactgcaaggtccttgtaaacattgagcagcagagccctgatattgcccagggtgtgcacggccaccttaccaaaagacccgaggaaatcggtgctggagaccagggtcacatgtttggctatgccacggacgagaccccagaattgatgccattgagtcatgttcttgcaactaaactcggtgctcgtctcaccgaggttcgcaagaacggaacctgcccatggttgaggcctgatgggaagacccaagtgactgttgagtattacaatgacaacggtgccatggttccagttcgtgtccacactgtgcttatctccacccaacatgatgagactgtgaccaacgacgaaattgcagctgacctcaaggagcatgtgatcaagccggtgatcccggagaagtaccttgatgagaagaccattttccacttgaacccctctggccgttttgtcattggaggtcctcacggtgatgctggtctcaccggccgcaagatcatcatcgatacttacggaggatggggtgctcatggtggtggtgccttctccgggaaggatcccaccaaggttgataggagtggtgcttacattgtgagacaggctgctaagagcattgtggcaagtggactagccagaaggtgcattgtgcaagtgtcttatgccattggtgtgcccgagcctttgtctgtctttgttgacacctatggcaccgggaagatccatgataaggagattctcaacattgtgaaggagaactttgatttcaggcccggtatgatctccatcaaccttgatctcaagaggggtgggaataacaggttcttgaagactgctgcatatggacacttcggcagagaggaccctgacttcacatgggaagtggtcaagcccctcaagtgggagaaggcctaaggccattcattccactgcaatgtgctgggagttttttagcgttgcccttataatgtctattatccataactttccacgtcccttgctctgtgtttttctctcgtcgtcctcctcctattttgtttctcctgcctttcatttgtaattttttacatgatcaactaaaaaatgtactctctgttttccgaccattgtgtctcttaatatcagtatcaaaaagaatgttccaagtt

SEQ ID NO: 10165 - DNA, 359 bp, Glycine max
  Clone ID: 700896666_FLI
tttcaagaggctgttagcagcttctaaaatgaggttcggtatgaaccttgtgaacacaagccaaccaactggacaatgttactaaccagaaatggccattaattgtgttcactcgattgtgtatatataaatgtcatgatttagtgcataagacttggtcttttgacattgaacagcaaataagtaatctctgctgatcaatgattctcctttgtgcatgcaataccatgggttctttgatctgatgatccgttgtgggctaatgctgatgaaggttgcataatcagcacctctttcaatgtacaagatctttgaaacaacgaaggattcccgaagcaataaaaaaaccgagcaatttt

SEQ ID NO: 10166 - DNA, 995 bp, Glycine max
  Clone ID: 700896705_FLI
gaaagatattccaacaccatggtaagagctccttactttgataaaaatggaataaaaaaaggtgcatggagcgaggaagaggataagaggctcatggcttatgttgagagacatgggcatcccaattggcgtcaactaccaaagtttgcaggattgcaaagatgtggaaagagttgcagacttcgttggatgaattaccttaggccaaatctaaaacgagggaactatacccagaaagaagagcaaataatcaaggatttgcataaaaagcacggaaataaatggtctctgattgctgaaaatctccccggaagaacggacaacgagataaagaactattggcacagcaacctaaagaagttcctaaagggcaatgagaacaccccttgtgatgatgatgatgagttaaagtccactgaatgcaaagagtttgaaaggtcaatgaacaaggctcatagtgctgattcccaccacattctggagagttcagtgtccatttcctcagaaacttcctacactgaaggcaattccccttcattctcctctagtcatacaacagaatcatcaaccctttccaaggaagaagatagtgttgtttcatggcaaacaatggatgtgcttagtagcaatttctggactgaaccgtttatttcagaaaatgctcttaatcaagactactttcccatttcatcctacggaacagaaccatttttcttgtggtagttgtgaacagttgttctaccaagtggctctagaatttccatagagttatacagcaaatagtgttgcatttttgctagtaagttcttgaaatttgaggaatttgggggaacttagtcacctgttatttcttaatttccaaatgaaggggaaaaaagagaaaaggtttgtgtcagcaactttgttttgcagaacaagcactcaggttatggagagaatcagaatatgttgtattttatacatgatacagtgaaaaattacagaaccaattgcat

SEQ ID NO: 10167 - DNA, 668 bp, Glycine max
  Clone ID: 700896888_FLI
gtcaaaggaggcatcaagttgccaattgggttcaggttttgtcccaccgatgaagagcttctccttcactacctcaagaagaaggcgtttgctcaacaattacccgcttcagtcatttcagagtttgacgtgtttcagactgagccatggaaacttccaggttggtccgaattctttttttctttcctacagctgcttcatttgttttttcttggttgttacttagtttggatttcagccattgaaaagtcttaaaaaatttagtttaggtcttatttaatctcaaaaccagctcatatgcattagtttgaaaacggtctaataaaacaatagttgacagaagtggtaatcacttatatcttttgatcaagaaatcaggactggcatctgattgactcttagacataaaatgaatcttcttgtgagaagaatatttatattttatgtgctcacgattttcatgaaaattaatcatcaatttcacagaaatgttttatatcaatattatgatcatttgatcaacaaaataaaaatatcaatctaataatgggtgaagaaaaaaaaagtttcaataataatgatcaagggtgtgtatgattaacataatagaaataaaaaagataaaaataaaataaaaattaaaataaaacataaaaaatgtaaattat

SEQ ID NO: 10168 - DNA, 2380 bp, Glycine max
  Clone ID: 700897094_FLI
aaggttggatctcagtaagaggcttggcttggagaataagcaagtcaagttctggtttcagaatcgacgaacccaaatgaagacccaactggaacgccatgagaacataatgcttaggcaggagaatgataagctcagagctgagaacagtttgatcaaggaagccatgtcaaatccagtgtgtaacaactgcggtggccctgcaattcctggccaaatttcatttgaggagcaccagattagaattgagaatgccagactaaaggatgaattgaaccgtatatgtgtcctagcaaacaagttccttggcaagccaatctcatcattgaccagtcccatggccctcacaacctcaaattctggtcttgaacttggtattggaaggaatgggattggtggttcaagcactcttggcactcccttgccaatggggcttgatttgggagatggagtgttaggcacccaacctgcaatgcctggggttagatcagcattgggtttgatgggaaatgaagttcagcttgagagatctatgcttatagatcttgcattggctgccatggaggaattactgaagatgactcaggcagagagccctctttggatcaagagtttggatggtgagaaggaaatctttaaccatgaggagtatgcaaggttgttttctccttgcattggtccaaaacccgctggctatgtaactgaagctacaagagaaactggaatagtaatcatcaacagtttagcccttgtggaaactttgatggacgcgaatcgatgggcagagatgtttccgtctatgattgctagagctatcaacctcgatgttatatctaatggcatgggtggaacaagaaatggtgctctacaagtgatgcatgctgaggttcaattgctttctccactagtccccgttcgtcaagtaagattcatcaggttctgtaagcagcatgcagaaggtgtatgggctgtagttgatgtttccattgagataggtcatgatgctgctaatgcacagccatccattagctgtagaaggcttccttctggctgtattgtgcaggatatgccgaatggttactccaaggttacttggcttgagcattgggagtacgatgagaatgttgtccaccaactttatcgcccgttgctaagttctggtgttggattcggtgctcatagatggattgccaccctccaaaggcagtgtgaatgcttggctatcctaatgtcctcttccatttcaagtgatagtcacacagcattgagccaagctggtaggagaagcatgttgaaattggcacaacgcatgactagcaacttctgttccggggtttgtgcttcgtcagctcgcaagtgggacagccttcacattgggactcttggtgatgacatgaaagtgatgacaaggaaaaacgtggatgaccctggtgagcctcctgggattgtgctcagtgctgcaacttctgtttggatgccagtgtcacggcaaaggctgttcgactttctgcgtgatgaacggctgagaagtgagtgggacatcttgtccaatggtggaccaatgcaggagatggtacatattgccaaaggacaaggacatggaaactgtgtttctcttctccgtgctaatgctgttaacgccaacgatagcagcatgctgattctgcaagagacatggatggacgcgtcatgctcagtggtggtatatgcacctgttgacgtgcaatcactgaacgtggtgatgagtggtggagattctgcatacgttgcactcttgccttcaggctttgcaattcttcccgatggccactgcaacgacaacggctgcaacgggagtctgcagaagggccgcggcagcgacgacggcagtggcggaagccttctcacagtcggtttccaaattctggtgaatagtctcccaacagcaaagctcacagtggagtcagtggacactgtgaataacctcatctcctgcaccattcagaagatcaaagctgcactcagagttgcatgatgccaacaacaacaacaacaacaaccattttgttaatgcagtaataatatgcaaaagttaagttaccttaaaattattattttgtggtcttttttaattttttggtttctaagatgaatattattcggagaggggttatataattcggttgggtgtataggatttataattatatagagtagtggaagaggctgaggcagaaagggtcgcgtaaggaaggtttcgagtcaagaacgaaccgcgatggaggaacttgaattgtgctgtttgcatttgcatgcagcttttctctgctcatagtggttcgggtattgactcgttgacctgcgagttagtctcagtgctcttgtttagataagatgacag

SEQ ID NO: 10169 - DNA, 1282 bp, Glycine max
  Clone ID: 700897136_FLI
aaatcaccagttgaatctgcaccattctcttattgtgaccatcaacatgggcgagatgtctatccatcaaccaatttcaattccactgcaactggttttcttggttttggtgggaactgctatgcttccaacaagtcaatatattggtccagtaggatggaaaactccacagaatctttttctcctgtagcacttaaagaatttggagagaagagacaagggactgcaaatggctgtagactctttaggattcagttacatgacaattctaattctaatgaagaaagtctaccaatggtcactttgtcaggaaggatgggtgatgatggcccccttccatctttggatgctgagtctgaccagcattctgaaccatcaaatgttaatcgatctgatatcccttcggtaagctgtgatgctgaaaaatcatgcctgcggtctccccaggagtcacagagcaggcaaataagaagttgcacaaaggtccacatgcaaggtatggctgttggaagggctgtggatttaacacggtttgatggatatgaggatctgctaaggaaattggaagagatgtttgacatcactggtgagctctgcggatcgacaaaaaaatggcaggttgtgtacactgataatgaagatgatatgatgatggttggggatgatccatggcttgaattttgtagcattgtgaggaaaattttcatctacactgcagaggaggtgaggaagctttcacccaaaataggacttccaatcagtgaagaagttaaacccagcaaaatggactctgaagcagtagccaatcctgaggatcagtcatctattgtggggcctggttgctaatgtcttaggtcttccaacatttcagttgttatatatatatacaatagatattggcatgaaaataggaagtagaacgtgagagaaacgagtatgtacctggcaagcccttcatcatggcctataaggagcatatggttagtgtattctgcatctatacaggagcagcataacagcaccaaagcagagggcttggggtattgtggcttttctctttctttcatagctctgtaatcaccgagtttcgatgccttgcttgttcagttttgtattggttgcgagcgtgcagaaatgtcttgtttttttttttttttggttgcgagcagcataacagcaccgaagtatcttactatgtatgcatttggattttttttttggttcttttgtaattcacttgttatgatgcatcatctcatttatgtatatataactttctatt

SEQ ID NO: 10170 - DNA, 561 bp, Glycine max
  Clone ID: 700897170_FLI
cacaagggaattccatttcctaaggaccaacccatgggtgtgtacagttcattatggaatgctgatgattgggccacgcagggtggtcgtgtgaaaacagattggagccacgcacccttcattgccacatacaagaacttcgagataaatgcgtgtgagtgtcccgtgtcagtggctgcaatggataatgctaagaagtgcaccagcagtgaggggaataagtattggtgggatgagcctaatttggctgaactcaacttgcaccagagccaccagcttatgtgggttagggcaaggcacattttctatgactattgcactgacactgctaggttcccagtcacgcctgctgagtgtgtccatcaccgtcacacctgagcagacttagtgattagtctaaactttattttgttataacttatgggaagttatgaaaataggattggggcataagaaaaaaatggtgggtggtgaacaaagttgtggaacatgtccttcatgtttctgattgtaatatatattgccacaacattaatgtgaattgttggtttttcttcttgt

SEQ ID NO: 10171 - DNA, 910 bp, Glycine max
  Clone ID: 700897181_FLI
ggcttccttaagctccttagtgctgctccttgcagctctaattctatcccctcaagttcttgcaaactatgagaatcccccagtgtacaagcctcccactgagaaaccaccagtttataagcccccagttgagaagcctcctgtttacaaacctccagttgaaaaccccccaatttataagcctccagtagagaagccaccagtgtacaagcccccagttgagaaacccccagtgtacaagcccccagttgaaaaaccaccagtgtacaagcccccagttgagaaaccaccagtgtacaagcccccagttgaaaaacccccagtttacaagcccccagttgaaaaacccccagtgtacaagcccccagttgaaaaaccaccagtgtacaagcccccagttgagaagcccccagtttacaagcccccagttgagaagccaccagtttacaagcccccagttgagaagccaccagtatacaagccaccagttgagaagcctccagtgtacaagccaccagtagagaagcctccagtttacaagccaccagtagagaaacctccagtttacaagcccccagttgagaaacctcctatttacaagccacctgttgagaagcctccggtctacaagccaccatatggaaagcccccatacccaaagtaccctccaactgatgacacccatttctgaaggatgtcaagaggtgtattgagtatatgctaaataagaggtgctcaaaatgtagttatagattacaaattattgcaagggttgctcttagcttcttcatttcaagcttttgtttacactttgcagtgctatggcaaagataagagtatcatggatggaaaaagggggggaaaaaatgttgctttgtactccaaattatgaataatagaactttatatt

SEQ ID NO: 10172 - DNA, 1065 bp, Glycine max
  Clone ID: 700897220_FLI
ggaagatctgatgggcatcaattgattggaatacaagaatgaaaattgctatatgtgctgcacaaggtctaactttcttgcatgaagaagggccttttcaggcaatgtataatgagttctcaacagccaacatacagattgacaaagatttcagtgcaaagctttcaggatatggttgtgttggacatattcccgaggaagagatttcaagcagttcatctgctgttggaaacctatcaatggaaacactggagaaaggaatgctcacaccaaagagcaacgtatggagttttggaatttttcttctggagctactcacaggaagaaagaatctcgatagccgtcaccccaaggaagagaggaatttagtcaagtggagccggcctttcctagctgacaactaccgtctgtcgttgatcatggatcctcaactcaaaggtcgctttccttctaaagccgcaagaacaatagctgacattgcacaaagatgtctccaaaaggagccatcagacagacctaccatgagaactgttgttgagcatctcaagatgatacaggatttgaaatactcgtgtcgattcccactgcaagagccagcatcaaactctgggaaacatatgtcaagatcaccaagtctcaatggcatcatctgccctgcaccgcggttgagtttctcaccatcaccgccatcaggaattccagtatctgtttcgcctccaagatggtcaggtggagggcccattctcctcctgccaccgcgtgcttgtgcttcaagtctctctttggaggagcttgataggcaggaaagccgcaagtcatcatcctcagcctctagaagggctagtgttgaaggattttgattgtctataatgttcattttttattttttatttttttttggtgtgattcaacacataatttataggagataaaagatgtggttcctccacctttaatccctcagagtgatgccgagaggatgttcttttgtagatagtgcaaaggttggttgactgggttcaattagttacacccatttatatgaaaaattatatggtctttagc

SEQ ID NO: 10173 - DNA, 1027 bp, Glycine max
  Clone ID: 700897362_FLI
gtatgcacttcaaacagtttgggcgtcatgtggagagagagagcgttattggtgatcctgctactgcttctagtccagcaaatttgtgctaccaagaagcaagatcatggttgccccctttcttcctgcggcaaaatcaccaacataacttacccatttcgattaaagggccaccctaaaagctgcggcgacaataggtatgagctagcttgtgaaaacaatgttactgtgttacatttgtactctggaaaatatcatgtgcaggcaatcaactacaataatttcactatccgagtggttgatccaggagtcgatcaacaaacaaattgctcctcccttcctcgctatttcttgtctcgctccaatttcactgatacttacagtgatatttacaacatggatccataccaagctggtcaatattcaggtcatcggaatttatttatttgttatcggtaaagattagttgttagttttcatttatgatgaaatccacgactttttcattctcaattctttcaatacttaggtcgtagtaattgggacaggcttgctttccagcatatagtgtatatgaattgtagcaatccagtgactcagaatgggaagtatgtggatactgcttcatacgtcaactgggactccaaagacaagtacatatacgctattgctggtgacttaaaagcagaggacttccaagttggttgtcacgtaaagctggttgctctgacatcttggtggggtttggatacaaacaattattcctactctgccatgcacacggggctagtctatggatttgagatttcatggatgcgcctcatatgtgagcagcactgtccaagtaaacacggctgctactactacaactgctttttcgactctgtcagccaggagcttaattattgggacggggattcattagggagtgagtgaaacttaacataaaaagacttttttattcagagtgctctatgttaatatgaattcttttttttttttgttaatatacgtgaccttcttgttt

SEQ ID NO: 10174 - DNA, 846 bp, Glycine max
  Clone ID: 700897422_FLI
ctgttggattacagaatgttggtcggcattatgaaacatgggaggcagggatcactggtccagttttgctccatggtcttgaccaaggacagaaagatttgacgtggaacaagtggtcatataaggttggcctaagaggagaggctatgaatttggtatctcccaatggagtctcgtctgttgactgggtccaagagtcacaagctactcaaagccggtcacaattaaaatggtacaaggcatattttgatgcacccgggggaaaggaaccactggctttggaccttgaaagcatgggtaagggtcaagtatggataaacgggcagagcatagggagatattggatggcttatgcaaagggtgactgtaattcttgcacttattctgggacctttcggcctgtaaagtgccaacttggctgtggacaacccactcaacgatggtatcacgttccaaggtcctggctgaagccaacaaagaacttgatagtagtgtttgaagaattaggtggaaatccttggaaaatatctttggtaaagagagtggcacatactccggcagttcatgggcagtgacccagttcagagaaccaaagaacctgaataagaatctatgtctactgtgaattttgtggctttcgttggaacgaaggtagcttcgaaacaataaagttatctacttcgcaatatgaagtgtttctgttagttctatggttcctactcctagcacctctttttcttatagaaatggaccaccgtgattggtacaaaagatgtacctagatgattttatattcttttcgacacgtcaaccaatctacttggagagtacttgtgaatgaagtga

SEQ ID NO: 10175 - DNA, 947 bp, Glycine max
  Clone ID: 700897446_FLI
aaactccaaatacctcactccacagttgaacaacaacaccaacaccaacttctggaatgaacattttcaaatccccactggaccatgatttgaactgtggtggaatattccacgactcagcagaagcatcttattcgtctgaaacaaggagcaccccctcagacgaagaagtgattctagcgtcagcgcggccaaagaagcgagcgggaagaagagtcttcaaggagacaaggcaccccgtctaccgaggagtgcgtcgcaggaacaagaacaagtgggtctgcgagatgcgagtccccaacaacaactcacggatttggctcgggacatacccaacgcccgaaatggccgcacgtgcgcacgacgttgcggcgctcgcgctcaggggaaagtccgcgtgcctcaacttcgcggactccaggtggcggctgacggtgccggcgaccaccaacgcggaggagatacggcgagcggcgggggaggctgctgaggcatttgcagttgcagatggggacgacgttaatattgaacaacagcagagtgtgatggccacgaatgatgatgaagttcaagagcctctccagcaggaggaggttcaagacttgcatgatttgcttttgagtattgcgaatgagcctttgatgtctcctccaccctgtgcaagagatggtagggactggaatgacgtggacatatttgatgatgatgaaatctcactatggaacttctcaatttgacgcgtacgtcattaagagtatgactgtatgcatgtttgatgataagcgaaaacacctttttgtgtatgtgattttctatatttttagggacctgttgtgtgtagataaattaagtagcactcgattgattaagttgagtggagttaaacatattgtagttgtatctatgatttgtttcgtgattaaattttaatgacaagtacagttggc

SEQ ID NO: 10176 - DNA, 708 bp, Glycine max
  Clone ID: 700897508_FLI
ttccatcaggatttggcgcggaagaagattcagtaaaacctcttcctccattccaagctgttcttgataagaaaagaaaaattagaagggaaattgaagcagctgggatcccttacacttctatatctgcaaattgttttggtgcatactttgtcaattatttacttcacccatatgaaaatgtgaaggatattactgtctatggcaacggggaagcaaaagctgtgctaaattacgaagaagacattgctatgtatactgttaaagcggcaaatgatccaagaacatgcaaccgcgtcgttatttatcggccacagaagaatatcatatcacagaatgagttgacatcattgtgggagcaaaaatgtggtcagacttttcacaaggctttcatttcggaagaagaaattgtcaagctatcacaatccttaccctctccacacaatattccagtttccatccttcatagtatatttgttaaaggggacctcgtgaggttcgagatagaggaagatgaccttgaagcttcacagctatatcctgattataattacacatccattgaccaacttcttgatatatttcttgttgatcctccaccccctgcatctgctgctttcgaataattaaagccctttcaagtttgttaaaatgaagtttgtgatcttccaaataccgctgactaaagcataattgtatttatctttg

SEQ ID NO: 10177 - DNA, 1813 bp, Glycine max
  Clone ID: 700897511_FLI
cggattagcatcaaagcaagttaacaaaatttgggtgcgtcctggattgacccttttgccccctctccctcaccctccactaactcctcctttttggtttttataaagcacattcccaatagaggagggtccctacacaacacaacccttcaatgacgtccatggccactttcttcgcccaaacctccttcccctcccactctctctccaaaaccttcgatacccatttcgcccctgccccgaaagtcaacgtctttgtgaacttcagggcgaggaggcacgttggggtgcgagtttcgaacgcgctgatcgaaccagatggagggaagctcgtggagcttgtggtgacggattttgagagggatttgaagaagggtgaggctctttcgttgccgaggatcaagctctcaaggattgaccttgagtgggtccatgtcctcagcgaaggatgggccacacccctgaaaggcttcatgagagaagccgagttcctccaaacgcttcatttcaactcgctccgactcgatgatgggtcggtcgtgaacatgtcagtgcccatcgtgctggctattgatgatgcgcagaagcatcggatcggggataacaaaaaggttgctctttttgattccaagggagaccccgttgcaattctcaataatattgagatttataagcatcctaaagaagaaagaatagcccgaacttggggaaccattgcccctggcctaccttatgttgaacaaactataaccaatgctggaaattggttgattgggggtgacctagaggtcattgaaccaattcagtacaatgatggacttgatcattttcgtctatctccgacacaactccgtgcagagttcacaaggcgcaatgcggatgctgtgtttgccttccagctccggaatcctgttcacaatggccatgctttgctaatgactgacacccgaaagcgccttcttgagatgggctataagaatcctgtcctcttgcttcatccacttggaggctacaccaaagctgatgatgtcccacttgattggcgaatgaagcaacatgagaaggtacttgaggatggtgttcttgatccagagacaactgtggtatccatattcccatctcccatgcactatgctggacccacggaggtgcagtggcatgcaaaggctaggatcaatgcaggggctaacttctatatcgttggtcgtgaccccgcaggcatgagccatccagttgagaaaagagatctgtatgatgctgaccatggaaagaaagtattgagcatggcaccgggactagagcgtctaaacattcttcctttcagggttgctgcatatgacaagactcagggtaaaatggcattctttgacccttcaaggcctcaggacttcctgttcatatcaggcacaaagatgcgcacactggcaaggaacaaagaaagtcctcctgatggatttatgtgccctggtggatggaaggtgctggttgattactatgatagcttagtactctcaagcaacggcaaagtgcaggaagctgttccagcttaatcttgtatcatatcataatgtatatatctcatgattgggagaaaccttaagcttatgtattctcctgctaagacatacttcacgaggatcctctggcccaatctaataataataataaattaaaactttggggaggcacaagcacggacacattgcctctctctgtatgtatggcatttagacagcctcttgcacttatggtgcaattgtgcatgccaactctctgtaatataatgtggttgtgctaaggatttggtttgatc

SEQ ID NO: 10178 - DNA, 1441 bp, Glycine max
  Clone ID: 700897515_FLI
gcacaaacacaaacacatggcttcctccttcttctttctaacattgcttctcctctccattatctccgccgccaccccctgcccgccgtcagaacgggcagcactactggccttcaaagctgccctgaccgaaccctacttgggcatcttcaacacatggtcgggcaacgactgttgccggagctggtacggcgttgcctgcgaccccaccaccggccacgtcaccgacgtcaacctccgcggcgagtcccaagacccaatgttccagaagcttggccgctccggctacatgaccgggaaaatatcgccggagatttgcaaccttagcaacctcacaaccctcatcgtcgccgactggaaggccgtctccggcgagatccccgcttgcgttgcctcactctacactctccaaatccttgacctttccggaaatcgcatttccggcaagattccgacggacatcgggaacctctggagtctcaccctattgagtctgggtgacaacgagatctctggcgagatcccaatgtcagttgtaaaccttgccagactcaagcatctagacctcagcaacaaccgactcactggcgaaattccctatgatttcgggaaactcgccatgctgagtcgggcgttgctgagtgaaaaccaattaaccggttcgatccctaagtccgtgtccagaataaacaggctcgcggacttagatgtctcatcgaaccggttaagcggttccatcccggtagagttgggaaaaatgaaggttctctctactttgaaattggatggtaactctatgacgggtccagtaccctccactttattgagtaatacgggtatgggtattttgaaccttagccgaaacgggttttcgggtaccatacccgatgtttttggagcaggttcctattttatggtccttgatttgtcgtttaataacttttcgggtcggattcccggctccttatccgcatccaagttcatggggcatttggatctgagctacaaccacttatgtggaaccatccctattgggtctccgtttgaacaccttgatgcggcttcgtttagtaacaatgattgtttgtgtggaaacccgttgaaggcttgttgatgggtgacccgaataagtattgggttgttgttggtgaatattaatcgttccaagatatagtgatttggttgtagtgaaggagcccaagtgtgattttcatttgatgtgatagtattttgtcatgtgaattgtgatgtaatataatatatttagggcaagtgttgaaatggacaaaaagttatgagggtgctcctggtggcatgtgcatataagtgagcataggtcaagagagttctgaatatgctagtgttgcatgtgggtttcggagttgcatgtgagtttaagagctggataacgtgaaagatttggatcatgattccatttcct

SEQ ID NO: 10179 - DNA, 470 bp, Glycine max
  Clone ID: 700897565_FLI
ttacgatgtgatcactcacatgaactccttccggcagtacaagaagagcagcagccccatgagcgctgttttcacggggcagcaagtgctgatgctcaacaatgaacaagtctcagagttgaaccaagacaagaatgctggggtttatgacatctatgtgaagctctacttcaggattaggttcaggcttggggacgtcatatccaatgactacaagcccaaggtcaaatgtcacctcaaggtcccttttagtaaaaatggcacctttactctgtttccgaccaccaagtgtgatgtcgatttctaaggactacacatttgattagattggttttaatttgaaattttctttctttaatccttattttaaattttaataattcattatgtaacttttgtgattatttctttcatttttttgactatatgttggtaatgtatttgttttctggcaataaatttattttggt

SEQ ID NO: 10180 - DNA, 765 bp, Glycine max
  Clone ID: 700897588_FLI
gtttcttttttggttctgttatcaaatcaaataaaaaatctccttctcggaaatggcatcaccgatccaacaacaacaacgctcgactactacaagttctggatctgaaggaggagatccgcatatcatcgatgagaggaagcggaagaggatgctgtcgaaccgcgagtcggcgcggcgatcgcggatgaggaagcagaaacagctggaggatctgaccgatgaagttagcagattgcaaagcgcgaacaagaagcttgcggagaacatagaggccaaggaagaagcgtgcgtcgagaccgaagcggcgaacagcattctgagagcacagacaatggaactggccgatcgattgcgcttcttgaactccatccttgagatcgctgaagaggtcgaagggttatccgttgagattcccgagattccagatcctctcctcaagccctggcagattcctcatccgatacaaccgattatggccaccgcaaacatgtttctgcgttgatcattcctgaggattttactttaattagggttattcagtgcggtagtaactttctctgttatgtgtattatattactattagtgttatctgtctgcatcaaaagtatcgtgtggtcatcaatgcattgggttcctgagagagatgaatgtgaggtacagggtgttgatggctggtagtggcagtgtgtgtccctttgcgcgacttgtaatcattttttatggtggctgttttattttaattaaaagtaatctcatcttct

SEQ ID NO: 10181 - DNA, 560 bp, Glycine max
  Clone ID: 700897637_FLI
aaaatatagagagagagagaatgtggtggcggcggcgcccgagaccatgagaactacagcaccttccgatttcattttcacccaaaagcttcaccctttcaacatcacctccaccaaaacctccctccaacgaaccctaccctattttctccaactcaatcgcatggccgaggctgcacgaaccgcgcataaacccgcgccgcacccgatccaacccaaacccgacgataaaaccccgaatccggcgaaggagattccgccgccgccggagaagccggagcccggcgattgctgcggcagcgggtgcgtccgatgcgtctgggatgtgtactacgacgaactcgaagaatacaataagcgatacaaacaggtcgatcccagccccaaaccttcttcgtaatcttcaacatcgcttggattagctttattaatttatttatattacatcctaattttaaaaagctttgggtatttcttgatttcgtgaattgtccctttttatcaaaaaggatcgaaatgttgtatgtggaattatacatgtagaataaactgattttttt

SEQ ID NO: 10182 - DNA, 1042 bp, Glycine max
  Clone ID: 700897774_FLI
gtgaaaagccgcgagggaggtttcgtttcgtttcgttcagttcacacattctattctctatcgattcctcttccctttttctcaatccactacaccacagttatgaggagccaacttgtgtgtaatgggtgtaggagcatcttggtttaccctagaggagcaaccaatttttgctgtgcgttgtgcaacaccattacctctgttcctcctcctggaatggacatgtcacaactctattgtggaggctgtacgacattgctaatgtacacacgtggtgctacaagtgtgagatgttcctgctgtcacactattaaccttgtaccagaatctaatcaagtcattcattgtgcgaactgccggacaacactcatgtatccttatggagcttcctcagtcaaatgtgcaatttgttgctatattactaatatcagtatgaccaatggaaggctttcaattcctgtacagagaccaaatggaacagccaactctggaacagtatcttcaacttcatcgtcaatgccttattctcagagccaaactgtcgtagtagaaaatcctatgtctgttgattcgagtgggaaattggtgaggaatgtcgttgtgggcgttacaacagataagaaatgatacttgccacatgaaaatgttacacaagtgtaaagggaacatcatttgactcgtcaactgctggtgcttgaaaatattgttcgtgtatatgaaattgcagcttataagttaaagatatttttgttctaaatgagatttagactgatttaatttacatatatgtatacgaggaccagtggaaagggcacacaacttgtcatttattgaattgccaaggtcctctttttgctgcagttgtatcacagggtttttcgcatctcgaattacaagtcctagatgcacatttgattcctcttctttggtgacttgattttattatgcaagcatataacctgataaggtgcctagagtcaactggcgcagaaattcaaatgtgtacacgcactaaatcaaatatcaaaggattagttattgt

SEQ ID NO: 10183 - DNA, 809 bp, Glycine max
  Clone ID: 700897784_FLI
ctttctatatgtcatcggacggtccaaaccacaacgagtttgattttgagtttctaggcaacaccacgggggaaccatactctgtccaaaccaatgtgtatgtaaacggagtgggcaacagggagcaaaggctcaacctttggttcgaccccaccaaggattttcactcatactctatcttctggaatcaacgtcaagttgtatttttggtggatgaaacgccaataagggtgcacacgaacatggagcacaagggaattccatttcctaaggaccaacccatgggtgtgtacagttcattatggaatgctgatgattgggccacgcagggtggtcgtgtgaaaacagattggagccacgcacccttcattgccacatacaagaacttcgagataaatgcgtgtgagtgtcccgtgtcagtggctgcaatggataatgctaagaagtgcaccagcagtgaggggaataagtattggtgggatgagcctaatttggctgaactcaacttgcaccagagccaccagcttatgtgggttagggcaaggcacattttctatgactattgcactgacactgctaggttcccagtcacgcctgctgagtgtgtccatcaccgtcacacctgagcagacttagtgattagtctaaactttattttgttataacttatgggaagttatgaaaataggattggggcataagaaaaaaatggtgggtggtgaacaaagttgtggaacatgtccttcatgtttctgattgtaatatatattgccacaacattaatgtgaattgttggtttttcttcttgt

SEQ ID NO: 10184 - DNA, 1179 bp, Glycine max
  Clone ID: 700897809_FLI
ggccattcttcgagggataccatttgataatagtgcaggacggtgatccttcgaaagttatcaaggttcctgaagggtttgattatgaactctataaccgcaacgacatcaaccgcgttcttggccccaaggcacactgcatctccttcaaagactctgcttgtcgctgtttcggattcttgttgtctaagaagaagtacatcttcaccattgatgatgactgcttcgttgcaaaagatccttctggcaaagaaattaatgccctggagcagcacctcaagaaccttctcagtccatcaaccccatttttcttcaacaccctctatgatccatacagagagggcgtagattttgtccgtggatacccatttagtctgcgtgaaggtgttcccacagctgcttctcatggcctctggctcaacattcctgattatgatgccccaactcagctggtcaagcctctagagagaaacaataggtatgtggatgctgttatgactatcccaaaggggaccctctttcccatgtgtggtatgaatttggcattcaaccgggaactaattggtcctgcaatgtactttggactcatgggtgatggtcaacctattggacgttatgatgacatgtgggctggttggtgcgtcaaggtgataagtgatcatctaggattgggggtgaagacaggattgccttacatctggcacagcaaagccagcaacccatttgtaaacctaaagaaggagtacaaaggaatttactggcaagaagagctgatcccatttttccaatctgtttctcttccaaaggaatgcacgactgctcagaaatgttacattgaactctccaagcaagtgaaggcaaaacttggcaaggttgatgagtatttcaacaagcttgcagatgctatggtgacatggattgaagcttgggatgaactaaacccatctgggccaaaatctgaagcattgcccaatggttcagcaaagtaaattcttcatacatgtggctctaaggagggcagaggatatgcctatagctatcattttacctttttcagtttttcttttcatagaacaataaaagttgagtgactccttaatattttttatattttgttcaggttggaatgtagcaatattatttaactttgaaatttgatagtgagattgttgcttttgg

SEQ ID NO: 10185 - DNA, 836 bp, Glycine max
  Clone ID: 700897812_FLI
atggccccaaatttccaacgaagcacaacatcaggatggcaatgtattggcttgcacaaggatgtcaacctggagactccctggtttttcattattctggtcatggatcacagcaaaggaactatagtggtgatgaagctgatggatatgatgaaactctatgtccccttgattttgaaacacagggtatgattgtagatgatgagatcaatgccgcacttgttagacctattcctcatggagctaagctacatgcactaattgatgcctgccatagtggcactgttctagatttgccatttctttgcagaatgaacaggagtgggcaatatgtatgggaggaccatcgccctagatccggtgtatggaagggatctagtggtggagaagttatctgcttcagtggatgcgacgatcatcaaacttcagctgatacatctgctctatcaaaaattacatcgactggggcaatgacattttgcttcatccaagccatagagcgtggccatggggctacctatggcagcattcttactgcaatgcgcacttccatcagaaatgttggcggcggcggcggcggtaccgggggtggtgatgtggtaacatcccttctctccatgcttttgactggagggagtctcagcggtgtcggtggactgggacaggaaccacagttaacagcttgcgaagcatttgatgtgcatagaaaacctttttcattatgatactcaatattctttattctgcaatttgttttcctaggctctgcccctgtatacgactacattgattacaatgattaatatattataaagtagagaggattcttttttcgt

SEQ ID NO: 10186 - DNA, 464 bp, Glycine max
  Clone ID: 700898068_FLI
cagagattgcagagagattggggaagacaccagcacaagttgcccttcgatggggcttgcaagcaggtcatagtgtgcttcctaagagcactaatgagtccagaatcaagggaaattttgatatctttgactggtctattcctcaagatttgatgaccaagatctctgaaattaagcaggaaaggctagttaaggccagtttttttgttcacgagacctatggtgcctataggagcattgaagacttctgggatggtgaactctgagcaatatgcatctttgagacgttgaaaaatacattgctcctagagcaaatttattctgccttatacccactagttgtagtgattcaagtgagattttgagaagtgttactattgatggtaacaccgaataagtagccaagagttatttttcatttaatgattgtatcttttattcaatataataaagtgagttgagtg

SEQ ID NO: 10187 - DNA, 635 bp, Glycine max
  Clone ID: 700898106_FLI
aatatagcccaagccctatacaaccaaaccctaacacacacccatttgattcagtttccatggctagcctcaaggttgcatttttggctgcagtgctctgcatggttgtggtgagtgcacccatggcacatgcagctatcacgtgcgggcaggtgacgaatagcctgatcaattgcatcggttacctccagaacggaggaacgccgccgtcgggatgctgcaacggagtgaagagcctcaatgccgccgccaagaccaccgccgaccgccagacggcgtgcaactgcctcaagtcggccgccagccaaatctccggcttcaaagccaacaacgccgcctcgctccccggcaaatgcggagtctccatcccctacaagatcagcacctccaccaactgcgctaccatcaaggtttgaagagaaagtcatggacgcaggaaaccggaaactactcactagtatatgagtagcattattaatattaagaataagatcgagggtgatgagggctccacttatatgcccctctcctcttgtatgagagatttgtattggatagctttaaattgtgttgcgttgttatttctctgtatgagttacacatagttatatctactttaatattgggttctccct

SEQ ID NO: 10188 - DNA, 804 bp, Glycine max
  Clone ID: 700898156_FLI
ggtccccggtggtttctcggagcagcattgacgatggaatgctttccttcacttccctgccggctgcaaatataaaatcagttaacggtgcttgtgtcggtgccggtgattcggatcactcggatctggaagctgaaccaaagattctatgctctacgagctgtagttccaaatgtatccaagatggacaaggcatcgctgttgggggacgccatattgtacattaacgagttgaaatcgaagctcaacgtgctggattcagagaaaacggaattggagaagcaattggattcaaccaagaaggaactcgagctcgcaactaaaaaccctcctccaccgccaccgccgccaccaccaccaggaccgcctccatctaatagcgtagaaccaaagaagacaacaagcaagctcgctgatttggagttagaggtgaagatcattggttgggatgcaatggtaagaatccaatgcagcaagaagaaccaccctgcagccaggttgatggcagcattgaaagatcttgacttggaagtgcatcacgccagcgtgtctgtggtgaatgatttgatgatccaacaagccacggtgaacatgggaaacaagttttacacgcaggaacagcttctgtcggcactatcatccaaagttggcgatgaactacgatagttccttctgtactattattggtagcagtagctgtagctttctatgtaaattagtgttcttatttttggttagtcctttttggtagcttggactaaattaattttattgaggtaatttgatttgggaagctgaatgatc

SEQ ID NO: 10189 - DNA, 1063 bp, Glycine max
  Clone ID: 700898255_FLI
gttttagagaactgtgaacttccatgtgcaaatcatggccacgtcatactgggagacccttcgccaatcttattctaccctataagcagtacagagattcgctgtctggtcgatgtacctggacagaaggttccttctatttcaaacggtgaaatgggaaagtacttgaagacaacggtggctccacagattcccccccagctttatgatgccttcattgctgctgttgacaaaggcaacataaggacaatgccaaacagaagcatgccggcagatcctcatcctacacctggagcccttttgatgggagatgcattcaacatgcggcatccactaaccgggggcggaatgacggttgcattgtctgatattgtggtgctgagaaatcttctaaggcccttgtctgacctgaatgatgcacccacactctgcaaataccttgaatccttttataccttgcgtaagcctgtagcatccaccataaatacattggcaggtgctctttacaaagttttttgtgcatcccctgatcaggcaaggaaggaaatgcggcaagcttgttttgattatctcagccttggaggcctattctcggaaggaccagtctctttactctctggattaaatcctcgtcccttgagcttggttctccatttctttgctgttgcaatatacggtgttggccgtttattgttaccatttccttcacctaagagagtatggattggagcccggctaatctctggtgcatctgcaatcatcctccccataattaaggctgaagggattcgtcagatgtttttccctgccactgttccagcttattacagaacacctccagttgcacaatagtgagtatatgtgaaattagtgaatatattttgaaaaatttaaggtgctgtcgataacatatggtagcttatcctgctttttgtcagaattgagggaaggttcagttcgtagttctgtaagcattttggcttctttattgtgtattctttgtagtctgtaactcaatgttataagtgaatgtatgatctctctttcctttttggtacaccag

SEQ ID NO: 10190 - DNA, 914 bp, Glycine max
  Clone ID: 700898257_FLI
gacgattctcttcacaggtacaaagtctttataaatcccagcattagcgatgtgctatgcacagctacagctgaggcacttgccatgggcaaatttgtagtttgtgctgatcatccatcaaatgagttcttcaggtcatttcccaactgtttgacttacaggacatccgaagactttgtgacaaaagtaaaagaagctttagaaaatgagccttatcctctaacacctgagcaaagatatcaactttcttgggaggctgctactcaaagatttatggaatattcggagcttgacggaatcctgaacaaggaaaataatggcgaaaagtcaagggtagataaggggaagctcattgctaagtcagcatcaatgcctaatctgacagaactagtagatggaggcttagcatttgctcactattgtctcactgggaatgaatttctgagattatgtacaggagcaatacctgggacacgtgactacgataagcagcactgtaaagaccttcatctcttgcctccacaggtagaaaatcctatctatggctggtgaatggattgactagtttgaatgtttgaaggaaaacttgtcacaccagattatgacaagcagtactgtaaagccatcatctaaatgcctttaggtagaaaaatttatggatagctggtgaatagatttagtggtttgagtttgtagtttgttttacagttgcttgtgttaggtgcctgctaagttttcaatccttaaattttgtagttctttttgtttttgtaagtgatgtagttcaatatttaccaaaacacgtgtagaaagctaatgtctaatgtaaagtaactgaacgttctcccacgtaacttgtgagaataagctgtaatgaatttgcatcggtttaacatgaaataaattgttcggtt

SEQ ID NO: 10191 - DNA, 572 bp, Glycine max
  Clone ID: 700898266_FLI
tctctcctttcctctcagactcattggtagtacgaacaagaagtaaccatgtcccgtcatcgacgccaaccctcccaagcccttccgccggacctcttcgccgccgccgacctcactaagccctttgacttcacacaaatcatcaccgaagaaaccggaaccgccgctgccgcccaagcctcacgcattcagacccaccaagagatcaaagactctcctctcgccgccacttctccggcgaagaacaaggcgccgctggcaaccaaatcggcttgaactaccgtatgcatcatgagtctgctcctgcctcctgctgctgcattttatgtctgtcattttctgtttttcttttttcttttcttttcttctttctttttgtttgaaataaaaatgttaagatgacagcagagaaaagctcaaggcattgtaacatggttttcttcttcttcttcttctgtgtttgagaaacttcctttttgttagagcttggaatgtgaggttttgttgtgatttgctgaccctgcctgattctattggaagtttctatcaagaatatttttatttatttattt

SEQ ID NO: 10192 - DNA, 714 bp, Glycine max
  Clone ID: 700898293_FLI
cacagcgctcttcctatggctgagtctccgcgttgacgaaccaaaatgctacctcgactacatttacgttcctgccctcaacaaaaccctaaattccaattccactcacaacaaaaacaccacaatactcttcgctctcaagctcaccaacgggaacaaggacaaaggcatccaatacgacgacgttctcctctccttcagagtcttcgagagcgtcaacctcacgcgcccactcggcaacgccaccgtgcaaaggttctaccagggccaccagaagaaggccaccaagcacggaaacttcagcggcggcggcggaaacctcaccgcggcggtggctgggagaatgtggtaccgtgtggactatgctactgcggtgaagtacaagattctcttctggtacacgaaacggcaccgtttatggggaggggcaaatgtggaaattggcgattcgggaatgaaggtgtatcgtaaagccgttaggcttggagggaagaaccccgtggtgatcgagtccggcgcatctaagctcagtggacgctatcgtgcgcttcttctttcccttcttctccctttttgtggcttgtgggtttagttgacttgactttttcacttcacccacttttgtgtgtattgttattattttatttttgtaatttgtattgtgacttttctttttgtctagttccaattcaaagattagagatgattatattc

SEQ ID NO: 10193 - DNA, 862 bp, Glycine max
  Clone ID: 700898308_FLI
ccgccatcgatctcgccatcgacggcgccgacgaggtcgaccccttcctcaacctcgtcaagggccgtggcggctccctcctccgagaaaaaatggtcgaaggcgcatgcaagaagttcatcgtcatcgttgatgagtccaagctcgtaaactatttggggggtagtgggttggccatgcccgttgaggttattaagttctgttggaggttcaccgcggcgaggttgcagaagctttttgaggaggctgggtgcgttgccaggctcagaacttttggggagaaggagaaggaggagccttatgtgacggataatgggaactttattgtggatttgtatttcgagaggagtattggggatttgaaggctgctagtgatgctattttgcagcttgctggggttgtggagcatggcatgtttcttgatatggctaccactgttattgttgcaggggagctcgggttgacggtcaagaacaagtagttgttgttggtggttaggagaatgaaggtaggttaattggccaaggttgacatggggtttctaagttctatctaacccatttgtatggtgtagtagtaaaaaaggttttaatccaggggtaaagggggattttgattaaatccttttgttattcaatacagttgttggagaaagtttataagttctccggtagttttgttttgtttttttttaggggcggggggatttagtttgagcaagcagaaagcaaaatggagagatgagtattaatctcatgcaatgactgttgtgtggcgttgaatcggttgtccgcacaatttgttgttcatttgacagacagtgtttaacatattgaatctatctatctaattcaatttttc

SEQ ID NO: 10194 - DNA, 756 bp, Glycine max
  Clone ID: 700898322_FLI
aattctgtgattcgggtaatggccaccagtggaggcgatgaggggcagaacaaccctgccctcgacccggatttggatgctccggatgacccggatcacgagttcgctgagttcgggtcgggttgcttctggggtgctgagttggcctttcagcgagttgtgggtgtggtgaagactgaggttggttacactcagggtcacactccggatccgaattacaaactggtttgcaccggaaccactaaccacgttgaagtggttcgggtccagttcgacccgaaggtttgcccctacaatgatctactcgctctcttttggtctcggcatgaccccacttccatcaaccgtcagggcaatgatgtgggtgcacagtatagatcaggaatatactactacaacgatacccaagctcgtttaggccaggaatcaaaagatgcaaaacaattggaactgaaggagaagattgtgacagaaatacttccagcaaagaggttttacaaagcagaggaataccatcaacaatatctggagaagggtggaggtcaaggcaacaaacaatccgcagaaaaaggctgcactgatcccatcaggtgctatggctgatgaatgatgatcactttcttgctgcacacttcaccatgtctggcttctatcagccatctgttgtgtactccaatataataatattatcaaaaataaaataagtcatggtgtatcttcagagtgctcatattgcaatctggactttagttgatc

SEQ ID NO: 10195 - DNA, 738 bp, Glycine max
  Clone ID: 700898383_FLI
ttagtcatcttcttctttcatctttctccctaacggtatcgagggaaaaatatggcggaagaacacagatgccaggcaccgcgcttctgcgccaacaattgcggtttctttggcagccctgccacgcagaatatgtgctccaagtgctaccgcgatttccagctcaaggagcagcaatcttccaacgccaagatggttctcaatcagtcgctggttccttcaccgccaccggcggtgatttctcagccgtcgtcttcttcttcggccgcggtagatccgtcatcggcggtggttgatgacgcgccacgcgaggcggaggaggttaaggcgccgcagcagaaccggtgtatgacgtgcaggcggcgcgtggggctcacagggttcaagtgtcggtgcgggatgatgctgtgcgggacccaccgttacccggagcagcacgcgtgcgagttcgacttcaaggggatggggagagagcagatcgcgaaggcgaatccggtggtgaagggcgagaagctcgacaagatctgaaacgaatgaacgaagggtgttatggtaatttcgtgtttatcaagttggtggtgatggataacggatgcgaaacgcgggtcggatcattgacccgtaaaaggcggtgggtgagtgggtgagtttggtgggtcattgttatgtggttgcgttgtcattgtaaattaaaaaatttgaaaaacatttcaattgtcattcaccttctttctggtt

SEQ ID NO: 10196 - DNA, 775 bp, Glycine max
  Clone ID: 700898536_FLI
gtggcagccaaatcttgtaagttatgagatgcaagcttctggcaaagtcagaagtcctgtgagaccaaaagcacatttgtcatgtggacctggacaaaaaatatcatcaatcaagtttgctagctttggcactccagtagggtcttgtggaagctaccgcgaaggaagttgtcatgctcacaagtcatatgatgctttcctaaagaattgtgttggccagagctggtgcacagtgacagtgtctcctgaaatttttggaggagatccttgtccaagagtcatgaagaaactctctgtggaggccatttgcacctgatcattttcaacatctgaaaataagtggaataaagtttccatattgatttattctgcaattgaatacatggtgttttgggtcagctaagtttacacttgtagaccaccactggcattaatttggctttaccaaggtgaaattgcaaatgaatacacaccatgtggttgaaagcctgctgggatgattgttgtggttttatgtgtatatatattggtgttgtggttgttatactgaagtggaggagagggtgaaaaagttacctgatgcacattgagacgacatcgattgagtccatgtgcaaaattggtttttgtttgtgtggaagtctctagcttcctgtgatgtaatgttataatattaccttgtagttgtaaggagaaagcaatttggcgctttcttataagaaaacaacccaatgtaataacataaggtatattaattcaatcatgttttgctttt

SEQ ID NO: 10197 - DNA, 869 bp, Glycine max
  Clone ID: 700898558_FLI
gttcgccgaagagaatggcctcaagggagaccccagactccaagccatttcccaagccatcagagtcgtccctcacttccccaaacatggaataatgttccaagacataacgacattgctgttggatcacaaggcgtttaaagacaccgtcgacatttttgtcgatcgttacagagacatgcacatttccgtagttgctggaattgaggcaagggggttcatgtttggtccctcaattgcgttgggcattggtgcaaagtttgttcctttacgcaaaccacggaagctgccaggtgaagtaatttcagaaaaatatgctctagaatatggaactgattgcttggagttgcatgttggtgctgcccagcccggtgaacgggccataataattgatgacttggtggccacaggtggaactctgtcagcaggagtaaaacttctagaacgtgttggggctgaagtggtggaatgtgcttgtgtcattggtgtgcctgatgtcaaggggcagtgcaggagtattggaaagccactttatgttcttgttgagccacgtaaagcagataaatgtcaagctcaagcagataaatgttactgagatgtgatgttggttcgatcttgaactgacatacaaaaaggacgcttagtgtgagaaacacaggccataatgtgatccttaagttttcggctgatggagagttgtgttcatggcaattgccaaatatcatcctgggaaatgttcccccttttcatatctttttatctttgtacatgttagccatcatgttatgtggccagcagtttagaacaataacaatcattaaagaagggatggattttatggcattttataaaatgtcaatttaaggtcc

SEQ ID NO: 10198 - DNA, 894 bp, Glycine max
  Clone ID: 700898569_FLI
ggttgcctcaatccaatatcgagcattggcagaaaaggcatcagatgcttactacaaactcaccaataccaaagcacagatacaatcctatgtctttgatgttatcagagctactgttccaaagatggaacttgatgctgtttttgagcagaagaacacaattgcaaaagcagtggacgaagaacttgggaaggtatttcctttcattttatttttaaattaagaatggagaactatgtaatctgtttggttttactttctaggctatgtcagcatatgggtacgagatagttcagactcttattgtggatattgtgccggatgagcatgtgaagaaagccatgaatgagattaatgctgctgcaagattgagggtggctacaaacgacaaagctgaagcagagaaaataatgcagataaagcgagcagaaggggatgcagaatcaaagtacctagcaggccttggagtttctcgtcagcgccaagccatagttgatgggctaagagacagtgttctagcattttctggtaatgtgcctggaacatcatcaaaggatatcatggacatggttctcatgactcaatattttgacacaatgaaggagattggtgcatcctccaaatccaatgctgttttcattccacatggacctggtgctgtgagtgatgttgcttcacaagtaaggaatggtcttctccaaggaaatgcaacaacagagtcttgaagacatacacatatatcatcataccatgatttcctcctccaggcacttgtagtttagctttgcaactaaatctttatatatgctactattatgaatcatccatggcaagttggcaactaatgccttctatatgtatatggtcttcctaatcaaccatggcaactttctt

SEQ ID NO: 10199 - DNA, 836 bp, Glycine max
  Clone ID: 700898616_FLI
gtcctcatcaaatctaagcaaccgcaaaccctccttgaaaaacatcacaatcccttccataacctctggtcttgcaacagctatgtcacaaacaacagcaacaacaacaacaatagctacaaccatgtataacaacaaccaagtttcttcttcttctttttcttcagatgaaaccaacaataccaaagacgacaagcactatagaggggttagaagaaggccatgggggaagtatgctgcagaaatccgtgaccctaatagaaaaggctcaagggtgtggcttggaacctttgacacagccatagaagctgctaaggcttatgacaaagctgctttcaagatgagagggagcaaagccatattgaacttccctttggagattggatcagatcagtctaaagaagagtcatcatcatcatcatcatcagtttcaagcagcagcatcgtcatcaaggttggtgtgaagagagaaagagaggaagagagtgaaaggaagaacaactatgagaaaagtgagtttaacaacaatagtaatagtaataagcatgtgaagaaagaagagtgccctttgactccatcatgttggaaaggcttttgggacactgatgttatgggaacaatctttagtgtgcctcctttgtcaccactatctccactaatggttgtttgagattttgtggaacttttgctctttcaatgatgttttgaggtaaccaaactaaggggagagagagagatgatgctggtgattgtcctctctgatttaggttgctaatttgcctaaatcaaaatggtagtactaattaatctactaatagattaatttgcaagtgaat

SEQ ID NO: 10200 - DNA, 596 bp, Glycine max
  Clone ID: 700898650_FLI
ggttttcactttggccgaggtctctcagcacaacaatgccaaagactgttggcttgtcattcatggcaaggtttataatgtaacaaagtttttggaagatcaccctggtggggatgaggtcctgttgtcttccacagggaaagatgcaaccaatgattttgaggatattggtcacagcaccagtgccgtagccatgatggatgagttctatgttggagacattgatacatcaaccatccccagcaaggttaagtacactcctccaaaacaacctcactataaccaggacaagactccggagttcatcataaggatcctccagtttctagttccgttgtttatcttgggtttggcagttggcattcgtttctacaccaaatcaacatgatcatttaactgctagagcacatgaatactggcatttgcaataatatgttggtgttgaaaaccgccccccccccctgcattttgttttatcctatttgtgctgcaatgatgaggggttgctaggatatgccatatgcattgtgcttgtttccattttcggtgtaatttgctttaaatatcagattgcctttctctgtcattgatttgct

SEQ ID NO: 10201 - DNA, 951 bp, Glycine max
  Clone ID: 700898664_FLI
gagatatccagaatataaggaaagagatttctatattgctggggaaagctatgctgggcattatgtgcctcaatttgcacataccattctctatcataacaaaaaggcaaataagaaaatcatcaatctaaaaggaatcttgattgggaatgcagtgatcaacgaggaaactgactcggacggactgtatgattatcttgccagccatgcaatcatctcagacaaagcagcttatctcaacaaagcttgtgattcatcatcatcaaagattcaggaaagtgtgtgcgatgcagccggagatgaacttggggaggatattgaatacattgatttatacaatatttatgctccactatgcaagaatgcaaatctcacagccctgcccaaaaggaacacaattgtgactgatccatgtagtgagaattatgtgtacgcatatcttaatagaaaagatgttcaagaggctctccatgccaatgtaaccaacctcaaacatgactgggaaccctgcagcgatgtcataacaaagtgggttgatcaagcttcaacagttcttccacttttacatgaattcctcaacaatagcctcagggtttggattttcagtggtgacacagatggaagggtgcctattacatcaaccaagtattcagttaagaagatgaaccttcccattaaatctgtttggcacccttggttttcctatggagaggttggtggctatgtagaagtatacaagggaggcctaacattagctacggtgagggaagcagggcatcaagtgccaagttaccaaccagccagagccctaactttgatcaaatatttcttagacggcactcctcttcccggtcctcccaaaagaaaggactaggactagtttcttcaaatccacttttcaataattgttgtggtaattattaatttaaggaaaataaatacaattatatt

SEQ ID NO: 10202 - DNA, 384 bp, Glycine max
  Clone ID: 700898745_FLI
attttccatttcttcaagcgggtcaaagacccgattgggctacccttatgtgtgccatttgcttcagcgacccaccgagcctccccgagaccgcatcgccggagtttcacgattttgtcgagtgctgcctcaagaaggagtccggggagaggtggacggcggctcagctcttgacccacccgtttgtgtgcaaagacccggaaacctgttaagtgggttgacccgttttttttttacttggatcgggtgtatatgacattagtttatcttggaataacctttttgagtaggtgtatattccccctgatgcaaaccttttcaattttaggagaatcattccctttgtaaattatgttcagcaatgataaaaaggaatttggaatt

SEQ ID NO: 10203 - DNA, 967 bp, Glycine max
  Clone ID: 700899120_FLI
cggtttcatcactcatcaaaccctcaatctccggagccaactcctccacgtgttgaatccatgcccgctcccaccgttccagaaccaccgcttttccaagtaaaagccgttctcgaagtggagaagaaagtaatcgaagaagatgttgtggcactaaagagaaaagactcgacggagattccatcgccggaggagaagccactggtgtctgctaggttcactcaccggaaattccttaaatccagttcagaaggtgggagagcgttgagagtggtggctaaggcaaaacgggacgagacgttggagagcacgtggaaggccataacggagggtcgatcaatgccattgagcaggcacatgaagaagtccgacatgtggcacaaccgcaacgtgaccccacaaccccaagagacattcaacgatgcactgagtgtgtcgtccgggaggctgcggaaagaaccctcgctgagtcaagacgagttgaatcgtcgcgtcgaagccttcatacaaaagttcaaccaagagatgaggctgcaaagacaacaatccttagaacagtacatgcagatgattaaccgcggtgccgcttaatctcaacctcaacataatcaatattttcattttacagaacaaaaaaacatatatagtgtaagtatttctgcaggtgtagacagtaggggtatttattttattgccatatattagtttatggttgggttaggctcatcatcattatttctttaatttgtttgttttgtgcctttatatgctccacataccaaaaatgtggttcatgttcaatatcaattagctagctagctagaaaacaaacacaccaaaaaaacacttcggggaacttaggattaatgttgttcctctttgtaatttttcggggtcattttttttagtcaaacctctttctctgtaattaataccatgaatgtaagcctgtaacgtttagtttgct

SEQ ID NO: 10204 - DNA, 1052 bp, Glycine max
  Clone ID: 700899141_FLI
caagaatggcacttcgttgcttggtgatgtccctttctgttctcttcactcttggtcttgcgagagaaagccatgccagagacgaagatttttggcatgctgtttggccaaacactcccattccaagttcattgcgagatcttctaaagcctggccctgcaagtgttgaaatcgatgatcaccctatgcaaattgaagaaacacagtacccgaaaaccttcttctataaagaagaccttcatccaggcaaaacaatgaaagtacaattcagcaagcctccctttcaacaaccatggggtgttggtacatggttaaaggaaattaaagacactactaaagaaggatatagttttgaagagctatgcatcaagaaagaagccattgagggagaagagaagttttgtgcaaaatccttgggaacagtaattggttttgccatttcaaagctgggaaagaacattcaagtactttcaagttcctttgtcaataagcaagaccaatacactgtggaaggagtgcagaatcttggagacaaagcagtgatgtgtcataggctaaatttcagaactgcagtattttactgccatgaagtccgtgaaacaacagctttcatggttccattggtggctggtgatggaaccaaaactcaggcacttgctatttgccactcaaatacttctggaatgaatcatcaaatgcttcatcaacttatgggagttgatcctggaactaaccctgtttgccatttccttggaagcaaggccattttatgggtacccaatttatctgtggacactgcctatcagaccaacattgttgcttaattagtccatgcatcttgagcaccatgagaatgagattgtgtataaaataaattatcatgtgctgtgtgttgtgcaagtactaccttctctagctagattgctagagctagaatttcaacctacctatgtgtactgataagatctgcttccctacttaaagagagcatcatcctgtgatcagtgtgcttcgtattctctctctctatatatatatggtaaaaagtggtt

SEQ ID NO: 10205 - DNA, 718 bp, Glycine max
  Clone ID: 700899163_FLI
caaaaacagagtgctctgagaaaggtagcgttttttttgtggttgtttttttctcaattctcaaccatggagaagcagaagacagtgatgggcttgattctgttgctgctgttatttgcttcggatgtgagtgcttggactggtgaaatccatggaagagttgtttgtgatgtttgtggggattcttctctcggacctgaagaccatgttctcgaaggtgctgaggttgctgttctttgcatcaccaaatctggggaggttctaaattatcaggcattcactgatgctaaggggatatacacagtggccgagacaatgccggagagtgatcgttgggatgcatgtcttgcccgaccaatcagtagtttccatgagcaatgcactcaacttggtgaaggcagcattggggttaaattcagttacaatcatccatcaggacattcacacactgtcaggacctttgtttatcgacccaccagtgttccaacttactgcatttgatatatactaatgagtatatgaatctgagagtgtctatgcttgattgaactagtgcaaaactaatgagtatatgagcatattttatttatactatatgtatgtgtagtggtgttccggtatgtatttctatagagcttagtcaaagtaagcatgagacgtttaagtaactgtaaatggcaatattatagagagcaatgcaaaatcattgtcattgagc

SEQ ID NO: 10206 - DNA, 1300 bp, Glycine max
  Clone ID: 700899221_FLI
ataagatataaggcaatagtaatattagtattgttgataataattaggtagaaaaaatattatggggaggggaagagtggaactgaaaaggatagagaacaagataaacaggcaggtaacgtttgcaaagaggagaaatgggcttctcaagaaagcctatgagctttctgttctctgtgatgctgaggttgccctcatcatcttctccacccgtggcaagctttatgaattctgcagcaccaacagcatgctcaaaacacttgaaaggtaccaaaagtgcagctatggtgcagtggaagtcagcaaacctggcaaagagcttgagagcagctaccgtgagtacttgaagctgaaagcaagatttgaatctcttcaaaggacccaaaggaaccttcttggtgaagacttgggcccattaaataccaaagatcttgagcagcttgagcgccaactggattcatctcttaagcaagtgaggtcaacaaagactcagttcatgctggaccagttagctgatcttcagaataaggagcatatgttggtggaagcaaacagatctttgaccatgaagctggaagaaatcaattcaagaaaccagtataggcaaacatgggaagctggtgagcaaagtatgccatatggaacccaaaatgctcactctcaaggcttcttccagcctttggagtgcaaccccacattgcagataggttctgactacaggtacatccctgaagcctcgagcagcagctagctgccacaactcaagctcaacaagtcaatggatttattcctggatggatgctttgacctaagatctcagtattttagatggctacataaataaaattagcaaacacctaaggccaaagtcaaaatgcctcttgctgttggaaatgtgtaaatgctgcttgttcttctgttaatttgttttggcataaaaacagcagtgactgacttaaaactattaaaactttagccatagacataggatgtggcatgaaggttatagtatttaatttgaatattttggaaggacaagttttatctgactgaatgaccagttagtgtcattttttatttgcaatctctttctaatctggctgcattaagagttgtttttaaacttcttgcattcattagtggagcattgtacaatgatatatatgacaatattgtaaagtatactgaggctatggaaatgccacttgaatttattttcaagggtgaactacgaagagaaaaccttgataagattatagatatattaggaagacagtcttaacccccaccccacccccac

SEQ ID NO: 10207 - DNA, 1543 bp, Glycine max
  Clone ID: 700899224_FLI
ctctttgggaatcaaatccgaagcatgatgcattgtgcgagcattgtctcggctccgtcctacgcgttcccttttctctctggctccgcttccactactccaactgcgatctcgctcactaagcgcagttggaagccacctccgagcatggcaaaaggcccagtcagagccaccgtttctatagagaaagagaccccggaggccaatcgtcccgaaacgtttctcagaggagtggacgaggcccagtcttccacttcggttcgggcccgcttcgagaagatgataagggaggcccaggacaccgtgtgcagtgccctcgaggccgctgatggtggggcccagttcaaggaggacgtttggtccaggcccggtggcggcggtggcattagcagggtccttcaagacggtgccgtttgggagaaggctggggttaatgtctctgttgtttacggtgtcatgccacctgacgcatatcgtgctgccaagggtgttcctaccgatcaaaaacctggtcctgtgcctttcttcgctgctggaatcagctccgttttacacccaaagaacccgtttgcccctaccctacatttcaactatcgctattttgaaaccgatgctcctaaagatgctcctggagcacctagacaatggtggtttggtgggggaactgacttgacaccagcttacatttttgaggaggatgttaagcacttccattcaattcaaaaacaagcctgtgacaagtttgaacctactttttacccccgattcaagaaatggtgtgatgattacttttatatcaagcatcgaggtgaaaggagagggcttggaggaatattttttgatgatcttaatgactatgatcaggagatgctcctttcctttgctactgaatgtgcaaattctgttattcctgcttatttacctatcatagagaaaaggaaggatttgcccttcaatgatcatcagaaagcatggcaacaattgcgaaggggacgatatgttgaattcaatttggtatatgataggggtacaacatttggactgaaaactggagggagaatagagagtatacttgtttctctcccactgactgctcggtgggaatacgatcataaaccggaagaaggaagcgaagaatggaaactcttggacgcatgcatcaaccccaaggaatggatctaattcatcagttgaccccccaatttgtcagcttttttaatttaataataagggagcttgtttcttttttcggtgtatatcaagtgcttgttatgatgagtcagaatgttagcttgttgtactaggtggattgtaaatcacgtattttgctagagtcatccgcgtaaagcgtgaaaatgcagaaaattacaaatgtctaggctgcgtctgtagtatacctactgccaaccattgttctttctacaagtaactcctcaatcccatgtaagaaaacaaaaggcagcttctttaatgccagtattgcacaacacctcagactagtaaattggtaattctgttgaaggtgatataatacttttgactg

SEQ ID NO: 10208 - DNA, 1011 bp, Glycine max
  Clone ID: 700899263_FLI
gaaatatcaaaactttgaaacaaaaacctctcatgctaagaggtctcctgctcatgctcaagatcacatcatggctgagagaaagcgaagagagaaactcagccagagcttcattgctcttgcagcccttgttcctggcctaaagaagatggacaaggcttctgtgttaggggacgctatcgaatatgtgaaagagcttaaagagcggttgacagttcttgaagagcagagcaagaaaacaagggcagaatcgatagtggttctgaacaagccagacctctctggtgataatgattcttcttcatgtgacgagagcattgatgctgatagtgtcagtgactcactgtttgaagtggaatcaagagtatcagggaaggagatgctgctcaagatccactgccagaagcaaaggggacttttggtcaagttactggctgagattcaaagtaatcacttatttgttgctaatagcagtgtcctaccctttggtaattctatccttgacattaccattgttgctcagatgggagaaagttacaatttgaccactaaggaacttgccaagaatctacgcgtggctgcattgaagatattgtcataacatgaacgtggcttgagtatggagaataccctcatggcatatggcatggatattgaaactctgaatcacatttaatgccccagccaccgagtaaatcacacccaaaatggaagccttgttattaatgtgtgatttctgctacaacctgcagtgttccccaatatgtagattcagcttgaccccaaatgatcttgtcttcttcgtgttatgttttggtttctgaggccttcagtgtgtgcctgctagagagggaaaaataattgaataattttgtagagatattaggaataatttcaatctgacatgtcttaattaagattttaattgagttgattaaacagaatggatgagttgtttaatttctatgaataaaaaaaatctgacacggcttaattaacattagcttaaac

SEQ ID NO: 10209 - DNA, 652 bp, Glycine max
  Clone ID: 700899294_FLI
cgattatgggagcaattgaaagatcaaggctttcaattgtagtgttctctgaaaactatgggtattccacgtggtgtcttgatgaactttccaagatcattgagtgcgtgaaaaccaggaatcaaatggtttggccaatattttacaatgtggaaaagtccgatgtatgcaatgaaacaaaaagttatggtgatgccatgactgcccaggagaaaagatttggaaaggactctgggaaggtgcataaatggaggtctgctttgtctgaaatcgccaacttggaaggagagcatctcagggaaaatcagtaccaatatgaatttatcgaaaggattgtggaaaaggccattaatataccaagtccttgctccaatgacagctacgaggaagagtcaagagtgtcaaaatgcacgcattgggagattgggagctgtgtagtcagctgatagtgacatcagcaagcagccttgaatttatgtgtgcttaacgatgttgttactatatccagttcaattctcaaggtttattatgttccttttacatcttgtgtaattcttgaggtctcgtgtttttctttttttttggtgtgtaccaaggtccaaggattatgtctgagattaacatctcccttttaatactactactctccctc

SEQ ID NO: 10210 - DNA, 986 bp, Glycine max
  Clone ID: 700899315_FLI
gctggctcttcttatggaaacgaagagtttgtgagcatggcagaaatcatggaggcagaagatcatgaccgggacagagttcatatagtgtttggtttgtcgaatgagctctctgttccaggtttgaaggtgggtgttatctactcttataatgacaatgtcgtggctgcttctagcaaattggcaaggttctccactgtttctgccccaacccaaagattgctcatctccatgctttcagatacaagttttgtgcaaaaatttattgaggttaacaggttgaggctgcggaaaatgtataatacatttgttgcggggctgaagcagttggggattgagtgcactaggagcagtggtggtttttgctgctgggctgacatgagcaggttgattggctcttacagtgaaaagggagagcttgagctctgggatagattgttgaatgttgctaagatcaatgttaccccgggttcctcttgtcactgtattgaacctggatggtttcgtttttgctttgctacatccactgaaaaggatgtttctgtagtaatggaacggattcggagaactgttgatgccacaaatggacatggttgatgtgggtggggtcaattagttatgcaaatttagttggtttattgattctttattcttttggagaagccagcatcatcctaggaggaataatcaatcaccaaggggtagttggatgacatggacatggtgttatgcaatggagtggcttcaaaatgattggtggtgaattttaattttaaaacctacgcatcaagacttaaaattttcaatgtgtagtcggaacctggtagatgatttctactttcttcaaattagtactgaaatggcttcaggtgcaatcatttgaaaaacagtgaaatactaatgacctgaagaagaggtggcaccactgatgctatcaagttaagcctgcttacaatgagaaaagtgtatgaaaagaaaggaaatat

SEQ ID NO: 10211 - DNA, 481 bp, Glycine max
  Clone ID: 700899352_FLI
tttgtattccaacttcatttttttaatttttacattatgtaggaatggcgcaaatgtgaagggatattatgtatggtctttgttcgacaattttgaatggtcttcaggttatacatcacgttttgggatgatcttcgtggattacaaaaatggtttgaagagataccaaaagctttcagcgcaatggttcaagaattttctcaagaaagaaagaagactttatagctctagtaaataatatgaaattcgtttattcattggttttgtaaataattatttggtttttctttgatattcttttattctaaagaggtcctaatttgacttagagggtattgattattcttttattctaaagaggtcccattggactgagaggtgaaacaaagatgtgtatcggttgattatagcttctatatattgttattgttatgataagaatgaaagaaacttttggttatgataaagtgatatcatttac

SEQ ID NO: 10212 - DNA, 630 bp, Glycine max
  Clone ID: 700899371_FLI
gttgctcttcgtgagattaggaaataccagaagagcactgagctcctaatcaggaagcttcctttccagaggttggttcgtgaaattgcccaggatttcaagactgatctgcgtttccagagccatgctgtgcttgcattgcaagaggctgctgaggcataccttgttgggctctttgaggacactaacttgtgtgccattcacgccaagcgtgtgactattatgcccaaggatattcagctggcaagaaggattcgtggtgagcgtgcttgagttggtgcgttctgtgtttgtgaagatggattgttggtggctgcggatggtgttttgttactaagttttctttttgttgaagcctataggttattagggaaaaataggtgtttacttggtagtcatattaattgtcattggcaaatactgcctaagacactgtgaaggtctggttgttagaaatttggcatgtatttgatttttttggatcctttatttctcgttttatttctggttgtgcagccactttgggaattgtattggacaactttctgttgccatctaatctagttgaagctagcttatcgtgtctgtttgttctgattttgaatttccatccttaatgttatttctcgc

SEQ ID NO: 10213 - DNA, 642 bp, Glycine max
  Clone ID: 700899387_FLI
gtgaaagtttcttcaactttttcaatcctcccgaggtccctgaggatgatgatgatattgatgaggatgctgttgaagaactccagaatttgatggaacgtgattatgacattggttctacaatccgggacaaaattattcctcatgctgtgtcatggttcacgggggaggctgcacagagtgattttgaggatatagatgaagttgattatgatgatgaagaaggtgatgaggatgaggatgaggatgaggatgaggaggaggaggaggaggaagaggaggaaaagaaagggaagagcaggagtaagagtggtggcagggtcaaacctggtaaggatcagccgactgagcgccctcctgaatgcaagcagcagtagtgtttggctgtgtacaaacagacctggatatgtttagtttcagagaagtaattactgtagagcctgggttatttcagtcataatttgcaatttaatgattatcatcattattattattttctgctcttttttattgggctgggggttggcggtggtatttttttaagtctctgcttgggtttctttgagttgccctgttatttggattttatttctctctggttttagtgttttctgaaaaaagaaaaagtaaagtgctaagtat

SEQ ID NO: 10214 - DNA, 967 bp, Glycine max
  Clone ID: 700899428_FLI
agttcaccaaaagcaaccacaacaagcacttctcttatttcctatcacaccctattacagattcacaagcgcagacacttcaaatggctctggaagctcttcaatcacccagaactgccactccatcgtttagtccctttgaagaaaccaacctcagttacttggagacaccgtggaccaaaggaaagcgttctaagcgtagccgcatggagcagcaactgcaacactcttcatgcaccgaggaagagtacctcgctctctgtctcatcatgctcgctcacggcggcgccggcggtgtccccgccgccaagcctgctgtctccgacaacaattccgcgccgctacccgccgccaaactgagctacaaatgttcggtctgcaacaaagccttctcctcttaccaagcactcggtggacacaaggccagccaccggaagctcggcggcgagcaccactcgacctcctccgccgtgacaacgagttcggcgtcgaacggcggtgctaggacccacgagtgctccatctgccaaaagacgttcccaacaggacaggccttgggaggacacaaacgttgtcactacgaaggcggtaacagcgccgtaaccgcctctgagggagtggggtccactcacacaggaagccaccgcgatttcgatctgaacctcccggcttttccggacttttcaacaaggttcttcgttgatgacgaggttaccagtcctcatccatccaagaaatcccgtctcaatttgaccatacccaagattgaaatccctcaatactgatgatccatagatccaaaaaatattcagtgtttttttcttctttcttttttaaagttatttgagattaatttgttcttgtacatatatagtacttggaccttattcgctagttttagcttttagattgtagtcattgtacttttgacagtggcaattcaattcaattcaattcatttatttat

SEQ ID NO: 10215 - DNA, 1171 bp, Glycine max
  Clone ID: 700899520_FLI
gggcgaacatactagttgatcctaatggtgaaatcaaactggcagactttggaatggctaaacatataaattcttctgcctcaatgctttcattcaaaggaagtccatactggatggcacctgaggttgtaatgaatacaaatggctatagtcttccagttgatatatggagcttgggatgcacaattattgaaatggcaacatcaaaacctccatggaatcagtatgaaggggtagctgccatatttaaaattgggaacagcaaagatatgcctgaaatccccgagcatctttcgaacgatgcaaaaaatttcatcaagctatgcttacaaagagacccattagctcgcccgacagcccataagttactagaccaccccttcattcgagatcaatcggcaacaaaagctgcaaatgtcagcataaccagagatgcttttccttgcatgtttgatggaagccggacaccgcctgtgttagagtcccattccaaccgaacaagtataacttctcttgatggagattttgcatcaaagccagctcttgcagcaccacgagcattaaggagtcctagagataacacaagaatgatcacatctttaccagtatctccctcttcaagtccattgcgacggtatgggccaacgcatcagagctgttttttctctcctcctcatccagcttacacaataatgggacaaagtagttacactttgaatgacatatcatcatatccaatgacatcaaatgccacgtttgctcttgatccttggcatgaaacatctcgatacagagccaatacaccacctggtggatctccaagaatgagactcatttgagttgagattgtaaatagctatagaactaaaatatttccacgtctccccagcatacctcgtggtctgtggttgaacttcaatctggactctgaaacacaaactatcctaaatattctgcgggtccattctttatacttgagaaccagatgacggaagaaatgattctggccctatgctctcggtgcattgcattggggagaccatgctgcttgtaacaatttcttgattattgtaaatgcaatgtgctcactgtgtttgtagtaacaattatgttgtataatgatagttcatggcaggataaaaaataaaaataaaaagtaatttttatagcc

SEQ ID NO: 10216 - DNA, 887 bp, Glycine max
  Clone ID: 700899532_FLI
gaaccattaaaccatgttgaagcagagagacagaggagggagaagctgaaccagagattctacgcgcttcgtgctgtggttcccaacgtgtcaaagatggacaaagcgtcgcttctgggcgacgcgatatcttacatcaccgagctgaagtccaagcttcagaccctcgaatctgataaagatgtattgcataagcagcttgaaggagtgaagaaggaactcgagaaaacaaccgataacgtttcttctaatcacgcgtgtaataataacaataacaacaagttgtcgtcgaatcagccggcgttaattgacttggttgagatggacgtgaagatcattgggtgggacgcgatgataacgatcacatgcagcaagaagaaccaccccgcggcgacgttgatgacggcattgatggagttggacttggacgtgcactacgccaccgtaacgttggtcaacgatttgatgatccaacaagcaacggtgaagatgggaagtagattttacacgcaggagcagcttcgagcggcgctgtcggctaaggttggggatgtacgatgatgttggcactttgcggcagcgttgagattataagtgtgtgtttgtgtcatgttattagctagctatctctttctaagttgtgtgctgctctggggtattttaagccttcccggtagctgtttctgtaaaattttaagattttatttttctttattgggcagcttagtattgaattttgaggtaatcaagctgggaagctccatggagtagtagtataactagctagggacagttttcatcaaatctgtgggtggagtggaaataggggtaattttatctgtttaggtagtgtatatatttataataaatcataaatgtgatcatgc

SEQ ID NO: 10217 - DNA, 1122 bp, Glycine max
  Clone ID: 700899544_FLI
tcttgtctaggcaaactgcgggacgggcgttctgttgcagtgaagaggttgtatgagaacaacttcaagagagttgcacagttcatgaatgaaattaaaatcctagcaaagttagttcatccaaatcttgtgaagttatatggatgcacctctcgccacagccgcgaacttctgcttgtatacgagtacattcctaatggaaccgttgctgatcatcttcatggtcaacgatccaaacctggaaaactcccttggcatattagaatgaaaattgctgtggagactgcaagtgcattgaattttcttcatcacaaagacgtcatccaccgagatgtgaaaaccaacaatattcttcttgacagtgacttttgtgtcaaagtggcagattttggactctcgcgtcttttcccagaccatgtcacccatgtttcaacagctccacaagggactccaggttatgtggatcccgagtaccaccagtgctaccagcttactaaacaaagcgacgtatatagctttggagtggttctggttgagctgatatcatccttgcctgctgtagatatcacaaggcatagacatgaaatcaatttgtccaacatggccatcaacaagattcataatcaggcactgcatgagcttgtcgaccctaccctcgggtttgaatccgatttcaaagtcaggaaaatgataaatgctgtggctgagttagcatttcagtgcttgcagagttctaaagagatgagaccttctatggaagaagtggtggagactctcaaggatatacagagtgatggcaaacataaaagccagcctgaggtaatggacatcacaagcacagctgatgatgttgtgttgctcaaggatgaccctcctccaccatcacctgattctaatgcggtgagcaagtcgacaacgccaaatgctagcggataagtggaccttctttctcacttccatcaaggcatcaagttaaccttatccaaatttatgtaaaagcagagttagcatcacacttgtagcagcatccacccagttacagcatgcattttgtcatcttatgatgaggataacttttatgattgagatgtatatatagatggtaaagctgctttggttatg

SEQ ID NO: 10218 - DNA, 990 bp, Glycine max
  Clone ID: 700899574_FLI
gttttgttccttccttggttcgttccctccacaaaccaaaaacccaacaaaagaacgttcatttttcattttcgtttctaataaagagcatggccggtggttctatcaagagacattctttctccgaagaggaccatggtttcgcttcttccatggagcctgggtattctgggcacaaccaccacttccatcatggtttcgtgtctaggactttgggttatggcactttctacaaccgaggtgttaggagccattcgattttctcgccgagatctgggagattttatgatgcaagattcgaagatcaccaaccccactttcttcaagcttgttctctttgcaagaagcgtctcggggataatagtgacatcttcatgtacaaaggggacacgcctttttgcagcgaagagtgtagacaagagcaaatggagagagacgaagccaaggagaagaataataacctttcttcttcgatgaaggctttgagaaaaaaagagcaaagaaattctgtctccccaaacaagacccaagattactcatttcgtgcagggacggttgctgctgcttagttgaaacttgtatggtgattagctattaagaggaaagaagaacgaaaaaaacagtttaaccgctacagccttctcaaaaaagaaaggaagaaaaaaaaggaggaaaacagatgaacaaaggaaagtagaagccaagttccaatccaagttactttcttttcctcgaagaagggtcaagagagaagagatccccccctaaaaaaaaggatttttgttcatgaagctgtatatggtaatacgtgtagagaagttcgttgcgtgtgggatcctctctcccaattggctctttttcgggtttattttttataaaaaaaaacatatatatcaatgtctcttagttacttactagtactattttatatgatggtgtggtgtctaatagtttcaaagttttaacgaagaaactgaatagtaccaattt

SEQ ID NO: 10219 - DNA, 628 bp, Glycine max
  Clone ID: 700899590_FLI
gaggacacaagatggaggaacagaagttgtagaagctaaggctggaaagggttctgcaactttgtcaatggcctatgctggtgccctttttgctgatgcttgcctcaagggcctcaatggagtcccagatgttgtcgagtgctctttcgtgcaatccactgttactgaacttcccttctttgcttccaaggtgaggcttgggacggttggtgtggaggaagttctgggcttggggcacctctcagattttgagcaacaaggcctcgaaagccttaagcctgaactcaaatcatcaattgagaagggaatcaaatttgccaaccagtaattgaacatgttatcacatacatgtctggtaggttactggatattcctttaagaaccaaatcaaattttgcattctcagaaccattgatgtattgttgtcggcagtggtgtggcggttttgttgttttatttagtgtaggtatacgccatggtttaataattaaagtctgagagctgtttgttgccaaagggattgaacgatcttaaaaccaggtttaggatttggcattccattaataatggtcccttttaactgtatggtttcacttaatgtaattgcagggtgttgtaccctttattc

SEQ ID NO: 10220 - DNA, 413 bp, Glycine max
  Clone ID: 700899596_FLI
ggaggaactgcagaagaggatgctgctgcactaattaaggatagtggaactgagaagcctgttgttgcttttattgctggtttaactgctccccctggccgtcgtatgggtcatgctggagctattgtgtcgggtggcaagggcactgcacaagacaaaattaaaaccctcagggaagctggggtcatggttgtggagtcccctgccaaaattggagctgccatgctagatgttttcaagcagaggggcttggttcaatagtttgggttcatttaatttcatcaagtcattttggtttcgattatttacaaactgttcaaaatttcttgattcccattggtaatgatgggctatttttttttttttttttttaagttacgagaggggcattaaaataaaattcaagatgcttt

SEQ ID NO: 10221 - DNA, 620 bp, Glycine max
  Clone ID: 700899609_FLI
gcatggacggccgcctcctcaccgcccgccccgctcccaaggccgccgacctcggctacgtcggcgaggtcgcacgcgtcgatcccgccgtcctccgctccctaatcgacaccagccacatccccgtcgtcacctccgtcgccgccgatgaatccggacagccctacaacatcaacgccgacaccgtcgccggagaattggcagcgtcgctcggcgcggagaagctgattctgctgaccgatgtggcgggaattctggaagatcggaacgaccctgacagcttggtgaagaagattgacataaaaggagtgaagaaaatgatggaagatggaaaagttggtggtggaatgatacctaaggttaattgttgcgttaggtccttggcgcaaggggttattacagcgagtattattgatggtagggttccgcattctttgttgcttgagattttgactgatgaaggtgctggaactatgataactggataagtttatttatttatggtgtttggattttttcttttcaatcaagccttgagttgaggttgcattgcagcacttgttttgttagagattggtgattgtttttaagtgcgtgtaatgtgagagatggttgaattg

SEQ ID NO: 10222 - DNA, 1085 bp, Glycine max
  Clone ID: 700899734_FLI
aattgctggaggctttgctggtgcgctttctaagactaccgttgcacccctcgaacgggttaagatactttggcagacaaggacaccaggatttcattctcttggggtgtaccaatctatgaataagttactaaagcatgaaggttttctaggattatataagggaaatggagctagtgttatccgcattgttccatatgcagccttgcattttatgacatatgagcgctacaaaagttggatcttgaataattatcctgcgttaggtacaggtccttttattgatcttttagcaggctctgctgccggaggaacttcagttttatgtacctaccccttggatcttgcccgtaccaaacttgcttaccaggtggcagacaccagaggaggaagtatcaaagatggtatgaaaggagttcaacctgcacataatggcattaaaggtgtgcttacaagtgtctataaggaagggggagttcgtggactttataggggtgcaggaccaacccttaccggaattctaccatatgctggtttaaagttctacatgtatgagaaattgaagactcatgttcctgaagaacatcaaaggtccattatgatgcgtctttcttgtggtgctctagctggattgtttggacagactttaacataccctttagatgttgtcaagagacagatgcaggttggcagcctgcaaaatgctgctcatgaggatgccagatacaaaagtacaattgatgcacttaggatgattgttcgcaatcaaggctggaggcagctgtttcatggcgtaagcattaactatataaggattgttccttcagctgcaattagtttcaccacatacgacatgatgaagtcttggcttggcataccaccgcaacaaaagtctcgatcagtttcggcagcatgattgctctgtgctcacccgtgatggcaataacttacaatgtcactttctaattgactctaattttacaggaatgtctcttactgagtattactgcatatgattaccacagattattgttagaggaaacccttttggttaaaattaactaatgctcaagtttgtttgtcgt

SEQ ID NO: 10223 - DNA, 1163 bp, Glycine max
  Clone ID: 700899771_FLI
gtttagtttgatcattctttgaaattcaacctagtactgattatgaaactatatgttaaaaaaatgatgaaattgcgttcagttcccagaagaatggatcactcttgggaagcacaaaagcttcttttcttagtgggaggaaactgaaggtgaacaactttacagcaccagttggagcacgatccagcactacagtttgcgcagttgctgagcctgataggcctctgtggttcccaggcagcacccctcctccatggctagatggcagtttgccaggagattttggctttgatcctctaggtcttgcatctgatcctgagagcctgagatggaatgtccaagcagagcttgtgcactgcagatgggccatgttgggagctgctggcattttcatcccagaattcctcacaaagattggtatcctgaacaccccttcatggtacactgctggagagttggagtacttcacagacaccaccacactcttcatagttgagctctttttcatcggttgggccgagggtagaaggtgggctgacatcatcaagccaggctgtgtcaacactgaccccatctttcccaacaacaagctcacaggaactgatgttgggtacccaggtgggctttggtttgacccacttggctggggaagtggttctcctgagaagatcaaggagttgagaacaaaggagatcaagaatgggaggttggccatgttggctgtgatgggggcatggttccagcacatttacactggcactggtcctattgacaacctctttgctcaccttgcagatcctggccatgctactatttttgctgctttcactcccaagtgagaagtgttggaacaactctatgattgcaagccttggagaaacattggcaaacctttttaactaagttgtaacgcttaaatggttttaggtgggagtgtttatgttggtgaaagcttgtaaaatggctacttctattgtcatgcatagattgaagattcaatgtacaaatacctatttaaggtttagatgcatttaatgtaaattcaggaagtaatcacagtttttgcatggatgatagaactgcaacaatatttgatggtaactagcgcaggggatattagatggtccttgttaacctgctgaatcttcatttcacacttcctc

SEQ ID NO: 10224 - DNA, 1177 bp, Glycine max
  Clone ID: 700899773_FLI
tatggctattacctgtggtaatacctttgttctaaaaccatcagagaaagacccaggtgcttctgtaatgcttgcagaattggcattggaggctggtttgcctgagggtgtcttaaatatagttcatggaacccatgatattgtgaatgctatttgtgatgatgacgacatcaaagccatatcctttgttggttcaaatgttgccggaatgcacatatattcaagagcagcagctaaagggaaacgcgttcagtctaacatgggagccaaaaatcatgcgattgtcatggcagatgcaaatgttgatgctactcttaatgctttagttgctgctggttttggtgctgctggacaaaggtgtatggctctcagtacagttgtttttgttggaggctcaaaaccatgggaggataaacttttagagcatgccaaagctcttaaagtaaatgccggaactgaacctgatacagatcttggtccggtgatcagcaagcaggcaaaggagagaatacacagattagttcaatctggggttgaaagtggtgccagactactgcttgatggaagaaatatagtggtcccaggatatgaatctggcaattttattggtccaaccatcttatcagatatcaatgccaacatggaggctgatagcttggaagaagccataaacattatcaacagtaacaagtacggaaatggtgcttctatatttactacatctggtgttgctgcaaggaaatttcagactgagatagaggctggacaggttggcatcaatgtccccattccagttcctttgcccttcttctcatttaccggcaacaaggcatcgtttgccggtgatctcaacttctatggcaaggcaggggttaacttctatacacagattaagacaataacacaacaatggaaggattcaactggtggtagcaagattaacttggcaatgccaacctctcaaaaataatgttgatagccagagcgtgtaataaggctgtttctgaagtctttgttctcttgaaaaaaatgtcaaaggtcacctgctatgctttgttttgaaacctttctcttttctttttcctgatcttatctgtctcttgtgtctccacgtggacaatacaattctttttgcttaattttctaaagtcaaggtttacgtggagcctaatccatt

SEQ ID NO: 10225 - DNA, 444 bp, Glycine max
  Clone ID: 700899857_FLI
cttgacgattttgctaaagtggtggttactgcagttgccacaaacagcaaaacaagagcatcatatttgaacatgcaaattatcagtttctccatagtttccttggaaggagggtctgcgagtgcttgtacattttgcctccatatccaggtatggattactactgtagatgtgtgcccctggagaagttgtaatgaattccataagtaggaccagctcactggtaccttcacttccttttcattttgattgctgcagttccatatgatgacaacttagttgatgcctgtgttaattatttcacccaacccccataaaggaaatagaaatcgtgtaaccctagtttcagttaaattgtagtttgattgtcgtcttcaaaaccatcaagtgaatgggtatctcaaggatttcaagattgtgcatgtcgtcatggtcgacttttct

SEQ ID NO: 10226 - DNA, 711 bp, Glycine max
  Clone ID: 700899924_FLI
cggcagtgaagttattagaatctgtgttgtgttgtgttgtgttgagcagagagagagagtgagggataagaagagaatagggttagggttagggttagggttagggtttgattgaggatgccgaagaacaagggaaagggaggtaagaacaggaagaggggaaagaacgaggcggacgacgagaagcgggagctggtgttcaaggaggacgggcaggagtacgcgcaggtgctccggatgctggggaacgggcggtgcgaggcgatgtgcatcgacgggacgaagaggctctgccacatccgcgggaagatgcacaagaaggtgtggatcgccgccggagacatcatcctggttggactcagggactaccaggacgacaaggctgacgtcatcctcaagtacatgcccgacgaggccaggctcctcaaggcctacggcgagctccccgataccactcgcctcaacgagggcatcggcgccggcttggacgaggaggacgacgccaccgccaacgactacatcgagttcgaggatgaggatattgataaaatctaatccctctctcgccctcaattatcattcatataatatcatcatcatatctgtctctagcaatatttcgttatctgcttgtctgcaactctccgtgttggatttcgttttataattgtgcactattatttcaataacccgcagatatttctgattctc

SEQ ID NO: 10227 - DNA, 660 bp, Glycine max
  Clone ID: 700900022_FLI
gttaagagaaataaatggaaaactgaggaagttaagaagctaattggtatgcgtgaggaactaagtgaaagatttcaagttgtgaagggaaggatggccctctgggaagagatttctcaaaaattgttggctgatgggatctgcagaagtcctggacagtgcaaatctctgtggacatctttggtagtcaaatatgaggggatcaagaatgaggataggaagaaaagttggccatacatagaggacatggaaaggataatgtctgataaagaagcccctgcaaaatgattggaaatatggtggacactggacaggataagaaatattttggagaaccatctacattaaaattgttgataagtttgagtgtggtgaccgggaagataatccatgacttgcatgacattgaagatccctagtgttttttagggctgagggatagacagcataaaggggttggctttcatactggcacgggaatgtctgagtttatgggacgatttattctccacctccaatgcctgtccccgtttttttattacatttgtgtcataatttataatatttgttggtggcacatattgggtgccctaagcaaccatggaaatgtctacctcttttccagacattgaacactgaaaagaaagttttcatactttt

SEQ ID NO: 10228 - DNA, 908 bp, Glycine max
  Clone ID: 700900078_FLI
gtgattttgagaggctggttcatctttggacacttgattctgctgaacgtgatgcatttttggcaaacgaggcgactaaaaaatggacttcaagcaatcaggttctggtggaaatagcctgcactaggtcctctgaacaattgtttgctgcgaggaaggcttaccatgttctttataagaagtctctggaggaggatgttgctcatcacacaacaggagacttccgtaagctcatactacctctggttagttcttatcgatatgaaggagatgaggtcaacttgaccctggcaaaaactgaggcaaaattgctgcatgagaagatttcaaacaaggcttataatgatgacgacttcatcaggattttggccacaaggagcagagcacagattaatgctactttgaatcactacaaagatgcatttggacaagatatcaacaaggacctgaaggctgatccaaaggacgagttcctgtctttactaagagcaactgtgaagtgcttgatccgtcccgagaagtacttcgagaaggttgttcgcttggcgatcaacaagcgaggaaccgatgaaggagcccttacaagagtggtggccacaagggctgaggttgatttgaaaaacatagcagatgagtatcaaaggaggagcagtgtccctcttgaacgtgctattgttaaggacaccaccggtgactatgagaaaatgcttgtggcgcttttaggacatgatgatgcttgacatactcctttgtgtttgtgtgtgtgtacttgtggcagagttactatatagtgtgcagtgtactgctttgtggttccatgttgttgtgttttctggccattattgtcttcctttgttgaataaaatgaaccactttggcacactttggtgggtttttgaagcccctag

SEQ ID NO: 10229 - DNA, 480 bp, Glycine max
  Clone ID: 700900126_FLI
gagaaagaaaaaaggggaatttcaatggcgtcaagggtttctctgaaggcgaaggggaagagttcaaagggatcgaaggctgcggaagatcgatccgcgagcgagtgcctgaaggagtggacgacatgggcgatgcgaaaagcgaaggtcatcactcactacggtttcatccctttggtcatcgtcatcggtatgaactctgaccccaagcccccactttcccagcttctcagccccgtctgatccacctcttcaattcttccaccatcaacgcgacgtcgttctttttttcctcttattttgccccctttctacatttgtaagtttctttatggatcaattttcacttgcacatctcatgtggcatggtgtgttcaaagtggattagcttgtctgtttttggataattttggaagacgcagtagtaaataatccgttttttttataattattacaatgttcaaatatcgtgttcctgcg

SEQ ID NO: 10230 - DNA, 525 bp, Glycine max
  Clone ID: 700900218_FLI
gctgtcacagcagtgccacctcctggcacagaaatggcccagttagtatgtggaggttgccatactttactcatgtacatccggggcgcgacaagtgtgcaatgttcatgttgtcacactgtcaatctagctttggaagcaaatcaggtggcacatgtcaactgtgggaactgcaggatgctactggcgtaccaatatggagcaagatccgtgaaatgtgcagtttgcaattttgtaacatcagttggggccacagcaagcaccactgagcagaagttcagcacctaaaacatacaaaatagcaaggtcattatagactctacaaccttggttttgagttacatatcgcccttaaggaataaagaggttatcagattggagaggaaactcgtttcacgtgtatagagttatttttttgccttgcgtgattgtattaaattatatttttgttagattgggtgtatgaaaaaactatttatgataagttttctgtttctgatgagtgttttgaaaaatcccatcgtt

SEQ ID NO: 10231 - DNA, 792 bp, Glycine max
  Clone ID: 700900377_FLI
tgcagctgacctcaaggagcatgtgatcaagccggtgatcccggagaagtaccttgatgagaagaccattttccacttgaacccctctggccgttttgtcattggaggtcctcacggtgatgctggtctcaccggccgcaagatcatcatcgatacttacggaggatggggtgctcatggtggtggtgccttctccgggaaggatcccaccaaggttgataggagtggtgcttacattgtgagacaggctgctaagagcattgtggcaagtggactagccagaaggtgcattgtgcaagtgtcttatgccattggtgtgcccgagcctttgtctgtctttgttgacacctatggcaccgggaagatccatgataaggagattctcaacattgtgaaggagaactttgatttcaggcccggtatgatctccatcaaccttgatctcaagaggggtgggaataacaggttcttgaagactgctgcatatggacacttcggcagagaggaccctgacttcacatgggaagtggtcaagcccctcaagtgggagaaggcctaaggccattcattccactgcaatgtgctgggagttttttagcgttgcccttataatgtctattatccataactttccacgtcccttgctctgtgtttttctctcgtcgtcctcctcctattttgtttctcctgcctttcatttgtaattttttacatgatcaactaaaaaatgtactctctgttttccgaccattgtgtcttttaatatcagtatcaaaaagaatgttccaaatt

SEQ ID NO: 10232 - DNA, 1313 bp, Glycine max
  Clone ID: 700900416_FLI
taaatacaactgctgatagaagtgattacttgtggtactcattaagcattgatcttgatgctggtgctcaaactttccttcatattaaatcccttgggcatgctcttcatgctttcataaatgggaagcttgcagggagtggaaccggcaaccatgagaaagctaatgtcgaagtagacatccccatcacactagtttctgggaagaacacaattgatctcctgagtttaactgtgggacttcagaactatggagctttttttgacacatggggtgcggggatcactggccctgtgatattgaaatgtttgaagaatggcagcaatgttgatctctcctccaagcagtggacatatcaggttggccttaaaaatgaagatttaggtctatctagtggctgttctggacagtggaattcacaatctaccttacctacaaatcaaccgttgacttggtacaagacaaacttcgttgcaccctccggtaacaacccagttgcaattgacttcacggggatgggaaaaggtgaggcttgggtgaatggacagagcattgggcgatactggcctacatatgcctctccaaaaggtggttgtactgattcatgcaattatagaggagcctatgatgcatccaaatgtctcaagaactgtggaaaaccatcacagacattataccatgtacctcgatcatggttacgaccagatagaaacacacttgtattgtttgaggaaagtggaggcaaccctaagcaaatctcttttgccacaaaacaaataggaagcgtgtgttcacatgtatctgaatctcaccctccacctgtagactcgtggaattcaaatacagaatcaggaagaaaagtagttcctgtagtttcactggagtgcccttatcctaatcaggtggtctcatccattaaatttgcaagttttggaacgcctcttgggacttgcgggaacttcaagcatggactctgcagcagcaataaggctctatccattgtgcagaaggcttgcattggatcaagcagttgtagaattgaactatcagttaatacattcggagatccatgtaaaggagtagcaaagagtttagctgttgaagcttcttgtgcatagacatgtcgcttcaagcgttcccactagcttggacttggctgaataacactcttcactctcggaagtcttttagacttattgctgaagatgattcctcattagccaaagtaaaatggtattctggtagtaaaccagtaaaaaaaatttcaaacaaaatagtgtaattttactttataaaagaggaaagtctcactt

SEQ ID NO: 10233 - DNA, 819 bp, Glycine max
  Clone ID: 700900473_FLI
ggctttggctcggaaccttcgacacagccgaggaagccgctttggcttacgacaaagccgcgtacaggctccgaggcgacttggcgaggctgaacttcccgaacctgaaaggctcgtgccccggcgaggagtacaagcctatgcaggctgcggtggacgctaagctcgacgcaatctgcgcgaacttggcggaaatgcagaagcaagggaagaacgagaagggtgccaggtcggggaagaagtcgaagcaaggtccgaacctggaggcgaagcccgaacctgaagcttcgggttccggtgctgctgctctgtctcctgaaagtgagggttctgcggattcttctgctttgtctgatcttacctttgatgtaaccgagccgcaatgggaggatgcttcagcacattttaatttgcaaaagtttccttcttatgagatcgattgggattctctctgaagactctttgttttttttatttttatgtctagtcttgtgggtaattaataatttagttataattaggattgctcttgtggctgctgcaattgagtttttgaagattgcagtgctacttgtaggatttggattatgttagtcttttttctttttcttttttttttttaaatttgcttattggctattcgatggtcaatatgatgtaaatctctctaccttggtcagctggttttttttttcttgcttggccatggagaatgattccgggttaggtctttgtctatgttttagtgttcgtccaagtactattattgatgtaattcaattctatttgtatctcaatttatgaatgtatttgtatttc

SEQ ID NO: 10234 - DNA, 1067 bp, Glycine max
  Clone ID: 700900550_FLI
ataatccttttggagattttaaaagtatgcatcgtcatatttctaaagggtcttggacattctctgatcaagaccatggatggcaagtttctgattgcactgcagaaggtttaaagtgttgtctacttctatcaatgttgccaccagagattgtgggagaaaagatggaacctgaaagattatacgattcagtcaatgtcttgttgtcgcttcagagtaaaaaaggtggtttagcagcatgggagcctgcaggagctcaagagtggttagaattactcaatcccacagaattttttgcggacattgtagttgaacatgaatatgttgagtgcactggatctgcaatccaagctttagttttgttcaagaagctatatccaggacataggaagaaagagatagaaaatttcattaccaatgcagttcgattccttgaagatacacaaacagctgatggttcatggtatggaaattggggagtttgcttcacttatggctcttggtttgcacttggaggtctagcagctgctggtaagacttacaccaattgtgctgccattcgcaaagccgttaaatttctacttacaacacaaagagaggacggtggatggggagagagttatctttcaagcccaaaaaagatatatgtacctctagaaggaagccgatcaaatgttgtacatacagcatgggctcttatgggactaattcatgctggacaggcggatagagaccccatgcctcttcaccgtgctgcaaagttgctcattaattctcagttggaagagggtgattggccccaacaggaaatcacgggagtattcatgaaaaattgcatgttgcattatccaatgtacagagatatttatccaatgtgggctctagctgaatatcgaaggcgggttccattgccttccactgaagtttaatttagaatggtttgagcacgaaaaggcaaaggcattttcattaagattgaggcaaataagttgtgtgtaatcaagcttaatcaattttttcatattcctatgtttatttcctacatatattggtagaaaaattatttc

SEQ ID NO: 10235 - DNA, 1063 bp, Glycine max
  Clone ID: 700900558_FLI
cttcgttggctactgtgatgatgataacaagatggcactcatttacgagtacatggccaatggcagcctgaaagattttctcttgctctcagatggaaattcacattgcttgagttgggaaaggagaatacagatagcaatcgatgctgcagaggggttggattacctacaccatggatgcaagccaccaataatacacagggatgtaaagtcagccaacattcttttaagtcaagactttgaagctaagatagcagattttggcctctccagggagtttaggaaagataaccaagatcaacaatttcaagtcattcacaaagatgctacatatgaaaaatctgcagtaatgggcacaacagggtaccttgatccagagtactacaaattagggagactgaatgagaaaagtgacatctatagttttggaattgttctactggaattactcacaggtcgccctgcaatattaaaaggcaaccgagtaatgcacatacttgagtggataagacctgagcttgaaagaggagatttgagtaaaattatagatccaaggctccaaggaaaatttgatgctagttctgggtggaaagctttaggaatagcaatgtcatgctctacatcaacctccattcagagacctacaatgagtattgtgatagcagagctgaaacagtgcttgaaattggaatcccctagtgatactaaaacatttgtggcccctccaagacaagtctacgacgaagtttatagttcatctgaagcattttcctatgatagtgaatctatcacctctccttttccaagatagtgcaagtatacattattcaacctttgggaagtatttaattgaaactgtaaaatatttttgaaaccataatttggttactacaaatgccactcttttgccttatttggtgtacaaaaaaacacatttattttgtcatattcagcttgtctgtgcataaagaactctgcccttgaggacatctaattatgtattatgtgataccttatttttaaaaaactgaataaattaaatacattttttttattttcatgt

SEQ ID NO: 10236 - DNA, 881 bp, Glycine max
  Clone ID: 700900559_FLI
gtcactgaatacaaagcaaagagaggtggaagaattttgttcataccaaagttacatgacagagctcaagtatttatttcatgcccctctgaagaaagtggtgcaaggccaacttacattggaactattgaaaggtggttaaataacaaagtaactcttccggatattaaatgccattctaagatcaacttatttattctggttgaaaacatgggtcgtgtaaattacgggtctttcatctttgataggaagggcattctgtcttctgtttatctggacaaggaacaagtaaaagggtggaaaatgttccctattcctttgcacaacctgaatgaaatgtcaacctacaatcccatcacgcaagttgcatattctgcattcagtggcatatcatcattcagaaaaaagttgatttataagaatgggaatacttcaaaagaacctgctttttattcgggccacttcttaattgataaatcaagtcaggtcaaggatacatttatatcattcaacaattggggaaaaggcattgtgtttgttaatgacttcaatataggaagatattggccgttgagaggaccacagtgcaacctctacgttcctgctccactccttaaacaaggagataactttttggtaatactagagttggaatctccagaccccgaacttgtggtgcacacagtggatgagccagacttcacatgtggctctagtgggacgagtctccatcagctgtaataaattgtcataaaaatatgcttgacctttgaaaatacatgtaagaatttggaggttatcgaatgactatcaagtcattatgcttgtaaatattaactatggttattattgctctttaatttttagctacaattctgcac

SEQ ID NO: 10237 - DNA, 714 bp, Glycine max
  Clone ID: 700901740_FLI
gagagtcggtggtggagatcgtgaagaatttgaaagaagcgcctctgctggtgcaggtttttcccaaatcggcgacgatgacgacggagaagaggacctctcccaggccttcttcaggcccataaacaacgccgcccctccctccccgaccaagcgccacaacaagatctccgtcatcggcgccggcaacgtgggaatggccatcgcgcagaccatcctcactcaggacctcaccgacgagctcgtcctcgtcgacaccaactccgacaagctccgacctctgcatcgtcaccgccggcgcccgccagatctccggcgagtcacgcctcaacctcctccagaggaacctctccctcttccgcgccattattccccctctcgtccgttactcccccgacacaactctcctcatcgtttccaaccccgtcgacgtcctcacctacgtcgcgtggaagctctccggcttcccctccaaccgcgtcatcggctccggcaccaacttggactcttcccgcttccgtttcctcatcgccgatcaccttgacgtcaacgcccaggacgtacaggtcaatcaatgtcacttcccctttttccttttctttaaattataaaatgtggactaatatattaaattagtattttagtattaaaattaaaaattctatgggattgatacaaattgtttagtgcatgtttgcttattatgtttgaggc

SEQ ID NO: 10238 - DNA, 1123 bp, Glycine max
  Clone ID: 700902119_FLI
gcgattaatagtgtggaatgctctaactaggcagaaaattcatgccataaagctgccttgtgcatgggtcatgacatgtgctttttcaccaactggtcagtctgttgcatgcggtggtcttgacagtgtttgttctattttcaatcttaattcacccactgacaaggatgggaatctacctgtttcccggatgcttagtggacataagggttatgtttcctcttgtcagtatgttccagatgaagatactcatttaattactggttctggtgatcagacatgtgttttatgggatattactacaggccttaaaacctctatctttggaggagagtttcagtctggacatactgcagatgtacttagtatctccattaatggatccaactcaagaatgtttgtatctggttcttgtgatgcaactgctcgattgtgggatactcgtgtggcaagtcgagcagtgcggacatttcatgggcatgagggagatgttaatgcagtcaaattctttccagacggtaatagatttggaacaggctcagatgatggaacctgcagattatttgacattaggactggacaccaacttcaagtttattatcagcagcacagtgacaatgacatcactcctgtgacttccattgcattctttgcttcaggaagacttctttttgctggatacacaaatggagattgctatgtttgggacactttattggcaaaggtggtcttgaacataggatctctccaagactctcatgaggacaggatcagctgcttaggtttgtcagctgatggaagtgccttgtgtacaggaagttgggacacaaacttaaagatatgggcatttggagggcataggaggacaacttaagccattgcgggaaggtcaaattggagacgaattgcgtgctaatttatataacccttcattttagccttgcaactcatgtccgtttgtccatgtgtgtgatcttagtactttttccattgtactacccactccgccaactgtaccattcccttataactatgataattataatacttaaaggtgtgattagctatggagcttcctgaaagtggcccgaactatataaaatgaaaatttgcattcctcttt

SEQ ID NO: 10239 - DNA, 1875 bp, Glycine max
  Clone ID: 700904279_FLI
ctcccatcagaggacaaagcttccgactttgcgggattcgttcgtatttgtttcagtgctgtgatggggaaggtcgcggtgggagctgccgttgtctgcgccgccgccgtatgcgctgcggcggcgctggtggtgcgccaccgcatgattagttcccggaagtggagtcgcgccatggcgatactgaaggagtttgaggagaagtgtggcaccccaattgtgaagctaagacaagtggctgatgccatggatgttgagatgcacgcgggtctcgcatctgaaggtggtagcaagctcaatatgttgatcagttttgtcgataatctcccaactggggatgaggaaggcctctattatgcattggatcttggcggcacaaacttccgtgtccttcgtgtacatttaggggggaaagacaaaggtgttatcggccaggagtttgaagaagtttcaattcctccaaatttgatgactggctcttcagatgcattgttcgattttatagcagcagctcttgcaaagtttgttggttcagaacctgaaggttttcatcctccccctggaagacaaagagaactgggttttacattctcattcccagtgaggcaaacatcgattgcatctgggactctaataaagtggactaaaggtttcaatattgaagatgcggttggtgaagatgtggtgggagaactaaccaagtccatggaaaaaattggcctggatatgcgcgttgctgctctagttaatgataccattggaacattagctggaggcagattctacaatcaggatgtcattgctgctgtgattcttggtactgggacaaatgcagcatatgtagaacgagcacatgctattccaaaatggcatgggcttataccaaaatcaggagatatggttataaacatggagtggggtaatttccgatcatcacatcttcctctaacagaatatgatctagctctggatgctcagagcttaaaccctggagaacagatttttgagaaattgatttctggcatgtatttgggggaagttgtaaggagagctttattgaagatggccgaagaagctgacttttttggcgatactgttccccccaaattgaaagttcctttcatacttaggacgcctgacatgtcagccatgcaccatgacacaagttctgatctgaaagtggttggaaacaagttaaaggatatattagagatctcaaacacatcccttaaaatgaggaagatcgttgttgaactgtgtgacattgttgctactcgcggagctcggcttgctgctgctggtattttgggcatccttaagaaaataggaagagacacagttaaggttggggagaagcaaaagtcagtgatagcgttggatggggggttgtttgaacactacaccaaatttagagaatgcttggagagtgcactgaaggaattgctgggagatgaggctgctgagaccattgtcattgagcatgctaatgatggctctggcattggtgcagccctcctggcagcttctcactcccaatatttgggagtggaggagtcttaaattttattgccaaacaagggaaagacgtgtaatactagtttcattttttgcataggtggtagatcaacacattgaagcaatggtgccttgcagctggtgactgggggggcattcattattttggtttcagtgtttgtttctccttcgttaaggaataatatcaaagatataaacttcatcttgagtgactagacaccttttgcggaatgtagccaacgagaataaagcaggacttaatgtattgacaagcctaaatttgtttttatttcaaagcttttctgagttatcaatgaagactaaagcattgtttctgtt

SEQ ID NO: 10240 - DNA, 1403 bp, Glycine max
  Clone ID: 700906084_FLI
acaacacatgggtgtgtagtagaattgcagtgaaattggaaaaatactcaaacatggagcgctatgagatcctcaaagatattggttcaggaaattttgctgtggccaagcttgttagagacaactacaccaatgagctttttgctgtcaagtttattgagagaggccagaagattgatgagcatgtccagagggaaatcatgaaccacagatcattgaagcaccccaacattattagattcaaagaggtcctgttgacaccaactcatttagccatagtaatggaatatgcttctggaggagaactctttgagaggatatgcaatgctggtagattcagtgaggatgaggcaagatttttctttcagcaattgatatcaggagtcagttactgtcattcaatgcaaatctgtcatagagatctgaagcttgaaaacacactcttagatggaagcactgcaccacgagtcaaaatttgtgactttggttactcaaagtcatcagtattgcattcacaacctaagtctacggtgggaacgccagcttacattgcacctgaggttcttacaaggaaagaatatgatggaaagattgcagatgtttggtcttgtggagtcaccttatatgtgatgttagttggggcttatccttttgaagacccagcagatccaagaaacttcaaaaaaaccattggtaagatacttagtgtccagtactcagtcccggattatgtacgagtttccatggaatgtagacatcttctatcacaaatattcgtggcaagtcctgaaaagagaataacaataccagaaattaaaaaccatccatggtttttaaggaacttgcccatggaactgacggaaggtggaagctggcaaatgaatgatgtaaataatccatcacaaaatgttgaggaagtactgtctattatacaagaggcaagaaaatctcttaatgttcccaaggttggaggccttcttactgggggcagcatggacctggatgactttgatgctgatgaagatcttgaagatctagaaacaagtggtgaatttgtgtgtcctatttaagtgtgtacatgaacaagctgagctatagtttgctgtgaaaatgtaaatagatttttctgtaggggctaaaattccttggtggttaatttttcaattaagatcagtagccccacttgcacggcttgttatttatcagttttgagttttgacatttaaagggttttttttttttatttctttatgtttatttttccctcttccctatcacacgtgtggatgtgatcagatttaggaacttccgaaaccatgtgctgttttcctagagaagtaataccacatgttccaaagatgagaatataaaataaagcaagttgtggcaggttccacttttgc

SEQ ID NO: 10241 - DNA, 1703 bp, Glycine max
  Clone ID: 700906317_FLI
cagtcatagtgttttatatatgcggtgtgactgacctgaaggaggaatttaaggggaccgtctaatggaagtcgggggaaggttgtcttactatttgatgataatcccttgtctaaaattggtgtgagatttgataaacccatacctgatggagttgatcttggtggtgcctgtgagggaggtcaaggatttttctgcaatgtcaccgatcttcgtttggaaagcagtgctgtagaagaactggacaaattacttattcattcattgtttgaggttgtttttagtgagagtagaagtgcaccattcattttgttcatgaaagatgctgagaagtctattgtaggaaatggagattcacattcatttaaaagtaagcttgaaaatcttccagacaatgtggttgtaataggttcacacacacaaaatgacagtcgcaaggaaaagtcacatcctggtggtttgctttttacaaaatttggtagcaatcagactgcccttctcgacttggctttcccagatagttttggacgattgcatgacagggggaaggaagccccaaaacaaaatagaactttgactaagcttttcccaaataaaattacaattcacatgccacaggatgaggctcttctagcatcctggaagcagcaactggatcgagatgttgagactctcaaaattaaaggaaatttacatcacttgcgcacagttctgggacgttgcggaatggaatgtgaaggacttgagaccttgtgcattaaggatcagacacttacaaatgaaaatgcagagaagataattggttgggctttaagccaccacctcatgcagaattcagaagctaagcctgattcaaagcttgtattgtcctgtgagagcattctgtatggaattgggatcttgcagtctatccagaatgaatccaagagcctgaagaaatcacttaaggatgttgtgacagaaaatgaatttgaaaagaggcttttggctgatgttattccacctagtgacattgatgttacttttgatgatattggagctcttgaaaaggtcaaggatacattgaaggagttggtgatgcttcctttacagaggcctgagcttttttgcaagggacaattaaccaagccctgcaaaggtatcctattatttggtccccctggaactggtaaaacaatgcttgcaaaggcaattgctactgaagctggtgctaacttcatcaacatttctatgtcaagtatcacatctaagtggtttggtgagggtgagaaatatgtgaaagctgttttctctctggcgagtaaaatttcacctagtgttatatttgttgatgaggttgacagcatgttgggtcggagggaaaacccaggagagcatgaggccatgcgaaagatgaaaaatgaattcatggtgaattgggatgggttacgcacgaaggaaaccgagagagttcttgtcctggctgccactaacaggccttttgaccttgacgaggctgtcataaggaggatgccaagaagattgatggtaaatttgccagatgcccctaatcgagcaaaaatattgaaagttatactggcaaaagaggaattgtctcctgatgttgatttagatgcagttgcaagtatgaccgatggatattccggaagtgatcttaagaatttgtgtgtaactgcagcacatcggcctattaaagagatatt

SEQ ID NO: 10242 - DNA, 1563 bp, Glycine max
  Clone ID: 700909141_FLI
atttcgcatcttctccttctcattccaactccaaaatacacacacacgatggaaaccttcctcttcacctcagaatctgtaaacgagggccaccccgacaagatctgtgaccaggtttctgatgccatcctcgatgcttgcttggagcaagacccagagagcaaggttgcctgcgagacctgtacaaaaaccaacatggtcatggtctttggggagatcacaaccaaggccaaggtgaactacgagaaaatagtccgcgacacttgcagaggtattgggtttgtgtctgctgatgttggtctcgatgctgacaagtgcaatgttcttgtcaacattgagcaacagagccctgacattgcacagggagttcacggccacttgaccaagaagcccgaggaaatcggagccggtgaccaaggccacatgtttggttatgccacagacgaaacacccgaactaatgccactcactcatgtgcttgctaccaagcttggtgccaagctcactgaagtgagaaagaacaagacatgtccttggttgaggcctgatggcaaaacccaagtgactgttgagtacaggaatgatggtggggcaatggtccctatccgtgtgcacacagtcctcatctcaacccaacatgatgaaactgtgacaaatgatcaaattgcgaaagatttgaaagaacatgtgataaagcctgtgatcccagctgagtaccttgatgacaataccatcttccacctcaacccttctggtaggtttgtgattggaggacctcatggagatgcaggactcactgggaggaagatcatcattgatacctatggtgggtggggtgctcatggtggaggtgccttctctggcaaggatcctaccaaggttgataggagtggtgcatacattgttaggcaagcagcaaagagtgtggtggcttcagggctcgcgcgccgttgcattgtgcaggtttcctatgcaattggggtgcctgatccactgtctgtgtttgtggatacctacaaaactgggaagattccagacagtgatattctggctttgattaaggagcattttgacttcaggcctggaatgatttccatcaatcttgacctcatgagagggggaaacttcaggtaccagaagactgctgcttatggccattttggaagagatgatcctgatttcacatgggagacagtgaagatactcaagcccagtgcttgactgattcattggcattggtgttgtttcttaaggtggttatcatcgtaattggtaaccatctttctgattttgggttaggaaaataataataaaggagcttcggtgagtacatacttcatttaagattgtgtttctcggcttggatgaggaatgggagcggaaatgtgctgtgtcctaagtggaggcgtttgcacaataggagcatgcaagcagcattagctggctagctacctcttttggtttttgccttttctcttgaaattttctttgttgttcacctttttttatccctcgcctttctgatatttgattattttgcaaccaatcttgcgtggttggggt

SEQ ID NO: 10243 - DNA, 1703 bp, Glycine max
  Clone ID: 700900608_FLI
aatttctctctattagtctgcatgctctgcaaactgagcatggctcctctcgcattttccttcttcttcatccttatcacattcttttcttcatcatctgaagcgggatccgttggaataaactatggaagggttgcgaacgacctacctacaccagcgaaagtggtggagcttctgaaggcacaaggtctgaaccgtgtgaagctctacgacaccgacgccaccgtcttaaccgcgtttgcaaactcgggaatcaaggtcgtagttgccatgccaaacgagcttcttgccaacgccgccgcggaccagtccttcaccgatgcgtgggtccaagccaacatctccacctactaccccgccacgcaaatcgaagccatagccgtcggaaacgaagtcttcgtcgaccccaacaacacaacaaagttcctcgtacccgccatgaagaacgtccacgcttctctaacaaagtacaacctcgacaaaaacattaaaatctcctcacccatcgcactctccgcgctccagaactcgttccccgcctcatccggttccttcaaaaccgaactcgtcgaaccggttatcaaacccatgctcgacctgctccgccaaaccggttcctacttaatggtgaatgcgtatccgtttttcgcttacgctgcaaactctgataaaatctctttagactacgcgctattcaaggaaaaccccggcgtggttgattccggtaatggtttaaaatacacgaacttattcgacgctcaaatcgacgccgttttcgctgccatgtcagcactcaaatacgacgacgttaagatcgcggtttcggaaacgggttggccttctgctggggactctaacgagattggagccagccccgacaatgcggcgtcgtataacggaaacttggttaaacgcgtgttgagtgggagtgggacccccttgaagcaaaatgagtcactcgatgttttcctcttcgcgcttttcaatgagaaccagaaaacgggtcccacgtcggagagaaactacgggctgttctaccccactgagaagaaggtttacgatattccgctcacggcggaggaaatcaaggaggcgccgccgtcaggagtagggaagagccaggttccggtgagtggtgaggtgtcaacgacgacgtctaagggccagacatggtgcgtagctagtggcggttcttcggagaagaagctgcagaacgctcttaactacgcttgcggagagggtggggctgattgcactccaattcaaccaggtgccacgtgttacaatcctaacaccttggaggcacatgcttcctacgccttcaacagttactatcagaagaaggcacgtgcatccggcacgtgcgattttggtggcactgcttatgtcgtcactcagccccctaagtatggtaactgcgaattccccacaggatactgaatggaccacggagatggattgtttctggtgaagccttgatttggatttaactgggatttgccggagtttttaggagcttttctcttctttgttatccattcgtagcacgtgtttaggctttgagaaatatgcgttagcgttactgtttgtaataaatcattatgattactttggagggttattgatttctttgactcatttattttgtaattatctctatttatttatttttaaatgaagagaagtatagaatacatttcttt

SEQ ID NO: 10244 - DNA, 1082 bp, Glycine max
  Clone ID: 700900662_FLI
tgaaaacagaccaataataataataataataaaagaccaactccttggcttggcgcatctttattccctctcttctataaatcgttcgatcgttaattcctcgcacgagcttgtgtccgtcgtcaaaccatggagaatattggtgaggatcagtacggctacttgccggagaccgacctgtttttcccaaacgaagaccttggcagctgggcaataatggatggggaagcggtctcttggtactatgattcaagctccccggacggcaccggtgcttcttcatcggtggcatctaagaacattgtctccgagaggaatagaaggaagaagctcaacgataggcttttggcacttagagcagtggtccccaacattaccaagatggataaggcttctatcattaaggatgctatagagtacatccagcacttgcatgaacaagagaagagaatccaagctgagattttggatctagaatctaggaataagttcaaaaatccaacctatgaatttgaccaggacctccctattctgctcaggtctaagaagaagaaaacagaacacctatttgattctctcagttcaagaaattccccatcaattgaaataattgagctgagggtaacatacatgagagagaagacgtttgtggtgaacttgacatgtagtaaaaggacagacacaatggtaaaactgtgtgaggtgttcgaatctttaaagctcaaagtcattgcggccaatatcacatctttttcaggcacgcttttgaagaagacagccttcatcgaggcagatgaaaaagaggaagactttttgaagataaaaattcagacagcgatttcagctctcaatgatcctcaaagcccaatgagcatctgatgaagttcagatcgaagctgagattgttctgttgttgagtttctttttcccactcactgttaattatctttagtgaatgagtcttcaactccaaagtttgcaagttttcttctttttcatttcctgtatgttgatagcctctaacgttgtaagctttacgttgcctgcaattaatgaaatcgaattttcatgttcttcatggt

SEQ ID NO: 10245 - DNA, 943 bp, Glycine max
  Clone ID: 700900743_FLI
tcaactttaccaatcttggcatgcacaaattaacccccacccaattttacactccctccctcctcccatacccatcatcttataatacacaaaggttttgaatatcaaaatacatgacaattcacaacaacaaaatgacttcaattgccaccaatagcactgttgtcgccactagaatgctagttgtgatcactttagtccttgcactagtatgttgtgtcacatccgcgcaatcaccggcagcagcaccagccccggagagcaacgggtgcttgatggcactaacaaacatgtcagattgcctgacatatgtggaggatgggagtaagttggcaaagcctgacaaagggtgttgccctgagttggcagggttgattgatagcaaccccatttgcttgtgtgagttgctaggaaaacctgactctattggcatcaagattgatttgaacaaagccctcaagcttccttctgtttgtggagtgaccactccccctgttagcacttgttcagctgtgggagtccccgtgtccttgcctccatcaatgagtgaaggttctttgtcaccaggtattgcaccaggagtctccagtccttcaaatacagatgctagtcctgcttctagtcctggtggtccaggcccttcctctgaggaagctgttgccagcccttctcaaaacaaaaatggagtttctgccattcaagcctctgctttgactaatttcatttttggcctttccactctatttgtctccgtattcttctgattttacacattagttctccgtgtcgttattttagtggatctttttatttcctcattatttgtatgttgtgagccaccttttaaaggttttgttgtaattttatgcactgatgcaattgttactgtcattattagtagtgaaccacacactttaatcagggccttcttgattgcattatt

SEQ ID NO: 10246 - DNA, 1499 bp, Glycine max
  Clone ID: 700900826_FLI
ctcaccccatttctccaccttgccaacaagttagccaaaaggggacacaaaatctccttcttcatacccagaagaacacaagccaagttagaagacctcaatcttcacccaaacctcatcacctttgtccccatcaatgttcctcacgttgatggtcttccttatgatgcagaaaccacttcagatgttccctcctctttgttcccactcattgccactgccatggacctcacagagaaaaacattgaacttctcctccttgatctcaaaccacacatcgttttgttcgatttttccacatattggctaccaaacttggctcgtagaataggaataaagtctcttcagtactggattattagccctgcaacagtagggtacatggcatccccagctagacaaagagaagatgacatgagaaaaccaccttcagggttccctgattgttccatcaagctgcatgcacatgaagttcggttccttgctgcagcaaggaaactagagtttggcaatggtgttcttttctatgatcgtatctcagttggtgcagatttgtctgatgctattggattcaaaggttgtagagaaattgaagggccttatgtggactatctagagacacaatttggtaagcccgttttgcttacaggtcctcttgtgcccgagccatcaaattcaactttggacgcaaaatggggtgaatggcttggtagattcaaagctggttcagtgatttacattgcatttggaagtgaacactctttgcagcaaaaccaattgaatgagttgttgttgggtcttgagctaacaggaatgccattttttgcagcacttaagccccctattgagtttgagtccattgagaaagctctcccaaaagggttcaaagaaagggttcaagaaagaggggttgtgtatggggggtgggtgcagcaacagttgatcttggcacacccttctgttgggtgcttcataactcactgtggtggagcttctctaactgaggcacttgtgaaccggtgtcagttggtgctgttgccacgacttggttccgatttcatcatcaatgcaagaaccatggggggaaaattgagggttggtgtggaagttgagaaaggggaagaagatggtttgttcacaaaggaaagtgtgtgtaaagctgtgaaaactgttatggatgatgagattgatcagcttggcagagaagtcagagcaaatcacaacaaagtgaggagcctcttgctaagtaacaatttcgagacatcttgtgtagatgctttcagccacaggcttcaggatttagtctaagttcagccccagtttaattaaatcactgtataagttctatattattgacactgaatccagtagggttatttggtcgtgtaagaactaaaaagcgtcctttatgattgatgcattaaatcatgggttgagaaagaatatatgtacaaaacctagtcttgataatcttaaagaaatgtttattattttgtaat

SEQ ID NO: 10247 - DNA, 1017 bp, Glycine max
  Clone ID: 700900868_FLI
cgctattcaaggaaaaccccggcgtggttgattccggtaatggtttaaaatacacgaacttattcgacgctcaaatcgacgccgtttttcgctgccatgtcagcactcaaatacgacgacgttaagatcgcggtttcggaaacgggttggccttctgctggggactctaacgagattggagccagccccgacaatgcggcgtcgtataacggaaacttggttaaacgcgtgttgagtgggagtgggacccccttgaagcaaaatgagtcactcgatgttttcctcttcgcgcttttcaatgagaaccagaaaacgggtcccacgtcggagagaaactacgggctgttctaccccactgagaagaaggtttacgatattccgctcacggcggaggaaatcaaggaggcgccgccgtcaggagtagggaagagccaggttccggtgagtggtgaggtgtcaacgacgacgtctaagggccagacatggtgcgtagctagtggcggttcttcggagaagaagctgcagaacgctcttaactacgcttgcggagagggtggggctgattgcactccaattcaaccaggtgccacgtgttacaatcctaacaccttggaggcacatgcttcctacgccttcaacagttactatcagaagaaggcacgtgcatccggcacgtgcgattttggtggcactgcttatgtcgtcactcagccccctaagtatggtaactgcgaattccccacaggatactgaatggaccacggagatggattgtttctggtgaagccttgatttggatttaactgggatttgccggagtttttaggagcttttctcttctttgttatccattcgtagcacgtgtttaggctttgagaaatatgcgttagcgttactgtttgtaataaatcattatgattactttggagggttattgatttctttgactcatttattttggaattatctctatttatttatttttaaatgaagagaagtatagaatacatttctttt

SEQ ID NO: 10248 - DNA, 1514 bp, Glycine max; identical to SEQ ID NO: 8323
  Clone ID: 700900903_FLI

SEQ ID NO: 10249 - DNA, 571 bp, Glycine max
  Clone ID: 700900916_FLI
gtgagtgccatgcggtggagcggatctggaagttgttaacggaggttggggacatgaacctcatgatggatccagaggatttcttgaggctgaagaaggagttagggatgatgagaactgcgggcgaaacggtggcgttttgcttcaggtcgagggagcttgtggaggtggcgagggtgtgtaggaacctgagggagaaggtgccggagatattggaggtggaggtggaccccaagggtgggcccgggatgatggaggcggcgatgaaggtttactcggagaaagagaaagggaaggttcatgttttgcaggggatgcaggggattgaggtggcgatgaagaggttcttctacgcgtataagcaggttgtgacggttatgatggggagctccgaggccgataatgggttcaccaagatattccttgaacccacttatttccctagcttggatgctgccaagacctttcttggttattacaaccaaaattaattcttttattcacttcaattccatcttactcacacaaagaaacaaaaaggattgaattttgtaaacaaatctttgtctgt

SEQ ID NO: 10250 - DNA, 693 bp, Glycine max
  Clone ID: 700901113_FLI
tggacctgcttctgagagagcctttggactctacaaccctgatcaatccatgatctatgatgctggcctctccaaacagcaagaaactagtagccccgtgccgacggttgccccgactactccggatgtgtcaaaatctccctctactccaaagccaacagtttcaagtccaaccaaaacaaataatagtgcaacatggtgtgtgccaaaaggaggagtggcagatgcacagttacaagcaaatttggattatgcttgtgggcaagggattgattgtaccgcaattcaacaaggaggggcttgttttgaacctaacactttggtaaaccatgctgcatatgccatgaatctattgtatcaaacagctggacggaatccattgacttgtgatttctcgcaaacagccatgttgtcaacgaataatccaagttacaagagttgtctttatgctggaggaaatgcctaacccagaaaacaagtagataaaggagggcactttttgttgttttaattattctctcttaattgctaaaaaatgttctggttcttggagtgttcatgtatggaggaggatcttcttcctctatttgtagtctcaccttttttagtctttatcagaagcaaattgatgctttgtttatgtgtgatctgtgaagcgtggtttaggtatgtgtgttgttcaatcatcgtttg

SEQ ID NO: 10251 - DNA, 707 bp, Glycine max
  Clone ID: 700901135_FLI
gagaaattgaagaaggacaacgagaaattgagcggcgagttagcgctggcgaagaaacaatgcgaggagttggtggcgtttcttagagactcgctgaacgtgagccccgatgtgatagagcgcatcattcggcaaggaacgtgtgtgtccagcaacaatgatgcggtgcgttttgatgctattattaataatgatcttgatgacgacgaaaatgcggtaggtgagtgtgaaccacaacaaccaccacccaaaggtgacaatggagaaagtttgaaactatttggggtttggttgaagggtcaaaatgggaaagagaattcaattggtaaatgccgcaagagagggcgccaagactaccctattgctgccactgccaaggaattgaagaccctagtctagtacaacatatcatattcttgttaattaattaccttttaagaaacaactattgtagccagatctagaacacaaagaaaaatactctcttagtcatcatggaaaatgtatggctctttcatggtatttcgttgtttggtttgatggtgcaagggacctaataaaggatactaatgatgatgattaagattatgtttatagacattaatttgtatgattggaaataaatgtgtcttgtttaaggaatttgacattgacggtctcattattacgtgggacagagctattgtagtaccatgccaattttaatt

SEQ ID NO: 10252 - DNA, 752 bp, Glycine max
  Clone ID: 700901165_FLI
tgaaaatcctaatgcaaagttgattattacgggtcatagtttgggtggggcactcgcaattctctaccctacgatcgtgttcttgcatgatgagaagttgctgatggagaggttggaagggatctacacttttgggcaaccaagagttggagatgaagcatatgcacagtacatgagacaaaaattaagggaaaattctatcaggtattgcagatttgtttattgcaatgatatagttccgaggttgccctatgataacgacttgctcttcaagcactttgggatctgccttttctttaacaggcgctatgaactcaggattctcgaagaagagcctaataagaattatttctcgccatggtgtgtgatacccatgatgttcaatgctgttttggaactaataaggagctttaccattgcgttcaagaatggacctcactatagagaaggatggtttctttttggcttcaggttgtttggtttgctgattcctggcttacctgctcatggtccacaagattatattaattccactcttctgggatcaattgaaaaacattttaaagcagattgatgtgtccgtgtactgtacatgatcattccgtaccactccatgtgtatggtcatgcaaactaaaatttacgtgatatataatcaagtttttcaatttaaataataataataacacttgattatgtatgtgaagaatagttaatatcattaatgagatcaatgtgcagtttgtttatttc

SEQ ID NO: 10253 - DNA, 1198 bp, Glycine max
  Clone ID: 700901166_FLI
ttttcactctcccattcttcttttttaagcaacaacaacctcattcctcggatcctaagaaaatgggaaccagagtgtggtgttgtttcatgatgttcttcctctctctcaatgctcttgcaatagcattggaagatcacaacctcaaaacgacgtccagggatgacatcaagtgcaccccatgtgggattatcctctttgttcttgtcgctgggtatcttccgtttaatgatcctaatttgatggttatgtataagaagatttacaaaggggagtttcggtgtccgaggtggttttcgatggagttaaggaggattctgacgaggttgttggatacgaatcctgatacgagaataaccgttgatgagatcatgaaggacacgtggtttaagaaggggtataaggaggtaaagtttggggatttgggtttggagtggaagagtgagggtgagggtgtcaaggatttgaatgcttttgatataatttcgttttctacggggttgaatctttctgggttgtttgattcgtcgtgtggggtggaggagggggagaggtttttgctcagggagtcgccagcagctccaaccaccacctactgccctccgcctccgtcgcctccaagctccggcggtggtggtgcttactattactctccgccgccaccctctcaatatatctactcttctcccccgccgccggcgtccaccggcggcggtggtggcggcgtttactactacccaccgccgagagggtactacccaacgccgccgcctcccaacccaattgtgccttatttcccgttttactaccatacccctccgccgccttccacggcggcgcctccgccggtgaaaggctcgttggtctgtgcaatttcgttcttaactctttttattgcatttctttaataggaagaaaaaaaaaaaaaaaggggaaattgtggaaataagtgcacaaattagcagatcttgggaagtgaaagtgaggtgagtccaagcaaggacagtgtgcttatttcccattttgcccctgaacttgttacaatttctttcaagtatcatatgataatgataagaatcacttcttagtggtgactttaatgtaggttgatctgcaatttgttgacaatttgtaattgtatctagtcttttgattttggttagtatgaaaaaagttactataaattgaagaatgttct

SEQ ID NO: 10254 - DNA, 772 bp, Glycine max
  Clone ID: 700901194_FLI
ggacccccttgaagcaaaatgagtcactcgatgttttcctcttcgcgcttttcaatgagaaccagaaaacgggtcccacgtcggagagaaactacgggctgttctaccccactgagaagaaggtttacgatattccgctcacggcggaggaaatcaaggaggcgccgccgtcaggagtagggaagagccaggttccggtgagtggtgaggtgtcaacgacgacgtctaagggccagacatggtgcgtagctagtggcggttcttcggagaagaagctgcagaacgctcttaactacgcttgcggagagggtggggctgattgcactccaattcaaccaggtgccacgtgttacaatcctaacaccttggaggcacatgcttcctacgccttcaacagttactatcagaagaaggcacgtgcatccggcacgtgcgattttggtggcactgcttatgtcgtcactcagccccctaagtatggtaactgcgaattccccacaggatactgaatggaccacggagatggattgtttctggtgaagccttgatttggatttaactgggatttgccggagtttttaggagcttttctcttctttgttatccattcgtagcacgtgtttaggctttgagaaatatgcgttagcgttactgtttgtaataaatcattatgattactttggagggttattgatttctttgactcatttattttgtaattatctctatttatttatttttaaatgaagagaagtatagaatacatttcttt

SEQ ID NO: 10255 - DNA, 254 bp, Glycine max
  Clone ID: 700901258_FLI
ggttgagatcgtgatggcacttgaggaagcatttggtattgccattgaagaggacagtgcacagagcatcgctacggttcaggatgctgcagatcttattgaagaaatcgttcagaagaagagttcttagagtaaacatgtaccagaaggtttgtgtaaaacatgaactcatcatagtctccatgccgatcaatatttatggtgtggggcaattctgagtctcgagtgttttagttgtgaactctgttgcgtga

SEQ ID NO: 10256 - DNA, 2190 bp, Glycine max
  Clone ID: 700901262_FLI
agaatatgtattctagagattcatggggtggaccgttggagataaacgcgacggactcggcgacggaggacgagcggagccggaacctgcaggacgttgacagggcagcgctgtcgcgtcccttggatgagacgcagcagagctggctccttggccccggcgagcagaagaagaagaagtacgtcgatctcggctgcatcatcgtcagccgcaagatcttcaagtggaccctcggcacaatcctcttcgccgccttcctcgccggcctcatcgccctcatcgtcaacaccgtcccccgccaccgccacaaacacccccctcccgacaactacaccctcgccctccacaaggccctcatgttcttcaatgcccaacgatcggggaagttgcccaagcataacaatgtttcgtggaggggaaactcgggaatgcaagatgggaagtcttcagatcattctgctgcgattaaggatctggtgggtgggtactatgatgccggggatgctatcaagtttaactttcctgcttcgttttccattactatgttgagttggagtgtgattgagtatagtgcaaaatatgaggctgctggggagcttgaacatgttaaggagatcattaagtggggtactgattattttctcaagagtttcaatagtactgctgacaccatcaccacccttgctgctcaggttgggcttggagatacttccggtggtgacagtccgaatgaccactattgctggatgcgcccagaggacatggactatgaccgccctgtgactgaatgccatagttgttctgatcttgcagctgagatggctgctgccttggcatctgcttccattgttttcaaggacaacaaggcctattcgaagaaactagttcatggtgctaccacgctgttcaagttttctagggagcagagaggcaggtacagtgcagggagttcggaagcttctatattttacaattctaccagttactgggatgagtatgtttggggaggcgcatggatgtactttgcaactggaaattcatcgtaccttaagcttgctactgctcctggcctggccaagcatgctggtgccttctggggaggccctgattatggggtactcagctgggataacaagcttgctggtgctcaggttcttctgagtcgtttgaggttgttcttgagtcctgggtatccatatgaagaaattttgaggacctttcacaatcagacaagcataatcatgtgctcctatctaccagttttcacaagctttaacagaaccaaaggtggcttgattcaattaaaccatggtaggcctcagcctctccaatatgtggtcaatgcggcctttttggctgccctatatagtgattatcttgatgctgctgatacacctggatggtattgtggacctaatttcttttcaaccgacgtgctccgtagctttgccaagtcccagattgattacatccttggaaataacccaaggaaaatgagttatgtcgtaggttttggtaatcattacccaaaacacgtccaccatagaggagcatctgtaccgaagaacaagatcaagtatagctgtaaaggtggatggaaatggagggacacttctaagccaaacccaaatacaattgttggtgccatggttgccggtcctgacaagcatgatggcttccatgatgttcgtacaaactacaattacacagagccaacacttgctggaaatgccggtttagttgctgcactagtggcattgtcaggcgacaaaggcacatctattgacaaaaataccattttctctgctgttcccccaatgtttcctacaccgccaccacctccagcgccatggaaaccataagctcatcgtgccattggttatttctttctagcaagtaccccagatgatatgagtgcaccgttaaccttcgttgttttgtatcaacttgaagatcagggtaattttgaagaaaaaaaagcttggagaagtggagcttggccactgaatatagctgcctggggccaatgatcgactcaagattagcattaagaattgataaagtggtacttgagagtgtgtctctttaaatttttgtgatactcatatagtatatatgtatctaaatcaaatcttgtattctttaaacatgaaaaactgaacagcttgtaattgtttgacagtttcatct

SEQ ID NO: 10257 - DNA, 1364 bp, Glycine max
  Clone ID: 700901287_FLI
tgaacacacatttacagcttcaaaacctggatcaggaatggttgttgctgtaaaaaggcttaaacctgaaggttttcaaggtcataaggagtggttgactgaggttaattacctcggacaactgtaccaccctaatctggttaaattaatcgggtactgcttggagggagagaaccggctattggtgtatgagtttatgcctaaagggagcttagagaaccatctatttagaagaggaccgcaaccactctcttggtcggtgaggatgaaagtggctattggtgctgccagaggactctcctttcttcataatgccaaatcacaagtcatataccgtgattttaaagcttctaacatcctgctggatgctgagtttaattcgaaactctctgactttggtttagctaaggcgggtcctactggtgatagaactcatgtgtctactcaagtcatgggtactcaaggatatgcagcacctgaatatgttgcaactggtcggttgacggccaaaagtgatgtctacagcttcggagttgtgttgcttgaacttctatcaggaagacgcgcagttgataaaaccataaccggaatggagcagaatctggtggactgggcaaaaccatatttgagcgataaacgaagactgttcaggattatggataccaagttggagggccagtacccacaaaagggggccttcacggctgccacacttgctctacaatgcctaaacagtgaggccaaggcaaggcctccaatgacagaggttttagcaactctggaacagatagaggcccccaagacagcaggcagaaactcccattcagaacaccatagacttcagactcctgtgagaaagtctcctgcgcgaaaccggtcaccgttaaatctaactcctactgcgtctcctctcccagctcaccggcaatcgcctcgtgtgcactaaagctgtgaacatagaacatctgtatatgtaaattccttaaatttatcaggttgtgttttggacagcatgcgttgaggcatgtgtacttaaatgcaattttgggtcatgcacggtagagtagttaacaccatttatccaaatgctatgcaagttattgcagagcagtattctgcatatatatctcctgttaccaatgtcttgttgataataacaacctgacacattgcttcccttctattatgggtgtccctttatttggttttggcctaaaacaattccaaaacatggagagagagagagggttgttgtatatacttaacatcttgtgtgcaaaatttgttgaattagtttttaataccttcttataatttggatttggattttgagtttaatttaactttattattttgtttgagtg

SEQ ID NO: 10258 - DNA, 1033 bp, Glycine max
  Clone ID: 700901296_FLI
gtttcttttatgcagacaataaagtcattcacacctgccaccacagttgttttgcaatggctagtgtggaggaagtattttgactggcgtatttgggcttctcttatacccattgttggagggattcttctcacatctgtaacagagcttagttttaatatgtttggattctgtgctgccttatttggctgtttggctacatctacaaagactattcttgcagaatctcttctgcatggatacaaatttgacagcataaacacagtttattacatggcaccttttgcaaccatgatcttggcgcttcctgccatgttacttgaaggcaatggaatccttgaatggctaaatactcatccatatccttggtcggctctcatcattatttttagctccggggtgttggctttctgtcttaacttctcaattttttatgtgattcactccaccactgctgtaacatttaatgttgccggaaatcttaaggttgcagttgccgtccttgtttcttggctgatatttaggaacccaatttcgtatttaaattctgttggatgtaccgtgactcttgtgggatgtacattctatggttatgtgaggcacaagctctcccaacagccacaagtcccaggaactcctcggacacccaggactcccaggacccctcgtagtaagatggagttgcttcctcttgtaaatgataaattagaagataaggtctagttcatttagctacatatgatgaggtttcagcctttttgaaggcagtaatagcaataggtacaaatacattaaaataacttcggttattatttgttagattacctccgaaatctttaatacaaggttctttttttccccccttcaactttcatagtcttttccatcttttgtcgattctcttttttctatttaccccctctagcgaagagtgcttttttgtctccatttagctttctatattccccgtttgattgtatgcactgtaaacaccgacgaattattgttaatttattgttatttttgaaagtgc

SEQ ID NO: 10259 - DNA, 785 bp, Glycine max
  Clone ID: 700901379_FLI
ctctctttctctctttctagttcgtgttcttcgtcgcaaatccgaagtaggatctctcttgttttttctctaggtttttcgcgatggcgtcgaagcgaattttgaaggagcttaaggatttgcagaaggatcctccaacatcttgcagtgccggtatatttttatttttttgttttgatattcttttcctattttattgttgagaatttggttgtgtttgtttaaacaatttggatttaaattttggtaaggaagaagctgcgcgattctgattttctagcagtaatatttgtatattgtaaaataaaattcctgtttagaattttgtttcttaggttttttgttgagatttatttcaatcggttgtagcggatgtcgtttgatataggtcttggtgccgtttgtagattagaacagtgtgtttgattctgtgttgtagtgatttcaggaggcttgcctgagctgcaaattctttgaggcttgatgaagctgaaggagaaataattgttttttttgtagagtattgaattaatttttgccatggacaaaaaaatgtttaggggaatgtacaattctaagcatatattgtttcatatattttaaggtgggaataggatacatagtccccaacatctccctatgcaattgtattcatgattcagcgttttgtttcctggatcatgcatctgttggcggctctgtctgttttatgacaagattatgcaataaaagaagttagaactgctgtagttgtaaatttacacactattgatggagtgtggtcc

SEQ ID NO: 10260 - DNA, 411 bp, Glycine max
  Clone ID: 700901412_FLI
gcgcaatgcaatcaaaaaggttggaaccgatgaggatgcactcactcgcgtggttgtgagccgggccgagaaggacctgaagataatctcagaggtttactacaagagaaacagcgttcttcttgagcatgctattgccaaggaaatctcaggggactacaagaagttccttctcactctgttggggaaagaagactaaatattttttctctgagggcatttgtgattacgagtttaggacaccaagctatacttgtgtgtgtgtgatggttgatggtgttaatctgtgttgattttgcttgagtctgttttcagttttccttgatcatgagaacttggagttctatcttatagagtggtaatatgatagctgtttggtggcttataaattattattaacaggctcaaaat

SEQ ID NO: 10261 - DNA, 384 bp, Glycine max
  Clone ID: 700901520_FLI
gtttccacactgcataccttaggtcttccgaattcgaagttaatttgcaagatggctaaggaaaaggctcagatcaacattgtggtggttggtcatgtggaccctgaggaggcaaccaccattaacgagctgaagaagcctgttgtggagaaagaagctccagggcatgccatatgagggcatgcacgtacggcctcggaggggaaccagaaaattatgttaacaaaataatctggaaccctaatgtatcagtgtcatcatcagtgtgtagtttaagctagctttgctatggttacgttctttgagatgagagtcttgatgaacagtaccattctgatgtattgctttccttgaaagttaatgcatgcttcttatcttctgtct

SEQ ID NO: 10262 - DNA, 1495 bp, Glycine max
  Clone ID: 700901534_FLI
ggccaggcaagccccactcaaccaccacacctctcctcgttcacgctacccctttctgctcttcttctacctttcaagttttaaaagtataaagatggcagagacattcctatttacctcagagtcggtgaacgagggacaccctgacaagctctgcgaccaaatctccgatgctgtcctcgacgcttgcctcgagcaggacccagacagcaaagttgcctgcgaaacatgcaccaaaaccaacttggtcatggtcttcggagaaatcacgaccaaggccaacgttgactacgagaagatagtgcgtgacacctgcaggaacatcggcttcgtctcaaatgatgtgggactggatgccgacaactgcaaggtcctcgtcaacattgagcagcagagccctgatattgctcagggtgtacacggccaccttaccaaaaaacctgaagaaattggtgctggtgaccagggtcacatgtttggctatgccactgatgaaacccctgaattgatgccattgagccatgttcttgcaacaaaactcggtgctcgtctcaccgaggttcgcaagaacggtacctgcccttggctgaggcctgatgggaagacccaagtgaccgttgagtattacaatgacaatggtgccagggttcctattcgtgtacacaccgtgctaatctccacccaacacgacgagactgtcaccaatgacgaaattgctgctgacctcaaagagcatgtgatcaagcctgtgatcccagagaagtaccttgatgagaagaccattttccacttgaacccttcaggccgttttgtcattggtggccctcatggcgatgctggtctcaccggccgcaagatcattatcgatacttatggaggatggggtgctcatggtggtggtgctttctccgggaaggaccctaccaaggttgataggagtggtgcttacattgtgagacaggctgctaagagcattgtggcaagtggacttgccagaaggtgcattgtgcaagtgtcttatgccattggtgtgcctgagcctttgtctgtgtttgttgacacctatggcactgggaagatccatgataaggagattctcaacattgtgaaggaaaactttgatttcaggcctggtatgatctccatcaaccttgatctcaagaggggtggaaataacaggtttttgaagactgctgcctatggacactttggaagagaagaccctgacttcacatgggaagtggtcaaacccctcaagtgggagaaggcctaagtaattcattccactgctctatgctggaagttttttgagcgttgcccttataatatgtctaatatccataactttccacgtctcttactctgtgtgtttctctcctcttcctcctattttgttatttgtatgttcttttgtaattttttacgtgatcaactaaaaacatgtactctctgtttgtatgtatgccctaccaatgtgtctcttaatatcaatatc

SEQ ID NO: 10263 - DNA, 1128 bp, Glycine max
  Clone ID: 700901538_FLI
cttggctggggcaatttctggtggaatatcacggactgttacatcgccccttgatgttattaagattcgattccaggtccagctagagcccacatcttcatgggcattactacgcaaggatttggcttcagctacggctgcagcatcaaaatacactggtatgcttcaggcaaccaaggatattcttagagaagaaggcgtacaggggttttggcggggaaatgtgccggcattgctcatggttatgccatatacagctatacaatttacagttttacacaagttgaagacttttgcctctggttcttccaagacagagaatcacattaatttaagcccttatctatcctacatcagtggggcattagctggatgtgcagctacagtaggttcatatccctttgatcttctccgaactatattagcttctcagggtgaaccaaaggtatatcccaacatgaggtcagcattcatggatatcgtccatactcgtggattccaaggcttgtattctggattgtcgcccactctagtggagattataccttatgcaggcctacaatttggcacatatgatacatttaagcgatggggcatggcttggaatcatagatactccaacactgctgcagaagataacctctctagctttcagcttttcctttgtggattggcagctggaacatgtgccaagcttgtctgtcatccacttgatgttgtcaaaaaaagatttcagattgaagggcttcaaaggcatccaagatatggagctcgagtcgagcatcgtgcatacaggaatatgcttgatgccatgcaacggatactgcaattagagggttgggctggtctgtacaaggggataattccgtccactgtcaaagctgcacctgctggtgctgtgacatttgttgcttatgaattgacatcagattggttagagtccactttcaattgattttttcccactttttcttcattactattgatcatattcttttttgaaatacaaattgattcccacgtagtataggaagaaagtgtgagggagatgccaattttttgtaatgatagtggtagttgataagattgaacttcctttaaaatggaagatttgtccttgatgcttac

SEQ ID NO: 10264 - DNA, 1085 bp, Glycine max
  Clone ID: 700901558_FLI
gagagaatagagggagttgaggaacaaccaagttcccttctcgggctcaaccacctaagcacgtctcagatttcccagatccaagcccaagcccaagcccagaactcgctctctcttaatttcttgggcccgaagcccgttcctatgaagcacgttggtgggccggcgaagcccacgaagctgtaccggggcgtgaggcagaggcattgggggaagtgggtggcggagataaggctaccgaagaaccgaaccaggctttggctcggaaccttcgacacagccgaggaagccgctttggcttacgacaaagccgcgtacaggctccgaggcgacttggcgaggctgaacttcccgaacctgaaaggctcgtgccccggcgaggagtacaagcctatgcaggctgcggtggacgctaagctcgacgcaatctgcgcgaacttggcggaaatgcagaagcaagggaagaacgagaagggtgccaggtcggggaagaagtcgaagcaaggtccgaacctggaggcgaagcccgaacctgaagcttcgggttccggtgctgctgctctgtctcctgaaagtgagggttctgcggattcttctgctttgtctgatcttacctttgatgtaaccgagccgcaatgggaggatgcttcagcacattttaatttgcaaaagtttccttcttatgagatcgattgggattctctctgaagactctttgtttttttatttttatgtctagtcttgtgggtaattaataatttagttataattaggattgctcttgtggctgctgcaattgagtttttgaagattgcagtgctacttgtaggatttggattatgttagtcttttttctttttcttttttttttttaaatttgcttattggctattcgatggtcaatatgatgtaaatctctctaccttggtcagctggttttttttttcttgcttggccatggagaatgattccgggttaggtctttgtctatgttttagtgttcgtccaagtactattattgatgtaattcaattctatttgtatctcaatttatgaatgtatttgtatttcagcttacatattgt

SEQ ID NO: 10265 - DNA, 726 bp, Glycine max
  Clone ID: 700901566_FLI
ggatggaccaacaccaaagtctgagatcaagccttgaatcttttgcaacaagaatgttcccccttgctgaaagcttggcagaagtactagcctacaaattgaatacgaaatccaactatttccgtgaaaattgcttgccaaagagttcgtacattcgactgaatagatatcctccatgccctatatcgtcaaaggtgcatggcctgttgcctcacagtgatacaagttttcttaccatcgtacatcaggaccaggttgggggattgcaattgatgaaagatggaaaatgggttggtgtcaaacctaacccacaagctctagttgttaatattggtgacttctttcaggcattcagcaatggtgtttataaaagcataaaacaccgagtggttgctgccgagaaagtagagaggttttctatggcttttttttattgcccctccgaagatgcacttatagaaagccacatcaagccagctacgtacaggaaattcacttcgagggagtttagacaacagactgagaaagatgtcaagcaaacaggggataaagaggggctctctagatttcttctgtagaagtatatatatacctatatctgtgtaaacttaaagtaatcatatctgtcttattttgtaacattttcttttgtgtgtactcttgttttgtaacatagctcatgagtttttgagttaaataaattaatattttaaatattattttatc

SEQ ID NO: 10266 - DNA, 1529 bp, Glycine max
  Clone ID: 700901573_FLI
ggccaggcaagccccactcaaccaccacacctctcctcgttcacgctacccctttctgctcttcttctacctttcaagttttaaaagtataaagatggcagagacattcctatttacctcagagtcggtgaacgagggacaccctgacaagctctgcgaccaaatctccgatgctgtcctcgacgcttgcctcgagcaggacccagacagcaaagttgcctgcgaaacatgcaccaaaaccaacttggtcatggtcttcggagaaatcacgaccaaggccaacgttgactacgagaagatagtgcgtgacacctgcaggaacatcggcttcgtctcaaatgatgtgggactggatgccgacaactgcaaggtcctcgtcaacattgagcagcagagccctgatattgctcagggtgtacacggccaccttaccaaaaaacctgaagaaattggtgctggtgaccagggtcacatgtttggctatgccactgatgaaacccctgaattgatgccattgagccatgttcttgcaacaaaactcggtgctcgtctcaccgaggttcgcaagaacggtacctgcccttggctgaggcctgatgggaagacccaagtgaccgttgagtattacaatgacaatggtgccagggttcctattcgtgtacacaccgtgctaatctccacccaacacgacgagactgtcaccaatgacgaaattgctgctgacctcaaagagcatgtgatcaagcctgtgatcccagagaagtaccttgatgagaagaccattttccacttgaacccttcaggccgttttgtcattggtggccctcatggcgatgctggtctcaccggccgcaagatcattatcgatacttatggaggatggggtgctcatggtggtggtgctttctccgggaaggaccctaccaaggttgataggagtggtgcttacattgtgagacaggctgctaagagcattgtggcaagtggacttgccagaaggtgcattgtgcaagtgtcttatgccattggtgtgcctgagcctttgtctgtgtttgttgacacctatggcactgggaagatccatgataaggagattctcaacattgtgaaggaaaactttgatttcaggcctggtatgatctccatcaaccttgatctcaagaggggtggaaataacaggtttttgaagactgctgcctatggacactttggaagagaagaccctgacttcacatgggaagtggtcaaacccctcaagtgggagaaggcctaagtaattcattccactgctctatgctggaagttttttgagcgttgcccttataatatgtctaatatccataactttccacgtctcttactctgtgtgtttctctcctcttcctcctattttgttatttgtatgttcttttgtaattttttacgtgatcaactaaaaacatgtactctctgtttgtatgtatgccctaccaatgtgtctcttaatatcaatatcaaaaagagagtgttcaagttaatgtttggattcc

SEQ ID NO: 10267 - DNA, 1297 bp, Glycine max
  Clone ID: 700901689_FLI
caaacacaacctcgacaaagacattaaggtttcctcccccattgcactttccgcactagcaaactcttacccttcctccgccgggtcgttccgacccgaacttgttgaacccgttttcaagcccatgctagacttcctccgcgaaaccgggtcataccttatggttaacgtgtacccgttcttcgcgtatgagtccaacgctgacgtcatctctttagactacgctctgttccgtgataaccccggagtggtggatcccggtaacgggttgagatattataacctatttgacgcccaaattgacgccgttttctccgcgctaagtgctttgaaatacgacgacgttaagatcgtggttaccgaaacaggttggccttctaagggagatagtaatgaggtgggtgcgagtgtagacaacgctgctgcgtacaacgggaatctcgtccgtaagatcttgaccgctggtgggacccctctcaggcccaaagcggatctcatcgtttttctgttcgcgctttttaatgagaaccagaagcccgggcctacttccgagagaaacttttggcttttctaccctgacgagaggagggtttacaatgttccgttaacgacggaggaactcaaggactaccacgatcgtccggcgccggtgagcggcggcggacagcagaagggaacgccggcgccggcgccggttgtgagcggcggggtctccaagagtaccactggaaacacgtggtgcgttgcaaacccggatgcggataaggttaagctgcaggcggctctagatttcgcttgtggtgagggaggtgctgattgccgtccgattcagcgcggttccacgtgttacgatcctaacacgcttgtggcccacgcttctttcgcgttcaacagttattaccagaagcagtcgcgcaagggtggtagctgctatttcgggggtacgtcgtacgttgtcacgcaggagccgaagtatggtagctgcgagtttcctactggatactaaaagctgaagaggacagagatattcccgcatgagaatatgcgtctggctgattttgctttgtgtaaagtatgttatgaggtgtctggaagtgtgaaactaggaagagaagataaattacttcttggtggttatattagttttaagattttttggggttatggattatgttagttaataaatgttgacttttcttccagttggtgggaactgggaatggggtagctaaattaatttaacggttgggactaaagtaatttgtatctaagtttttttttttttttttactttgcc

SEQ ID NO: 10268 - DNA, 717 bp, Glycine max
  Clone ID: 700901839_FLI
gccacttttccttctccgtcttcgccgctaccagcagaagctgctcctgctagctctgcacctccaaaagcagctcctgccttgccttcccccggaaaagcaagcacatcttctcacccaccactgaaatgtccaatggcaggaaccttctataggagtccagcacctggtgaacctgcatttgtcaaggtgggagataaagtgaagaaaggccaggttatttgcattatcgaggctatgaaactgatgaatgaaattgaggctgatcagtcaggaacaatagctgaggtattagctgaggatgggaaaccagtcagtgtagacatgcctctttttgtaatagttccatgagtaccggaagggaccttacttcaaagttgatatgaaatctccctagcttgttggatagcagcatggtatttgatgtcagattttctgttcagaaatttcttgagtgataatgtttgtctcattttaagaaatccttgtcttctttagcccccacccctcctcttaatttatcgagatattttggacataaaagtccccagcatatcagaatgaatattggacatttcagttctaagcagatttgacatttgtagtagtatttatgttttctgtttatgttttctgattgccccctcttttttgtatgaacatgcttgctggatgttacattatcccaggtaatatattatatacatctttgtggcc

SEQ ID NO: 10269 - DNA, 939 bp, Glycine max
  Clone ID: 700901873_FLI
gagaaaataaaccaatattattccacaaaacaaattaaagttcgtgagagtttaatcaatttgatacacgtacccttatggccaaagaaggtcttggacttgaaatcaccgagctaaggttgggtctacccgatgcggagcatgtaactgtggtcaataagaatgagaagaagagggccttctcgcaaattgatgatgaaaatagctcctccggcggcgaccggaaaatcaagaccaataagagtcaagtggtggggtggcctccggtgtgctcttaccggaagaagaacagcatgaacgaaggttcaaagatgtacgtgaaggttagcatggacggtgctcctttcttgcgcaaaattgatttgggtctccataaggggtactcagatttagccttggctttggacaagctctttggttcctatggaatggtggaggccttgaagaatgcggacaattctgaacacgttcccatttatgaggacaaagatggtgactggatgcttgttggagatgtcccttgggaaatgtttatggagtcatgcaagaggctgaggattatgaagaggtcagatgccaagggcttcggtttgcaaccaaaaggatctctgaagggattcatagaaagcgcggcaaagtgaaacattatgttaggcttctaattaatgtcgtgcacattttgacgatcatcaatccaagtttatgttgtcgttttattatatttgagaaatcatgcatttttagtttgatatatgaatcatacttttgtttatgtcaagtattaatgaatgacatataggaccctatataactaatagggaaaactcattgttttagattaattaatgctttgccatgcttgttaatttgcattcaattgcaatataagttattgtaccagtatattgttttattactgatgatttcaatttgttaatt

SEQ ID NO: 10270 - DNA, 787 bp, Glycine max
  Clone ID: 700901886_FLI
ggcgttactattacgtctgtgattagatgacaagtgtggcacagttctttccttttactattgctggtgcattttctcttcagaataatcagcattgctgaaaagtggaaccgttcagaagaagctccccagggccaaatgctgttctaattgcacgtaataggaaagctgctacctctttgattcagaggttgctttactacttccctccaaattcagatgacctcagcagttacattattggggacaagtcaattgcaaaagatgcggggatcaatggaatacaggacgtagaagctttgccacctcctccagaaatcaaagataatattccaccccaaaaatacaagggggatgtcagttatttcatatgtaccagacctggaaggggacctgttttgctttctgatagcagtcaagcacttctgaacggtgaaactgggcttcccaagtaagttcatgggaaacattctcgtggttgatctattcttcgttgggcttcactagcaggctttttgagcccaaaatattttgattggaggaccctttcaaggaagcccgtgtgctacccatggcatgatgattcgttccttcctagttcgcagtatgtgttcgtttaagtatctgtaatttttgtttcagacctagttaggctattttgttggagaaaaataagtctcgcttcttttttgaacaattcatttgagcttgcaagttaaacttgtcagttttttaaaaaaagaagcgagacttatttttctccaacaaaatagcctaactaggtctg

SEQ ID NO: 10271 - DNA, 1238 bp, Glycine max
  Clone ID: 700901902_FLI
cttcctttctctgctctttgtcttctctgacacatttggggccttgttgagtgtgtttttgcaagagggtatggcgaaggacgttgaggttgctgagcgtggctccttctctgggaaggactaccaggaccctccaccagcaccactcattgatgctgaggagctcacaaagtggtccttttacagggctcttattgctgagttcattgccactttgctcttcctctacattactgtgctcacagttatagggtacaagcaccagacggatcatgctgatgcgtgtggtggggttggcattcttggcattgcatgggcctttggtggcatgatcttcatccttgtctactgcactgctgggatttcaggaggtcacattaacccagcagtgacatttgggctgtttttggctcgcaaggtgtctttgatccgagccatcatgtacatggtggctcagtgcttgggtgctatctgtggagttggtttagttaaggctttccaaaagtcttacttcaacaagtatggtggtggggctaattccctcgctgatgggtacagcacaggtactggattgggtgctgagatcattggcacctttgttttggtgtacactgtcttctctgccactgaccctaagaggaatgctagagattcccatgttccggttttggctccacttcccattggatttgctgtgttcatggttcacttggccaccatcccagtcactggcactggtatcaaccctgctaggagtcttggagctgctgttatctacaaccaagataagccatgggatgaccattggatcttttgggtaggaccatttattggggcagccattgcagccttctaccaccagttcatcttgagagcaggtgcagccaaggcccttggatcattcaggagtaacccccataattgagatgtctttctcttcatgatgatggctctagtggaaagaagataattggagagatggaggttgatatggcaagtttaataatgggaaatgcttttggctttgtatttgcaacgtttctttgaccctctcgattatgtcttcaagattgtggataagtgtagattaaagtctctttcatgacagggggagccgtttgcactttcctctgtggtgttcttccctttagtgtgtcatttttcttttttaagttattctcttctgtcatctctgtactcaaacaaatcatgggaaatattttaaattttaattttac

SEQ ID NO: 10272 - DNA, 532 bp, Glycine max
  Clone ID: 700901917_FLI
ctcctgtataatgggacaagttcgatacattgttccaaggcttgttcattggggtatttattcaggtactatgtagctacagcaccctgccactgtatgcaattgttacgcagatgggaactcactataagagggcaatatttaatgagcatttgcaacaaaacattgttggttgggcacagaaggcgaagaagaggaaaggactaaaagctgatggcaatcctggccaaggaagttctcaggagagtgctaatacaggaatccagcttgggtcaattttcaagaaggcatctgctccaggaggcagttcttctgccaccaaagctgatgggaccaactcagtgtagcctatagaagtgaagatttacagtcttattttgtaaagttgctcacaaattgcagttttctttatattattttgtttgctaacagtgtagcattgtgggacatgtgtttgacttggtgtaggcgtaaggtcgaagttctatatgagtagatgctagtaatgccattggcatttctaacttctaag

SEQ ID NO: 10273 - DNA, 1468 bp, Glycine max
  Clone ID: 700901925_FLI
ggccaggcaagccccactcaaccaccacacctctcctcgttcacgctacccctttctgctcttcttctacctttcaagttttaaaagtataaagatggcagagacattcctatttacctcagagtcggtgaacgagggacaccctgacaagctctgcgaccaaatctccgatgctgtcctcgacgcttgcctcgagcaggacccagacagcaaagttgcctgcgaaacatgcaccaaaaccaacttggtcatggtcttcggagaaatcacgaccaaggccaacgttgactacgagaagatagtgcgtgacacctgcaggaacatcggcttcgtctcaaatgatgtgggactggatgccgacaactgcaaggtcctcgtcaacattgagcagcagagccctgatattgctcagggtgtacacggccaccttaccaaaaaacctgaagaaattggtgctggtgaccagggtcacatgtttggctatgccactgatgaaacccctgaattgatgccattgagccatgttcttgcaacaaaactcggtgctcgtctcaccgaggttcgcaagaacggtacctgcccttggctgaggcctgatgggaagacccaagtgaccgttgagtattacaatgacaatggtgccagggttcctattcgtgtacacaccgtgctaatctccacccaacacgacgagactgtcaccaatgacgaaattgctgctgacctcaaagagcatgtgatcaagcctgtgatcccagagaagtaccttgatgagaagaccattttccacttgaacccttcaggccgttttgtcattggtggccctcatggcgatgctggtctcaccggccgcaagatcattatcgatacttatggaggatggggtgctcatggtggtggtgctttctccgggaaggaccctaccaaggttgataggagtggtgcttacattgtgagacaggctgctaagagcattgtggcaagtggacttgccagaaggtgcattgtgcaagtgtcttatgccattggtgtgcctgagcctttgtctgtgtttgttgacacctatggcactgggaagatccatgataaggagattctcaacattgtgaaggaaaactttgatttcaggcctggtatgatctccatcaaccttgatctcaagaggggtggaaataacaggtttttgaagactgctgcctatggacactttggaagagaagaccctgacttcacatgggaagtggtcaaacccctcaagtgggagaaggcctaagtaattcattccactgctctatgctggaagttttttgagcgttgcccttataatatgtctaatatccataactttccacgtctcttactctgtgtgtttctctcctcttcctcctattttgttatttgtatgttcttttgtaattttttacgtgatcaactaaaaacatgtactctctgtttgtatgtatgccct

SEQ ID NO: 10274 - DNA, 262 bp, Glycine max
  Clone ID: 700902026_FLI
tttgatatcgggcctttgctgcatgatgggaattgacaccccaacaagatttgagacgccacaagagtaatgatccatttgctgaagctaataaatgttgtgatgctctcggtctactggattaaaatattactgctatattatttgcgaatgttacggaggctctgataagtgttctgtagttgatgacttatctcagggacttgacatattgaataataaaataatttgtatcagtatataaaaatgaaacttcaagctt

SEQ ID NO: 10275 - DNA, 896 bp, Glycine max
  Clone ID: 700902142_FLI
atctttcggttatgtcagttaccacggttgggtatggagaccacgcgttcaagaccatgcacggtcggatctttgctgcgatttggttgcttgtgtcgacgcttgctgtggcccgggcgttcctctatttggctgaggcgagagtggataagcggcataggaggatggcaaagtggattcttggtcaggatatgactgtttctgagtttcttgcagcagacatagacaataatggctttgtgagtaaatcggaatatgttatatacaagctcaaggagatgggaaaagtatctgagaaggacatcatgcaggttagtgagaagtttgatagactagatgctggcaactgcggaaaaataacgcttgctgatcttatggggaatcataattgatgagttcagtgttgccaatttgagaagggagtgtcagattctcaagttgatgggaactttcttcttctggggattgggagggatatcaggttgtcaaagacgcaagctggtgattttccccttaccctcttgttatgatcattaactcctgacataaagttgatgctgctgaattgctgggttcttttgcctgaatttcacaaattatttggaggatggtaaggtgcaagacaccttgctgaaattcgggtatgaccaatcacatattgtcagattgatgagatggcttgtgataatggaagggataattttgattggttaaataattaatctgtacatattctttttggaaaatgaattgcattgattctttagcatattatttctagtgagcctctctgggttagccgtattacacaatcaatgtgttcgtcttggtgactttcgtgtattgtttttgccaagatgattcgattagctcaggcgtaattaaatatgtttctt

SEQ ID NO: 10276 - DNA, 1049 bp, Glycine max
  Clone ID: 700902209_FLI
aaaatgtgttactagcaagtactagggtgcgacttggcacaaaaagaagcacccatagttttgggctaacacgtgaggcctccccatactcttcattcttcactcttcactcttcactcccaaccctagccaaacgcaaaccattcattcattcagttcagtaactcacctcaccatggccgcatccattacattgtccaggctcgtctcttccaccctcaccactgcctctttcttcccacccataaccctgccttccaaactctcctctctccgactccccacccgccgccaccccaagccactcagattctcctcctccaccatcaccgccaccatctccgtcggcgacaagctcccggaggccaccttctcctacctggactcgtccggcgaggtgcagacgacgacggtgtcggaactgacgaaggggaagaaggcggtgctgttcgcggtccccggcgctttcacccccacgtgctcgcagaagcacgtgccgggcttcgtggagaaatcgggggagctgagggcgaaggggatcgacacaatcgcatgcatttcggtcaacgacgccttcgtcatgaaggcatggaaggaggacctcaaggtcaacgaggaagtcctcctgttatctgacggtaacggaaccttcaccaaagccattggggtcgaacttgatctcagcgacaagcccgttggtttgggcgttaggtctaggcgttacgcgcttttggccgaggatggggttgtcaagctcttcaatttggaggaagggggtgccttcactttcagcggcgctcaggacatccttgatgttctttgaattattcttcctctttcgtttattccacactccagttactactcttttcaatccggttagggtttctttcctctcataataacgtggatggattaattggacctcagtgctgttactgttacctgtgcctataataatgaaactcatgtgctggtgttgagcttttgtggccatttgtttggcattttcaggaccttgtgtaaagtttatcaattttggacttcct

SEQ ID NO: 10277 - DNA, 1058 bp, Glycine max
  Clone ID: 700902222_FLI
gctggcttcgccaccggaatttggttccgttgctggggtggtgtcgccgccgtggtgacctcctccttgtgtatgatttcatggaaaatgggagcttagataagtacttgtttgatgggccaaaaacaatcttaagttgggagcaaaggtttaaggtcatcaaggatgttgcttcagcccttttgtatcttcatgagggctatgagcaggtggtgatacatagagatgtgaaggctagcaatgtgcttctagatggtggactcaatggaagattaggagattttggattagcaaggttgtatgaacatggggctaacccaagtaccacaagggtggtggggacctttggctatatggcacctgaggtgcctaggacagggaagtccactcctaactcagatgtttttgcatttggtgcacttttactagaagtggcatgtgggctcagaccacttgagccaaaggcgttgccagaagatgtggttttggttgattgtgtgtggaacaagtacaaacaagggagaatacttgatttggtggatcctaaactaaatggtgcttttaatgaaagagaggttctcatggtgttgaaattgggaattctatgttcaaatgccgcacccgcggctaggccgagcatgagacaggtggtgaggtttttggatggagaagttggattgccagatgagttgagaaagccagaagaggtaggatatcaggagggttttgatgaattcatgaactcacttgaaccttcttccttttatcagatgagcacaagttcctatgctataaagactgacatggatgctaggtttccttttattgatacatcactttatactctccatgctagaggagaaacaaggtgattatctacatcgtacttagagttgtacttttgatagttgtttattttatcatctcatgatgtcttataattgtagagagaaagttattgtaatgataaattcaatcccaacataggaagtttgtattctaattatttcccccactggcatccattttcgggattcatataacgtccccttcatttt

SEQ ID NO: 10278 - DNA, 1058 bp, Glycine max
  Clone ID: 700902268_FLI
gtcactttacattggttgctagcaagtggtatggggaggcaaccctgctgtgacaaacttggggtgaagaaaggtccatggactgctgaggaagacaaaaaactcataaacttcattctctccaatggccagtgctgttggcgagctgttcccaagcttgctgggcttcggcgttgtggtaagagttgtcgtcttcgttggactaattatctaaggcctgacttgaagagagggctcctcacacaggctgaagagcagcttgttatcgatctccatgcccgtcttggcaacaggtggtccaagattgctgccaggttaccaggtaggacagacaacgaaattaaaaatcactggaacacccacatcaagaaaaagctccttaagatgggtattgatcctgttactcacgaacctcttaacaaacaagtctcatccaaagatagttcatcccctgcagagcatttctcacaagtgaataacattaacattcatcaggttgagcaaaatgatggggttctcaactcagaagagaattcaacctcatcaccggctgaaaattcttctggggaagaatcccttttggtggatagcatttgcagtgatgtttctctaattaacagcatgtggctggatgaaactcctctgatggacacattatgggacaatacacctaaagttgagaatgcaaataataacatgggcttaccaataggggaggataattgtgcttggttgttggactgccaggactttggtattcatgattttggcttcaattgtttcagcgaggttgaaacaaatgtactgcaagctataggcatggacagaaaagggctttaggatgcagtacatatggtaattaaagttagttgtccttaagaaacagagcatgcaatcaaaaaatatgtgtatatgtgaatgtgacaaaatgggaataaatcctctcgtgtccatgtcacgttcaaattttgtgtttataactttcttgatgaatattagataaagttctccttatttattatttgtcaagaaagtgatacacacgagatttgaacgtg

SEQ ID NO: 10279 - DNA, 1121 bp, Glycine max
  Clone ID: 700902285_FLI
ggagagagtagttatggaaggagaagaaggaggaattgcaacaaagaagagagggaaagagggtgaaactgagacgacgcgctacaaaggaatcagaatgagaaagtggggcaagtgggtcgctgagattcgagaacccaacaagcgttcaaggatttggctcggttcttactccacgcccgtcgcggcggcgcgtgcttacgacaccgccgttttccacctccggggcccctctgcgcgcctcaacttccccgagcttgttgccgcggagggccccgccgccgacatgtccgcagcctccatcaggaagaaggccaccgaggtcggcgccagagtcgacgctctccaccgccagcacccccacgcgctgcctgctggagaattcgccgaccgggttgaccttaataagatgcccgaacccgagaattcggattgtgactactgggacagggattaggagtgttgtttagttgttaatttggagtttttcaaaaacaaatataaaattataaccttgttttaattaatttttttttattggggaaaaggggttagagggcacagcaatggcctatgatgccagggagttgggttgaaaaagagggagtgagccatgttaaccactcaagtaattataatattataatagctactattctactgaagagtaaaaaaagatggatgttaggtgtttttatgagttgtatatgtgaagagaagggaccattggggagggaagacgctgttgtggtcactactctgtttcgatgataacgatgggtgatgcatggggtcggttaatcggttctgcgtctcagatttttgtctagttggagtcaaatctcaaacgacattgtatccaacaaattggaaaatagaaaaccagaaaatatgaaagaaaagcaaccgaaaatgtaagaaagaaagagatgtgtcttcaatgtgaaaccaaaattgtagctcctcaaacctcgatcgttgttccacaattaactattacaaacatctcccccaaaggttgtgttttatatttgttttgtgatccgctgtagatattatttcttattttatttaaaagatgtaggttaaagtataagtaatttaataacagtttggttctg

SEQ ID NO: 10280 - DNA, 676 bp, Glycine max
  Clone ID: 700902334_FLI
gaaatggaggatggctttgcatcaagtagctgacttgtctggctatcatttcaaagatggaaacagagattcatatgaatacgagtttattgggagtattgttgaggagatctctaggaagtttagtcgtgcttctttacatgttgcggattatccagttggtctagagtcagaagtgacagaggtaatgaagcttttggatgttggatcccatgatgttgtccatatcatagggatccatggaatgggcgggttaggaaaaacaacacttgctctggcagttcataatttcattgctctccatttcgatgaatcctgttttcttcaaaatgtgagagaagaatcaaataaacatgggttaaaacaccttcaaagcatccttctttcaaaattacttggggagaaggacatcaccttaacaagttggcaagaaggagcttcaatgatacaacataggctccaacgaaagaaggttctcttgattttagatgatgttgataagcgccagcaattaaaggctattgttggaagacctgattggtttggtcccggtagcagagtcatcattaccactcgggacaaacatctgctaaaatatcatgaggttgaaagaacctatgaggtgaaggttttaaatcagagtgctgctcttcaattgcttacgtggaatgctttt

SEQ ID NO: 10281 - DNA, 705 bp, Glycine max
  Clone ID: 700902347_FLI
gaaagaccggaagccgaaaactgaaattggtaaccaagtgagtccgttacctgagctcattgcagagcctacggatgctcggtccatgtcatttgttggaactcacgagtacttggcaccggagatcattaagggtgaaggtcacgggagtgcggttgattggtggactttcgggatctttctatacgagctgttgttcggtaaaacacctttcaagggatccggtaaccgagctacgttgtttaacgtggtcggtcagccactgcgatttccagaagcacccgttgtgagttttgcagcaagggatcttataagagggttgcttgtaaaggaacctcagcacagattggcttacaaaagaggcgctaccgagatcaagcaacaccctttttttgaaggtgtgaattgggcattgatcagatgtgccaccccacccgagatccccaaggctgtagagtttgagaagataccctcaccagcttcatcaagtggtggtgaaaaggctgctaaccatatctcaatagctaatcagaaaggttctgataattatctggagtttgatttcttctagagagagagagagagagggtggagacaatatattgattgcaaatggtttctgttaaagagggggaggaactgtttttcaatgtttcaggaacagatatgatatgatgaggaattgtatgtttgtttttgttggct

SEQ ID NO: 10282 - DNA, 505 bp, Glycine max
  Clone ID: 700902348_FLI
attcagaattgcccataagtgctcgggtaaatgtcactggggtgaatggacgtaggaagaggactgttgtaatgacgtctagaggtggacaagctggaggtggtcctgctatgcctacacgtggtgctggttggggacgtcgaggtggcccaaggagtggcagtggacgtggtggagctggaggtcgaggtcgtggtcgcggcaggggtggagctggaggtagaggtcgtgggagaaaggacgctgttgagaagtcagcggaggaacttgacaaggagctggagacctatcatgctgaggccatgaacatctcttgatctcggaagccccagtttattttgtaatattacttaagattggcttccttgtacaaaagctcgtttccttggcgtttactttgaatctcttactgcttggtgcttttaaacatgccatcctatttgaccgcatttaagtcttgttggaggctgaatgatcaacttagggatttttgaagttcagagat

SEQ ID NO: 10283 - DNA, 698 bp, Glycine max
  Clone ID: 700902387_FLI
cacaaacactcacactctctctttctttcttcctgctgctacaatatggagcctctctcttccaccaaacacaacaacaatctctccaagccttcctccctccacacggaggctccgccgccggaggccagtcccctccggaagatcatggtggtggcctccatcgccgccggggtgcaattcgggtgggccctacagctctctctacttaccccttacgtccaactgctggggattccccacacttgggccgccttcatctggctctgcggcccaatctccggcatgctcgtccagcccatcgtgggataccacagcgaccgctgcacctcccgcttcggccgccgcggtttgtttggccatgacggttttggttactaagatggcccaacattctcgacaatacaccctactccccaacgcccaccaggaacccctgcctcctcccgccgccgtcaaagccggcgcgttggctctcttctctctcctcggaatcccactcgcgattacttacagcataccctttgctctagcatcaatattctccagcacctcaggggcaggccaaggtttgtctctgggagtgctcaatcttgcaattgtcataccacacgatggtggtgtctgtgataagtggaccatgggatgctctatttggaggtggtaacttgccagcgttcgtggtgggtgcggtggcg

SEQ ID NO: 10284 - DNA, 500 bp, Glycine max
  Clone ID: 700902403_FLI
caacacatagcggtcctccgggtggtgatcagggaggatttcagccgtggcttggccgagagacttgctgctgacatagagaaggttgtgaagctcttggacacacttcctagccccctcactaccaaagttgctcatatcacagccatcactagtgagactagtgagactagtgagaaggttaagagtgcaatagagactcagaaagagattgctttgtactggaagcgacttgtggatggcaagagacttggagcatgttaggcttaccatatatttttgccttatggcaaccttgttgtgagttaagttggtggtttgttatctatgtgcatatatgtgagtgtgtaatggctatgtagcaataagcaatggcaatgcatgacggattctagtagtcattgctgttcttgcttaagagaacattttctcttttgtctttttgaggtgttagtttggtactcctgagaaggcactattatcatataatattataatgc

SEQ ID NO: 10285 - DNA, 1063 bp, Glycine max
  Clone ID: 700902412_FLI
ataatccagagagaggagagagaagtaaaaaggtggaggaagaagcgaaaagcgagtgagggcagtgttgcttaataaaagaaaacgaacggtggtgataggcttcagtctagatctcaatcgtctccaccttgctttcttctccagcgtccgattctctcaccgatctcgcgccaaatacaaattcgtgtcaacccaacccagggttccggcgagcatggccgacggtccggctagcccaggcggcggcagccacgagagcggcgaccacagccctcgctctaacgtgcgcgagcaggacaggtacctccctatcgctaacataagccgcatcatgaagaaggcacttcctgccaacggtaaaatcgcaaaggacgccaaagagaccgttcaggaatgcgtctccgagttcatcagcttcatcaccagcgaggcctctgataagtgtcagagagaaaagagaaagactattaacggcgatgatttgctctgggcgatggccactctcggtttcgaggattatatggatcctcttaaaatttacctcactagataccgagagatggagggtgatacgaagggctctgccaagggtggagactcatctgctaagagagatgttcagccaagtcctaatgctcagcttgctcatcaaggttctttctcacaaaatgttacttacccgaattctcagggtcgacatatgatggttccaatgcaaggcccggagtaggtatcaagtttattattgaccctcttgttgtaacgtatgttttctacgccagttaccaagtgctcacggcatattgaatgtctttttatgttatgtgaatactgacaggagatgttggttcttgtgtccgtttttttttttaaattaaggtttgtatattatctttggattcgaattattatttgaaagttattattatattgtaaatcctagagccctgttgtctgaatccatcaggcggcttggtaaagaccgagattttaggactgattgtaagcataaatccgaatattcttttcctaatttctttgcacaataatgtatgaagaa

SEQ ID NO: 10286 - DNA, 1258 bp, Glycine max
  Clone ID: 700902415_FLI
gtttcttcctttctctgctctttgccttctctgacacatttggtgccttgtagagcgtgttttggcaggaaggtggtatggcgaaggacgttgaggttgctgagcgtggctccttctctgggaaggactaccaggaccctccaccagcaccactcattgatgctgaggagctcacaaagtggtccttttacagggctctcattgctgaattcattgccactttgctcttcctctacattactgtgctcacagtcatagggtacaagcaccagactgacctcaaggaaaatggtgaaatctgtggtggggttggcattcttggcattgcatgggcctttggtggcatgatcttcatccttgtctactgcactgctgggatctcagggggtcacattaacccagcggtgacatttgggctgtttttggctcgcaaggtgtctttgatccgagccatcatgtacatggtggctcagtgcttaggtgctatctgtggagttggtttggttaaggctttccaaaagtcttacttcaacaagtatggtggtggggctaattccctcgctgctgggtacagcacaggtactggattgggtgctgagattattggaacctttgttttggtctacactgtcttctctgccactgaccccaagaggaatgccagagattcccatgtgccggttttggctccacttcccattggatttgctgtgttcatggttcacttggccaccatcccagtcactggtactggtatcaaccctgctaggagtcttggagctgctgttatctacaaccaagataatccatgggatgaccattggatcttttgggtaggaccatttattggggcagccattgcagccttctaccatcagttcatcttaagagcaggtgcagctaaggctcttggatcattcaggagtaacccccataattgagttgtctttctcttccttatgatggctctagtggaaagaagataattggagagatggaggttgatatggcaagtttaataataattgggaatgcttttggcttgtgttttgcaacgtttctttgaccctctcgattatgtcttcaagattgtggataagtgtagattaaagtctctttcatgacagggggagccttttgcactttcctctgtggtgttcttccctttagtgtgtcatttttttcttttaagttattctcttcagctgtcatctctgtactcaaaatatatttatggaaaatgttaaattttaatttt

SEQ ID NO: 10287 - DNA, 721 bp, Glycine max
  Clone ID: 700902443_FLI
gattcgcttctggcttttttgactctaaattgggacgaaaagtcgagccttcgaagaaacgcagaaactcataaaccatcgctgactccgcaattttcgtcggttcctcacacactctctgatttctccgcgatgcgattcgatgaagtggttctgaattcggagcaagagtttttgtttctgcggaagtgtatcagcttaagaaactgcgtttagggtttctgtttttggtggtgttgttgtgatggcggatgctgacgtggacctttcggaactgttctctggtaatgccgacgaagacgacgacatgttttatatagatattcagaccgtccagaaggttcttgatgaagacgatgattgttactttcaggaggtagggtttcttctttgccaaaaacagagactcaaattccgaatgctgtcactgtgtaaggtttctctgaaaaccgaatcagttattgaacatatgccgaatgaagtatcttgtgatagaagaattgaagcttctgtgcagtggcaacgctaattttttttcctttttttcttttttcaaatttatttatttgttttactttttttgagctgaagatgtaatctgcacagaatccgaaggccagttcttttttttttaccactaataattaattttacttagataactattgtttaatttgctactgtattttgattatttattgtctagttcatctaaattaag

SEQ ID NO: 10288 - DNA, 761 bp, Glycine max
  Clone ID: 700902987_FLI
taaagccactaccttcattgaaaaaatacaagcttcagatggatcatggtatggttcttggggagtttgcttcacttacggtgcttggtttggggtaaaaggtctgattgctgctggaaggagtttcagtaattgctcaagcatccgtaaagcttgtgaatttctgctgtccaagcagcttccttctggtggctggggagagagttatctgtcctgtcaaaacaaggtgtattcaaatctggaaggcaacaggtctcatgtggtcaacactgggtgggctatgttggctctcattgatgctggacaggctaagagagattcgcaaccactgcaccgggcagctgcatacttgataaattcccaattggaggacggtgactttccgcagcaggaaataatgggagtcttcaacaagaattgcatgatcacatacgccgcatacagaaacatattccccatttgggcgttgggagaataccaatcccaagtattgcaatctcgttaatcgagccttagttagggtgtcatcctaattatttcgacctgtggacagtaaaagaaataataataataacctatttttcttttatttccatggctctcttaaaatgtttgtgactaatgagtttagtagtcagctaaaaaaaaaagcaaacacgtggagaatgcctgtaagttttttctattactcatagacgcctctcttgctttccctgcagcagaggaattaaatatatacataaatagagatataaatgttt

SEQ ID NO: 10289 - DNA, 1293 bp, Glycine max
  Clone ID: 700903084_FLI
gcaggatggcatagatgccatcgaagatgtgatctatcacattgagacatatgatgtgacaacaattagagcaagcattcccatgtttcttatgtctcgtaagatcaagtcattgggagtcaaaatggttatctctggagaaggatctgatgaaatctttggagggtatctatatttccacaaggcacccaacaaagaagagtttcaccaagaaacatgccgcaagattaaagcactccacaaatatgattgcttgcgagccaataaatcgacctttgcctggggtctagaagccagagtaccatttttggacaaagagtttatcagagttgcaatgaacattgatcctgagtgtaaaatggtatggatacagaatattgcaatgcaccatcacttaaaaaatgttacattttattaaagtggtttactacgtaatctgttcagataaaaaaggaagaagggcgaattgagaaatgggcactgaggagggcctttgatgatgaagaacatccttatctgccaaaggtactatgtgatttgaagcattgtagaactttgcaaaattaatttgttaaactaacatgttagactttaatttttatgcagcacattttatataggcagaaagaacaattcagtgatggagttggctatggttggattgatggccttaaagctcatgctgagaaacatgtaaaacttgaatgaaaccttttctcgctaatctctttttttttttttttttttctcttgttatcaatggtcaggcatgacatttcatattgttaattattggtttatgaaaatttcctttaggtaactgacagaatgatgctcaatgctgccaacattttccccttcaacactccaaccaccaaagaagcataccactatagaatgatatttgagaggttcttccctcagaactcagcaaggctcactgttcctggaggaccaagtgttgcatgtagcacagcaaaagctgttgagtgggatgctgcttggtctaacaaccttgatccatcaggtagagcagcacttggagtgcatgcatcagcttatggaaaccaggtcaaagctgtagaaccagagaagatcatacccaagatggaagtttctccactaggagttgccatatagagcttgtatgagccatagcaaggactagtagttgccctagaaccagcatataatattattatactagtcatcataaaatgaaaattttgcttgctttgtagtttatccagggaatggtatataaatagataaggctctctatctagctgtctt

SEQ ID NO: 10290 - DNA, 1326 bp, Glycine max
  Clone ID: 700903277_FLI
atattttcaaaagacctatatttggtaagccaatcaaattggacattaataaaggaatggagagggcagaacaaattggaggaggcaaagctgtggccacagtcctagccattggcacagcaaatccacccaatttcatccttcaggaggattatcctgacttctactttcgggtcaccaatagcgaccatttgcaccgcttgaagcaaaagttcaagcgcatttgcgagaattcaaagatagaaaagcgacacatagtccacacggaagaatacctaaagcagaactcagacagcggcacgtacgatggccttcccttggagacacgacagaatgtccccacggaacaggtaataaaattaggtatggaagcagcatcaaaggccattaaggaatggggcgaacccttatcagaaatcacacacctcatcttctacaccacttcttgcttcggctccgttcccggtcctgaccactacctctccaaacaacttggactccgctcaacggtcaaccgcctcatgctcttcagccacggttgccacgctggcggcaccattctccgcgttgccaaagatatcgcggagaacaaccctggctcacgtgttcttgccgtctgttccgagaccatgtttgcctcgtttcgcgctcctagcgaatccaacgttgaggttctcgtaggacaggctctgttcggagacggtgccgccgccgtcatcattggcgcggatcctaagcactccatcgagcatccactcttcgaactcgtgttggcttctcaaaccactgtgcctgacaccgagaatgcgatcaaaggaagtcaacaagagaataggttggtttattatttggataaggacattcccaatattgtaactaacaatgtgaagaagtgtttggttgatgagttgggtgaagttggtttcgtcgacgaaattgattggaacaagtttttctatgcaattcatccgggtggggctgttattgtgagtggggttgaagagaagctagggttagagaaagagaagctgagtgcgacatggcacgtgctgagccaacacgggaacatgtggagtccaactgtgatttttatcttggatgagatgaggaacaggtccaagactgaggggaagagcacaaccggtgaagggttagagtgggggattttattagggtttggtcctggtgtggcaatggaaactgtgcttttacgtagttatccatgttgataaatagttacaaggagttacaaatactactactgctactcatgtttatgtatttatgggtattttttttaagaataaatgtggtaactttcttagt

SEQ ID NO: 10291 - DNA, 1445 bp, Glycine max
  Clone ID: 700903290_FLI
gttatttttagagctagtataagcttgtaacctattatgactttgatgaagagcaacgcataaccaatggccactgaatttttttccttatcttccagtgctgcctttactcttaggccttggccaaaagaatgagagagatcatcatcaattgacatggaatcatgtgtgcctccaggatttagatttcatcccacagaagacgagcttgtggggtattacctcaagaggaagataaactcgctaaaaatcgatctagatgttattgttgagattgatctctacaaaatggaaccatgggacatacaagataggtgcaagctaggatatgagcagcagaatgagtggtactttttcagccataaagacaagaagtatccaacagggacaagaactaacagggcaactgctgctggattctggaaagcaacgggaagagacaaggctgttatgtccaaaaatagaatcataggaatgaggaagaccttggtgttctacaaaggacgtgctcctaatggaaggaaaacagactggattatgcatgaatataggcatcaaacttctgaacatggccctccacaggaagaaggatgggttgtgtgccgagcatttcgaaagcctagtccaagtcacaggccaggctttgaccacccatggtgcagtactagtagtcaacaacaacactttttcagagaccaaattcaaagctattcatcaagacccttatcaattgctgacattttggatgaaacaaataatgtgcctcaccctaatgctgaaggtacaagttttagtcaccccttcagctcggatcatcagcaacacctgaataatcttctatcaaaccaaactgtggctattatggacaaacaactcattgagcttccacagctagatagtcccactgcaagtttggcaatcaaagaatgtaaccaacaacaacataatggcttaacaaatgaggaatattgcagtgatgaaaggagtaacaatagcaatgcacaagggatcgattggaagagcttggacaacttgtttgggtctcaattgagtgataatgcagcttatttttcacatccaaacttgcccttgatgatgccccataaccatgatcaagctagtcatatccttggatgcttccctgattcttcataattaacttgtgtgtcacgtaccaaccataatccatagccaaattaataaataaagtctctaagtaagatatgatggatatataatattcattatatcatagttttccatttatcttaccataagctaatttagaagttgttgctgggagattgaatattaccaaaaagctttttaggtgatgatgatattatatatatttttacgtgataaaggagatttgcttgaagagtgaatctctgatcctttgtattagagttcagaagatcataagccttttctttttttctttt

SEQ ID NO: 10292 - DNA, 651 bp, Glycine max
  Clone ID: 700903312_FLI
tgaacacctacagtctgattcacactgtccagtttgtaaggaacgatttgaactgggatccgaggccaggaagatgccatgtaaccacgtttaccactcagattgtattgttccatggttagttctgcataactcgtgtcctgtgtgccgtgttgagctgccaccgaaagaacatactagttctcgtggtagacgaatttggggtaatggcagtggtagtggtagtagcaatgatatctctaggggaagagagaatagacagatgaacaatggaaggagaaatctgctatcttatttgtggccattccggacctctagttcaagtactcagagtgtgtttgttttatcagaatcacactttccaaagcatgttgaacgtgatttctatgagattgattttgaaggtgattcaaagccaaaccaaaggcaaccttaatcattgtgctgagaccggggaatctactgttttatatctctttggccagaacaatgacagaagttaaaaagtttcctttcttcttcgagacaagtgtaattagctgtcaaaaaatgcttgtaatttaaatgacatgaagaaagtttctgtagattgtgctttgagcttgatctcatagatcatagaagtatgcgaatatctttgtaaatacaata

SEQ ID NO: 10293 - DNA, 915 bp, Glycine max
  Clone ID: 700903387_FLI
gtcgatgtttacattgccaagggtgctggcatcacggtgcagtttgtgaagaacatcatcatccatgggatcaaggtctttgacatcgtgattcgtgagggtgggatgatcagagattctgagacacattatggtttcaggactaagagtgatggtgatggcatttccatctttggtagcagcaatgtttggattgaccatgtttccatgagaaattgtagtgatggactcattgatgccatcatgggatccactgctattaccatctccaacagccatttcacagaccacaatgaggtgatgttgtttggtgccagtgacagttattctgatgataagatcatgcaaatcaccttggcattcaaccacttcggcaaaagattagttcaaaggatgcccagagttcgatatggttttgtccattcggtaaataatgactacactcactgggaaatgtatgccattggtggtagcaagaaccccaccattatcagtgagggtaaccgttttattgcccctgacaaccaattcgctaaacagattacaaagagggaatacgcaccagaaaacgtatgggcaaattggcagtggagatcaattaacgatgtgtacatgaatggagcattttttgtgcaatctgggcctgagctggctagcagaccattctcaagagaagacatgatcaccgctaaggtaggaaattatgtaggaaggcttacacgctattctggcaacctgttgaagtgcagagtgggtcgcccttgttaattatcctttttcccattaattctcttcctcacaatacccataatgatagaatggccaaggatagaaacaagaagagagaaagcaagaaaattgtatatatacgccatatgcttttgaaaaaaataaaaaattgattgattttatctc

SEQ ID NO: 10294 - DNA, 1377 bp, Glycine max
  Clone ID: 700903424_FLI
caaaacttgctatagcagtaagctataactcatttgaggctctgtgagaattgagaaatggctaaagatgttgaggttcaagagcaaggaggagagtactctgccaaagactaccatgaccctcctccagcacctttgttcgacccagaggagctcacacagtggtccttctatagagccctcatcgctgagttcatagcaacccttctcttcctttatgtcactgtgctcaccattattggctacaaaaggcagactgatacaacggtaggtggcaccgactgtgatggggttggcattttgggcatcgcttgggcctttggtggcatgatcttcatccttgtttactgcaccgccggtatttcaggaggacacataaacccggcggtgacattcgggttgttcctaggacgcaaggtgtcgttgataagggcgttgttgtacatggtggcacagtgtgccggtgctatctgtggtactggattggccaaggggttccaaaaagcatactacaacaggtatggaggtggtgccaactctgttgctgatggctacaacaatggtactgctttgggtgctgagattattggtaccttcgttcttgtctacactgtcttctctgccactgaccctaagaggaacgctagggattcccatgttcctgtactggcgccacttcctattggatttgccgtgttcatggttcacttggctacaatcccaattactggtactggcattaacccagcaaggagtttcggagcagctgtaatctacaacgaagacaaaatctgggatgatcagtggatattctgggttggaccaattgttggagcagcagtggctgcattttaccaccaatacatccttagagcagcagctatcaaggctcttggatccttcaggagcaacgcttaattaattaatcaattaagctagctaccttgattaatttgccaacaagggctatgcatggtgtttcccccgaagaataataatttctatgttgaggagtgctagtgatctgtctatgcagttccctaatttaggctttttcgtcttttcctctcatcagctacagttgttgggggtgtttggaagagaaggccaaaaccatgggggcatgcatcaaattgtagataagcatgcttgtgtccaagggtgtattttgtatcccttttgtgtcttttctttttctttttcttttttttaatttccatgtatgtattccttgagtgttccttttctgtcttgtgcatccttagtcatttctcattttactcttcataattaagtactcatcttctcttgtttattaaagctttattaatcatcatctatgaatgtaatgtaccttgacttgagtaatatttatat

SEQ ID NO: 10295 - DNA, 900 bp, Glycine max
  Clone ID: 700903463_FLI
aagaaacacaaaagatagaaagaaaataaagagaaggagaaggggagaagagagaaaggttgtattgagagatatggggaggggtaagattgagatcaaaaggattgagaactcaagcaacaggcaagttacctactcaaagaggaagaatgggatccttaagaaggcaaaggaaattagtgttctatgtgatgctcaagtttcccttatcatctttggtgtctctgggaagatgcatgagtacatcagcccctccactacgttgattgacgtcctggacagataccaaagagcctctgggaagaccctgtgggatgctaagcatgagaacctcagcaatgaaattgatagaatcaagaaagagaatgacagcatgcaaattgagctcaggcacttgaaaggagaggacatcacgtcactgaattacaaggaactgatggctctagaggatgcccttgaaaatggcctcagtggagtccgtgagaaaaagatggaagtgcacaggatgttcaagagaaatgacaagattttggaggagcaaaataaggaactcaatttccttctgcaacaacatttggcactagaaggtgtgggaaacatgcatggacaatggatttaacgagattaaaagggtattcaattcgcatatgcaacgcgcagctagcctaaaacagccaaatctaaaagaaagaatatagattaatggctggtcttgtcaaattagttctgctcaaagccttaagttatatgaacttctatcatttctgatttcggccgtatttgttaaagctcggtagtgtatctctaaaacttgttatacgattattgaattctgattacgaaactatcaattaatgtgcatgtatgctgccaatttgagttatatatacatgcatggag

SEQ ID NO: 10296 - DNA, 2239 bp, Glycine max
  Clone ID: 700903581_FLI
ataaactcctaccaaggttctctcgttcactcctctctctctcatcgtacgtgcatccatctctcaacaccaaattactacttgcttctcttattactctccccaatattgcctcttgtactttttatgctgattgcccttgaacccttcaagtttcgacacacattgttcactctcacaatatttgcatgcaacagatctcaattattcaccaatcaaaaccacttgcacattttttagttgaacacaataatttcatctatcactcccgttttagcccccacttgaatactacacagctagggtttactttcctcatttaagctgcaatggatccaattgaatttgcgtggtgatggtaatagcagcctctagctcctccggtgagggaaggtgcaagcaataaaggtttaattttttgttttgggagttgggcccagcactcacatggacgcagcaacggctttaatgatcctatcagcaatagcggcctatttaatatggttcaccttggtcactcgctccctcaaaggtccacgtgtctggcccctattgggcagcctccctggcctcatccaacacgccaaccgcatgcacgactggatcgctgacaacctccgcgcgtgcggcggcacgtaccagacctgcatctgcgccctccccttcctcgcccgaaaacagtgcctggtgactgtcacgtgcgaccccaaaaacctcgagcacatcctcaagcttcgcttcgacaactacccaaaaggccccacgtggcagtccgccttccacgatttgctcggcgaaggcatcttcaactccgacggcgacacgtggctcttccagcgtaagactgccgcactggaattcaccactcgcaccctgcgccaagccatggcgcgctgggtgaaccgagccataaagcacaggttctgccccatcctagccacggctcagaaagaaaaccaatcagtggatcttcaagacctcttgcttcggctcacttttgacaacatatgcggcttggctttcggccaagacccgcaaaccctagccgcggggcttccagataacgctttcgctctctccttcgaccgagccactgaagccactctacaacgctttattctgccggagatcttgtggaagctgaagcgatggctcaggctcggaatggaagtgagcctgagccggagcctcaaacacatcgaccagtacctctcccacatcatcaagaaccgcaagctggagctgctgaatggtaatgggtcccaccaccacgacgacctcttgtcccgcttcatgaggaagaaagaatcctactcggaggagttcctccaacacgtggcactcaacttcatcctcgctgggcgcgacacgtcatcggtcgcgctcagctggttcttctggctctgcgtcaagaacccgcgcgtggaggaaaacatcctaaacgaactctgtactgttcttctgtccacgcgtggagataacatctccacgtggctgaacgagcctcttgtgttcgatgaggtagaccgtttggtctacctcaaggcagcattgtctgagacactgcggctttatccctccgtgccggaggactccaaacatgttgtgaaggatgatgttttgcctaatggaaccttcgttccggcaggttccgcggtgacctattcaatttactctgttgggaggatgaagttcatttggggagaggactgcctcgagttcaagcctgagcggtggctctctcctgaaggggacaaaattcaggtgcaagactcttacaagtttgtttcgttcaatgcgggacctaggctttgtttggggaaggacttggcttacttgcagatgaagtcaatcgccgccgcggtgctcctgcgccaccgcctcgctgtcgcgccgggccaccgcgtcgaacagaagatgtcactcacactgttcatgaagtacggtctcaaggtgaatgtgtacccaagggatctcaaacccgtgctggaaaaattaaccaccatcaagagtgttactgttggtcaaaagtgattttgatttggttaattaaaacagatagatacatcatcggtttaaataaagaaataattataagaattttatatattacttaatatagaatgatggtgtatcatttcacttgtgttagtttaatttacgctggctgtatagatgaaatttccctttactcacaagtttctcatttgatgatgaatactatatatgttttgcatgt

SEQ ID NO: 10297 - DNA, 1117 bp, Glycine max
  Clone ID: 700903662_FLI
ctagcaatggaggcgattaggaagagtaggattcttatatttggaggaactggttacatagggaagtatatggtgaaggcaagcgtcacgttaggccatccaacttttgtctacactcgccctcttgatgcacaaactccttcctctaaggcacagctttgcaaggagttcaactctatgggggtcacacttgtccatggagaacttgagcatgaccagattctggcagtgattaaacaagtagacattgtgatatgttctcttccataccctcaagtgatggagcaactcaaaattatagatgctatcaaagttgctggtaatataaagagattccttccatcagattttggggtggaagaagatagagtaaaccctcttcctccgttccaagctttcctcgataagaaaagaaaaattagaagggaaattgaagcagctgggatcccttatacctttgtctctgcaaactgttttggtgcttactttgtcaattatttgcttcgtccttacgaaattactgtctatggcaacggtgatacaaaagctgtgctaaactatgaagaagatatcgccatgtacactattaaagtagcgaatgatccaagaacatacaatcgtgttgttatctaccgaccctcgaagaatatcatatcacaaaatgagttgatagcattgtgggagcaaaaaagtggtcaaaattttcgcaaggattttgttgctgaggaagagattgtcaacctatcacagaccttaccccctccacacaatattcccgtttctatccttcatagtgtatttgttagaggggacctcgtgaggttcgagataggagaagatgaccttgaagcttcacagctatatcctgattataactacacatccattgatgaacttcttgatatatttcttgttgatcctccagcccctgcctctgctgcttttgagtgaagacattttaccctgcacttgttggttataaattgtaataaagtaggtgatcctcccgattaccgttgaataacatgaaaaggcataaatgtttgggatacatgattaatagacttaaatatgattttattcttaataaatatttgattttatatttatttttttt

SEQ ID NO: 10298 - DNA, 2397 bp, Glycine max
  Clone ID: 700903715_FLI
gaacctcaatctctccgagcagcggtccatttctctcccggaacacccataagatttccggcacggcgatggccgctgttcgcctccttctcctcctcctcttccctttctcctctctctccctttctgaaaacgaagcccttctcaacctcaagaaatcattctctaaccccgtagctctctcttcctgggttcccaaccagaacccttgctcctccaggtggctcggcgtcatctgcttcaacaacatcatcaacagcctccacctcgtcgacctctccctctccggcgccatcgatgtcaacgccctcacccaaatccccactctccgctccatcagcttcgtcaacaactccttctccggcccaatccctcccttcaaccaactcggggccctcaagtccctgtacttagcccacaaccagttctccggccaaatcccctccgatttcttctcgcaattagcttccttgaaaaaaatatggatctcaaacaacaagttctccggccccatcccgtcttccttgaccaaccttcgcttcctcaccgagctccacctcgagaacaacgagttctccggcccggtgccggagctcaagcaagacataaaatccttggacatgtcgaacaacaagctccagggagaaatccccgccgccatgtcgaggttcgaagcgaagtccttcgccaacaacgaaggactatgcgggaagccgctgaataatgagtgcgaggccggtggtagttcagaagtagggtcgggttgggggatgaaggtggttattgtcctcattgtcgctgttgctttggctttcatttttgcgttgacgcggtcgaagcgtcgacacgacgatgatttcagcgtgatgagcagggatcacgtggacgaggtggtgcaagtgcacgtgccgagctcgaaccatagcaggggggcctccgagggggggagcaagaaggagtcttcttcgtcgaagaaagggtcttcgcggggcggcatgggtgaccttgtgatggtgaacgacgagaagggcgtgtttggcttgcccgatttgatgaaggctgcggcggaggttctcgggaacggtgggttgggttcggcctacaaagctgccatgaacaatggcctctctgtggtggtcaagcggatgcgcgagatgaataaagtcagcagagacatctttgacgccgagatgagacgctttgggagactcagaaaccttaacatcattacgcctctcgcttatcattaccgcaaggaggaaaagctgtttgtcaccgaatacatgcccaaaggaagcttgctatacgtcttgcatggtgacagaggatcgagtcatgctgacctgaactggccaatccgtttgaatatcgtgaagggaattgcgcgagggttggactttatttattcagaattttccaacgaagacctgccacatggaaacctgaaatccagcaatgttctactaactgaaaattacgagcctctcctaagcgatttcgcctttcatccactcatcaaccccaactacgccatacagacaatgtttgcctacaaaacacccgattacgtatcataccagcatgtttcacagaagaccgacgtgtattgcctcggaatcatcgttcttgaaatcatcactgggaaattcccctctcagtatcacagtaatggcaagggtggcactgacgtagtgcactgggtgttcactgcgatttctgagagaagagaagcggaattgattgatccagagttaatgagcaatcactcgaactccctcaatcaaatgttgcaacttctccaagtaggggctgcttgcacggagagcaaccccgatcaacgacttaacatgaaggaagccattagaaggatagaggaggttcaggtttaaatatgttgtgtcaatatgctagcttagtacaaagttgcttttgtaggtgagaattgcagtgcaggcctaggaaagattgcttttagcatcttgatccaacaatcactttgtgcatgagaaccacacagtccacggggctaaagagaatgattcggagggagaaagaaaggcagagggtggcatgctgtttcaagaacttgatgtcatatatctaagtccaaaaactatgaaatagagcataaattgagagatgctgaagcttggagttttggacaatttttggtccttctgaagaagagagaaaaatgtcaaagtccaagctaattttgttggtgggcgtgcctctttctgctgatagcaacccttgtgaattgtgtgcaattcgtataagatgaaaccatttttgagacagcatcgcccaattttactgctgacaagtttgtaccctgggattttcccacttttccttttattcctatcaaatccaagggatttcttttgatttctc

SEQ ID NO: 10299 - DNA, 1647 bp, Glycine max
  Clone ID: 700903722_FLI
cgagacagaaaaaggggttagggtttgttcttgtgatcgaagctaagcgaagcaaaatgggtggatcagtgagggacgtgaagtcgaagggcgaggtcgacgaggtggtggcgagtggctctccggttatcctccacttctgggcgtcgtggtgcgaagcttccaagcacatggaccaactcttctctcacctttccactgatttccccaacgcccgcttcttaagggtcgaggccgaagagcaacccgagatttctgaggcttactccgtctccgctgttcctttctttgccttctgcaaggatgggaagacctttgatacattggagggagctgatccgtcaagcttagccaataaggttgctaaagtagcaggctcaattaaccctggagaatctgcatctcctgccagtcttgggatggctgcaggggcttctgttcttgaaacggtgaaagaattagcaaaagacaatgattcttcaaaggagaaaaatcaagttcaaccagggcttagtggtcctctgaaaaagagaattcagcagcttgttgactctaatcctgtcatgcttttcatgaaaggaactcctgaagagccaaaatgtggatttagcaggaaagttgttgttgtgttgaacgaagagagagtcaagtttggaagttttgatgtcctatcagactcagaggttcgtgaaggcttgaagaagttttccaattggcccacatttcctcagctttactgtaaaggagaacttcttggtgggtgtgacatagcaattgctatgcatgagagtggggaactgaaggaagtttttaaagatcatggaattgatactactaatgaagcaaaagagaaagaatcaggaaacggcaaaggtggcatctcaaaatctactgatttgagtacaaccttatcctctcgtctggaaagcctggtaaattcaagtgcagttatgctgtttatgaaaggaaagccagatgaacctaagtgtggtttcagtaggaaggtagttgaaattctccagcaagaaaatgttccctttgagagttttgacattcttactgatgaagaagttcgtcaagggcttaaggtttattcaaactggtccagttatcctcaactgtatatcaagggtgagcttattggtggatcagatattgtgttggagatgcaaaaaagcggagaacttaggaagaatttacacgagaaagggattcttcctgcagagaccattcaagatcgactgaagaatttgattgcctcgtcccctgtgatgctgttcatgaagggtaccccagatgcaccaagatgtggttttagttccagagttgctgatgcccttcgacaagagggcttgaattttgggtcctttgatatattgactgatgaggaagtgagacagggattgaaggtatactcaaattggccaacctatcctcaactctactacaaaagtgagctgattggtggtcatgatattgtgatggagctgcgaaataatggggagctgaagtcgactttatctgagtaggattattattattccttcaaataacatgtgttatgtcctagaagccattttgggaggttgtgtttgatgtcattaatgaactacatggttattttatatgctaccgtcagtgattttg

SEQ ID NO: 10300 - DNA, 1510 bp, Glycine max
  Clone ID: 700903739_FLI
ggaagatgtgtttgagttcctcgggaacgttcctctgctacagaggcttcctggctcgtctgtaaggaagatatctgagcttgtgattctcaaacactatgagccgggagagtatgttgttcgtgagggagaacgtggggatggtctttacttcatctgggagggagaggctgaggttgttggctctgttaatgctgacgatgataatcatccagagtttcaattgaaaagatttgactattttggttttggtttatcaaatgaagttcaccatgctgatgttgtagctttgacaaagctatcatgcttggtgctgccccatgagcactcagcattgctgcagccaaagtctatttggagtgcagaaaaatctcatgatacatgctcacttgtggagcatatattgcatttggaccctatagaggtagacatcttccgaggaatcactcctccagatgctccaacatttgggaaggtatttggtggacaaatagttggacaggcactggctgcagcatcaaaatctgttgattgtcgtaaagttgttcatagcttgcatgtctattttcttcttgtgggggattttaacatacccattatatatcaagttaagcgtctccgtgatgggaagagttttgctacaaggaaagtggatgcaattcaaaagggaaatgtcatattcactttgttggcttcatttcataaggaagaagtagggtttcaccaccaggaagtgtctatcccatcagtccctgctccagatacgcttttatcgttggaagagcttcgggagcaacgtcttactgaccctcgtcttccaagaacttaccggaacaaggttgctacaattgaattcattccctggcccatagagatacggttctgtgaacctaaaatttcaacaaatcagaccaaatctcctcctagtttgagatactggtttagagcaaggggaaaactttcagatgatcaagccttgcataggtgtgtggtagcatatacatcagatctaatcttccttcaagtgagtttgaaccccaaccgtaggaagggaaggaaggctcgtgctgtgagtctggaccactccatgtggtttcacagacctttaagagctgatgattggatactatttgtgatctttagtcctactgccaataatgcccgcggctatgtcactggccaaatgttcaatcagaagggagagcatcttgtgtctgtggttcaagaaggtgtaatgagggaagttatttctgctaagtcagccatcaaatctaatctatgaatagctaaaaatgcactgaaacttgtggtgttctttttagttttgtcttcttttgttttccttctatagtgaatgatcgggtgaaccatacaataggtggtgcaccactatatcaccatcatatagtgcacctttatttttaatcaacggttcaaaattgtgattgacaagtaattgatgtgttagatttatttccaattaactagttttaaaatttacaaattggtc

SEQ ID NO: 10301 - DNA, 1207 bp, Glycine max
  Clone ID: 700903761_FLI
gattgctgatgtttccaatgctaacggatggggagatgatgacccaaccatctttgagatgacaatcgttgcaaccttacaaggggaattccaattgacaaatggctatgggccaaataaagctccggaaattatgaaggaacattggaacacttttattgttgaagatgatttcaagttcatgaagagtcatggattagatgctgctagaattcccgttggctggtggatagcaagtgatccatatccacccccaccttatgtcgggggttccttgcacgcattagacaatgccttcaagtgggcacagaaacatggattgaaaatcattatcgatcttcatgctgcacccggctcacaaaatggctttgacagcagctctacaagagatggttctctagagtggggaaaaacatatgaaaacatcaagcaaacagtttacgttatagacttcctaactgccaggtatgcaaaaaaacccgagcctttacgcagttgagctcttaaacgagcctttgtttcctaacgtgactctagagagcttgaccaagtactacaatgatgcttacaatgcagtgcgcaggcactcttccacagcttatgtggtgttatcaaataggttggatctctcaagtcaactagaaatcccaaacaccaaggaactcttccctcttgccacaggccttaggcgatgtgtgattgatgtccactactacaatctctattatgatatatttgaagacatgaatgcgcaagagaacattgatttcatctacaaagtccgttcatcacagttggataatattacaaccgtagatggtcctctcactttcgtgggtgaatggactgctgagtggaaggttgaaggggctaccaaaaaggattatcaaagatttgtcaaggctgaattagatgtttttgggcgagcaacatttgggtggtgttattggacactcaagaacgtcaataatcattggagtttggaatggatgatcaagaatggctacatttaagttttaaaaaaattcctcttgccgtgtgcaccctctattcctatcatattatgcccttttaatatttctcaatatcaattatgatattgatatcataattaatgtctacgtatagatctttaacgttcttcacttccggaaaggcagaaatatcaaagttgtagaccctttcattagtgaaaacggttcaaaat

SEQ ID NO: 10302 - DNA, 1364 bp, Glycine max
  Clone ID: 700903834_FLI
accatatttgctatggctccaatgcttcatatatttaaatgaaggaattgagttcgaaagtggttgtcttctgaagagaatttttttttttttttatcattcatgggtttttttgtagcacatgtagtgcaaggatcagcactagcccttcttggattatggcacaccatccacaccatcagatcttacctggtgaagggccctgccaacttcactgtaagattctggtaccagtttaacactacccctcagtctagacttaaacacttagaacttgtttctattttatccttttccatccttgcatttttcgatcaaattctagacttccctcatttccactatgcctttaagcttgacaactttgagcatgcaactatgttcatacaccttgctttgtttgctggtttctccctctccactgagttgactgattcacttgacctcttctccggctttgttgggatacttgcatcctcggtgtttagtcaagaactattccttctccattttcactccacagaccatgttggacttgaaggccattaccactggctgctgcagctcatagtgcttgtctcactagtatcatctttggctgcaactatttttcctaacaatttcaacgcggctctcgtgctttctatttcactcatcttccaaggatgttggtttataaacatggggtttatgctatggattccatcttttgtccctgaagggtgtgcggtgaatttggccaagccaagtggccatgaaatcattggagcagtgacttgtagttccaaagaggctgatttcagggccaggggattggccaatttgcaattcagttggatcctttcttcaattctgatatttgcaggaatcatttgcttgaaactttctaggaaatgtacaattacaacaaaccggttggagtatgagagaattcaaactaaaggtgcaacagactcagctttggccaatgaaggtttcaagcaggccatataatctactagcacagtttgttaaacaggtctgttgcttgcacttttaaggtctcaagtgtacatgagacctgagttatgcaaatgaaataagctacagtgtattttattatataccaagtttaaatatagatgtccaacaatctgttaggttttataacctgtcaggaaatccttagctagctatataatgttggtagagttcaaaactatcaagttactaaatgtaagaagcataacatctccagatcttgattgcttcatgaattcccttaaatttcaaacaacattctgctggtattggacttgtaaattataaggatgtttctgcgtatcaattgagagtttagttttgttggtttcattgatgaccct

SEQ ID NO: 10303 - DNA, 2737 bp, Glycine max
  Clone ID: 700903859_FLI
gcaaagatgacaggtgggatgtttggaaggaaggggcaaaagataaaggggacagtggtgttgatgccaaagaatgtgttggacttcaacgccataacctccgtcggaaaaggcagtgctaaggacaccgccaccgatttcttgggcaaaggcttggacgcattaggtcatgcagttgatgctctcactgccttcgctggccatagcatctccttgcagcttatcagtgctactcagactgatggtagtggaaaaggaaaagttggaaacgaagcctatttggaaaaacatcttccgaccttgccaacgttgggagcaaggcaggaagcattcgatattaactttgaatgggatgctagttttggaattccaggagcattttacatcaaaaactttatgactgatgagtttttcctcgtcagtgttaaactcgaggacattccaaaccatggaaccattaacttcgtttgtaactcatgggtttataacttcaaaagttacaaaaagaatcgcattttctttgtcaatgatacatatcttccgagtgctacaccaggtccactagttaagtacagacaagaagaattggaggttttaagaggagatggaacagggaagcgcagagactttgacagaatctatgattatgatatctataatgatttgggcaatccagatggtggtgatcctcgcccaatcattggaggctctagcaactatccttaccctcgcagggttagaaccggtagagaaaagaccaggaaagatcccaacagtgagaaaccaggcgagatatatgttccaagagatgaaaacttcggtcacttgaagtcatctgatttccttacatatggaatcaaatccttatctcagaacgtgatacctttgttcaaatctataatatttgacttaagggtcacatcgagtgagttcgatagcttcgacgaagtgcgtggtctctttgaaggtggaatcaagctgccaacaaatatactgagccaaattagccccttaccagtcctcaaggaaatcttccgcactgatggtgaaaatacccttcaatttccaccacctcatgtaatcagagttagtaaatctggatggatgactgatgatgagtttgcaagagagatgattgctggtgtaaatccaaatgtaattcgtcgtcttcaagagttcccaccaaaaagcactcttgatcccgcaacctatggtgatcaaactagtaccataacaaaacaacagttggagattaacttgggtggggtcacagtagaagaggcaattagtgctcacagattattcatattagattaccatgatgcattcttcccgtatttgacgaagataaacagcctacctattgcaaaagcttatgccacaaggacaatcctgttcttgaaagacgatggatctttaaagccacttgctatcgaattaagcaagcctgcaacagtgagtaaagtggtgttgcctgcaacagaaggtgttgagagtacaatttggttgttggccaaggctcatgtcattgtgaatgactctggttatcatcagctcataagccattggttaaatactcatgcagtgatggagccatttgccatagcaacaaacaggcatctcagtgtgcttcaccccatttataaacttctttatcctcactacaaggacacaataaatatcaatggccttgctaggcagtccctgattaacgcaggtggcattattgagcaaacatttttgcctggaaagtactccattgaaatgtcatcagttgtttacaagaattgggttttcactgaccaagcattaccagctgatcttgtcaagagaggattggcagttgaggatccctctgccccacatggtcttcgccttgtgatagaggactacccttatgctgttgatggacttgaaatatgggatgctattaagacatgggtccatgagtatgtctctgtgtattacccaacaaatgcagcaattcaacaagacactgaacttcaagcatggtggaaggaagttgtggagaagggtcatggtgacttaaaagataagccttggtggcctaaactgcagactgtggaggatctcattcaatcctgctctattatcatatggacagcttcggctctccatgcagctgttaattttgggcaatacccttatggaggttatatcgtgaaccgtccaactctagccagaaggtttatcccagaagaaggaaccaaagaatatgatgagatggtgaaggatcctcaaaaggcatatctgagaacaatcacacccaagttcgagacccttattgacatttcagtgatagagatattgtcaaggcatgcttctgatgaggtctaccttggccaaagggataatccaaattggactacggattcaaaggcattggaagctttcaaaaagtttggaaacaaactggcagaaattgagggaaaaatcacacagaggaacaatgatccaagtctgaaaagccgacatgggccagttcagcttccatacacattgctccatcgttcaagtgaggaagggatgagtttcaaaggaattcccaacagtatctccatctaaaatgtgtgtgtggtttgcttatctattgtgcttttgaataaaatagacaatacttgtctatggttattattggctgtatgtctgtatttggatgctctcgatcggtttgcaagtaataagagtgttttcactgtcactttgtatttcgatc

SEQ ID NO: 10304 - DNA, 1211 bp, Glycine max
  Clone ID: 700903880_FLI
ctcgtttcacatggcttccccaaacccaaaagagatcgttgcagagattcctacctatatcagagtcttcagcgacggcaccgtggaaaggccaagagaaacaccctttgtgccaccctcaattgatgaccctcaaaccggagtctcatccaaagacatcgtcatctcacaaaaccccttagtctctgctcgaatttaccttccaaaacttaccacaataaatcaagttcccatcttggtcttctttcacggtggtggcttctttttcgaatccgctttctcccaactctaccaccaccacttcaacaccttcgtttcccaaacaaattgcatagtagtctccgtggagtacaggctcgccccggagcaccctctccccgcatgttacctcgattgttgggaagctctcaaatgggtcgcatcccattccagcgaaaatagccccatcaacgcagaacagtggttaattagccacggcaatttccaaagagttttcattggaggtgacagtgcaggtggcaacatcgttcacaacattgccatgcgtgctggcactgagcctttaccttgtggtgttaagttactaggagctattttcgcccacccttacttctgcagctcatacccaattgggtcagaacctgttacagggcatgaacagagtttaccctatgtggtttgggattttgtttacccttctgtacccggtggcattgataaccctatggtcaacccagtggctcctggggcgcctagtttggctgaattggggtgttccaagattattgtgtgtgtggctagcgaggataaactaagggatagaggggtttggtactatgaagctgtgaagaagagtgggtggaaaggggatctggagttgtttgaggagaatggtgaggatcatgtttatcatatcttccatccggaatctgagaatgccacgaagttgatcaaacgcttgggtttgtttctgaatgagtagaataaatgtctttgcttgatttctcctgttgtgttgtgtgagaatatgaataacaacaaccatggaatggttcctctgtgatctgaaattctgaatattgtgattttgtgttccttgttctcttcctctgttccagtttttgttactgtttgggttttactttcctatatgatgtaaaatttacacatggaataacgtggaaaaagtaggtggtgcggtgatgcgaagc

SEQ ID NO: 10305 - DNA, 723 bp, Glycine max
  Clone ID: 700903985_FLI
cacacatagcagggtatgttcagctaagtgggaaccaaatgagtggtgaaatcccttcagaaattgggaacatggtgaacttcagcatgttgcattttggggataacaagttcactgggaaattccctccagagatggtaggtttgccacttgtagtcttgaacatgaccagaaacaatttttctggtgaacttccaagtgatattggcaacatgaagtgtctacaggatctggatttgtcttgtaacaatttctccggagcatttcccgtaactttggcacgcttggatgagcttagcatgttcaacatctcatataatcctctcatatctggtgcagtcccaccagctggacacttactcacttttgacaaggattcatatttgggtgacccccttttgaacctgttctttaacatcactgatgatagaaataggactttacccaaagtcttgaaaaatcccacaaaatggtctttggttttggctctagcacttgctatcatggtctttggacttcttttcctggtgatatgtttcttggtgaaaagtccaaaggtggaaccaggatacctcatgaagaataatacaaagaagcaagcacatgattcaggcagcaccggatcctcagcagggtattccgatactgtcaagatattccacctaaacaagacagttttcacacatgctgacatcttaaaagcaacctccaacttcacagagg

SEQ ID NO: 10306 - DNA, 3370 bp, Glycine max
  Clone ID: 700904003_FLI
ttcaatttcaatttcaatttctttctttctagacgttacattctctctcttccaaagtcacacacaccacattctctctcttcttaaccctctctgatgtttcctcagtttcatcgatggagagtgaagccttaactcttctgcttcttccgtgttcagatctcgttgttgttgcttccgattctttgattcttcgcttttttcttctcacttcacattccgattcgtcgcagattctttcagtttctaaacttgatgatcgccactgcctccacctgtaatcggtgaatttctccctctctctctctctctcttctctcagctcatgaattttcctttttctttattagctgttgaatttacacgatcatcgagtgaatcacttttttcttcttctattttcatggttagaaatttttgttctattttcattttgcaattgttttgttgttatctttaatctgctaaagatgattctagatttacctcagatctgtgctcttgttgtgtttcattttttaagattaaagtaatgcacacacacacaaacacacatacacacactcacacacacacacatatatgtgtgtatgtatattattattttcagctacttgtttgtcaacaatactttcgtgtggttatgctaccttgtgatttgttattatttattaattttcttaaataattttattgtttatgttactatttctcatcaagcgtggtttttgcttaatctgttgttagaatccttagtaaacttttgtgttattgtgaatttttctatgccaaatttaggttattttttttattctttaatttgttgatttattgattaatggtttgtttgtgtttttttatgattattgtcccagttagttgaagtcacgtgaggtggtccagagaaatcaaaatctccttcaacttcgtcttccctttaggtgtaaaagtcagctaacgataaagaaatgaaatcgctaactgttaatactgaagattctttttccagtttgctggaacttgcttctaacaatgatattgaaggcttcaaggtgcttttagagaaagattcttcttcgatcaatgaggttgggctctggtatggccggcaaaacggatcgaagcaatttgttcttgagcacagaacccctttgatggttgctgcaacttatggtagcattgatgttatgaagattatactgttgtgccccgaggcagatgtaaatttcgcgtgtggggcgaacaaaaccactgctcttcactgtgctgcttctggtgggtctgccaatgctgttgatgctgtgaagattcttttatcggctggggccgatgtgaatggcgtggatgcaaatgggaatcgccctattgatgtgattgctgttcctccgaagctgcaaggtgcaaaagccgttctcgaggaacttctctcggacagtgcttctgaaggctcaattggtgaattctctgtcccagtgtctgttaatacttccagtctgggttctcctggccattcctcgaatgggatgccgtatactccttcttcctcaccgccatctcctgtggtggcaaagtttactgatgcagctgtttgctctttgtcggagaagaaggaatacccaattgatccatcgctgcctgatataaagaacagcatatatgcgaccgatgagtttcggatgttttcgttcaaggtgaggccttgttcccgggcatactctcacgattggactgagtgtccttttgttcatcccggagagaatgctcggaggagagaccccaggaagttccattacagctgtgtgccatgccctgattttaggaaaggggcttgtaggcgcggggacatgtgtgaatatgctcatggggtgtttgagtgctggctgcacccggctcagtatcggacacgcctctgcaaagatggtaccagttgcaatcgaagggtgtgtttttttgctcacactgcggaggagcttcgtccgctgtatgtgtccactggatctgctgtcccttcgcccaggtcatctgcctcggctcctaatgtcatggacatggctgctgcgatgagccttttgccgggctcgccttcttcggtctcttccatgtcgccatcccactttgggcaaccaatgtccccatctgcaaatggcatgtcactgtcttctgcttgggcacagccaaatgtgtcagctcttcatttaccaggaagcaatcttcagtctagtcgattgaggtcttcccttagtgcccgcgacatgccaccagacgacttgaacatgatgtctgatcttgatggccagcagcagcatcctttgaatgacttgagctgttacttacagccgcggcctggtgctggttctgtgagtagatctggtcggtccaagatcctaactccatcaaatcttgaagatctcttttctgctgagatttcttcatctccccggtattctgatccagcagcgggttccgtgttttcccctacgcacaaatcagctgttctcaatcagtttcaacagctccaaagtatgttatcacctataaatactaacttgctatctcctaagaatgttgagcatcctcttttacaggcttcctttggtgtatctccttcgggtaggatgtcaccaagaagtgttgaaccaatctctccaatgagctctcgcatatcggcatttgctcagcgcgaaaaacagcagcagcagcagcagcagctgcgcagtctcagttcgagagacctcggtgccaacagtcctgcctcacttgttggctcccctgcaaacccttggtcaaagtggggatctcctaatgggaaagctgattggtcagtaaatggagacacacttggtcgtcagatgcgaagatcatcctcgtttgagctcaagaacaacggggaagagcctgatctctcttgggtccaatctctggtgaaggaatccccacctgagatgatcaaagagaagtttgcatctcctatgcctactgcatctgctgatggaccaaattcaaattcccaaattgaatccattgaccattctgttttaggagcctggcttgagcaaatgcagctggatcagcttgtagtctagtcaaaattgaccctttacatatcttgttgagataggtatttaatttcgtaaggtacatattcttttggtgaaatttttggaaagacaagaaaggaagtgtagtaaaggaatggaggatcggttggctgcagagtcacatgaaggatattctattttttcttttataaaataattgtcattcattattttactacatagcttcaggagagctgaaaaagctctctcccttggggctgatcaattaatagtaggcgaaaaatcctatcgaggttatctatttttcttcc

SEQ ID NO: 10307 - DNA, 1144 bp, Glycine max
  Clone ID: 700904034_FLI
gattggtgctgatcgtaccgcatctatagaaacagtaatgaaccatttgcaagaaactgcacttaatcatgttaaaagtgctgggcttcttggtgatggctttggttccacgccagaaatgtgcaaaaagaacttgatatgggtggttactcggatgcaggttgtggtggaacgctatcctacatggggtgacatagttcaagtggacacttgggtttctggatcagggaagaatggtatgcgccgtgattggcttttacgtgactgcaaaactggtgaaatcttgacaagagcttccagtgtttgggtcatgatgaataagctaacacggaggctgtctaaaattccagaagaagtcagacaggagataggatcttattttgtggattctgatccaattctggaagaggataacagaaaactgactaaacttgacgacaacacagcggattatattcgtaccggtttaagtcctaggtggagtgatctagatatcaatcagcatgtcaacaatgtgaagtacattggctggattctggagagtgctccacagccaatcttggagagtcatgagctttcttccatgactttagagtataggagagagtgtggtagggacagtgtgctggattccctgactgctgtatctggggccgacatgggcaatctagctcacagcgggcatgttgagtgcaagcatttgcttcgactggaaaatggtgctgagattgtgaggggcaggactgagtggaggcccaaacctgtgaacaactttggtgttgtgaaccaggttccagcagaaagcacctaagatttgaaatggttaacgattggagttgcatcagtctccttgctatgtttagacttattctggtccctggggagagttttgcttgtgtctatccaatcaatctacatgtctttatatatatacaccttctaatttgtgatactttggtgggtaagggggaaaagcagcagtaaatctcattctcattgtaattagctactgctgtattctctctttctgctgctccatatttcatttcatctctgattgcgctactgctaggctgtcttcaatatttaattgcttgttcaaaatagctaggcatgtatattattattctttttctcttggccc

SEQ ID NO: 10308 - DNA, 1639 bp, Glycine max
  Clone ID: 700904153_FLI
gtcaaaaagaaattcactatgcttcagacttggcctgtacgtacacccaggcctgttgcatcaaaacttgcagctgatactcctcttcttactggtcagcgtgttcttgatgcccttttcccctcagttcttggcgggacttgtgccattcctggtgcttttggttgtggtaaaacagtcattagtcaggctctttctaagtattccaattctgatgctgttgtatatgtcggctgtggggaacgtggaaacgaaatggcagaggttctaatggactttccccaacttacaatgacattacctgatggtcgtgaagaatctgtcatgaagcgcacaacactagtggctaacacttcaaacatgccagtggctgctcgtgaagcttcaatttatacaggaatcacattagctgagtattttagagatatgggttataatgtcagtatgatggcagattctacatctagatgggcagaagcattgcgtgaaatctctggacggctggcagaaatgcctgcagatagtggatatcctgcataccttgctgcacgtttagcctctttctatgaacgtgctgggaaggtaaaatgtctaggaggccctgaacgtacaggtagtgtaacaattgttggtgctgtttcgccacctggaggagatttctcagaccctgtgacatctgcaaccctcagcatagttcaggttttctgggggttggacaaaaagcttgcccagaggaagcactttccttctgtaaactggcttatttcttattcaaaatactcaacggcacttgaaaccttttatgagcaatttgatccagattttataaacattaggacaaaggctcgtgaagttctgcaaagagaagatgacctgaatgaaattgtccagcttgtgggcaaggatgctttagctgaaggagataagatcaccttagaaactgcaaagcttttgagagaggattatcttgctcaaaatgcctttacaccatatgataaattttgccccttctacaagtctgtttggatgatgcgcaacattatccatttctacaatttggcaaatcaggcagtagagaggggagctggttcagatggtcagaagatatcttacacccttatcaagcatcgtatgggagatctgttctaccgattagtgtctcagaaatttgaggatccagcagaaggggaagctgctttggttgctaaatttcagaagttacacgaggacctgactaatggtttccgcaaccttgaggacgaaacccgatgattgaagatttggtatggtagtttgctcaaataatgtgttatttccaattgtaagaggcagtctagcatcgcagggttacaccgtcccgagtgttcttatatttgactgtttgattcattcatatcacatttatttcctttcttggtgctggtttggcttttgatctagtctcatgtgtagctataatcatgtgtttcagtcatcctcagtttgtttattgaaaataagaaacgaaacttgctctttcaatatgtatttaggagaataaagttattttagaacatgaagtgcctgcggcaatcggattccggattcatataggtggaatttttggtggaagtggattatcttgaatcctgtatttcat

SEQ ID NO: 10309 - DNA, 1318 bp, Glycine max
  Clone ID: 700904208_FLI
attcctcttggctcccttaaactctctttctctctttgtgtgtctctttctctatttctgagtctcagtgttaggggggttattcattattcataataacttggctttatagcattttcccttttgatataaaatgggaaggcaaccttgttgtgacaaagttgggttgaagaaggggccatggactgcagaggaggataagaagctcataagcttcatcctcactaatggccaatgttgctggagagctgtccctaagctagcagggcttttaaggtgtgggaagagttgcaggctcaggtggacaaattacttgaggccagacttaaagagaggtcttttatcagaatacgaagaaaaaatggtcattgatcttcatgctcaacttggcaatagatggtctaagattgcttctcatctccctggaagaactgataatgagataaaaaatcattggaacacacacataaagaaaaagctcaagaaaatgggcattgatcctgccacacataaaccacttcctaatgcaaatgaacaaaaccaaaatcaaaccagacaagatcaacaactacaccaccaaccagtagaattagaagagcctaaccaacaacctttgcaagttgactttgaccccaaagttgacccaaataaggagccagagaagccagagacttcattggaatcatcaaccatcactgaagaagccaaagaggaagaccaaatcataacacccttatttgacacaatggagctaatgaatggtttctgcacagatgaagttccaataattgaacctcatgagattctaatgccttgtgctccttcctcttcatccaccacctcttcatcatcttcttcaaattcaaccaattttcttgaagacttgcagctaccagattttgaatggtcttgtaattacaatgataataacactattactaacaataacaacaatgaagacaaagacgacgacaacaacaacaatagcagcatggccttgtgggatgatgacattattggcaaccgttattggctgattaatgaagatgatgatagtgatgaaaaccaagtgtttgatgcttctctcactcaattctcaaaaatgttcatggaatcagaatcttggggatatggcttttgatttgaattttctccccattatttgcgatttgcttctaagtttttacgaagaataaacggttaataatttattaggaagaacacaactgttgtttagcattaccaacttttcactttatcatttacacaaattacatgtaatatgttaatggaaataataagtttctttctttgcagt

SEQ ID NO: 10310 - DNA, 1040 bp, Glycine max
  Clone ID: 700904260_FLI
cggaaccaaacccgggtccgcgccggagatccccacggtggacctcgccgccgaggagagctcccgcgccgccgtggtggagcaggtccggcgggcggcgagcaccgtgggattcttccaggtggtcaaccacggcgtcccggaggagctgctattgcgaacgctggcggcggtgaaggcgttccacgagcagcccgcggaggagagggcgcgggtgtaccgtagggagatggggaagggtgtgtcgtatatttccaacgtggatctcttccaatcaaaagccgccagctggcgcgacaccatccagattaggatggggccaaccgcagtggattcgagcgagattccagaagtgtgtaggaaagaggtaatggagtgggacaaggaggtggcgcgtgtggctcgtgtgttatacggtttactgagtgaagggctgggattgggtacggagaggctcacggagatgggtttggtggaagggagggttatggtggggcactattacccgttttgtcctcaacctgatctaacggtggggcttaactcgcatgcggatccaggggctcttacggtgttgctgcaggaccatattggggggttgcaggttgagactgaacagggttggatccatgtcaagcctcagcctaacgccttggttattaacattggagatttccttcagataatttctaatgaaacatacaagagtgctcatcatcgggtgttagccaattattctaacgagccacgagtctctattgccgttttcctcaacccaagtgatagggagaaacattttggaccattaccagagctaacatcaacagagaaaccagctctttataggaacttcacgttccatgaatttatgacaaggttcttcacgaaagagttggacggtaaatcattgacaaatttcttcaggcagtgatgtacacatatatattagcatctatttctggtgatgtatcaatgttggatatgcgatgatgaattttatgcttaataagtttgtgaataaaaggtgctatatgtttgac

SEQ ID NO: 10311 - DNA, 857 bp, Glycine max
  Clone ID: 700904284_FLI
ctcatctttcaatttcaatcaacggttatacccttttctatttgagcatcatcatgtccaccgcagcgcaccaaggccaagaaaacggcgtcgtccaagaagcccctctcccatcctaccttcgccgcggtacttcctaattactctctttcgattcaatttcgaaatcaattgtgtttaattagtttcattgttttgtagatgatagcggaggcgatacgagtctgaaggagagaaccggttcgagccaatacgcgataaccaaattcatcgaaggcaagcacaaggagttgcctccaacctacaagaagcttgttctcgttcatctcaagaagtctgttgctgctggcaagctcgttaaggtcaaaaactctttcaagctcgcaccgactaagtctgctcctgttaaagccgctgctgctcccaagaagcccaccaaagctgcggctaagcccgccgccaagcccgcttccaagcccaaagctgctgcacctaagaagaaggctgttgccaaacccaaggccaaagctgcggccaccaagcccaaggccaagcccgctaaggccgcgccgaagaaggtcgccgctaagcctgcgaagaagactcccgtaaaggccgtgaagaagcccaagagcgtcgtgaagaaacctaaaagcgtgaaatctccagcgaaaaaggccaaggctaagaagtgagggattggagtgggttttagtttggcgttatagtgtttatgtatttcgggttgaatcgtagtataggtggatatatttttagaagagtattgatgtaaattcctttgctagaaattttaacaagtgttcttcttttgcattgaatacagtttcgttttcttc

SEQ ID NO: 10312 - DNA, 830 bp, Glycine max
  Clone ID: 700904295_FLI
aattaagagatggggttgtctttcaccaagctttttagccggctctttgccaagaaagagatgcgtattctcatggtaggtcttgatgctgctggtaagactaccatcttgtacaagctcaagctgggagaaattgtcacaaccattcccacaattggatttaatgtggagactgtggaatataagaatattagctttactgtatgggatgtgggtggccaagataagattcgtcctttatggagacactacttccaaaacactcaggggcttatctttgttgtggatagcaatgatcgtgaccgtgttgttgaggctagagatgagctccaccggatgttgaatgaggatgagttgagagatgctgttctcctggtatttgccaacaaacaagatcttccaaatgctatgaatgctgcagaaatcacagacaagcttggtcttcattctcttcgccaacgccactggtatatccagagcacatgtgctacctctggggaaggactatatgaaggactggagtggctctccaacaatatagctaacaaggcttagggacattttgtggaatgccgctatttcttgcttattatattatgaggttgatgggttgctgcttctcttatatagcattataatatatatatatatatatatatatatatatatatatatatatatatttttttttttttttttttactcttttaagtcttttctttttctttatttaggtgtttgatactatatcatagcaatcgtattgaatcctgtagaatttttaaataattaatgaattacaaactatacatgacgcgatcatgcttttc

SEQ ID NO: 10313 - DNA, 2314 bp, Glycine max
  Clone ID: 700904315_FLI
aataatagttacactaacacacagtagtgaacaacaactccaacaacaacaatcaacaacaacaacaacgttgtagtgtgttgttttgttttttagtgcagtttatttttttggcatcaaagtggttgaatccatggattctgattatggtattcccagggaactctcagatcttcaaaagattcggtctttgtaccagccagagctccctccttgtctccagggaaccactgtgagggttgaatttggtgacgcaaccaccactgctgaccccactgatgcactcaccgtctgcagggcttttcctaacacttatggacaccctttggctcactttctcagggccactgccaaagtccctgatgctcagatcataactgagttccctcctattagggtggggattgtcttttgtgggagacaatctcctggagggcataatgtcatttggggtatccacaatgctctcaaaattcacaatcccaacagtgttttgcttggatttcttggtggttcagaaggtctatttgcccagaaaactctggagataactgacgatattctttcgacgtacaaaaatcaaggtggttatgatttgcttgggcggacgaaggatcaaattaggaccacagaacaagttaatgctgcacttgctgcatgcaacaatttgaaacttgatggccttgtcataatcggaggggtgacatcaaacacagatgctgcacagcttgctgaaacatttgttgtagcaaaatgccccacaaaggtggttggtgttcctgtcactctgaatggagatcttaaaaaccagtttgtagaaactaatgttggttttgatacaatttgtaaggttaattctcagctcatcagcaatgtctgcactgatgctctctctgcagagaagtattattatttcatccgtcttatgggacgcaaggcatcacacgttgctttggaatgcaccctccagtcccatccaaatatggtaattcttggtgaggaggttgctgcatcaaagcttaccctttctgaaattgcaaaacagattactgatgcaattcaggctagagcagagcaagacaaataccatggagtcattctccttccagaagggctgatagagagtattcctgaagtgtatgccctcttgaaggaaattcatggtttactcagacaaggtgttgaagttgacaagatatcttctcagctaacaccatgggcatctgctttatttgaatttctgccaccctttattaggagacagttgctcctttaccctgaatccgacgactcagcacagttatcacagattgaaactgagaaattactagcatatcttgtggaagtcgagattaacaagcgtctgaaagaaggcacatacaaggggaagaaattcaatgccatttgccacttttttggttatcaagctcgtggatctctgccatcaaaatttgactgtgattacgcatatgtccttgggcacatctgctaccatatactggccgctggtctaaatggatacatggcaactttaactaacctgaagaatccagtaaacaagtggaaatgtggggctgctccaattgcatctatgatgactgtaaagcgctggtctccaaatccaggagctacatcaattggaaaacctgctattcatccagctactgtggacttgagaggcaaagcatatgagttgttgagacaaaaggcacaaagctttcttatggatgacatctacagaaatccaggtccacttcagtttgatggtcccggcgcagatgccaaggttataactctttctgttgaagaccaggactacatgggccgcattaagaaacttcaggagtaccttgaacaggttcgaaccattgtcaagccaggatgccctcaggaggttttgaaagctgctctaagcgtcatggcgtcggttaccgaagttctagctgcaatgtcaacatcttataccaacaccctggcatccctgtgagagtagcagatggaagttgtattcttccataaaaattctacattttatagccatggaagtagtttttgattggaaataagagttatagctgacatggtgcacgtcaacgtgagatgagatttactgtaatcaaagttttggctctctatgttcccaactgggtaatttttttgttttttgttttttgttttttgttttcaaagacatgtgggatccatgtgaaattgtttgataacttagctgctgcttgaaattattattgttctttttaggacatctcttttgatattccaaacattatatttgaggtgttttcttcctaacttt

SEQ ID NO: 10314 - DNA, 1830 bp, Glycine max
  Clone ID: 700904381_FLI
tggaccctaatcacctcttcttcacgcatttccgcgatggtgctattgcctcacgcattgagggccaacacagaggagctcttccttctgttattgtgattggtgctggaatatctggacttgcagcagcacgaagtctctatgatgcatcttttaaggtgactgtactggagtcacgagataggcttggtggtcgcattcatactgacttctcatttggctgtccagttgacatgggagcctcatggctacatggagtttgtaatgagaatccattggctccattgatacgtggcctggggctttcattatatcgtaccagtggtgacaactctgtcttatatgaccatgacttggaaagttatatgctttttaacatcgatggtaagcaagttccacaacagatggtcattgaagttggagacacctttaagaaaattctggaagagacagggaaagtgagggatgagcataccgaggacatttcagtttcccaagctatttcaattgtgctagataagcaccctgatctaaggcaacaaggacttgcccatgaagtgctacaatggtttatatgcagaatggaagcttggtttgctgctgatgcagatatgatttcactgaaaacctgggatcaggaacatgtcctgtctggtggtcatggactcatggtgcaaggatatgatccagttataaaagttcttgcaaaagatattgacatacgcttgaaccacagggtgaaaaagatatctagtggttacaacaaggtaatggtgacggtcgaggatggcaggaactttgttgctgatgctgctatcataactgttcctattggaatcctaaaagcgaatttgattgaatttgaaccaaaacttcctgattggaaggtttcagcaatttcagatcttggtgtgggcaatgaaaataagattgccctaagatttgacaaagtattttggcctaatgtagaactcttgggcactgttgctccgacctcttatacctgtggctattttctcaatcttcacaaagcaacaggccatcctgttcttgtctacatggtagctggaaggttcgcttacgacattgagaaactatctgatgaagcagctgcaaattttgtgatgcaacagctcaagaagatgtttccaaatgcttctaagccagttcagtatcttgtgtctcgatggggaacagatccaaactctcttggatgttactcgtatgatttagttggaaaaccaactgatgtgtatgacaagcttcgtgcacccttgggtaatctattctttgggggagaagctgtaagcttggacaatcaggggtctgtgcatggagcttactctgctggggttatggctgctgaaaattgtgagagctatatgttagagaaactaggccacgcagaaaagctatctctagcttctgttaggcatgaaatgcttgaaactcttatacctcttcagatctcgaggatgtgatttgttggtgctcagtagcttttagacaatgattctgcataatgcaatggcaaaatatttgccattcgatataataaagaaataaatgttctttaaggatggtgaattggtgactatcgtccaagtaacaccattttcacttatccgcattggattcgaatagctttttttatccttttttttaggcctggcttattaaggtgtatgtagtatgtaccttggtccatctgagacacagtgcatgtaagaccatcactattgtgttaccccacaattctgtaatgtgggtgtgtcctacttgtaggtagcttctcaacattttccttaatcaacatgtttcttggcagac

SEQ ID NO: 10315 - DNA, 1925 bp, Glycine max
  Clone ID: 700904431_FLI
gaacaataacttttctggcgttgtgcctgaagggttatggggtttgccccatttgtatttgttggagcttgtttataattctctttctgggtcgatttccaattcgatttccggggcttggaacttgtcaatgttgttaatttccgggaataagttttctgggtcgattcctgagggggttggggaattgggtaatcttgaaaagtttgtagctaataataatagtcttactggtcggattccgaaaagtgtgtttaggttgagtcagttggataggcttgttctcggagacaatcagcttttcggagaaattcctgttggagttggtggttgtaagaagctcaatgagcttgatttggcgaataataggttaggtgggagtattcctaaggagttaggggacctgcctgtgcttaattatcttgatctttcagggaatcagttctctggtgagattccaattgagctgcagaagttgaagcctgatttgttgaatttgtcgaacaatcagctttctggggtgattcctcctctttatgctaatgagaattatagaaagagttttcttgggaatcctggtttatgcaaggctctctctggattgtgtccaagcttgggtggtgagagtgagggtaagagcagaaagtatgcgtggattttccggttcatatttgtgcttgctgggattgtgttaattgttggggtggcttggttttacttcaaattccgggacttcaagaagatgaaaaaggggtttcacttttcaaagtggaggtcgtttcataagctgggttttagtgagtttgagattattaaattgctgagtgaggataatgtaatagggagtggagcatctgggaaggtttacaaagttgcgctgagtaatggcgagttggtggcagttaagaaattgtggagagcaactaagatgggaaatgaatctgttgattctgagaaggacggttttgaagttgaggttgaaacattgggaaagattcggcacaagaatattgtgagattatggtgttgctgcaacagtaaagacagcaagctcttggtttatgagtacatgccgaatggaagtcttgctgatttgttgcacaatagcaagaaaagcttgttggattggcccaccagatacaaaattgctattgatgctgccgaggggctctcatatttgcatcatgattgtgttccctccattgttcatagggatgtcaaatctagcaatatcttgctagatgatgaatttggagcaaaagttgccgattttggagttgccaaaatttttaagggagccaaccaaggggcggagtccatgtctgtgattgccggatcttatggttatatcgcaccagaatatgcttatacacttcgggtgaatgaaaagagtgacatttatagctttggtgtggtcattttggagttggtaactgggaagctccctcttgacccagagtatggagaaaatgatctagtaaaatgggttcagtccacattagatcagaaaggactggatgaggtgattgatcccactttggatattcaatttagggaagaaatcagtaaggtactcagcgtggggcttcattgcactaactctcttcctataacccgcccttcaatgcgtggtgtggttaaaaagctgaaggaagtaactgaacttccaaaatccttaagtggaaaactctcttctccttattttcaggaagaggcttcggatattgatcatgagggaagcttagtttgagctagatgctgaaaatcataacagtcagcttcaattttcacttcagctttggtacttaaaatgttagtttttgcataggtaatagtaattgaagcagcaattgtaacaaaatagcaagaaactttccaatttcaatcgtgtctaatgaaattcacaatagaatatattatgttct

SEQ ID NO: 10316 - DNA, 1795 bp, Glycine max
  Clone ID: 700904465_FLI
caacaacactctctcttctcgctcttggcttttcgctcttcactcactctcattcattcatttccaccgttcatggatccagtaagcgtgtggggtaacacgcccttggcgacggtggatcccgagatccatgacctcatcgagaaggagaagcgccgtcaatgccgcggaatcgagctcatcgcctccgagaacttcacctccttcgccgtcatcgaggccctcggcagcgctctcacgaacaaatactccgagggcatgccgggcaaccgctactacggcggcaatgaatacatcgaccagatcgaaaacctctgccgctcacgcgccctccaagccttccacctcgacgcccaatcctggggcgtcaacgtccagccctactccggctccccggccaacttcgccgcctacaccgccgtcctcaacccccacgaccgcatcatggggctagatctcccctccggcggccacctcacccacggctactacacctccggcggaaagaagatctccgccacctccatttacttcgagagtctcccttacaaggtaaactccaccaccggctacatcgactacgaccgcttggaagaaaaagccctagacttcaggccaaaactcataatctgcggtggcagcgcgtaccctcgcgattgggactacaaacgtttcagggaagtcgctgataagtgcggagcattgcttctctgcgacatggcgcacactagcggccttgtggccgcgcaggaagtgaacagccccttcgagtattgcgacattgtgaccaccacgactcacaagagcttgcggggcccacgtgcggggatgatcttttaccggaagggccccaagccgccgaagaaggggcagccggagaacgcggtttatgatttcgaggacaagattaacttcgcggtgttcccttcgctgcagggtgggccccacaaccaccagatcggtgctctcgccgtggcgctgaagcaggccgcgtcgcccgggtttaaggcctacgcgaagcaggttaaggcgaacgccgttgcgcttggaaaatacttgatggggaaagggtacagccttgtcactggcggaacggagaaccatcttgttttgtgggatctgagacctcttggattgactgggaataaggtggagaaactctgtgatctctgtaacattactgttaacaagaacgctgtttttggtgatagcagtgccttggcccctggtggagtgcgaattggtaacgatcttacttctcttttatatgctacaatacaaatcttgctttactaactcaattggaaacaagatctcatttataagattataaaaatgatttccttaggctaggactatatcctctctctctctctctctttttcttttttatcatcgcagaacttagatgaattttcttacgtaattttagtactgttctcttatcagagttcgaaagtaagttataaaatttctattgaaggcttgcatatttatataagtgaaattttaattttggttggagaacaatgtccaaaacaccaaagtgattgcatctaagttttttggattttttaatgtatttgtattttgtacaaggtatcttagtaagttgttgtagattagtattgaaagagatttcattgaggatgtgttttttagtgctttaacaaaggaggtatgttagttcgggctaaagcttgcagactgcctttgttaaagaatttcgagttgttgtcgtgcaatatgattggcaaatcaattataaactaatctgttattttgtttttctgat

SEQ ID NO: 10317 - DNA, 2484 bp, Glycine max
  Clone ID: 700904492_FLI
accaggtttcgtgttttgtgtaggcgtataagaattgaagctgttttgttgggagttgggattaggtgcatcaattgactgtggcattatagcatattaagagaaagcaacaaaatgtggaggctgaagatagcagatggtggaaaagacccatacattttcagcacaaacaattttgtaggaagacagacatgggagtttgatcctgaggcaggaactccagaggaacgagctcaagttgaagcagctcgtcaaaatttttataacaatcgcttcaaggtcaaggcatgtggtgatctcctttggcgttttcagattctgagagaaaaaaacttcaaacaatcaatacctagtgtgaagatagaagatggagaagaaataacatacgaaaaagtcataagcacgttgagaagagccgcacaccacctatcagcattgcagaccagtgatggccattggcctgcacaaattgcaggtcctctgttttttctgcctcctttggttttttgtatgtacattacagggcatcttgatttggtattcccagaagagtatcgaaaagagattctccgttacatatactatcaccagaatgaagatggaggatggggactacacatagagggtcatagcaccatgtttggtactacactaaactatatatgtatgcgaattcttggagaagggcctaatggaggtcatgaaaatgcatgtgctagaggaaaaaagtggattcatgatcatggtggtgtaacacacatcccttcatgggggaaaacttggctttcgatacttggtgtatttgattggtgtggaagcaacccaatgcccccagagttttggattattccttcgtttcttcctatgcatccaggtttgtgggtccaatcacaccactcatcttacaattgagagaagagctctttactcagccttatgaaaaagttaattggaaaaaagtgcgtcatcaatgtgcaaaggaagatctttattatcctcattctttgatacaagacctagtatgggacagtctatacatgtttactgagccactacttacttgttggcctttcaacaaactaattagagaaaaggcccttcaagtaacaatgaaccatattcattacgaagatgagaatagtcgatacataactattgggtgtgtggaaaaggttctatgtatgcttgcttgttgggttgaagatccacagggagatgcctttaagaagcatcttgcaagggtctcagattacttatgggtttctgaagatggaatgaccatgcaaagttttggtagtcaagaatgggatgctggttttgcagttcaagctttgcttgcaactaagctaattgacgaaattggccattcacttgcaaaagggcatgatttcatcaagaagtctcaggtgagagacaacccttcaggagattttaagagtatgtatcgtcatattactaaagggtcttggacattctcagatcaagaccatggatggcaagtttctgattgcactgcagaaggtttaaagtgttgtcttcttctatcaaagttgtcaccagagattgtgggagaaaaagtgaaacctgaaagattttatgattcagtcaatatcttgttgtcacttcagagtaaaaaaggtggtatagcagcatgggaaccaataggagctcaagaatggttggaattactcaatcccactgaattttttgaggacattgtaattgagcatgaatatgttgagtgcactggatctgcaattcaagctttagttttgttccagaagctatatccagagcataggaagacagagattaagaatttcattgtcaatgcagttcaattccttgaagatacacaaacaaccaatggttcatggtatggatgttggggagtttgctacacttatggctcttggtttgcacttggtggtctagcagctgccggtaagacttacactaattgtaatgccattcgcaaggctgtgaaatttctacttacaacacagagagaggatggtgggtggggagagagttatctttcaagcccaaaaaagatatacatacctcttgaaggaagtcgatcaaacgttgtacaaacagcatgggctcttatgggtctaatttatgctggacagtcagagagagaccttactcctcttcatcaagctgcaaagttgctcattaattcccagttggaagaaggtgattggccccaacaggaaatcactggagtattcttgaaaaactgcatgatgcattacccaatgtatagaaatatttttccaatgtgggctctagctgaatatcgtaggcgagttccattgccatccactgaaggttaattttgaaaaggtgtgtgcataaaagggcaaagacatatcaatgaggaatggggcaagaagcacccattgtctcttacttggactctattgatctgtaattttgaagcttgctttttattataaaataaaaaattatttacgc

SEQ ID NO: 10318 - DNA, 1979 bp, Glycine max
  Clone ID: 700904514_FLI
gctagaccagaccctaaaaagaacatcacaactttggtaaaagcatttggagaatgccgtcctcttcaagagcttgccaaccttacattaattatgggtaaccgagatggaattgatgagatgtcaagcacaaatgcttctgttcttctctcggtacttaagttgattgacaagtatgatctgtatgggcaagtggcatatcctaaacatcacaaacaatatgatgttcctgacatatatcgcctagcagcaaagacaaagggtgttttcattaatccagctttcattgagccatttggtcttaccttaattgaggcagctgctcatggtttgccaattgttgctactaaaaatggaggtcctgttgatattcatagggtacttgacaatggtctgctcgtagatccccatgatcagcagtctattgctgatgctcttttgaagcttgttagcaacaaacaactttgggcaaaatgtagacagaatgggttaaagaatattcatttattttcatggcccgagcactgtaagacttacctttctaaaatagccacttgcaagccaaggcatccacaatggcagcgaagtgaggatggaggtgaaagttcagaatcagattcaccaggtgattccttgagagatttacaggacttgtctctaaatctgaagttttcattagatggagagaagagtgagggtagtggaaatgacaattctttgaattctgatggaaatgctgctgatagaggggcaaaattagagaatgctgttttgtcatggtcaaagggcatctctaaggacacacgcaggggtggggctacagaaaaatccgatcagaatccaaatgctggtaaatttcctccattaaggagaagaaaacatctgtttgtcattgctgtggattgtgataccacttcaagccttcttgaaactattaaagccatctttgagtctgctggaaaggatagggcagagagcattgtaggtttcatattgtcaacatcattaacaatatcagagatacagtcatttctaatctcaggtggcttgagtcccattgattttgatgcttatatttgcaatagtggcagtgatctatactatccatccctcaatcccggagatcgcccatttgtggttgacttgtattaccactcacacattgaataccgttggggtggagaagggttgaggaagactttagtgcgatgggctgattcaatcactgataagaagggtgataatgacgaacaaattgtgagtcctgctgaacagctttctactgactactgttatgctttcaaagtgcgaaagccaggaatggctccccctgtgaaggagcttcgcaagttattacggatccaagctctgcgttgccatccgatatattgtcaaaatgggacaagactgaatgtcattccagtgctggcatctcgttcccaagccctcagatacctatatgttcgatggggttttgaactgtcaaagatggtggtgttcgttggagaatgcggtgacacagattacgaaggacttcttggtggcctacacaaaagtgtcatactgaagggagtgggaagcagtgcaatcagtcaactccataataacagaagctaccctctttcagatgtcacgccattggacagccccaacatcgtcgaggcaactgaggggagtagcggtgctgatatccaggctttgatcgaaaaagtgggatatctcaatggatgaaaaaatttgaaagtcatttctagttatatgcctcttagtgtgtgtctgctatgaaacctacttctgagcaagcagatatctgaattttatccacaatgttcataaagcttttttcctcctctcttctctgtaacttctatatcattctcttcctcacaaacttccccatgaaacatatttcctcttgtttccccacttatctccttgttggttctgtatctacatattacatttttaatgaaggccac

SEQ ID NO: 10319 - DNA, 661 bp, Glycine max
  Clone ID: 700904559_FLI
aagagactcacctcctcaacgaaagctcaatctataggggtgtcacaaggcatcgatggactggtcgatacgaggctcatttgtgggataagaattgctggaatgaatcacagagcaagaaaggaagacaaggttttcattattttgctctctataatctttagtttaattttctgatttccttcgctttatatgatttattgtcatattaattatcttgggttggttgacaatggcaatggaaaacaactggatgcagtatatctaggggcatatgatgatgaagaagccgcagcacgtgcctatgacttggcagcattgaagtactggggccaagataccattctcaattttccattatcaaattatgaggagaagctcaaggagatggaaggccagtcaaaagaagaatatattggatccttgcgaagaaaaagcagtgggttctctcgaggagtttcaaaatacagaggcgtagcaaggtacttgaaccctgctctgttcactgcaaaatgctaggttttgcaatttttcaatctgttttacggtagatcatcatggtcaacaaaataaaccattgatatctttgttgaattcagaaagtggggcgtgcacgaatatatatatacacacacgagtgtacgaaatgtttttagaacat

SEQ ID NO: 10320 - DNA, 1932 bp, Glycine max
  Clone ID: 700904655_FLI
cgacgtgcgtggactctttgaaggtggaattcatctccctacagatgcactcagtaaaattagccccctaccagtgctcaaggaaatcttccgcactgatggtgaacaagtcctcaagtttccaccacctcatgtcatcaaagttagtaagtctgcatggatgactgatgaagaatttggaagagagatgcttgctggtgttaatccatgcctaattgagtgccttcaagtgttccctccaaagagcaagctagatcccacagtgtatggtgatcaaactagtacaataaccaaagaacacttagagatcaaccttggtggactctctgtggaacaggcactgagtggtaacagattgttcatattagatcaccatgatgcattcatcgcatatctgaggaagatcaatgaccttcccactgcaaagtcttatgccacaaggaccatccttttcttgaaagatgatggcaccttaaagccattggccatcgaattaagtttgccacatcctaggggagatgagtttggtgccgttagtagagtcgtcttgcccgcagaccaaggtgctgaaagtacaatttggctaattgccaaggcatatgttgttgtcaatgactcctgctatcatcaactcatgagccactggttaaatactcatgctgtgattgaaccatttgtcatagcaacaaacaggcatcttagtgtgctccaccctatttataaacttttgttgcctcactatcgtgacaccatgaacatcaatggactcgcaagacaatcactcatcaatgcaggtggcattattgagcaatcatttctgcctgggccatttgctgtggagatgtcttcggcagtttacaaggggtgggttttcactgatcaagcccttcctgcggatcttatcaagagaggaatggcagtggaggatccatcctctccctatggccttcgccttgtgatagatgactacccttatgctgttgatggactagagatatggagtgctatccagacatgggttaaggactacgtctccttgtactatgccacggatgatgcagttaagaaagactcagaactccaagcttggtggaaggaagctgttgagaagggtcacggtgacttgaaagacaagccatggtggcctaagttgaacactcttcaagatctgattcacatttgctgcattattatatggactgcttcagcactccatgcagctgtgaatttcggacaatacccttatggcggtttcatcctaaatcgtccaactctaaccagaagattgctcccagagccaggaaccaaagaatatggtgaacttaccagtaatcatcaaaaggcttatttgagaacaattacaggaaagactgaggcccttgtggacctaacagtgatagagatattgtcaaggcatgcttctgatgaggtctaccttggacagagggacaatccaaattggactgatgacacaaaggcaattcaagcctttaagaagtttggaaacaagctgaaggaaattgaggacaaaatctcagggaggaacaagaattcaagccttaggaaccgtaatggaccggcgcagatgccctacactgtgcttcttcctaccagtggggaaggccttactttcagaggaattcccaacagcatctctatctaatgagagtgtgtggtgtgtggtgtgtggttttctttccttccaacgtacctctcattgacaaataaacgtgcaaacttatgtgtgcataattttcttatgtatgcttaagttttgtaattggatgctatctagtttttcatatctaatagggtgttgtgtcagtttttatgtatagtattgtgctcctatcatgttcacccgtatcatgttcacccgtatgtaagtctgatattctgatctatgaatgtcaaatcaaatttctctatgtc

SEQ ID NO: 10321 - DNA, 2176 bp, Glycine max
  Clone ID: 700904656_FLI
cacagggagtggtggcatctggaattgccttcgctgtacaaatatggtgcattgacagaggtggtcctgtgtttgttgccgtctatcaacctgttcagacttttgttgtcgccatcatggcttccattgctttaggagaagagttttacttgggcgggttagtcccttccacgctaattaattattcttctccttaattttcttcataatgtccatgatttaatgagttaaaacaatatgaaaaaggcttaaaaataagactaggtaatcttaagaagttcttaaataaatattataaataaatttaatgattatgtatataacacttcgtatattatcattaatataacttttaagataattactataaaaatcaataaatttatcatatataataatttgtgatttgtgattgaatggtagtataaaattattttattacatgtattttttttatcatacttaaattgataatttacattaataaaagagatttgttaaaaatgagtgcatttctattctaacacaacatatataatatctacattaattttagatgttaaaaggatgtacttatttttcaaagatgaaattaaaatttctttgactcatgcatatggagcagctggagatccctgaactaagtactcacactaggcaataatttcatttttcacacttgataactttgaccgcgtattttatgtaatatgcttagtccgaaatgacgaccaaaagtatgatgaaggttatttttgtagtcgggagatttagaaaatgacaaaagccagttaacgacaaggaggaggtagatcatagatgcacagtttaatttgttacctttcggtgagacctgataaaaggggcttcagctgaatgattcaaaattccagagggttaaaaaagtttgaagaattatactatgtaggacacattgaacagaagatcgtgtctcgtgtgcttctttatgttgtttactttttgctccctcataaattaccttttttttttccttctaaaataataacattggttccatggttttaaatatggatatatggcagtcacattgcagtttcgttgcttttgtctatatcgagacaaattgtggagaaatgcgacccatatgactctgtaccgaaaggcctcttcgtaatggattgtttaacctgctatagcttaggtcaagaagaagactatttaaccttatttgccaagcatgtttcccgatattggcaggtcaaacattataacatatcaaaatgttccatcatatcccaaaaatgttagtatgtgattctgtcattgctagctagttagatcttcgttaggtcaagctttctcatcgtattagcatattcccttaactccgcatttctcagggataattgggtcggtactgatattatagatattgatcgggttaaggcttggttagtaggatcaagtatatgaggatacacagtcccctaagtacaaaatgcgtagagatagattccaattacgagtgcaaacagtttaaaatcttgatattgcgtgatttcttgatattgcgttctaaatcacggtcgcggaccatttttttaaaaccttgattggttctaatttggttcttgcctttatgatgtcatataggatcattggtgccgtgttgattgtagcgggactgtaccttgtcttgtggggtaagagtgaagagaggaagtttgcaagggagcagcttgcgattgcatccactgagcatagcatcataaggcccgcaagccacgccaaagcatcacttgctcagccactcctttcttcatcaacagagaatgtttgaacaagatcaaaattccaacttcaaaccacacaccattttcttggtgagaagaagtaaaagaaaaaaggggaaaaaagataccagctataccttactagttactactgctactactacattatgtcagcaagtttgtgtgtgttggaaccggttttcatcttttcctttctttttttttttatttaattcaaatgcttttttagtaggtcatttagaatatgagagaattgtgggaatggttgtaatggtggatgccactttaagtggggctagagcctgaaatccccccatatgcttttgtatgtcaattaatttatggtttgatttaagaaatgaatttttgttttttgggtc

SEQ ID NO: 10322 - DNA, 1261 bp, Glycine max
  Clone ID: 700904718_FLI
aatggatctccccgttatagatctttctccctccctctccggcgagtgggacccacttctctgcgccgaggtcagccgcagcctcagggaaaccggcgcgctcctcgtcaaggaccctcgctgcaccgtcgaggacaacgatcgcttcatcgacatgatggagcgctacttctcaaaaccccgcgacttcaaacaccgccatgagagaccccacttgcattaccaggttggggttacaccagagaaagtagaagttccaagaagcttggttgatgaagaaatgcaggagaaactgaaagcgatgccaaaagaaaaccagccaaacactcctgttggacctgatctcaaatggagatacttttggaggatcggtcctcgaccgtcaaatactcgttttcaggaacttaatgctgagccagtaatacctgaaggtttccctgaatggaaagaaactatggattcctggggatacaaaatgatagcagcaattgaagtggttgctgaaatggcagctattgggtttggtcttccaaaggatgcattcacttctcttatgaagctgggcccgcatctgttagcaccaacagggagtgaccttcaaaaatatggtcaggagggaactatctttgcaggatatcactatgaccttaacttcctaacaattcatggtagaagtagatttcctggtttaaacatctggttaagaaatggacagaaagttgaagtgaaggttccaataggatgtcttcttattcagacaggaaagcagatagagtggttaactggaggggactgcatagctggcatgcatgaggttgttgccacaaagaggacacttgatgcaataagtttagcacaagagcagaatcgtagcttatggagagtctcttcaacgttgtttgcacacatagcatcagatgcagttctgaagccattgggacattttgcagaatcaccccttgcaagcaaatatccacctatgtgtgcaggagagtatgttgaacaagagctttcagtaatcaatctcaagggaaagaagtgagaactttcattgttgacaattataataaaaagttggatacatttttctttcactggatcacagtcacactgccttacaagctattgagaaaaaaccattagggcaagaaactgaaaattatggtttcatttttgtcccaagaaatggaacaattgtgagcttccaattgaacactgattaatttcaatacatataaatgtctacatgcttcagcgtttt

SEQ ID NO: 10323 - DNA, 1375 bp, Glycine max
  Clone ID: 700904771_FLI
agattaatcagtggagctccccacttgaacatcaatcttgaaatgaactattggcctgctcttccttgcaatcttagcgagtgtcaagaacccttgtttgattacatttctcttctgtctgtgaacggcagtaaaactgcacatgtgaattaccaagcaaatggttgggtggcacatagtaaatcagatatatgggcgagaacatcagcaggtcaaggtgatgttgtgtgggccttgtggccaatgggtggagcatggctttgtactcatctatgggagcactatgcttacacaatggatgaggatttcctcaaatataaagcatatcccttaatggaaggatgcgtgtcatttctgttgagctggctgatcgaagacagtgaaggatatcttgaaactaatccatcaacttcccctgaacattattttatcgctcccaatggcgagcctgcttgtgtaagccagtcatccacaatggatgtagcaatcataaacgaagtcttctccacatttctttctgctgctgaggttatagggagaacaaaggataacattgttggagaagttcgtaaagctcaaccacggttacgtccaatcaacatagcccaggatggttccattatggaatgggtgaaagatttcaaggatccagaggtgcatcaccggcacctttcacatctatttggtctatttccagggcatacgattacttttaaggaaactccagccctgatcgaagctgccgaaaaaagcctttataaacgaggagaggaaggtcctggatggtcaaccacatggaaaactgcttgttgggcacggctacaaaacagttctaatgcatataagatgatcaagcacttgatcaacttggtggatccagatcatgagagaccatttcaaggtggactttacagcaacctttttgctgcacacccaccatttcagatcgatgccaacttcgggtttgcagcggcagttgcagaaatgcttgttcagagtacattgagcgatcttttcttacttcctgcccttccttgggagaaatggccaaatggctccctgaaaggcttaaaggctcgtggaggaacaacagttaacatatactggagagaaggggatcttcaggaggttggtatatggtccgaagaccaaacgagaacaactctaagaaaaagaatacactatagaggaaccatggtcactgcagacttagtgtctggccttttttacaagttcaacggacagttgaagtgcttgaacacatgctctctttcagaaatgccttgttcttgaatttcagtttttttttccttcttctataatacaactttggtcttcctatttagtttaatgtgtaattttggttttttatttt

SEQ ID NO: 10324 - DNA, 258 bp, Glycine max
  Clone ID: 700904785_FLI
catgaatccaaaagcagagaatgcatggcaatatttgagaatttcattgagctgtgcttctaggaatgacatgttggaagcttgtgatagtcgtaatttggaccttctccagaaggagtttccactacagtaagggtgcgtttgagtgaacagcttaatcaagcgcttagtgaataagtacttatcatataagcactattgtataagatttttttttttaataattgaagaggatatagggttaacttcttttcatat

SEQ ID NO: 10325 - DNA, 1822 bp, Glycine max
  Clone ID: 700904810_FLI
cttaaaatcatgtgattatagaacattggctattggtgatggtgggaatgatgtaaggatgatacaacaagctgatattggtgtgggcatcagcggcagggaaggattgcaggcagcaagagcagctgattatagtattggaaagtttagattcctgaagagattaattctggtccatggccgctactcttacaaccgtacagcatttctttctcaatattcattctataagtccctactgatatgcttcatccaaatccttttttcatttatttcaggtgtctctggaactagcctcttcaattctgttagcttgatggcttataatgttttctatactagtgttcctgttctagtcagtgtgcttgacaaagatcttagtgagaaaactgtgatgcagcatcctcaaattttattttattgccaagcaggaaggcttctaaatcctagtacatttgctggatggtttgggcgatctctcttccatgcaatagttgtatttgtgataagcatacatgcctacgcttatgataaaagtgaaatggaggaggtttcaatggttgcactttccgggtgtatatggatacaggcttttgtagtaacaatggagaccaattcctttactatattgcaatatatggctatatggggtaatttggctgccttttatgtcatcaactggatcttcagtgcgcttccttcatcggggatgtatacaattatgtttcggttgtgtcgacaaccgtcatattggatagcaatttttctcatggttgcggcggggatgggtccaattctagccatcaagtacttccgatatacatatagaccgagcaaaatcaatgcacttcaacaagctgaacgtctgggtgggcctattttgtctcttggcaccattgagcctcagctgagatctgtagagaaagatgtttctaccctgtcaataacacaacccaaaaccagaaatcctgtgtatgaacctctgttatcagattctccaaatgccaccagaagatcttttggagcaggaacaccatttgattttttccagtcacaatcaagattatcactgtctagctacactcgaaattgcaaggacaactgagattaaggagcaattggaagagctccagatgcagcatcttagttgtatatccttttttttttatcaaaactaacagtacaatgttagttccgtgtatactaatgttatataaagtgccataagataactggttatataaagccaaaagaaaatgaattttcacgattttatagattatttgattaacttgatattatttttgttttccaacttctggttggagacatttgattttttccccctttgcaacaccttcaccttataatgttctccagttagggttatattgcatttattgaagaataatacatcttatggccattcaagaagaaactgggcaggtgaaagaaagccaaattctttgtcagttttcttccatggaagcatctggaaaacgataattcgtgcagagatgtcaacatactaatttgcagatggcagaagcatacaaatttggtgaccattttaaagctgaacaaggggagaacttaatacgtaaggtatatgtcccccaccaaccgtggtcagatctctgctgcaaattgcatggcaaggtagcgatgataataaggagtaagtaattctgaaattgttctctgaaattacaattatgagttgttttagatttttagtccttgaaattatggattaaattgacaatgattgttaaatttaattaattaaattttttaatgttaaattaaattgaaaggtgtt

SEQ ID NO: 10326 - DNA, 758 bp, Glycine max
  Clone ID: 700904815_FLI
gtgacataactggagccataaagaacagcaatggtcttgacatcccaagcctacttgagcattccaaagtgcacaggggagtaaaaggattcaatggtagtgatccaatagaccctaactcaatattggttgaagattgtgatgttctagtcccagcagctcttgggggtgtcatcaatagggaaaatgcaaatgaaatcaaggccaaatttattgtggaagcagctaatcacccaactgacccagaagctgatgagattttgaagaagaaaggggttgtgatcctcccagacatatttgcaaattcaggaggcgttacagttagctactttgagtgggttcagaacatccaaggtttcatgtgggatgaggagaaagtgaacaatgagctaaagacctacatgaccaaaggtttcatagatgtgaaggaaatgtgcaaaacccatgaatgtgatcttcgtatgggagccttcaccctggcagttaaccgtgtcgcacgtgctactgtccttaggggctgggaagcttgacatccattgcttctgctttcaataaattaattaaagagctcccactctcagcaacacttcacaaagtttttgttgctttcaactaatgtgttgggtgaatcgtattttcacgccaaattttctttcaataaattagtatagtatataaatctttttgtaactacatgtgtggttctatgccacttcttgtgacagccacgctttttaatataatgtcactttgctttg

SEQ ID NO: 10327 - DNA, 1719 bp, Glycine max
  Clone ID: 700904851_FLI
gtcctctgttgctgtcatgttttcaattgttgtttatggtgtcatagggtgcagtagtgtgtgggctcatcttggtgctgcccttttgttgggcttgctttggatgcaaagcacttacgtgggtcatgactctggccactatgaggttatgtctagccctggctacaacaaattggcacaaatcctttgtggcaattgcatgactgggataagcattgcatggtggaagtggactcacaatgctcaccacatctcatgcaatagtcttgactatgatcctgatctccagcacatacctgtctttgccgtgtcgacacggttcttcaattcaatcaaatcttgtttctatggaaggaaattggtgtttgattcattatcaaggtttctcatcagctaccagcacttcacattctacccagttttgtgctttgcaagggtcaatttgtacctccagactttgttgctgttgttctctaggagaaaggtgccagatagagcctttaacataatggggatccttgtgttttgggtttggttccctctgttgatctcttcactaccaaattggggagaaagggtcatgtttgtgttggccagttttgctgtttgttcaatccagcaccttcaattttgtttgaaccatttctcagcagatgtgtatgagggcccaccaaatggcaatgactggtttgagaagcaaactggtggcacattggacatttcttgctcctcatggatggattggttctttggtggcttgcaattccagcttgagcaccatttgttcccaaggcttccaagggcacaattgaggaaaatctcacctttggtgattgatctttgcaagaagcacaatttgccttacaggagtttgacatttgttgaggccaatctttggactcttaagaccctcaggactgctgctcttcaggccaggaatctcagtaacccttcttcccagaatttgttgtgggaagcttttaacactcatggatgatttttgtgaaaagattgatgatcatcaatcaagtttctctcttttttttcccacccttttgaaaagcttttaatcaacatcttagttgtcaatttgttagatctcacatttcttaattgggcatggaatttttaatctcccttttcttgggtaaggaataaaatgatgatcacttgttattatgcaaaattcatatcagattcagaggctattctggtgggttcagcaagaaatctattacttggttaatctcccttttcttgggtaaggaataaaatgatgaccacatgttattaagcaaaattcatatcagattcagaggctattctggtgggttcagcaagaaatctattacttggttaatctcccttttcttgggtaaggaataaaatgatgaccatatgttattatgcaaaattcatatcagattcagaggctattctggtgggttcagcaagaaatgtagtacttggaggagcgcaactcggatgacttgttttggggtactaattgctttgcttattttatgtttttatgattttgtatttgtattcttttatggtgaattttttatgatattgttgtaaacccaacatatgtagaagaatcttttcatttaggtgtgcaacttcgtgctgagtagtttactacgaagttgggtccacccgtggttgcttccacgtgaaaatttcgtacataataatacttccaaattcgtgttg

SEQ ID NO: 10328 - DNA, 961 bp, Glycine max
  Clone ID: 700904857_FLI
gttatgcaaatgatgtccaagaccatattgactatggaacttctggaaaagttgctggatttatagctgaaacaatgcagggagttggaggagctgttgaactggcaccagggtatttgaaacttgtttatgacattatacataaggctggtggtgtctgcattgccgatgaagttcaaactgggtttggtcgaacaggaagccattattggggatttgagacacagggtgtcattcctgatatagttaccatggcaaagggtattggcaatggtctgccattaggagctgtagttacaactccagaaattgcaagtgtgttggcccaaaagattcaatttaatacctttggtgggaaccccgtttgctctgctggtggacttgcagtgcttagggttcttgataaggagaagcgtcaagctcactgtgccgatgttggatctcatttgcttgaacgattgagatttctcatggaaagacatgacatcataggaaatgtaaggggaaggggcctaatggtaggcatagagttggtcactgaccgagacaacaagacacccgcaaaggctgaaactgctgtcgtgtttgaaaaactcagagagcttggtgtgctagttgggaaaggaggacttcatggcaatgttttcaggatcaagccaccaatgtgtttctccaaagatgatgcagattttcttgtggatgccttggattattctctatcaaagttgtgagctgattgtgcatagcatgaaatgaaatcttcgatattggaaccaaattactacaagccaacaacaaaagttcgtttagttcatagaaatcaccatgaataatgtaatgttctccacgttgccaagagaggggtttccctcccttagctgagcattataagttgaatgcaaactattttgtatataaatttggattcataacatcaaaataaagagtaatgtttaattcc

SEQ ID NO: 10329 - DNA, 1925 bp, Glycine max
  Clone ID: 700904885_FLI
gattgagtcatgggcaagcaagggccttgctatcactgtggagttacaagcacaccactttggcgtaatgggccacctgagaagccagtactatgcaatgcatgtggatctcgatggaggacaaagggaacacttgcaaattatacccctttgcacgcccgggcagaaaatattgattatgaggatcaaaaggtttccagggtaaagagcatatcattaaataagaacacagaagtgaaattggtcaaacgaaagcaaaactatggtaatgctgcatctggagggtttgttcctgattatagtcaaggataccgaaaagttgtggatgaagatacaagcaatagatcaagctcagggtcagctgtctctaactcagagagctgtgctcaatttggtggcccagatgctagtgatttgacaggtcctgctcagtcagtggtctgggatgccatggtgccttcaaaaaagaggacatgtgcaggtcgtccaaagccttcatctgttgagaagctcacgagagacctgtgcactattcttcatgaacagcagtcttatttttctgcatcttctgaagaggatcttcttttcgaaagtgacacaccaatggtttctgttgagataggacatggaagcattctcatcaggcatcctagctctatagctcgtgatgaagagtctgaggctagctctctctcagttgataataaacaatgcctaatgaatgaagcatattcattttctagtaccattcctatatatagtgatcgcagtagcatgaacttctcatctcacggagttgaaaagatcaaaaactcagctggccaaatcatgcaacaagagaagcttgaaagggacaagtctcagcttgaaaaactacaagttcatggaaatcatgattcaccattgtgctcaatagatttaaatgatgtagtcaactacgaggagtttatgagaaacttgacaaatgaacagcagcagcaattactgaagtatctcccagtggttgatactgctaaatttcctgatagccttagaaacatgttcaatagcttccaattcaaggagaacttaatctattttcagcaacttctcggggaaggagtctttaacatctctttgttgggggcaaaacctgaagaatggaagacattagaaaggcttgcattatctaatctgtcaaagtcgaaatgggtagaacactataattttcttaagaaatgtgaaaacaaatctggaaaatctattggtttgggttctactgctatggaatcaagtaatgttacaactggcaaaagaatgcgtgagcatgacagccgaaatcaaaatattccagaattgaagacaacgatgaggagccccaaaagggtgatcataaagcctcctagctgtgaggtcaaagaagttgtagaagaaagctctagcttcagtccaaaaagcttatttgctttacccccctggtgttggtggcttgcacatgctggattctttcaactttgttggtgagagttctgaggatctgcttttagaggtgccttctaacagttcttttccacaggctgagctcctgcacccatctttaagctatggtgctcgtcaggtcagcaccactagtagctcagtacactcacctgttactcatccttaactaatctttactaggttacttggatgggtatggacacaatattttgtcataatagggtccacatgttttgcatctgaaacaccaaagttcatgtacaagagatatgatgatgattgtgtttttgtttccttgcaaccttgagcttggattgccaaaggatggaagttgaatgggcttttttttttttttcttgtatagattggtaatagattgtaacatatagcatgaaattcggagtgatcatctccggagtttttgtatgcaattgtagtttatgttt

SEQ ID NO: 10330 - DNA, 1598 bp, Glycine max
  Clone ID: 700904893_FLI
cctccctggccgaaacggagccggatcaggccgcggaatccctaagccgtttgcgaaaatccgtttcccagcacggaaaccccactcagcgagtgggcttttacttctggcaggccctctcccgcagagaagaaaagggccataatagcacttgggatgaggagttaacactctcttacaaagccctgaacgacgcctgcccttactccaagttcgctcacttaaccgccaaccaagccatccttgaagccacccaaaccgcctccaacatccacatcgtcgacttcggtatcgtccaagggattcaatgggccgcactcttgcaagctttcgccactcgtccttctggaaagcccaataagatcagaatctccggcatccccgccctctcccttggttcctctcccggcccctctctctccgccaccgcccaccgcctctccgacttcgccaagcttctcgacttgaacttccacttcactcctattctcactcccattcaccaactcgaccgcaacagcttctgcattgacgacactaacgaagccttggctgttaacttcatgctccagttgtataacctcctcgacgagcctcccaccgctgttgacactgcgctcaggttggccaagtctttgaaccccaaaattgtcacccttggcgagtacgaagcaagcgtcacacgtttcggctttgtcaaccgcttcaagactgcgtttaagtacttctctgctgtgtttgagtctctggagcctaatttggccgcggactcgccggagaggtttcaggtggagagtcttcttctcgggcggcgaatcgcggcggtcattggggggcccgggtcggtgaggagggagagtatggaggacaaagagcagtggagggttctgatggagcgtgctggttttgaatcagtgagtctaagccattatgcaattagtcaagctaagatacttctctggaattacagttacagttctctgttttcgctggtggaatctacaccaccggggtttttgtctctggcttggaaggatgttcctctcttgaccgtctcctcttggcgttagttaatgggttcgacttggttgattgttattggaaagggtttccacctggtccttttttccctggtgtggaacaactaattattattattattattattatttgtcgatatgccatggatgatcgatcatgttgtgctatgctagcctcttcaattactgaagttatgcagaagatttgatatgtgaattggctggcactacaagaaattgaggtttttgggagaattgccacctttagcagcagtttggtcctctactagttccacacctccttacttttgtttttttagttgatttttctatttcttatcagcgttttttttttcttctagtggcaatgatgttattattagcttcaagaattggctaggcaaactgtgacaatgaaaatagggagaaatgggatggagaaaagctttctttctcattgcttctagtcattgtgatttgtgactctgtaaattggattttgttgtatggatttaaattggtctgaatgaatgaaatgaatatcaaaggatttttatc

SEQ ID NO: 10331 - DNA, 1068 bp, Glycine max
  Clone ID: 700904909_FLI
ggtgttgtgtgagacataagagcgtagaagatggtgagactgagataattgagcatcaatgagtggaagctgatcgatgggagtcgccacacggaggcatgccacgtgtgctgccagaagctgctcgtacagcggatgagtcgctatctccgccttcagcttccactcattgatgctcaattatctcagtctcaccatcttctacgctcttatgtctcacacaacactctttctctctcccctcatcaccgccaagaacttgacaacttcctggcacaatatttgatagttttgtgtacatttaaagaacagcttcagcaacatgtcagagtccacgccgtcgaggctgtcatggcctgccgtgatatcgaaaataccttacaagctctcactggagtgagtttgggagaaggaactggtgcaacaatgtcagatgacgaagatgatttacagatggatttttctttagatcaatctagcgctgaagggcatgacatgatgggatttggtcttcctacagaatctgaaaggtcattgatggaaagagttcgccaggaactaaagattgagctgaaacagggtttcaagtcaagaattgaagatgtcagggaagaaatattaaggaaacgtagagctgggaaattgccaggtgacacaacttctgtgttgaagaactggtggcagcaacatgcaaagtggccttacccaactgaagatgacaaggcaaaacttgtggaggagacagggttgcagctgaagcaaattaataattggttcatcaaccaaaggaaacgtaactggcacagcaactctcaatcggttacttctttaaagtccaaacgcaagaggtagacattatattattttgtccctaactatgtggaacagctagcaagcaacacaactatatataaggacatgcttattgctgataaagtgtagtcccactaaggattcagaagatagtagatgggttactgtaatattgtaagatagctgaaacaaattcgaggctggctgtaaatttgtggaacttaacgtatgcaaacttttcttttaggtgtggtt

SEQ ID NO: 10332 - DNA, 200 bp, Glycine max
  Clone ID: 700904949_FLI
ttccaatcgttaacagtgtcagccaaatctgttacaatggcaagggcattaaaacgcaagcctaatgttactgtagccatagatggtagtggagatttcaaaagcatcaatgaggcattgaagcaagtgccggagaaaaaccgaaagccatttgtgatctacatcaaggaaggcgtttaccaagagtatgttgaagttac

SEQ ID NO: 10333 - DNA, 762 bp, Glycine max
  Clone ID: 700904960_FLI
gtcaaagcaaccatcgagaggtacaaaaaagcaagttcagattcgtctggcgctggatctgcttctgaggctaatgctcagttttaccagcaagaagcagataaacttcgtcaacaaattagtaacctgcagaataacaacaggcaaatgatgggtgattctttgggctctctgactgccaaggatctcaaaaatctggagactaaattagaaaaaggaattagtaggattcgttcaaaaaagaacgagctgctatttgctgaaattgagtacatgcaaaagagggagatagacttgcacaacaacaaccagcttcttcgagcaaagatagctgaaagtgagaggaaccaccataacatggctgtgttgcctggaggctcaaactatgactctatgcagtcttctcagcaacaatttgactctcgtggctacttccaagtcactggattacaacccaataatcagtatgcacggcaagatcagatgtcccttcaattagtatgatgtgtttagtattgagatttgagatgttctgctacttgtagtttgccttctagtatgatagcagatgaatgctaagggtaatgtaagtagaaccatttgtaggggatttaagcatatatcccctcagtactatatatatgtaatggctttgtagactttcttaagactatcctgtatctattgtgaaacgctctgagatgttagtatttgtgtcctaattaatagtatgaagaagaaacctagcttggcatgtttttc

SEQ ID NO: 10334 - DNA, 1968 bp, Glycine max
  Clone ID: 700905047_FLI
gacaattctgcaagcaataaatctagtggttctgtggcttcctcaaagaaaaacaacgaatgcagcgagagattaagtgaggctcaaagcacttgtacatcaccaattttcgaagctgagagtacatacgtggaaaatatgcaggatgtgccccagtatgtacattgccaagttatgcaaactcttgtgcagagcacttgtacatcccctatttttgaagccaagagtacatatgtggaaaatatgcaggatgtgcccccgctgaaaagttctaaactgaacaaaattgatatggtgaagcatgaaaagtttgcccaatttgaaagggaatcagctgagcataatgatgaaacagaagataaatcagttacaattgtatcagatgctgcaaggtgcgacaaaacttctgaattaacagagttaaggccagaacaagactgtggtgttgctgaacctgaaactgaaaacgaggatgaaatcttaaaatctgagttagacggagacaattctcatgttagtatgatgcaaggatgcagtgctgagcgggtgaaaccttctaaaggagctattgacttgattgccacagttggaaatcttccaaagcaccttgatgaaaactgtagtctcaatggtggtaatacaaccaagtttgattgtgaaacgcaattggaactttccttaagaagtgattttcctggcagctcaggtaatcaagcaagtgaagcaactgaggaatctcaaagattgaaccattcaaatacttctgccttttcttggtatagtaatagtaaattgttgcagcctcatttttcaacaccatcgattacatttcctgaagtaaacaacctcagttgggattctcatgaatcccataaattatctggaattacttctggaaattgtcagtatggtggctcaaatcagaacctggagaatatgatcggtacagtcatttgtcagtatggacaagttacaccaaaattatcaaacagtcaatgtggactcttacctgtttctggggttatctccaaccttaagtctgagggacatggtaatgttttcacttctttgttctatgcacaatctggtattcaccctatgtcgagtccaaaacctgtctgccagaatgagagttctccctttcccacaagtacctccacccagtcctatcctgaaagccacaactcagatcaactacatgactgctccaatgatgctacttgtcttaatcaaaatgtaaaggataatactgattcagatcacgcaaggcatgattctcctgttgctgatcagagtgctggtaatagtttatgccatgatgctgcaaatcatgtcaatagtagtgcatatggaagcatggacagtggaaatgatggaaatgctacttcagctatagtatccaagaacgccccagatggtttcagtgatagtggttgtcataattatgatggatttagagtgacagatcctcatcgctccagtcaaagagaagcagtgctagtgaagtttcgactgaagcggaaagagagatgcttcgagaaaaaggttcgatatcaaagccggaaaagactggcagagcagcggcctcgggtgaaggggcagtttgtacgtcaacatgatcatcctgtcgctgaggctggtggtgattcatgaactttgttctttttaggtttcgtgtagtattaaattacagctgactgtaacactgattgtgtcaacaaggattagctgtagggtggtgtctgtgtatgtgttgttggaatctgtttatccattaggcaaaagaagagtaggccagtagggagatttatatttggactgccacttacaaatttaggattgcaattatttagtgggtttggtttggattttacctgtgtatatgttttcttggttgaatactaatatgggtctgtaaaaaatcccctctagaacctctggttttgcaattgagtgatctttctttgc

SEQ ID NO: 10335 - DNA, 1189 bp, Glycine max
  Clone ID: 700905073_FLI
caagcacatgcttgctaaacaaacagggcttaccaggagccaggtttctaattggttcattaatgctagagttcggctttggaagccaatggtggaggaaatgtacttggaggagatgaaagagcatgaactaaatggttctgaggagaaatcaagcaagagtggtgaagatcctgctacaaaaaccacaagtccacaagagaaacgtacttcctctgaaattgaatccaaaagtttcaattccaaacaagatgtttccaaacaaagccagaacactccaattcttccaacttctccaccatcaatatcacctatagggggaagtgttaagaaccaatcaggattcagtttcatggggtcatcagaacttgatggaatcacacaaggaagtcctaaaaaaccaaggaaccatgaaattcttcactctccaaaccgtgtcccttcaatcaacatggatgtgaaagccaatgaaggaaacaatgagcaacaactctcaatggatcacgagaggcagaataatagggatagctactccttcatggggaaccaaacaaacttcattagtggctttggacaataccctattgaggaaattggtaggtttgatgctgagcaattcacaccaaggttttcaggtaagaatggagtttccctcactcttggtcttcctcattgtgacacattgtcaggaacacaccaaagttttctcccaaaccaaaacattcaacttggaagagggttggacattggtgaaccaaaccagtttggtgccttgaacaattccaattctcacaattcagcagcatttgagagtatcaacatgcagaacccgaagaggtttgctgcacaattgctaccagactttgtggcctaaataagacattgaagaggggatagatcatagttggtgacattggttatatgggtctctcatattttcttctaatccatgtgcttgtttcttgggagtagtgataaaatcttagtgtaaagaaagaaggaattttactctagtataggtttataccttgcatagaaccattttagtttcttagatagcttagagatttgaaagtctatggttatttgaggttgtatattatttttgtaatttttgaaaatgggatagatgggttggtgtcataaaatttcaattggtaaagattacaatatatcttcgattgagagt

SEQ ID NO: 10336 - DNA, 1842 bp, Glycine max
  Clone ID: 700905086_FLI
tcaggctgcaacccacttccaccagagatatggcttttgcccaagtacgcccccattcatccagggaaaatgttatgctactgtcgcttagtttacatgcccatgtcatacttatttgggaagagatttgtgggtccaattaccgggttaatcatatctctaagagaagaaatgtacaaccagccttatgatcaaatcgattggaataacgcccgaagcacagttgccaaggaggatctctattacccacatcctctgattcaagatatgttatgggcatctcttcatcacgtggcagagcctcttctgaattgctggcccttttccatgctgagagagaaggcactagaagtcgcaattgatcatattcgttatgaggacgagaacagtggatacctttgtattggtagtgtagagaaggtgttgtgtttgattgcacgttgggtcgaagatccaaactcagaggcatacaagcttcatttagccagaatccctgattacttttggcttgcagaagatggattgaaaatccagagtttgggttctcaactgtgggatgctacattagctatacaagcaataatatcatgtgatttgagtgaagagtatggacctacacttcgtaaagcacaccactttgtcaaggcttcccaggtgcttgaaaatccatcaggtaatttcaaagcaatgcatcgacacatatccaaaggagcatggacattctcaatgcaggatcagggttggcaagtctctgactgcacagcagaaggattaaaggctgcacttctattgtcacaaatgtctcctgacctaataggcgagaaaatggaagatgagaggttctatgatgctgttgatgtgattttatctcttcagagcggcaatggcggcttccctgcttgggagcctcaaagagcgtaccgttggttagagaagttcaatccaacggaaatcttcaaagacactctcattgagatggagtatgtggagtgcacatcatcggcattgcagggcctggctttgtttagaaagttatatccaaaacacagaagaaaggaagtcgatctctgtatttctaaagcaatccgttacattgaaaaaacacaaaatcctgatggatcatggtttggctgttggggaatttgctatacctatggtacattgttttctgtaaaagggttaacagactgtggaaaaaactaccgtaatagtcctgccttgcgtaaagcttgcaaatttttgttgtcaaagcagcttcctaatggaggatggggtgagagttacttgtcaagccaaaacaaggtttacacaaatctaaaaggcaacagggcaaacttagttcaaacttcatgggctttgatgtccctcattgatgcagggcaggttgagatagatccaacacccgtagagcgtggaataaggttattaataaattctcaaatggaagatggagactttccacaacaggagatcactggagtattcatgaggaattgtacgctgaactattcttcatatcgaaacatttttctcatatgggctctgggagagtatcgtcgccgtgtctttacgcataaaagtcaaatacttagctccacctaactccaatccaactcattttgttgcctcaatgcacccattattatacttagcaactaagcgcagtgcaatttttgcggagccacccttcgcccttgtaaacacagcacatgttgcaagggtatctgccatgatgcttgttcactttagttcttatcattttttataggtcttatctcatgttacattatatttaaaaactttaatggtgaaactattcaaaaactttaaatgtctctcatt

SEQ ID NO: 10337 - DNA, 1491 bp, Glycine max
  Clone ID: 700905113_FLI
gcttaccaaccagggaataagagtgatacaattacagtgggcctaaaaaaacttgaacctagtttattctgtgaaggaagggaaacttattcaatatatcaacagcagaagcaaggtcaatgaatctctagagcaggcatataaattttacgctgggtatggaaatgatggaacagaaactgctcaggcttctggagcatatattttccgccctgatggttcaccctctcccatcaaatccaacgggaagtctcctctcacagtttttcggggaccaattgtgcatgaagtgcatcagaagatcagtccatggatataccagactactagactgtacaaggggaaagaacatgctgaagttgagttcattgttggacctatacccattgatgatcgagttggcaaagaaattgcaactgagatcaaaacaaatctagcaagcaacaaaaccttctatactgattccaatggacgtgatttcattgaacgtgttcgagactatagagaagactggcacttggaagtaaatcaacctgttgctggaaattactaccctatcaaccttggaatttacctgaaagataaaagcaaagagttctctatattggtagatagagccgtggggggctccagcatcatagatggacaattggagctaatggttcataggaggttacttgaggatgattccagaggtgttgcagaggcactgaatgaaacagtttgcattcatgataactgcactgggttaactgtgctagggaagtactatttcagaattgatcctgtaggagagggtgccagatggcgccgatcattcgctcaggagatatactcacccttgcttttagccttcacagagggtgaaggtcactggggagattctcatgtcacaaccttctcagcaatagattcctcatacaacttaccagataatgttgccataataaccctccaggatctaggtgatggaagagttctcctacggttggcacacttatacgagattgatgaggacaagtatctttcagtgaaggcaactgtagaacttaaaaaggtgtttcccaacaagcagataaacaaaataactgaagtgagcttatcagcaaaccaagaaagagcagaaatggagaggaagagattggtttggcaagttaaagggtcacctccagaacccaaggtgtggaggggaggaccagtagatccagaaaatctaattgtagaacttgctccaatggaaataaggacttttatcatcagttttaggcattaaaagtccactaggagcactactgaaaaataactaaaataagaaattgcatcagattagatatttccaacatcatgtaagccagcaacaagaaatatgttcagagttcgtttggctaaaggtgtatggactcaatcaagttcattgccaataaaagtgcattgcttctccccttttctattgacatctaaccaaaatttatgactactttttttttcttg

SEQ ID NO: 10338 - DNA, 1107 bp, Glycine max
  Clone ID: 700905149_FLI
gcatcaatgggccaaaagaaaagttagattccaccgttattagccagcctgctatttatgtcacaagtcttgctgctatagagctacttcgtgcacgtgaaggaggtcagcagattattgactcagttgatgttacatgtggtttaagcctgggagaatatactgctctggcatttgctggggctttcagctttgaagatggactcaagttggtcaaactgaggggagaggccatgcaggatgccgctgatgctgctagaagtgctatggttagtgtgataggactggactcagagaaggtccaacaattgtgtgatgcagccaatcaggaagttcctgaagctgagaaggttcagattgccaattacctgtgcccaggaaactatgctgtctctgggggattaaaaggagttgaagtgctagaatccaaggcaaagtctttcaaggctcgaatgacggtgcgcctagctgttgctggtgctttccacactagttttatggaaccagctgtgtcaagattggaagcagcattggcaacaacagaaatcagaaccccaagaataccagtcatctccaatgtgaatgcacagccacatacagatcctaacacaataaagaagatattggcacgccaggttacttcacctgttcaatgggaaacaacagtgaagactcttctaaccaagggtctgaagaaaagctatgaactgggacccggaaaggttattgctggaatcgtcaaaagaatggacaaaggtgctgatattgaaaatatcggtgcttaatgtggggaccttgctccttcttcgggttggaatgaacaaaactaaattgtgttagctataaatcaggatgcgtggaacttgaagctttgaaagcaaggagcagctacagtcatatttgaatgccagttttgaagttaaaatgttaaattataattcacgagttagataagtgattgtacttggcactagaattttttagtttttctaatcttatattcaatctgtctcggagttaattatgcctatgcttctttgtaccaaatatagcttttggcctttacacaggcttaataataattagaagaaacaacactttccattc

SEQ ID NO: 10339 - DNA, 1333 bp, Glycine max
  Clone ID: 700905152_FLI
aaagaatacaaaccttgtctttgaaccagctcaaggagcttccaccccagttcatccgtccagccaatgaaaggccagagaacaccaaagccatagaaggtgtcattgtgcctctcatctcactgtctcagtcacatcatcttttggtgaaggaaatagctgaagctgcttctgagtggggatttttcgtcataaccgaccatggtatgtcacaaacattgatccaacgtttgcaagaggttggtaaggagttctttgccctccctcaagaagagaaagaggcttatgcaaatgactcttccgaaggtaagtttgagggatatggcacaaaaatgaccaaaaaccttgaagaaaaggtggagtgggttgattatttttttcatctaatggctcctccttctaaggtcaactatgacatgtggccgaaacacccttcttcctacagggaagtgacacaagaatacaacaaggagatgttaagggtaacaaacaaggttttggagcttctgtccgaaggcttgggcttagagaggaaggttttaaagtccaggttgggagatgaagaaatagagttagaaatgaagataaatatgtatccaccatgtccacagccacatctagctttgggagttgaacctcacactgacatgagtgcccttaccatactcgtcccaaacgaagttccaggcctccaagtttggaaggagaatagttgggttgcggtcaattacttgcaaaatgcactcatggtacatgttggtgatcaacttgagagaaaacaaagaggaaaagagaatggttatgcagacctcgcccattggtgttgatgactacagggataaggtgttgagtaacggaaagtacaagagtgttctgcatagaagcttggtgaataaggaacgaaatcgcatgtcatgggcagtgtttgttgcgcctccacatcaggcagtgatagggcctcttccttctctcatcaatgatcagaacccacccaagttttcaacaaaaacctatgctgagtatcgttatcgcaaattcaataagctttcccaataagggaccaaaacatcatcacttgtgttgtcacggtgaaataaatttgtaagccatgatggaggataacaaagtaggagctaactctccattttggttaacaagtgtagctaatttctattatgcttttgaagtaaacagggctttgtccccttggcatttggtacatgccatattccttaagaatacaataaggctatattcctgttctacttcattaagagtcactgagtgagattcgtatgcacttttttgatggcctaattttacttttgttatc

SEQ ID NO: 10340 - DNA, 409 bp, Glycine max
  Clone ID: 700905160_FLI
tccacacgctttctccagagaccttcttcctagatacttcaagcacaacaatttctcaagcttcgtcaggcaactaaacacttacgttgcagctgttgcttggacaagaatctatggtagtgatagcaatcgttatttactcaagattattcagaagccgtagaatggatacgaattcgaagtagctggtctccaagaatcataactgattgttgcttttgaaccaagatccggttggtggttaaccttgtcggtttgattttttttcccctctatacttttcattgcttgagacttcgtcatgtggcttgaaattccacgtgtggcctcgttttatttcaagccacatgacgaagtctcaagcaatgaaaagtatagaggccacacgtggaatttcataatgttacat

SEQ ID NO: 10341 - DNA, 613 bp, Glycine max
  Clone ID: 700905166_FLI
tcggctgcggtgccttcgccaaagtccactacgcgcgcaacgtgcaaacggggcagagcgtggccgatggcggtgcggtggaagaaggagtgtggggtggagttggaagggatgaatgggaggtttgggattggggtggaggtttaccggctcacggcggagctcgcggtggtggaggtaaggaagaggggcggcgacgccgtggccgcggcagtgaggggtgtgtgggaggagaggttgaagcctttgttgcttgggggtgcaaccacgtcgtatagtagtgaggaggaacaacaacaacaacatcaagaagaagaagaacaacaagaacttgagtcgcaggttgccggtgactgaagtcaaaggaaatttgaatggcttgggttaaatccaaaagaaagtcaaaatgtacaaaagttaaaagaaaaaatggaaattggtgggggcacggtgtttatgttgcataatagatggatggaagttggaaggtagtgattatgtattattttatgtttttttggtttttgtatattattgaataaaaaaggggtgtattattttgtttttttttgagggattgtgagagaggaagttgctgcggggaattgaattt

SEQ ID NO: 10342 - DNA, 1585 bp, Glycine max
  Clone ID: 700905218_FLI
cggtggcctttcaacaagctagtaagagaaaaggcccttcaggtaacaatgaagcatatcctttacgaagatgaaaatagtcgatacataaccattgggtgtgtggaaaaggctttatatatgcttgcttgttgggtggaagatccaaatggagatgctttcaagaagcatcttgcaagggttccagattacttatgggtttctgaagatggaatggccatgcagagttttggtagccaaggatgggatgctagtttggttattcaagctttgcttgccactaacctaatggaggaaattggtcctacacttgcaaaagcacatgatttcatcaagaagactcaggtgaaggatgaccctttaggagattttaagagtatgtatcgtcatatttctaaagggtcttggacattctctgatcaagatcagggatggcaagtttctgattgcacggcagaaactttgaattgttgtctacttctatccatattgccatcagagattgtaggagaaaagatggaacctcaaaggttatatgattcagtcaatatcctattgtcacttcaaagtagaaaaggtggtttagcagcatgggaaccatcaggaactcaagaatggttggaaatactcaatcccacagaatttttagggaacattgtggttgaacatgattatgctgagtgcactggatctgctattcaagctttagttttgtttaagaagctatatccaaggcatagggagaaagagataaagaattccattgccaatgcagttcaattccttgaagatacacaaacagctaatggttcatggtatggaagttggggagtttgctacatttatggcacttggtttgcacttcgtggtcttgcagcggcgggtaaaacttacactaattgtgctgccattcgcaaaggcgttaaatttctactttcaacacagaaagaggatggtgggtggggagaaagttatctttcatgcccaaaacagatatatgtacctcttgaaggaagtcgatcaacagttgtgcacactgcttgggctcttttgggtctaattcttgctggacaggcagagagagatactacttctcttcaccgtgctgcaaaattgctcatcaattctcagttgaaagagggtgattggcctcaacaggaactcactggagtattcaatagaacgtgcatgctgcattacccaatgtacagaaatatttatccaatgtgggctctagctgaatatcgtaggttggttcccttgccatccactgaagtttaatttgaaaagttgtgcccataaaaaggcaaagccatgtcaacaaacattaagacattgtttttcatcttatggctctttttagttttgtaaagacacaaggcttaactcttttatgttatggtaatggatattatgcgatcgaatgcttgcatatcttacgtattttcataggactttaaagtatcggggttgtattagtataataaacttgtaatgaagttgggttgttacaaataattattggtatgatttttttatgtaattattgtaaaaattaataaatttattgtaaaatatagtatat

SEQ ID NO: 10343 - DNA, 1806 bp, Glycine max
  Clone ID: 700905223_FLI
atggactctcccaacgctttgtctaccgctccggcagcgggtagtaggaagaacgcgacgctaatttgcgtcccaataatgggagaatcagttgaaaagatggagattgacgtggacaaagcgaaagccggaggcgcggaccttgttgaaattcgattggattctttgaaaacctttgacccctatcgagatctcaacgctttcattcaacaccgttctttacccttgttgttcacttacaggcccaaatgggagggtggtatgtatgatggtgatgaaaataaacggctggatgcacttcggttagccatggagttgggagctgattacattgacattgaacttcaggtagcacatgagttctatgactctatacgtgggaagacattcaataaaaccaaggtcattgtttcatctcacaactatcagcttactccttcaattgaggatcttggtaaccttgtagcaagaatacaagcaacgggagcagacattgtgaagattgcaacaactgccttggacatcactgatgtggcacgcatgtttcaaataatggtgcattctcaagttccatttattggacttgttatgggtgatagggggttgatttctcgtatactttctgcaaaatttggtggatatctcacttttggtacccttgagtcaggagttgtttcagctcctggtcaacctactcttaaggatctattgtatctatacaatttaagacaactggctcctgatacaaaagtatttgggattattggaaagcctgtcggtcacagtaaatcacccatattattcaatgaagtcttcaagtcaattggtttgaatggtgtttatctatttttattggtggatgaccttgccaattttctcaggacttactcttctacagattttgtgggattcagtgttaccattcctcacaaggagacagcacttaagtgttgtgatgaggttgatccagtggctaagtcaataggagctgtgaattgcattgtaagaagaccaactgacgggaaattgattgggtataacactgattatgttggtgctattactgcaattgagaatgggttacgaggtaaacataatggtagtagcacaactatttctccattagctggtaagctgtttgttgttattggggctggtggtgctgggaaggcacttgcttatggtgcaaaagcaaaaggagctagggttgtgattgcaaaccgtacctatgaccatgccagaaaacttgcttatgcaattggaggagatgctttagcccttgctgatttagataattaccatccggaggatggtatgattcttgcaaacacaacatcaattggaatgcaacctaaagttgatgagacgcctgtttctaagcacgctttgaaatattactccctagtttttgatgctgtctacacgcccaagattactagactcttgaaagaagcagaagaatcaggagccactattgtaacaggattggagatgtttatggggcaagcatatggacaatatgagaatttcaccggattaccagcaccaaaggagctcttcagaaaaattatggaaaactattgaagagtgatcggttatctttgcaacacaatcaaagaatctaatggcgaggtactttaaagtgtttaggatgtgaatgaggaggtatcctccccgttctacttccaatttttcaaagtcttgttaattgaaatcaacaaatgattttgtatctcaattagagtgtatttggatagagaattttaactgaggagactaatttatcagagaatttaaatttttttt

SEQ ID NO: 10344 - DNA, 1298 bp, Glycine max
  Clone ID: 700905224_FLI
agaagaaaaacaaaaccctcactgagcgctgctgctttgagagagagatggctccgaaccttgaatgtcgtatgtacgaagcgaagtacccggaggtggacatggcggtgatgatacaggtgaagaacatagcggacatgggggcgtacgtgtcgctgctggagtacaacaacatcgagggcatgatcttgttctcggagctctctcgccgtcgtattcggagtgtgagcagcctcatcaaggttggccgcatcgagccggtgatggtgctccgtgtcgacaaggaaaagggttacatcgatctcagcaagcgcagggtctccgaagaggacatccaggcctgcgaggagaggtacaacaagagcaagctcgtccactccatcatgcgccacgtcgctgaaaccctcaacatcgatttggaggagctctatattcacattggatggcctttgtatcgcaaatatggtcacgctttcgaggctttcaaaataattgtgactgatcctgatactgttttaagtactctcactcgtgaagttaaggaagttggccctgatgggcaagaggtgactagtgtggtgccagctgtatcagaagaagtgaaggactctcttgtgaagaatattagaagacgaatgaccccccaacccttgaaaattagggcagatattgaaatgaaatgttttcaatttgatggagttcttcacattaaggaggcaatgcgtaaggctgaagctgtgggaaatgatgactgccctgtcaaaattaaacttgttgctcccccactttatgttcttaccacccagacactggacaaggagcaaggaatattggttctcaacaatgccatagcttcttgcactgaagcaatagaacaacacaagggtaaacttgtggttaaggaggcagctagagcagtgagtgaacgtgatgataaattgcttgccgagcacatggctaagctacgccaagataatgaagaggtcagtggtgatgaagacagtgaggaggaagaagatacaggaatgggcgaggttgatgtggataatggtgccgggataacagagtgacaaaaaacttgtgggtatagtagtaaggcatagatagcagagtccggctttactaattctgtcttttgttttttttttttcttaattcttttcaaactgtctttaaatgcggttgtacaatacaagcttgaattactttatgttgagatgtcttgtaacttacgaagcgattttgaagtttcttgatgagggtgttcaacccgaactaaggagatttacagttacttc

SEQ ID NO: 10345 - DNA, 942 bp, Glycine max
  Clone ID: 700905283_FLI
gcctccactctcatcttcatggacatcactcattcgaatgccttcttgattggaatcggcgtatgaatattgcaattggttctgctgaaggaattgtatcttcatcaccaagcaacaccgcatatcatccacagggatattaaagcaagcaacgtgttgctggattctgatttccgtgctcgtgttgctgatttcgggtttgctaagttgatccctgacggggcaacgcatgtgactacaaaagttaagggtaccctgggctaccttgcaccagaatatgccatgttaggaaaagcaaatgagagttgtgatgtctacagttttggcattctccttctagaacttgccagtggcaagagaccaattgaaaagcttaattcgacggtgaggcgatcgatagttgattgggcattgcctttggtttgtgagaagaaatttagtgaaattgctgatccaagactgaatgggaactatgtggagggagagcttaaaagagttgttttagttgcacttatgtgtgctcaggatctacctgagaagagaccgaccatgcttgacgtggtagagctactgaagggagaatctaaagataaattttatcacatagagaacagtgaaatgctcagaagccttctagctgtagaaagcaatgatgagacatcagtggctgaagaagacagtttagactatatatcagaagaaaaagaattagaacgtcccttgaaagagtatacttaaactatgaatgataccaaaaagataaaactatgagcttgaggggttaaatataggttgtgaagggtttttgttttcactgggtgcccatttgttagattaacatgggtatgtttactgctgcgcgtgattgtatgagtgtttggggttgtccctttgtgtagtgttttattccccttgtgttgtggttaccaacttgatatttgc

SEQ ID NO: 10346 - DNA, 825 bp, Glycine max
  Clone ID: 700905368_FLI
gtagtacacaacacatagagataggaagacaaaacattctcactccgaacaaaatgtcgattaacagcgaatctacgccgccaccgctgatcggcaaaatcgggccttacaccgtcttcatgacgccgccgtctacacccaaaccctccgacgaccaccccgtcaccaccaagatcgcacctccgccgcctcagattcccaaagccgttccttcccccaaacccgtctccgaccccgacgattccgtcttcggcttcttcagaaatgccgttaccaaggtccaaaccgcacactcaagtttggatgatcatttggcacgttggtttgggttgaatcagtcaaagtatcaatgggctcttgacgattattatgagagcaagggaatggaaaaaggagacattaaagtgaaagaaatatcgagcaaagtacagagtgtttgacttgcctagagttggtggattattcaaaagtgaggtgtgaagactcctgctttgagtatatttatacctttgtatttacatgtggagtagaatgtacgcgtttgaatcagtcaaagttatttgatctaaatccattgatatgattcaatggttattttccaactcctgccagttgagtctgattggacagtctctacctgtaatctaattaccaagttattttctggggcaaatgttttgtttttgtattgtagtttgggtcatgtttttgggcttctcatgatggctgggttttctcctaagcattttgtttgtaatctgagggggctaaactctgcaaaaaccctatgcaaattatttcaagcgatagtgtgattggttattg

SEQ ID NO: 10347 - DNA, 1249 bp, Glycine max
  Clone ID: 700905387_FLI
ttgttgcgttgcactcgcggaagcggagaaaaccaaagaatcaagcttcgtcaaagtgtctgtcacacacagtctttaagatctggaagcgcttctcacttgcccacaataagaattcctctcaaatttcaatttttcatttgaaaataataaaaccctaaaagaggggttgcaagcaaaatgagaagctcgaagatgtggatggttttcatgtgtctgacggtgagcttcttcgctcgcattgaatcgctatccgtgacggtgaacgacgtcgagtgcgtctacgagtacgtactttacgagggcgacaccgtttcggggaactttgttgtcgtcgaccatgacattttctggagctctgatcaccccggcattgatttcacggtgacaactgctgcagggaatactgtccacagtatcaagggaacctctggtgacaagttcagttttaaagccccatcacatggaatgtataaattttgttttcataacccttactcaacacctgagactgtttctttctacattcatgttggtcacatcccctctgagcatgatcttgccaaagatgagcatttggacccaattaatgttaagatcgctgagctcagagaggcactagaatctgttacagctgaacagaagtacttgaaagcccgtgatgcaaggcatcgtcatactaatgagagcacacggaagcgtgttgtattctacactgtgggagagtaccttctcttggctgctgttagtgcactgcaagtcatatacattaggcgccttttcagcaagtcagtggcctacaatcgtgtttgagtcgccttcatgattaacgttaatggcttccttcattagcaacagggttaggtttacatatgcgttctctattcattcaacagtacgattacgatcccttggtgaacacttttttttttcttttcaacagagactccacttgtatgttgatacccaacaagatatttaaattccttagcttgaatttcaatggattcacagaaatcaaaccgtgtgggaatcaataccaagtttgtaaaatggtagtctgagttcctaaaatggttgaaaaactgaaagtaaaattagacttttttggtaactctaagcccatactgcttattttttacctgttcttttaggacttggctctttatgttgttcacttctactggcaaaaggtgaaacatctccacaaattaaaaatttgatgttatatatgattgtaatttgtaat

SEQ ID NO: 10348 - DNA, 775 bp, Glycine max
  Clone ID: 700905448_FLI
cattactgaaaatggggtttcagatgagacagatttgattcgccggccatatctcttggagcatttgcttgctatttatgctgccatgatcatgggtgtgcgtgtacttggttacctgttctggactatttctgataactgggagtgggctgatggatatggtcccaagtttggacttgttgcggttgaccgggcaaataatcttgcacggacccctcgcccctcttaccatctattttctaagattgtgaatacaggcaaagttacacatgaagatcgtgaaagagcatgggatgaacttcaaagagttgcaaaagagaagaaaacaagaccattttatcgggctgtggataaacaccgtttaatgtatgcaggtggacttgacaaacctgaacagcgaccttatatagaacgagattggcggtttggtcattatcagatggatggactccaggatcccttgagccgcttctcaagatccatttttcgaccattctccctcttctcccttaaaaggaaaccaaaatctcaaaagaagaatgccaaattgattctccagcctcttgaaacttagcaattgatttgtcttgtcccagattctatatttttgagtgatgagcactttccatttcaatattcaaccccagacacatctgtctaactttcattatatgtgtaatattgtactgggtgtattatggtgcattcttgttgtaaagcttatttgtctcatttttaccaagaagtcaacgtattaatataatcactggacggt

SEQ ID NO: 10349 - DNA, 1728 bp, Glycine max
  Clone ID: 700905490_FLI
ctctctcccttagtcaaagggactcgttgttcttctcccaggttatttagaaaagcaaaatggtgaagatttgctgcattggtgctggatatgtggggggtcctactatggcagtcattgcacttaagtgcccatccattgaagttgctgttgttgatatctctaaatcccgcattgcagcctggaacagtgaccagcttcctatctatgaacctggccttgatggtgttgtgaagcaatgccgtggcaagaacctcttcttcagcactgatgttgaaaagcatgtctttgaggctgacatagtgtttgtctctgtcaacaccccaaccaaaactcagggtcttggagctggtaaagcagcagatttgacatattgggagagcgcagctcgcatgattgctgatgtttcgaagtctgacaagatcgttgtagagaaatccacagtcccggttaaaacagctgaggcaatagagaagattctgacccacaatagcaagggaatcagattccagattttatcaaaccctgaattccttgctgagggaactgcaatcaaagatctctttaacccagaccgtgttcttattggaggcagggaaaccccagagggccaaaaagctattcaagcattgaaggatgtttatgctcaatgggtccccgaagaaagaatactaaccacaaatctctggtcggcagaactatctaagcttgcagctaatgccttcttggcccaaaggatttcatctgtcaatgccatgtcagcactttgtgaggctaccggggcaaatgttcaacaggtgtcctattctgttggaacagactcaaggattggacccaagttcctcaacgccagtgttggttttggtggatcctgcttccagaaggatatcttgaaccttgtttacatctgcgagtgcaatggccttccagaggtggctgagtactggaaacaagttatcaagatcaatgattatcagaagagccgttttgtgaaccgtgtagttgcatcaatgttcaacacagtctcaaacaaaaagattgctattctgggatttgccttcaagaaagacactggtgacactagggagacccctgccattgatgtatgccaggggctacttggtgataaggccaacctgagcatatacgatccacaagtaactgaggaccaaattcagagggatctatcaatgaacaagtttgattgggatcatcctatccacttgcagcccacaagtcctactactgtgaagaaggtcagtgttgtttgggatgcctatgaagcaacaaaggatgcacatggcctttgcattctaaccgagtgggatgagttcaagactctcgactaccagaggatatttgacaacatgcaaaaaccagcatttgtttttgatggcagaaacattgtggatgctgataagttgcgtgagattggcttcatagtttactcaattggtaagccactggatccatggctcaaagacatgcctgctttggcgtaaaatagatcattgatcaagtacactgcaataccagtcaaatgttgaggcagtcagtttaattctttattattttttgtaagagtttttcttttcctgcttaactttctcataatagttggtgacataaatggggtataaattgtgggaaatgggagggtttatgttctatgttactttgtactccaatcttttatgaatgtactagggaaacttgttttgtttgatt

SEQ ID NO: 10350 - DNA, 1839 bp, Glycine max
  Clone ID: 700905512_FLI
ctacaaaggaaggactgaagatgataggttggttgctgtgaagcgcttcaacaagtctgcttggcctgatcctcgacagttcctagaggaagcaagggcagtggggcagctgaggaatgagcggttggctaacttggttggttgttgctgtgaaggggaagagagattgcttgttgctgagtttatgccaaatgaaactctctccaaacatctctttcactgggagagccagccaatgaaatgggcaatgaggctgagagtggccttgtatttagcacaagcattggagtactgcagcagtaaaggaagggcattgtatcatgatcttaatgcttatcgagttttgtttgatcaggatggaaaccctaggctctcttgttttggactcatgaaaaacagcagagatggcagaagctatagtacaaatttagctttcaccccacctgagtatttgaggacaggaagaatcacccgagaaagtgtaatatacagttttggcacactcttgcttgatcttctgagtggcaagcatattccacccagtcatgcacttgacctaatacgtggcaaaaactttctgatgctggtggactcatgtttggaaggtcatatttcaaatgatgatggaactgagatagtgagattagcttcacgctgtttacagtatgaacctcgtgagaggccaaacgccaagtcgcttgtgactgctctagctcctcttcagaaagaaacttcagttccatcacaagttttgttgggcataccagatgagattaccccatcaaaggaagcagttccactgacaccttttggtgaagcttgttctagaagagatctcacttcaatatatgaaattttggaaacggtggggtacaaggatgatgaagatgtagcaaatgagctttcgttccaagtgtggacagaccaaatacaagaaacactaaattctaagaagcaaggagattctgctttccatgccagagacttctctaaggccattgagtgctatacacaagtaagtcagctagaaatacgtggagcatgaatccattatgaatctcccaaaatagcatgcagatttcacacttttgtacaaactacataacctttggttatcaacttcatggcagacaaagttcatctttactctattgaattttatgtgttactacttactgttatttggctaaaacagtgaatgattagttggtaacgtaaaggggtcaatgctttagaattatcaattaacctttcattactcacaaaacatgctaaataaagaagactagactgttatgcacctcccaaactaaaagagtattttcttgtactccttttttctctcgagagaattcctacttgcttgttttgtgtagttcatcgatggcggaacgatggtatcaccaactgtgtatgcaaggcgctgcttttgttaccttatgatcaacatggtacaagaagcactgggagatgccatgcaagctcaatcagtatcccccacatggccaattgcattctatcttcaagcagtggccctcttcagcctcgggatggaccatgatgcagaggaaagtcttaaagatgcaacaactctggaaaccagaaaacatagaaactgaagtgtacatagctttttgttttctttcttccctttcttttggttccctttcatttctcaaggaaatgttacaagcattagctgtatgtatctttgtctgttcattatttccttcaacagttttgaaactcttattgtctatgcctcctaggattttgttttcctaaaaaaaagctgtgaaattgccctagttcgtataaaaatattatatacaataactt

SEQ ID NO: 10351 - DNA, 758 bp, Glycine max
  Clone ID: 700905514_FLI
atgtgtttacccctctagtcctagcaatgctggaacaggcaccacagcaactccaacaaccactacaccaacaacaggcacaccacccaccaccttaactccaaccacccccactactaccactccaggcacaaccaccggtaccagcccaaccactggcactggtaccggcaccggcaccggcaccaccataggtaaccctaatgtgtttggaatgagtccaacatcttcaactggaacaggaggaggcttcaatgacccaaacaaaggagtggttcatttgcaagacataagcatgttgctagtgtctcttgttatcaccttcttgctagtaatgttgagggtctaataataagtggtacagttcttgggaaaaaaaaaacacttttggggctgtttgttttgatgtgtggatgagattttgccacactgtacaagggtgttcttgtaatttcatcacttggaatcatccagaagcaaaaccccccactttagcctcctgtttgtttttgttctgttcctacttctaagaaaagagagaaaaaaagaagtgttagggaatttggttccttttcagtggtgaatatttgataatatagctactaatggggtggaacctgatcggtttccatttgtatattatctatctatcactatgagaggcactattttttatttatttttatttactgagccttgctagttgctaccttgtattatttatatgttaatatgtgatatttacttgttttttactt

SEQ ID NO: 10352 - DNA, 1017 bp, Glycine max
  Clone ID: 700905635_FLI
agagaaaagcgcgctatatacaagaacttgagcgcaaggttcagactcttcagacggaagccacaactctttctgcccaattgacattataccagagggacacatctggccttagtactgaaaatacagagcttaagctccgtctgcaagccatggagcaacaagcacagcttcgcgatgctcttaatgaagcattgaagaaggaagttgagagacttaaggttgctaccggtgaggggatgagccacactgaatcctttaatctgggaatgcaccagatgccattttccggatcaaatttcattccaatcccgccacaatcaggtccttctggtcaccagaacatgcagatgccaccatttggtcactccccatccacaatgccaactcatcaactgcatcaaacaagttctcatccatattcagaaatattgcaaaatgaacagcttggtcgtttccaagggcttgacattagtagcaaaggatcaactctcgtgaagtctgaaggcccctcgctctctgcaagtgagagtagcagtacattttgaatttgacagaaaatgcttgacctgctgacttatccatgctattcattgctcatagggttgacatttagtcaactagtgaaggtacctcatttcatgattcagatttgaggattaattcttaactatttattctaagggttgctcgccaaaaaggggaagcacccttggggttttgttgcaaagttcacagtaatcatgtttcagcatggcatttggtgtttctgggcgctggaatattgggaatgaaaggtcattcccattgtatctttgtatttgtatcatcgtttacgtgatagcatgtaaactgtgtgatttattgttgtgttttacttcattcatagtccaagatggactcttttttttttttctttgtataattagttttagatttattcatagtcgttgtacaatccaagagttttgggtacttgttgtattaaacttcttctgagataagaccttttttttg

SEQ ID NO: 10353 - DNA, 1328 bp, Glycine max
  Clone ID: 700905636_FLI
gtagcagtataaaccaattggagttggagagaaaagaagaagaatctagaaagctgaaatgaataggattcacagcagatatagcaaagctcacactaacatcaatttatgataacaacctcaaaatcaagttatcagtgtgtcaccctgacttttcaaaaacaattatttgttgcttcatatttcactgtgatttcataatagattttcactcatcttacttgactccaagcattctatatatctagtgcctccacgcatctctaccctcaaatcttcaccacacaacactacctcaattactcaactaaagcttcattcattcatcgtgtcgtgttgtgttctttgcaaccatgcttcttagaacagcgtcctctttctctctcttcaacgccaacggcgaccatatactactcccttcctctgttcgctactctcagggcaaacacttggttccatgcgctaccaagaactccaataaccggcccttaaccggcgtcgtatttgaaccctttgaagaggtcaagaaggagctcgaccttgttcccactgtcccacaagcttcccttgctcgccagaagtacaccgatgagtctgaggctactatcaacgaacagatcaatgtggagtacaatgtttcgtacgtttatcatgcgatgtttgcctacttcgatagggacattgttgcgctcaagggtcttgccaagtttttcaaggagtcaagcgaggaggaaagggagcatgctgagaaattgatggaatatcagaacaagcgaggtggaaaggtgaagttacaatctatagtgatgcctcttactgagtttgaccatgaggaaaagggagatgcgctatatgcaatggaacttgccctgtcgttggagaagctgacaaatgaaaagctgcttaacttgcacagtgttgcctcaaagaacaatgatgtgcaattggcagattttattgaaagcgagtttttgggtgaacaggtggaagccataaaaaaaatctctgaatacgttgctcaactcagaagagttggcaaaggacatggtgtgtggcactttgatcagatgctactccatgaggaaggagttgctgcttgattaacattttttttctacctctcgttcgtgcatctagttagttattcggattagtattttcaggtcttttaatgctagagatgaacaaagtggatatggagtaatattggtcatttgtatgtcgtgttttttttagtaatattggagtaatatggaatttgcgtattggactaatatggaattgacgtattgttggagtaatatggaattgaaactcaaattacaatt

SEQ ID NO: 10354 - DNA, 952 bp, Glycine max
  Clone ID: 700905693_FLI
gctctacgcaccatagtctttgttttcatttactaccatatttagttatcagcaatggacttctactttggaaactctcctccttatcccaataattatgctcataattctcttaatatggctctatcttcccctgagattgcactatccgattatctcatgctcgatgactatgttgatcatcaagattctcgatcatcacaaagcaccgagtcatctgaaaaagcaaccttcaatgatgccactcacggattcagtactggtgcaacctctaagaataataacataaactgcaaaaatgggattaatgaaaacaaaggtggagtgggtccaaggatcgcgtttagaaccaaatcagagcttgagatcatggatgatggatacaagtggaggaagtacggcaagaagtccgtgaagagcagtcccaatctaaggaactactacaaatgttcaagtggaggatgcagtgtgaagaaaagggtggaaagggatagagatgactacagctacgtgataacaacatatgaaggtgtgcacaatcatgagagcccatttaccacatactacagccccatctccttcgtacattctgatactactttcaaatgacaccaacttcaaacccttttgggcatttacacctccctagcttaattatgtgccaagaaaaagcttggaagattcgatcgagcaggggaagctatgtatcattgcattgtctaatcaatcataatttattttcatgctgtaataggttgaagagagtttctatacctttttttggttccacgtttaatatatctctcaattaaaaatcagcctttgctagttcatgtaacaaggaacatgattctccatgtgtaaagttgttcaaatcttaaaagtaagtatcttgtattaggattagagtatctctcttgtactctgtttaataataaaagttttgcctcct

SEQ ID NO: 10355 - DNA, 1284 bp, Glycine max
  Clone ID: 700905713_FLI
tgttaagaccgctgggcttctaggtgatggatttggttccacgcctgaaatgtgtaagaagaacctgatatgggtggtgactaagatgcaggttgtggttgataaatatcctacatggggtgatgttgttcaagtagacacgtgggtttctgcatcagggaagaatggtatgcgtcgtgattggcttgtgcgtgacgccaaaactggtgaaatcttgacaagagcctccagtgtttgggtcatgatgaataaagtgacaagaagactgtctaaaattcccgaagaagtcagggcagagataagctcttattttgtggattctgctccagttgtgccagaggataacagaaaactaaccaaacttgatgattcagctaatttcattcgcactggtttaagtcccagatggcatgatctagatgtgaatcagcatgttaacaatgtgaagtatgttgggtggattctggagagtgctccgcagccacttttggagagccatgagctatgtgccatgacattggagtacaggagggagtgtggcaggaacagtgtgctagattccctctctgatctctccggtgctgatgttggaaacttagcagatgatggattttttgagtgcaagcacttgcttcgacttgatgatggtgctgagattgtgaggggcaggaccgaatggaggccaaaacccttaaacagaaactttggtcatgttttgagtcaggttcctgttccagcagaaagcacctgaatctcattgattgacatcaatggaagagtggcataattcatgttcccacttgcagattggagagctttgcttgttgccttaaaatataaaacaaacaaaaaataataataaaaaaactcggtcttatcattttgtaattaaaaaatagctcctaccactactttccctactgctccatttcgtttatggttatgctgctgctaggtgtcatcaaaatttaattgtttcataaaaatggctaagcgtgtatattatagttcttttttcttttcccttataagaaagatgcaatattcctcgtgaacataccaaaacaaataaagctatgtatagcttgcaggaaaggcctcctgggtctcttttgtggtttctattattagcaattaattgcgcacacaaatatgggtcatgtgacgggatggattctagctatatagacaacttcatatgaccggcactatcatgtagacatgtatgttccgagagatttaaccatttatgatttatccatctcaggctgtgatcttttttac

SEQ ID NO: 10356 - DNA, 744 bp, Glycine max
  Clone ID: 700905716_FLI
gccatgcagatcagcacacctgaaggcaatggaagttgccagggaagcaggatgcttgctctcttatgacccaaacctgcggctacccttgtggccctccgccgaggaagcacgtcagcaaatactcagcatatgggacaaggctgatgtaatcaaggtcagtgatgtggaactggaattcctaaccggaagtgacaaaattgatgatgcatctgctctctccctgtggcaccccaatttgaagttgctccttgtcactcttggcgaacatggctctagatactataccaagaatttccatggatcagtggaggcttttcatgtcagcacggtcgacacaactggcgctggtgattcctttgttggtgctctattaagcaagattgtcgatgatcaatccgtacttgaagatgaagcaaggttaagggaagtactcaagtttgcaaatgcgtgtggagcaattacaactactaaaaagggagcaattcctgctcttcccacagaggctgatgccctcaacctgatcaaagaggcatagaaatttaatgctagtagcttttggttttctttatatatatgtcttcatccttttcctttcgcgttggacttgcttgctatcaacttcagatggattttgtttcttggttttctttgttttatttacccctcattctgcattaacggtaatatcatatgatttggggttttgccaaatgatttctttcaaattctgagattgagatt

SEQ ID NO: 10357 - DNA, 765 bp, Glycine max
  Clone ID: 700905726_FLI
cacacaactcgcatctcagtcagcatgtcttaatttacttggtgtcaagggtgccaacaaagaatctccgggtgcaaattctaggctactggccaccattgtagccggttcagtcctcgccggggagctatcgctcatgtctgctattgcagctggacaacttgttaagagccacatgaaatacaacagatctagcagggatatatctacaattgtccaatgaactggccacagtacacttaaacttgtgtcagagactaatattctaataagcaaaccatcagataaagacataaataacgagaaaaaaattggtattgatgatggtgggggtaaaagataaagtgatggttggcatcttccatgggcaaatccagctccccagaagcgtggggttggttggcattcattgaatatctgcttcgtgtgaggcattttctcttatggagattgtacagaggtacttgaattagagggtggaggtaaacaggagccacacttttgggattagagtttctctttgttttccaaaaaaaaaaaaaaaaaatcattttgtgttgtgtgttatcctcttgtttaaggctactgcttcaataatgtggtactttagagggcagtgtttttacgtgttgtaatctccatcttgttgatttgtaattgtagctagagatgtctccaattaggatgtagagttgttaataataacagtctctggttgctcaacatttttccttcgtctctaattacgtctttttggcggttggt

SEQ ID NO: 10358 - DNA, 2068 bp, Glycine max
  Clone ID: 700905774_FLI
ctgtgagacaaactgaaccggatcctgtagttgaggatgactacagtgatgaagaaattgatgtggatgaactcgagaagaggatgtggagggacaaaatgcgtctcaagcgattgaaagaacaaaccaagtccaaggaagggactgatgcagcaaagcaaaggcaatcccaagagcaggcaaggaggaaaaagatgtcaagagcccaagatggaatactgaagtacatgctgaagatgatggaggtttgcaaggcacaagggtttgtttatgggataattcctgagaaggggaagccagtgaccggagcatcagataatcttcgcgaatggtggaaggataaggtcaggtttgatcgaaatggtcctgctgccatagccaagtatcaagccgataatgcaattcctggaaagaatgatggatgcaattccattggtcctacaccacacaccttgcaagagttacaggacacaaccttgggttctctcttgtcagcacttatgcagcactgtgatcctcctcagaggaggttcccactagagaagggtgttcctccaccatggtggccaactgggaatgaagaatggtggcctcaaattggtctacctaaagatcaaggccctccaccttacaagaaaccacatgacttaaagaaggcgtggaaggttggtgttctcactgcagtcatcaagcatatgtcccctgatatcgccaaaattcgcaagcttgtgaggcagtccaaatgccttcaagacaaaatgacagcaaaggaaagtgcaacctggcttgccatcatcaaccaagaggaagccttggctagagagctttaccctgattattgccctccattttcctctgctgtagctaatggatccatggtgatcaacgattgcagtgagtatgatgttgatggggctgaagaagagccgaacttcgatgttgaggaccggaagcccgaccatcttcatccatcaaaccttgggatggagagaatgatgggaaggatgccaattcagcaaccttctcatcccatgaagggagatgttgtcacaaacctagatttcatccggaagaggaagatttctagtgacttcaacatgatgatggatcagaaaatctacacatgcgagcatccccaatgcccttacagcgaagttcgccttggtttccatgataggtctgctagggacaatcatcaattgaattgtgcatatagaaacagttctgcagattatggtggtggtcccaatttccatgctactgaggttaagccagtcatattcccccagtcctttgttcaacccaacactacagctcagtctgcaagtttggttgcaccttcatttgatctaactggtcttggagttcctgaggatggccagaaaatgattagtgaccttatgacaatctatgatacaaatgttgtaggaaacaaaaacctaagctccaccaactgtgttactgctgaaaatcataacctttctcaggccagcttacaacgacaggacagttttttccctggtcaaggaatggtgttggaagggaacttgtttgcacgagaggaaggtcaatttgaccggttcaaggccaccatgaacatgaacatgaacatgaacactccttttgataccaaccacaacaacaataatatccatttgatgtttaattccccttgtgatttgtcatcctttgatttcaaggaggatatacaaggagtaggaatggattctcttcaaaaacagcaagaggtttcaatttggtaccagtgaaaatgcgaagagggaaactcgtgtatcacggacttttattgtgtcattaaagagggtcatgtgaaagtcccttgactcaaaaagcagttaatgcatttttcttcccatgtaatagtttaggtcttagatattttatgctttgggaggtctggtctggtctggtggcattatattatgggttaataaatcatgggtgttcccataatgtaaccctttttatgtgtctctttatgtgttagccctatgttacttatatcatatgtacgactgtgatataaataaaagatttttattctctt

SEQ ID NO: 10359 - DNA, 1216 bp, Glycine max
  Clone ID: 700905846_FLI
ctcagattggtgaatctcaacccagtattttcttcacagataggtcaggacagcattataaagaatgcctgtccatggcagttgataatcttcctgttcttgatgggaagactccagtccaagtgtaccagagtttctgtgagagcttcaagtcttcattctctccattcatgggctctacaatcacgagcatttccatgggtttaggaccagatggtgagctacgttatccatctcaccactggctgccgagtaatggtaaaactcaaggtgctggggaattccagtgttatgaccaaaacatgctcagctttctcaagcaacatgctgaagcatctggaaatcctctgtgggggcttggtggtcctcatgatgcacctatctatgaccagcccccatacaatggcttcttcaatgatggggcttcttgggagtctacttatggggacttcttcctctcttggtattccaatcagctcatagctcatggagactgcctcctttcattagcatcttcaacttttggtgactctggagtggcgatctatggaaaaatccctcttatgcactcttggtatggaactcgatcccatccttcagagctaacagcagggttctataacacagttaacagggatggctatggaccagttgcacagatgtttgctcggaactcgtgcaaaattatattacctggcatggacctttcggacgcgaaccaaccaaaggaaaaccattctagccctgagttgctacttgcacaaattatggaagcttgcaaaaagcatgaggttcaggtttcaggtcaaaattcgtctgaatctggtgttccaggggggtttgaacaaattaagaagaatttatctggagataatgtattggacttgttcacatatcatagaatgggagcatcattcttctctccagagcattttcctttgttcactgagtttgtccggagccttaagcaaccggaactgcattcagatgatctacctgctgaggaggaagtaggtgctgaatccgccgtggttatgagccgtgattcaactgtgagcatgcaagcagcctaatggttgtaaatttgtaatctatgataatcatgtatataacaattagttattattatactacccttgcatcagtgcatgggatgagattgaggacaggttattttgtaagcataatatgaggatcccttttccttgtttattct

SEQ ID NO: 10360 - DNA, 2427 bp, Glycine max
  Clone ID: 700905872_FLI
aatccctccaagctatggaaaaatgtggcagctcaactttctgtctcttgcagggaatgatttgagaggcttcataccaagtgagcttgggaatctcactaacctgactcatctttacttgggatactacaatcagtttgatggtggaatccctcctcagtttggtaagctgaccaatttggttcatctagacattgcaaactgtggcttgacaggtccaattcctattgagttgggaaacctctacaagttagacactcttttcttgcaaaccaatcagctaagtggttcaatccctccccagttaggaaacttgactatgttaaaagcccttgatctatcattcaacatgctcacaggaggcatcccttatgagttctcagcccttcatgagcttactctcttgaacttgtttataaacaagttgcatggagaaattcctcacttcattgctgagctacctaaattggagactctgaagctgtggcagaacaacttcactggagtgattccttcaaatcttggccagaatggaaggttgattgagcttgatttgtcaacaaataagctcactggtttggtgccaaaatctctatgcgtcggaaagaggctgaaaatcttgatcctgctgaagaactttctgtttggatctttgcctgatgatcttggtcaatgccacacactccaaagagtccgtttgggccagaactatttaactgggccactgccacatgagtttctttatttgcctgagctattacttgtggagctacagaacaattatcttagtggtggctttccacaatcaacaagcaacacatcctccaaactagcacagttgaacctatcaaacaaccggttttcggggactcttccagcctcaatttcaaattttccaaacttgcaaatccttctgctcagtggaaacagattcacaggtgaaatcccaccagatatagggagattgaaaagtatcctcaagttggatattagtgctaacagcttttcaggtactattccccctgggataggtaactgtgtcttactcacctatttagatttgagccaaaaccaactatcaggccctattccggtccaagttgctcaaattcacatattaaattatctcaatgtctcatggaaccacctaaaccaaagcctgcccaaggaacttagggccatgaagggtttaacttcagcagatttctcttacaataacttctcaggctcaatacctgaggggggccaattctcactctttaattccacatcctttgttggtaaccctcagctatgtggatatgactccaagccatgcaatctttcttcaacagctgtgttggaatctcaacaaaaaagcagtgcaaaacctggggtccctgggaagttcaagttcctctttgctttggcattgttggggtgttcattgatttttgcaacattggcaatcatcaagagtagaaagacaaggaggcactccaattcatggaagttaacagcattccagaagctggaatatgggagtgaggacatcacagggtgcataaaggaaagcaatgtcataggaagaggaggatcaggtgttgtatacagaggaaccatgcctaagggagaggaagtggcagtgaagaagctcttaggaatcaacaaaggctcttcccatgacaatggcctctctgcagaaataaaaacattggggagaatcaggcacaggtacattgtgaggctactagcattttgttcaaacagagagaccaatttgcttgtttatgattatatgccaaatggaagcttgggagaagtcttgcatgggaagaggggtgagtttctcaagtgggacactaggctcaaaatagccatagaagctgcaaaaggactttgctatttgcaccatgattgttcccctttgatcatccatagggatgtaaagtcaaacaacatattgttgaactctgactttgaggctcatgttgctgattttgggcttgccaagttcatgcaagataatgggggatcagagtgcatgtcttccattgctggctcttatggctatattgctccagaatatgcatacacattgaaagtggatgagaaaagtgatgtttatagctttggagtggtgctgctagaactgataacgggacgaaggccagtgggggattttggtgaagaaggattagacattgttcaatggaccaagatgcaaaccaattggaacaaagagatggtgatgaagatccttgatgagaggctagatcacattcctttagctgaagcaatgcaggtgttttttgtggcaatgttgtgtgttcatgaacacagtgtggagcgaccaaccatgagggaagtggttgaaatgcttgctcaagcaaagcaaccaaacacattttaaatgtagtgatctagaaaagtataagataacaagtt

SEQ ID NO: 10361 - DNA, 1531 bp, Glycine max
  Clone ID: 700905933_FLI
cagacttacatgccttgtgactctttcatttttctccataccttttcttgttccttctgagcttaatcgtattcctcacttcggctgcttggcaatccaagccaaaagatcctgcagacgtcataagaaaatcttatgaagaaggatatgataactaatgttaccgagtatgaggcaattgcaaaggaaaaattgccaaagatggtttatgacttctatgcatcaggggctgaggatcagtggactttgaaagagaaccgaaatgcgttctcaaggattctgttccagccgcgtattcttattgatgtaagcaagatagacttgactacaactgtaatgggcttcaaaatatcaatgcctatcatgattgctccaacagccatgcaaaagatggctcaccctgaaggagaattagctactgctagagcagcatcagcagctggcacaatcatgacactatcctcaactgcgacttccagtgtcgaggaggttgcttcaacaggtcccggcattcgtttttttcaactttatgtgttaaaagacagaaatgtggttgctcaggttgtgagaagagctgaaaaagcaggtttcaaggcaattacccttactgtggacagtccaattcttggtcgtagggaggctgatatcaaaaacagatttacattgccaccaaacctggttttgaagaattttgaagggttggatcttggaaagctgaacaagactagtgactcttttgctgcctcttatgctgctgaactatacgatcggtcactcaactggaaggatatcaaatggattcaaacaatcacttctttgcctattttattaaagggtgtacttactcctgaagatacaatgatagccatacaagctggagctgctggaatcattgtttccaatcacggagctcgccaacttgactatgtccctgcaactattatggctttggaagaggtggttaaagctacacaaggaagaattccagtttttctggatggcggaattcgccgagggacagatgtttttaaagcactagctcttggagcagccggtgtattcattggtagacctgtggtgttctcattggcagctgatggtgaggctggtgtgagaaaagtacttcaaatgcttcgtgatgagtttgaattaactatggcactaagtggttgtcgttcactcaaggagataactcgtgaccatgttctcacagagtgggatcgtccaagattttctcccaagttataatatggcaggactccaccttcttctatattctaaaataggagggattttagaataacctttgttcttatttcatgctttagtagaaatcttatgagtgaggcgttagtcatccattagtaattgctacttctttattcactgtacaaaataagtttttacttgaactcatttcattgcacttggtgcgatttggtaaactctagaaacatgatagcctataaaatgtacttttttcttgacaaaagattaagttttatgatcatggatctcccatttaggtgcg

SEQ ID NO: 10362 - DNA, 915 bp, Glycine max
  Clone ID: 700905984_FLI
gagaaaaggaacatattagaaccagcaggtgcacttgcactagctggagctgaggcatactgcaagcatcatggggtccaggggaaagatattgtagtaataaccagtggagcaaacatgaattttgataaacttcgggttgtaactgaactcgctaacgttggccgtaaacaagaggctgtgctggcaactgttttgccagaggagccgggcagtttcaaacagttttgtgaattggtggggcagatgaacatcacagaattcaaatacagatataactccaatgagaaggctgttgtcctttacagtgttgggattcacacagtctccgaattaagagcaatgcaggagaggatggaatcttctcagctcaaaacttacaatctcacagaaagtgacttggtgaaagaccacttgcgttacttgatgggaggccgatcaaacattcagaatgaggttctctgtcgtttcacctttccagaaagacctggtgctttgatgaaatttttggaccccttcagtccacgttggaatatcagtttattccattaccgaggggagggtgaaactggagcaaatgtgctagttggaatacaggtacccaaaagtgagatggatgagttccacgatcgtgccaacaaacttggatatgattataaagtggtgaataatgatgatgacttccagcttctaatgcactgatgatggttttaggcacttgccattattgtgtattttagtcaacaagtttgccatatttaatatttccacggtcgtttctaaaagttggatggggaaaaaaggtggaaaggaagtggccttcagacatgtcattagttgattagaggaacaactagttctttttacctaatgcggcgtcttattacattttttataatctgtaatttatgtttt

SEQ ID NO: 10363 - DNA, 1939 bp, Glycine max
  Clone ID: 700906023_FLI
gagattcttcgttacatatattaccaccagaacaaagatggaggttggggactacacatagaaggtcacagtatcatgttttgcactacactcaattatatatgcatgcgaattcttggagaaggacctaatggaggtcataacaatgcttgtgctaaagcaagaaagtggattcatgatcatggtggtgcaacacatataccttcatgggggaaattttggctttcggtacttggtatagttgattggtgtggaagcaacccaatgccgcctgaattttggatccttccttcttttctccctatgcatccgggtaaaatgtggtgttattgtcggttggtatacatgcccatgtcttatttgtatgggaagaaatttacgggtccaatcacaccgttagttgtaaatttgagagaagaactttttattcaaccttatgatgaaaatagttggaagaaagcacgtcataaatgtgcaaatgaagatctttactatccccatcattggatacaagatctattatgggatagtttgtatgtattcaccgagcctcttctaaattgttggcctttcaacaagttggttagagaaaaggcacttcaagtaacaatgaaacatattcattatgaagacgaaaatagtcggtatattgccatcgggtgtgtggaaaaggttctatgtatgcttgcttgttgggttgaagatccaaatggagatgctttcaagaagcatcttgcaaggatcccagattatttatgggtttctgaagatggaatgaccatgcagggtattggtactcaatcatgggatgttggtttcattgttcaagctttacttgctactaaccttatagatgattttggacctacaattgcaaaagctcacgatttcatcaagaaatctcaggtaagagaaaatccttcgggagattttaagagtatgtatcgtcacatttgtaaaggctcatggacccttgccgatagagatcatgcatggcaagtttctgataccactgcagaatgtttgaagtgttgtctacttttatcagtgctgccacaagatattgtgggagaaaaaatggaacttgaaaagttacatgattcaatcaatttgatactgtcacttcagagtaaaaatggaggtatgactgcgtgggagcccgcaggagcttataaatggttggaactactcaatcctacggaattttttgctgacatagtagttgagcacgaatatcttgaatgcactgcatcagcaattcaggttttagtgttgttcaaaaagctttaccctgagcatagaaaggaagagatagagaacttcattgctaaagcagtaacattcattgaagatacacaattagagaatggttcttggtatgggaattgggcagtttgtttcacttacagctcttggtttgcacttggaggtctagttgctgctggcaagacttacacaaattgtgttactattcgtaaagctgtgaaatttctactcaaaatacaaaataaggacggtgggtggggagagagttatctttcttgcccaaggaagatgtacgtacctcttgaaggaagtcgatcaaatgttgtacaaacatcatgggctctaatggctctaattcatgctgagcaggctgagagagatccaactccccttcatcatgcagcaaagttactcattaattctcagttagaagatggcgattggccccaacaagaaactcttggagtatacttgagaaattgcttggttcattactcattctatagaaatatttttccaatgtgggctttggctgaataccgcacaaatgttttattgccttcctttactatttaagttgaaaaattgtgagctcaaaaagataatgtcataccaataaaagtctagaaaaaaaaaagttggtaatgaagtttaataggcttattcatattcc

SEQ ID NO: 10364 - DNA, 2693 bp, Glycine max
  Clone ID: 700906055_FLI
agcatattgatgctcttactgacaggattggaaggaatgttgtccttgaacttgttagcactgagattgatccaaagaccaaatctgcaaagaaaagtaatgaagcagtgctgaaggattggtcaaagaagtccaatcttaaggcagagagagttaattacacggctgaattcataattgactctagttttggggagccaggagctattactgtgacaaacaaacaccagaaagagttcttcttggatagcataaccattgaaggatttgcaagtggaccagttcatttcccctgcaattcatgggtacaatcaagaaaagatcttcctggaaagaggattttcttttccaataagccatatttacccggggatacacctgctgggcttagattattgagggagaaagagctgagaaatctcagaggtgatggcaaaggagttagaaacttatctgacagaatatatgactatgatatatacaatgatttgggaaatccagataaaggaattgaacttgccaggccaaatcttggaggatcagatatgtatccatacccaagacggtgtcgtactggccgcgaaccaagtgatacagatatgtacgcagagagtcgtgtggagaagccattgcctatgtatgtgccaagagatgaacgttttgaggagtctaagcagaacacattcactgtgaagaggctcaaggcagtgctgcataacttgatcccaggtcttaaggctagcctttcttctagcaaccaagacttcaatgaattctcagatgttgatggcctttacagtgaagggttgctcataaagttggggtgggggttgcaagatgacgtgttgaagaaaattccatttgtcagcaaaatccaagagtccagccagggtcttcttaagtatgacactcctaagatcatttccaaggacaaatttgcgtggttgcgagatgacgaatttgcccgccaagcaatagcaggagttaaccctgttaacattgagaagcttcaagttttcccaccagttagcaaactagacccagaaatttatggcccccaagagtctgctcttaaagaagaacatattttgaatcaactcaatggcatgactgtccaagaggcaataaacgaaaataagctgtttatgattgattatcatgatatatatctacctttcttagaagggatcaatgcccttgatggtaggaaatcatatgccacacgcaccatctttttcttgacaccacgtggcactctcaagcctgtggctatagaacttagcctccctcatgctggacctaattcccggtcaaagcgcgtggttacacctcctgttgatgctactactaattggatgtggcagcttgccaaggcccatgtttgctccaatgatgctggggtgcaccaacttgttaaccattggttacgtacacatgccaacttggaaccatttatattggcggctcataggcaattaagtgctatgcatccaattttcaagttgttggacccccacatgaggtacaccttggagatcaatgccttggctagacagagtttgatcaatgctgatggaatcattgaaaattgctttactcctggtcgctatgccatggagattagttctgctgcctacaagaacttttggcgctttgacatggatagcctccctgcagatctcatccgcaggggaatggccgtacctgacccaacacagccacatggtctaaagctcatattggaagactacccttatgcagctgatggaatactaatctggtctgcaatagaagactgggttcgaacctatgtgaaccattactaccctcactcaagccttatatgcaatgacaaagagttacaatcttggtactctgagtcaatcaatgtaggccatgctgatctcaggcatgaaagttggtggccaacattgaacaatagtgaggatcttgtgtccattctttccacattgatttggaatgcatctgcacaacatgctgctctcaactttggccagtacccttatggtggctatgtgcctaatcgtccaccactgatgagaaggttaataccagaagagggtgatccagaatatgcaagtttccatgctgaccctcagaagtattttctgaatgcattgcctagcttgctgcaagccacaaagttcatggctgtggttgacacactctccactcactcacctgatgaggagtacttgggggagaggcaacaaccttcaatttggtctggagacgccgagatcgtcgaggcgttctacgatttctccgccaaggttcgacagatagagaaggtcattgatagcaggaaccttgatcggactctaaggaaccgttgtggtgcaggggtgttgccatatgagttgcttgctcctagctctgaacctggcgttacatgcagaggggtgcccaatagtgtgtccacataactatactaaactaataaataagggagtcactcccacattttgatacgcattaatatatatgtaatggttggcttactatttactaccatggacagtgactctcagtggatgcccattttgtacctagatttaataagttgttatagtatatattggtaacctagggctgtatagactgtatatgaaaatgagtttggtggggttggaggatgtgtgactgtttataaagttattatcacaatttat

SEQ ID NO: 10365 - DNA, 1511 bp, Glycine max
  Clone ID: 700906093_FLI
aagaaaaagaaaactagtaatatggcttcaagaactatatgttttaccattcaagtgactcttgtagtagcttttctaacaacaaaggttgttttatctgatgacactgtgccaattcccgcgaacaaagcacaattaggtgaatggtataatactaatgtggggcctttagatcaaagaaagagcaccgtggacccagcattggtgactgctgaagaaggcgctaaggttgtaaaggtgatgcaagatggcagtggggaattcaagaccatcactgatgccattaaaagtatacctagtgggaacactaagcgtgtaattatttacattggagctggaaattataatgagaaaatcaaaattgagaagacaaagccttttgtcaccttgtatggggtaccagagaaaatgccaaacttgacttttgggggcactgcacaacaatatggcactgttgatagtgctacattgattgttgaatcagattattttgtggcagctaacatcatgatctcgaacactgcaccgagacctgatccaaaaacgccaggaggtcaagcagtggcattgcgtatttcgggtgacaaagcagcattttataattgcaagatgtatggattccaggacacaatttgcgatgataggaatagacattttttcaaagactgcttaattcaaggcaccatggattatatttttggaagtgggaagtcactatatgtgagtactgagttaagaacgcttggcgacaatgggattactgttatagtggcacaagcaaggaaaagcgagacagaggacaatgcctactcatttgtacattgtgacgttactggaactgggactggcactttcttggggagagcatggatgtctcatcctagagtggtctttgcatacagcaacatgagtgacattgtaaataaattagggtggagtaacaacaatcaccctgaacatgacaaaactgttcgttttggagagtatcagaactcgggacctggtgcagaccccaaagggcgtgctactataactaagcaactaagtgaaacggaggttaaaccttacataacacttgcgatgattgaaggctccaaatggctacttcctcctccaactcccaaggtttaattaattaccacatttttgtctggcttgaggaataatgcaccccatgttttagtggatggtgaattagaaaatggtattccaattcaatactagattgctcgagttgttgagttttggtgtcttgtaatttatttgctttagtcttggcattttaaaattaagtgagatccttgtaaattttgattaagtgagttttggtgttcatgtgcactatgataacacctttgttaaaaataattggaaatttattattgttctagcttcaagcttttaaaaggacataatgtagtcaatatatgtccctataaattcatgaaaatgggaaatgtattttaatttatttaattttatatgaaatagatgatttgtattgtggatat

SEQ ID NO: 10366 - DNA, 948 bp, Glycine max
  Clone ID: 700906096_FLI
gaagatgggaaggggtaaggtacagctgaagaggatagagaacaagatcaatcgccaggtaactttctccaaaaggagaagtgggttgctcaagaaagctcatgagatctctgtactctgtgatgctgaggtagctttgattgtcttctctcacaaaggaaagctctttgagtatgctactgattcatgcatggagaagatactggaacgccacgaaaggtatgcctatgcagagaggcagctagtagcaaatgattctgaaacacagggaaactggaccattgaatacactagactgaaggcaaagattgaccttttacagagaaaccacaggcactatatgggagaagatttggcttcaatgagcctcaaagagcttcagagtttggagcagcagttggatactgctatcaaaaacatccgcacaaggaggaatgatctcatgtacgcttccatttctgagcttcaaaaaaaggagaaaatgatacaagagcagaataacatccttgcaaagaagatcaaggagaaagagcaggcagtagcacagcaagctgcacaatgggagcagccaaactacagggttgatacatctttcatgccacagcagcaaccccttcgcaccagtttgaacataggcggcaataattacaatcaggaagctgcaccagaactaggaaggaatggtcttgacctgaccctggaaccactgtattcttgccaccttggatgcttctgaaaattgtttcctcgaggtggataatattatataactgctggcatatatgaactacgtagtataagtactctgtttgaatgttttatatgtattttggtcattggcttttccctactttgaagacattattttgaattgcttctgttgtaaacatattgaatttgaaatctaattgtgtatttatgaaatatgttaattatacggttttcctt

SEQ ID NO: 10367 - DNA, 1002 bp, Glycine max
  Clone ID: 700906103_FLI
gagaaaaggaacatattagaaccagcaggtgcacttgcactagctggagctgaggcatactgcaagcatcatggggtccaggggaaagatattgtagtaataaccagtggagcaaacatgaattttgataaacttcgggttgtaactgaactcgctaacgttggccgtaaacaagaggctgtgctggcaactgttttgccagaggagccgggcagtttcaaacagttttgtgaattggtggggcagatgaacatcacagaattcaaatacagatataactccaatgagaaggctgttgtcctttacagtgttgggattcacacagtctccgaattaagagcaatgcaggagaggatggaatcttctcagctcaaaacttacaatctcacagaaagtgacttggtgaaagaccacttgcgttacttgatgggaggccgatcaaacattcagaatgaggttctctgtcgtttcacctttccagaaagacctggtgctttgatgaaatttttggaccccttcagtccacgttggaatatcagtttattccattaccgaggggagggtgaaactggagcaaatgtgctagttggaatacaggtacccaaaagtgagatggatgagttccacgatcgtgccaacaaacttggatatgattataaagtggtgaataatgatgatgacttccagcttctaatgcactgatgatggttttaggcacttgccattattgtgtattttagtcaacaagtttgccatatttaatatttccacggtcgtttctaaaagttggatggggaaaaaaggtggaaaggaagtggccttcagacatgtcattagttgattagaggaacaactagttctttttacctaatgcggcgtcttattacattttttataatctgtaatttatgtttttttgttgttgttaacattggaatcttataatgttgttgcctggtcttttgtgtctgtaatataagtgtcttcaaaaggttgtttgct

SEQ ID NO: 10368 - DNA, 1310 bp, Glycine max
  Clone ID: 700906121_FLI
ctcagataccaaaatggctatcaccgggtgcacaaaatatgataaggagaattcttgatcctaaccccgaaacacggataacaatggctgggattaaagaagacccatggttcaagaagggttatattccagcaaatcctgaggatgaggatgtacatgttgacaatgaagccttttcctcccatgaagaaccaaatgaagcagaacagaggaattcaggatcaccaaccctaatcaatgcatttcaattgatagggatgtcttcatgcttagacctctctggcttttttgagaaagaggatgtttctgagagaaagataagatttgcatcaattctttcggttaaagatctgatcgataggattgaagatactgtgacagaaatggaatttagagtcgagaagaaaaatggcaaattgaaagtgatgcgagagaacaaggtgcacaaaactctcggctgcctctcagtggtagtagaggtgtttgaaataagtccatcattgtatgtagtagaattaaggaagtcgtatggagatggttctgtgtataaacagttatgcaagaaattattgaatgatttgggtgttccccccaagcaagggctagtgagatcagcagcaaattagaagccacattatgtgtaggctattttctgtttttttgctcaggtggatagctacgcagatgatataaaaaccaattgtaaatgcattatagttaaagagtagagaaatgcacacatgttagacaatgatggcaccaattttgaattgaggaatccatcatctcgaagatggcttctccatgtctagtgaactgtgaacctgaaaggcagtttgtcttgcttggcttcagttttttccagggccttgtaacatgtcatggaagtttacctctgaaccgaaccatcaaaatgggaatgaataaaaaaatttcgtaccccattgcccggaggctcttcgctatgcgaaggtataggggagagatattgtacgcagccttacccttgcatatgcaaagaggctgttttcggattcgaacccatgaccaacaagtcaccaaggcacaactttatcgctgcaccagggctcgccctcaaaatgggaatgaataaaactggataattgataaacttgtttaggttatggggatttaagtattgacaaaggagaaggatagaatagaaactagattttctcaaattgatattgactaagaggtaagtttgaataaactttttaataaattgttatagaagaagaaaattaaatgaattaaaagggtaaaatgaatgaaatttctctcaaatt

SEQ ID NO: 10369 - DNA, 1573 bp, Glycine max
  Clone ID: 700906134_FLI
catttttccttccctccaaaatggaagagaaactaaagtacccctgtctctcttccttgttaaccctcttcctctgcatctccgccacttccactaacccacacaactcccaaacccaaacccttctcctccataccctccctgacccacccacactctcatggcccgaatccgccaccgtagaacccgacccggaacccaccacatccctctcccttcaccacatagacgcactctccttcaacaaaaccccttcccaactcttccacctgagactcgaacgcgatgccgcaagggtcaaaaccctcacccacttagccgcagccacaaacaaaacccgacccgccaaccccgggtcgggtttcagcagctccgtggtatcgggtctctcccaaggcagcggcgagtactttacgcgcctgggcgtgggaactcctccgaagtacctctacatggtcctcgacaccggaagcgacgtcgtttggctccaatgcaagccctgcaccaaatgctactcccaaaccgaccaaatcttcgacccatcaaaatccaaatccttcgccggaatcccctgctactcccctctctgccgccgcctcgactcccccggctgcagcctaaaaaacaacctttgccagtaccaggtttcttacggtgacggctccttcacattcggagatttctcaacggaaactctcacgttccgacgcgctgcagtctcgcgcgtggccatcggctgcggccacgacaacgagggactcttcgtgggcgccgcaggtttattgggcctcggtcgcggcggcttgtcttttcctacccagaccggaacccggttcaataacaaattctcttattgcctaaccgaccgaaccgcttccgctaaaccgtcttccattgtgttcggtgactccgctgtttctcgaaccgcccggttcactcctttagttaaaaaccctaagcttgatacattttattatgttgagcttcttgggatcagcgttggcggcgcgccggttcggggaatttcggcttcgttctttcggctcgactctaccgggaacggtggggtgattattgactcggggacttccgtcacgcgcctcacgcgccctgcttacgtgtcattaagagacgcttttcgggtcggggcttcgcatttgaagcgcgcgcctgagttctcgctttttgacacgtgctatgatctttcggggttgtcggaggttaaggttccgaccgtggttctgcattttcggggcgctgacgtgtcgttgccggcggcgaattatctcgttccggtggataatagcgggagcttttgctttgcgttcgccggaacgatgagtgggttgtctattatcgggaacattcagcagcaagggtttcgggtcgtgtttgacttggcgggttctcgggtcgggtttgccccaagaggatgcgcgtgattgaaaaaatgtttaacacatcttttttcctttccccttattttaattattcctttttttttttttttaatttatgtatcttactcttgatgtttttatcgtattatctagtgaaatgctacttacaagtt

SEQ ID NO: 10370 - DNA, 693 bp, Glycine max
  Clone ID: 700906171_FLI
cgggaatcaaggtcatcagacttcaagggtgtttcagctgttgtcactgacagaattcgagaagctcatcagaatgagtctgctccattaatgatgttatttccagaaggtacaaccacaaatggagagttcctccttccattcaagactggtggttttttggcaaaggcaccggtacttcctgtgatattacgatatcattaccagagatttagccctgcctgggattccatatctggagtgcgccatgtgatatttctcctgtgtcagtttgtgaattatatggaggtgatccgattacctgtttaccatccttcacagcaggagatggatgatcccaaactatacgctaataatgttagaaggttgatggctactgagggtaatttgatactttctgatattgggctagctgaaaaacgaatatatcacgctgctctcaatggtaataatagcctgcctagtgttttgcatcagaaagacgaatgataatttcatggccccccgtctcaaatgaaatgtagttcccgtcgagttttagtttcaaacttagtatctgcttatgaatggacagcttgtgtgtgaggggtatttatagctaaatagtacacattcacctaaacatctgaatggtacttgtgtaattttcttgtaaataatgtgaccaataatgttttaattgctggtgaactc

SEQ ID NO: 10371 - DNA, 1371 bp, Glycine max
  Clone ID: 700906279_FLI
ctcacagatggaaccggaagaaaccgccgccgccgccgacgaagcttcgacgaggggctgctcgggctagacgacggcggcggcggcggcagggacagagtaaagggtccgtggtcgccggaggaggacgccattctaagccgtctggtgggcaagttcggcgcgagaaattggagcctcattgcgcgcggaatcagcggaagatccggcaagtcatgccggctccggtggtgcaaccagcttgaccccgccgtcaagcgcaaacccttcaccgatgaggaggaccggatgatagttgctgctcatgcaatccatgggaacaaatgggcagccattgccaggcttctaccaggaagaacagataatgccattaagaaccactggaattccactctgaggcgtcgtggagttggtcatgatacgattaaattagaatctgtcagcttcatggaagatgttagcttggagaaagcaaaagcatcatcggaagacactctatcatgtggggatgtttctttgaaatcctcagaagggagagatgtcagttctatggagatcatggatgataaatctgatgacaaagcacaaactgagggccaaatacaccatgaagtcaaggacctacctaccctttttcggccagtagcacgcgtgagtgcttttaatgtataccactcatttgatggtacacagccttcaacatcaattaaaagacctgttccgatgcaaggagctgttttacaatcatcaaaaccagacatggaattttgtagaatgcttgaaggaatttgtggtgatcagtcagtgcctcaccagtgtggccatggttgctgtgctgctccagatggtagaaagtccgaaagctctttgttgggacccgaatttgttgaattttcggaacccccatctttcccaaattttgagttggctgcaatagctacagacattagtaaccttgcttggcttaaaagtggattggagagtagtagtgccaaaatgatgggcaacacctctggaagggtagtatctaatggatctcaagtacatattggccattaaaatgccaaatagatcatcattcctattctgagtgaggactggataatgggtatgataaaagctatagtgatggcaacctattttccttgcaaatctaattaggaaatcaaagttatgtgtgaatcactgctataatgtaaatggattcactaggtaaaaggaggttcttggactgttgaccgattaggacttgatttgggaacctgttattgctaacaaatgttcgttgtagaatagggggaaattacttgcatttcaatcggtttgagttgctgctgttcactttctaagagtgagtagctcgtctaaatt

SEQ ID NO: 10372 - DNA, 269 bp, Glycine max
  Clone ID: 700906289_FLI
aggaacccctgcctcctcccgccgccgtcaaagccggcgcgttggctctcttctctctcctcggaatcccactcgcgattacttacagcataccctttgctctagcatcaatattctccagcacctcaggggcaggccaaggtttgtctctgggagtgctcaatcttgcaattgtcataccacagatggtggtgtctgtgataagtggaccatgggatgctctatttggaggtggtaacttgccagcgttcgtggtgggtgcggtggcg

SEQ ID NO: 10373 - DNA, 1744 bp, Glycine max
  Clone ID: 700906315_FLI
acagactacagaggcttccttggcagatcagagggagagagagagtgtgaaagttggaatggcgaaaaaggcagtgttgatcggaataaactacccaggaacaaaggcggagctgagaggatgcataaacgacgtgtggagaatgcatcgctgcctgatcgagcgatacggtttctccgaagacgacatcaccgttttgatcgacacggacgagtcctacacggagcccaccgggaagaacatccggtcagcgctgaccaggctggtccgatcggcggagcccggggacgttctgtttgtgcactacagcggacacggcacgcgcctccccgcggaaaccggagaggacgatgacactggttatgatgaatgcattgttccttctgacatgaaccttatcaccgatgatgatttcagagaatttgttgatggggtccctagaggttgcaggatcacaattgtgtctgattcttgccacatggtggcctacttgaagaagctaaggagcagataggagagagcacaaagggagaggaggaacaatctagctctggctttggattttcaagttttctacatcggactgtggaagatgccattgagtctcgcggattccatatcccttcagcgttgcgccacaacagaggcagggatgatgatggtgatgaagctcaaaatagggatattgaacttccggatgggggctatgtaaagaacaggtctttgcccctttcaaccctcattgatatactcaagcagaaaactgggaaagatgatatagatgttgggaaactgagacctacccttttcgatgtttttggggaagatgctagtcctaaagtgaaaaagttcatgaatgttatttttaacaaactccaacatggaagtgatgaaagtgggggtggaatattggggctggtgggtggtcttgcccaagagtttctcaagcaaaagcttgatgacaatgatgagggatatgcaaagcctgcactggagacaaaagtggaaagtaagcatgaggcatacgctggaccaaccaaacgcggccttccggatggtgggatattgatgagtggatgtcagactgaccaaacttctgcagatgcaagtcctgcaggcaacgctgccagtgcttatggtgcttttagcaatgcgatacaggctataattgaggagactgatggtgcaatcacaaaccaagaacttgttcaaagggcaagagagaagctgaagaactccggtttcacacaaaaacctggactctattgcagtgatcaccatgttgatgctccttttgtgtgttgatctcttctcatctgatgactgatgcagagaaagagagaataatgtgtgttgtttatagtatgcttgtgtattgctgtatatgtttggacaatcaaattgaagttagtgtgttttcatacagttttcctatgcatcactattatcaggtacggaccattccctccaacattttagcacttctaatgtctccgctgattacagcattatggtgtatttgctgctacttgaccattttgcggggagaccaaactatcagagcaagttctatgcaccaaaccacagacttcggctctgtaaatctgaataaaatggtgtatgtgaaattattataaaatatatggttaagttttgtatttcctttgcaacattcttgcaactttgtaaggattttaatttgttgaacttagttgtagtatacttataatgttatgtttgtttc

SEQ ID NO: 10374 - DNA, 2230 bp, Glycine max
  Clone ID: 700906354_FLI
ctccaaccccaacaagtaagagtaaaggcaaagaacaaaacaaaacatggacgaatggcgcgccaccatcaaaatggatcacagaacccaacgaacttagaaaacctaaccgagtcctccatcagtcatattcccaacgaccgttcagaatgattgatggtagcgatcatgcaacagcagcagcagcatcaacagcaacagcagaacccctctgcactggtgccacctcagctcaagaatccccaatcctccaccacaaccaccaccgccgccaccactccccttaggtcaccctccgcccagtcgccgctctccgtcgtccaacccatccggcaacccccacccccatctcatccggtggtgccggttacgacggtggagcccggtctgacggcggtgccgacgtgtccgctggtcagagtccggctctcggacattgccccctatgacggggcaccagggggaccctatctgagagcaatggaggcactgtgtgggtctctgttgcggcacaatgctgctttgatcgaattggggaacgaagacactgctctgatgcgatgcggcttggaaggtgcgaggttgttcttcagaagtagggcccaccttggttctggcaagggcagccgtggggtttacatgtacagagcaggaagggctttggaggattgggattcttctcccccttgcatggctgatattttcaggtgcatgggaaaggcatctcgatccgccttgtgtgccattgcgaggcatttgcgtcttagaagcgatgtttttaaccatttgcttgatgatgctccattgcctgctaatgaggtgtcttcgtcggttcttgttgtgacttactcacatgcttctttgcaaaatggaaggggtgccattggaggcagtaagcctaccatgaatggtgaagttgagaagggattgttgacgttgatatcttctgacactcctggtcttcaggtatgtgatcccagtggtcgatggtatctggcagacagtgggtttgggcctggagatcttttacttataacaggcaaggcacttagccatgctactgctggcctatgtcctgctgcatcatatagagcttctcctgattattttctgagtcctaatggtggaggaaggtcttctcttgcatataggctcatgccacagggcaatgctatattagattgttccccaattgcagcagctggccatgttattccccaaagctatgttcgaatatctgtaagccaatttatggatgaccttgctgccgaagaactgataggcagcagatgtgataatgctgatgctgctgctcaacacaatgtgaataaggagccatcattaagaagtgttctatcagatcctttatctggcacattccttgaagatgccatgcttgtctcatgtggacattcttttggtggtctcatgctgaggagagtcattgaaacgtcaaaatgtactctctgcaatgtggaaattgaaactggttctttgatccctaatcatgctcttagagctgcagcagctgctgtcaagcatgaggatgatcggaggttatttcgtaatgccgctctccgaaagcggcggaaagaaatgggtgaccaaatggattcaatgagaagagtgaatggggaaaatggagattttactgctgccgatggacttcagcggggagtacaatatccatttttggtaaatgagaaagttgttattaagggcaacaggagaacaccagaaaaatttgttgggaaagaagctgtgattacatctcagtgtctcaatggctggtatttgctcaagattattgaaactggagagaatgtccgcctgcagtaccgttctcttaggaagctcttaaactcaccagcggaccagtgcccctcccagccaattcaaaatagcagctcttaaaatagatttattgtaggttttccttctttcttttttcctccaccagaaaaaggaaacttttgtagtcttgatcctttgaagcaaagaattgactcatctagtcttgatctatgattgtaaagaattacattgactggtccggctccttatagcatgtgatagaggtttataatgtatcaacgaggttatttgtgtagatgccaatgctaggtcggcttataattattgtaaagaagaaagcaggcaaagataaattagatagcatgtaaattgtagcttgcacttactgaaatggatcatatgtttaattttattt

SEQ ID NO: 10375 - DNA, 665 bp, Glycine max
  Clone ID: 700906367_FLI
cacagttagtacaaaaaagggttacttcagcttccacatatcttgaagaattgatcaatgggcaagtctgtagttgagaagctactttggatggcaattgtgtgcttggtgctgggtgtaatttccattactcccaaggcccaagcagcagtgacatgcaaccaggtggtgagcaacctcaccccatgcatttcttatgtgctcaatggtggcaaaaccgtgcctggcccttgctgcaatgggatcaagaccctctttaacctcgctcactccacaccagaccgccaaaccgtttgcaagtgcataaagaacgctgttagtgcgttccattatggcaagtccaatgtggaccgtgctgctgctcttcctaagcagtgtggggttaacattccttaccagatcagcccttccaccgactgtaccagagtgcagtgaggttaatgatatatggagcggtaactcgagaagagaaggatatacaatatatagctagtgtgtgaataagtggctggctatacgtaggccacacattacattaatgactggtggctgcttattattacatccatcaactagtcttgttattgagttattgtattttttttatttgtaagaatcaaaaataatattaaagatttataataatttatgtattttattcaacc

SEQ ID NO: 10376 - DNA, 1474 bp, Glycine max
  Clone ID: 700906377_FLI
aaagcaaggaagagaaagaaatttgtttctctctaaagagtctccgctgaactttttggtttcttgaagatgtcgttactctccgatcttatcaaccttaacctctccgacatcaccgataaggtgatcgccgagtacatatgggttggtggatctggcatggatatgaggagcaaagcaaggactctctcgggactggttaatgacccttccaagcttcccaagtggaactatgatggttccagcactggtcaagctcctggacaagatagtgaagtgatcttatatccacaagcaatttttcgggatccattcaggaggggtaacaatatcctggttatgtgtgatgcttacactcctgctggggaacccattcctaccaacaagagaaataaagctgcaaagatattcagtaatccggatgttgctgctgaagaaccctggtatggtcttgagcaggaatatacattattgcagaaagatgtccaatggcctcttggatggcctcttggtgggtttcctgggccccagggaccatactattgtggaactggtgctaacaaggcttttgggcgtgatattgttgactcacattacaaagcatgtatttatgcgggaattaacataagtggaatcaatggagaagtgatgcccggtcagtgggaattccaagttggtccatcggttggcatctctgctgctgacgagttgtgggttgctcgttacattttggagaggatcaccgagattgctggagtggtgctttcctttgaccctaaaccaattcagggtgattggaatggtgctggtgctcacacaaattacagtaccaagttgatgagaaacgatggtggctatgaaatcatcaaaaaagcaattgctaagttggaaaagaggcacaaagagcacattgctgcttacggagaaggcaatgaacgtcgtttgaccggacgacacgagacggctgacatgaacacctttttatggggtgttgcaaaccgtggtgcttctattagggtagggagagacactgaaaaggcagggaagggatactttgaagataggaggcctgcctctaacatggacccttatgtggtcacttccatgattgctgagacaactattctttggaaaccataagcaacgtcaaaacaatcacatggtgccttccgcatagcattgttgtttagatggtcaatttgtttttctatgtttttgtgtgcattctagttgtgactacctcgcctgttgttaggtattgtttgttggtggtactcatgattaccaagcgaggaattgttgtttcattttcttaatgtacgttttaagtgttccaataatgtgtaatggccctcaagtattgttatttgctgcgaatttatattgtgaagcatctcatgatttctctttgagcaatcaagttcttattaactgtacatgccttatgggtatgggaacggtttgtccagaccgc

SEQ ID NO: 10377 - DNA, 3919 bp, Glycine max
  Clone ID: 700906435_FLI
ggagcgatctgaggtgaggaaattaaaagagcaatgctagcacagggattcgaggacgaagagaaatggctcgccgaggggatcgccggcattcagcacaacgcattcttcatgcatcgcgcactggacgataacaatctcagagacgctctcaaatactccgcgcagatgctatccgagcttcgaacttccaggctctcacctcacaaatactaccaactttatatgagagccttcgatgagctcaggaggttggagattttcttcaaagacgaaagcagacacggggtttccatagttgatctctacgagcttgttcagcacgctggaaatatattgcctagactgtatctcctttgcacggtaggatctgtttatctcagatgcaaggatgctccagtaaaggatgttcttaaagatctagtggagatgtgtcgtgctgttcaacatcccattcgtggtctatttttgaggagttacctttctcaagtcagtaaagataagttgcctgatattggctatgaatatgaagagggggaatctaatagtgtgatggacgcagttgaatttgttctacagaatttcacagaaatgaataagctttgggttcggttgcagttgcagcatcagggacctgctcagataagggagaagagggaaaaagaaaggaacgagcttcgtgatcttgtggggaaaaatctacatgttctgagtcaaatagagggcatggaccttgagatgtacaaagacaccgtccttcctagtgtcttagagcaggttgtcaattgtaaagatgagcttgcccaattttatcttatggagtgcataatccaggtttttccagatgagtaccatttgcagacacttgagactttgttaggtgcttgccctcaattgcaggtgggtaaattagattggaaatagatgacctcttttgtgcttgggattttaaaaattatactagtggtgactggtcaaccttgtagaggcctaatatacttgagtttaactttgttgttattatattgattccttcttaagggttttgttttacaagtatgtgaagctctatgacttatgaattgctgatcatacatttggttgctcatgaatttaggctatttggaatggtgaccactgacctattcaattagattttgaaacaccttggatttggtgcataaaaaaattgcacatgatatgcttaatcacgtgtggacaattggacatacttagagtgtatttaaattaagagattctaggagtcaatgtaatttttaagactaataaaataaaatatcttgattggatactgaaccggtgaattttaaaatctgtaagcattttgattgagtgtaataaaacagagattttggaattctgcctattgaagtggattttcaaaaattcgtcaagaactgactgcactgtcttctttctttcatactcctttaagcttcattgtacatcgtttattttgtacttatctcaactatcatagtttatggcttcaagctattattaattcacatggtcaacgaatcatcagacatttgctatgcccaccaatcatttgacaacattcctagtccagatatggaagctgtaaaattatttacttataatcattgtctttgtcatttttgataattatttggttgactttgttattaaccaatcattgttttgttatggatgttgatgtaaattgtttgatgagatgcttgagagagatgagcgtcatggacaacaatattggatgggtatacaaggaatgataattttggtgcagcttctatctaatcttcttcatggagggaatttcaatttcacttcttgttacccagatacatcatttttcaaatgaagaaaattaaattgacaaaatttgattttctgtattttaatttctgaaaatttaaaattctccatccaaacgcaacccagttttattttttgtttcttaattgtatctagctggtggtaggtttccttgcagatgaccaagaaatttactggatggcagtggttcacccatgtgactttcttttagaatatatgtggggattctattataagtgaagagtgaagcaacagaaaaacttctcatagatcaattctgttctatttttctctgattttcttaaagctgaaagccatttttatctcccctatgactgacttgatttatttgcagcccacagtagacatcaagacagtgttatctcagttaatggacaggtattgcccgaatttctgcaagtggaagcatttaccaaattaagcacagcaattggcagggtgatagaagcacaagttgacatgcctattgtgggagcaatagctttgcatgtttctcttcttacatttactctccgtgttcatccagatcgacttgattatgtggaccaagtactgggatcatgtgtcaagaagctttatggaaaaccaaagcttgatgacaatagagcaacaaagcaagttgttgcacttttaagtgctccacttgataaatacaatgatattgtgactgccctgacactttccaattatcctcgtgtaatggatcatcttgatcatgaaacaaataaagttatggccatggttattatccaaagcattatgaagaataacacttgcatctgtactgccgataaggttgaagttttatttgaactaatcaaagggcttataatggacttggatggaacaactgtggatgaggttgatgaagaagatttcaatgaggagcaaaactctgttgctcgcctcatacacatgtttcataatgatgaatcagaggaaatgtttaagataatatgtaccgtaacgaagcatattatgagcggaggaccaaggcgcttaccttttacagttccctccttgatattttctgcactaaggttgatcaggcaattgcaagggcaggatggagatatagtgggagaagaagttcctacaacaccaaaaaaaatatttcagcttttaaatgaggtaattgaagctctttcttctgtgtcatctcctgaactggccctgaaactgtatctgcaatgtgctgaggctgctaatgactgtgaccttgagcctgttgcttatgaatttttcactcaggcatttgtattatatgaagaagaaattgcggactccaaagcccaggtaactgcaatacatttaattattgggtctcttcagagaatgaacatctttggcgttgagaacagggatacattaacacacaaggccacagggtattcagcaaagcttttgaagaaacctgatcagtgccgagcagtttatgcatgctctcatctcttttgggttgatgatcaagatggtattaaagatggagaaagggtattgctttgccttaagcgtgctttgaggattgcaaatgctgctcaacaaatggccaatgcagcaaggggtagcagtggtccagtgacgctctttgttgaaatactgaacaagtacatttactattttgagaaaggaaacccgcagatcactagttctactatccaagggcttatagaattgatcatgaccgagatgcagagtgactctgcatcagctcttccagcttcagatgccttttttaccggcacattgaggtacatccaattccaaaaacagaagggcggtatgctgggtgaaaaatatgatcccatcaaggtctcaatccctgcctaacatatccaagacacccaaatgtgaacttgtatgaaaagccaagcatgttgttgtgagtgttcatcttcatcttgaaaaacaaaaaaggtttatcagtgttcactactcgtgcattataaaatgtttgcagtggcatcaagtttattttgaagtgaataattttaaatcttcctacaaattcttctacttgctaaatgaagaagtaattgaaagtattttatacggc

SEQ ID NO: 10378 - DNA, 2006 bp, Glycine max
  Clone ID: 700906442_FLI
cgaaatctttaatccacagcatgtgctttacgctacctgtatatatgtaagatggtcaaaattcttcaaatactttttttattgtataggagcagaaccagaagagaaggctcaaccacaaagggatccaatttcatttttcatcttcctcttcttcactctcttttatggctccaagcaagctcaattcctcgggaaatactagtatgccatgttcacaggctgagaatggttttgtcaattccttttctctcttccccgagaaagtggtgcaagagcttcttcaatctccagtccaggggtcggatgaccatcttattgagttctctgaagctttaagaactgttgcgaaggctctcaggctagttgccgaagggaaagcttctgctcaagctgaggctgctgaatggaaacgtaaatatgagttggagagggatcggaatctgaagtttgaacatgcagagaaatcatgtatagagcatcaggctgaacatgaggatgtgaggacaaataaccctgccaaacaacctgttttatgtaatgaagctaatggacagtctgagaaatgttgttcaaggaatggtatttgctcccatgaagttcttagggatggaacacctggttctgattccaagatggtcaaaaaggcttcatttaaactctcatggttcagcaaaggtgatcaaagtgatcagtacaaacacgacattgtctcttttgaaaggggaaatataaccactgcagagcgcagtagtaagcagatctctttgaagtgggagtcatgcccacagacagtgctcatattgaccaaaccaaattcagtttcagttcaaattctgtgtgctgaaatgattagatggttgagccagcaaaagaatctacacatctatgtggaaccacacgtcagggttgaacttttaacagaatcatcacactttaactttgtagaaacttggaatgatgataaggaacttttgagactacacactaaagttgacctcgtggtaactcttggtggagatggcactgtcctatgggcagcttcaatgttcaaagggccagtgcctcctattgtccccttttctttagggtctcttggctttatgacccctttctatagcgaacaatacaaagaatgcctagaatcaatcttaaagggccccattagcatcacattacggcatcgtttgcaatgtcatgttatacgagatgcagctaaaaatgaatatgaaactgaagaacctatccttgttctaaatgaggttacaattgaccgtggaatatcttctttcctcacaaatttagaatgttactgtgacaactcctttgtcacgtgtgtgcaaggggatggattaatcttatctactacatctggcagtacagcatattctttagcagctggaggatcaatggtccatccgcaggttccaggtattttattcactccaatttgcccacattcgctatcttttaggccattgatatttccagagcatgtgactttgagggtgcaagtgccattcaacagcagaagccctgcatgggcatcatttgatggcaaggacaggaagcagttagcacctggagatgcacttgtgtgcagcatggctccatggcctgttcctacggcttgtttggatgattctactaatgacttcttgcgcagtattcatgagggcctccattggaatttgagaaagacacaatcatttgatggcccccgggaaacatgacttctttcttagtaaactttagttgcaaactggttagtcatttatcaagataatagcgacttgttacagaaaaaatctagtgtaattttattcctttatcaatagtcacatgtagttataattattagagtaaattatactcctctacaccctattcctctctcttattttagaatgtatactctcctcttgagaaagagatgaatatggatcatactttagatcatttcaatataaatgtaccttttaatagtaatgaataattatgaatgt

SEQ ID NO: 10379 - DNA, 1075 bp, Glycine max
  Clone ID: 700906508_FLI
aaaatatggacaaaaaatggctaaggggaatccatgccctcgagcatactacagatgcactatggcagttggttgcccagttcgcaaacaagttcaacgttgtgctgatgatagaacaattttggtgacaacatatgaaggcacacataaccatccactgccaccagctgcagtggttgatgccatggccatagcagcaggtggcagtggatggttatggcatcaaccactgcagctgctgctaccatgttgctgtctggatcaatgtccagtgcagatggagtaatgaaccccaatttgctagccagagcaattcttccttgctctacaagcatggcaacactttcagcttcagcaccattccccactgtgactttggacctcacacacaacccaaacccattgcaatttcaaaggcctggtgccccattccaagtacccttcctccaagcacagcctcagaattttgggtccggagccaccccaattgcacaagcactttataatcaatcaaaattctctggtcttcagttgtctcaggatgtaggatcttctcaattagcaccacaagctcccagaccacccttgcagccaagccaacatccctcactggctgacacggtcagcgccgccgcctctgccatcacttccgatccaaacttcaccgccgtgctcgctgccgccatctcctccatcattgggggagctcacaattcaaacaacaacaacaataacaacagcaacaacaacacgagcaggactactattagcagcttttcaggaaactgaacattttctttttggttccattaactttgtatttttgtacttgggtactataagggaaaatgaaaccataaatgttcatattctttttagtccatgtattgggagggatatatcatatattagatcagaaaaaaaatgtttcatttttttgtatcatcaatttctctttgaataatgttgtatatttgattcaaaaattctcttgggagtaaatagacaagggcaaatgaagaaagaatcgtcttttattttttcttcctttgtctcgtgtttatctttaattttt

SEQ ID NO: 10380 - DNA, 379 bp, Glycine max
  Clone ID: 700906510_FLI
gttgacagagatgatcagggcactctgcttcagattttcaccaagcctgttggggacaggccaacgatattcatagagataattcagaggatcgggtgcatggtggaggatgaggaagggaaggtgtaccagaagggtgcatgtgggggttttgggaaaggcaatttttctgagcttttcaaatccattgaagaatatgagaagactttggaagctaaaagaaccgcgtaagcacattggaagaacacaaatactcctttgttgaaatgattaatgaggaatcaatgtggcatagggtgtttatactctataatacatagaattacaatgatagtgtcctcccttgtatgaaaatgaaatcacagaaacttttatggat

SEQ ID NO: 10381 - DNA, 1038 bp, Glycine max
  Clone ID: 700906513_FLI
gaaagacttactagagtttttacacaaaaaattcatgatttgattggaactcacacagatgtgccagcacctgatatgggaacaggaccacaggatcttggtggatctctcggtagagacgcggctacaggacgaggagtcctctttgcaacagaggctttgcttaatgagtatgggaagagtgtatctggacaacggtttgtcatacagggttttggaaatgtagggtcatgggctgcccaattaattagtaataaaggtggaaaagttgttgctgtgagtgacataactggagccataaagaacagcaatggtcttgacatcccaagcctacttgagcattccaaagtgcacaggggagtaaaaggattcaatggtagtgatccaatagaccctaactcaatattggttgaagattgtgatgttctagtcccagcagctcttgggggtgtcatcaatagggaaaatgcaaatgaaatcaaggccaaatttattgtggaagcagctaatcacccaactgacccagaagctgatgagattttgaagaagaaaggggttgtgatcctcccagacatatttgcaaattcaggaggcgttacagttagctactttgagtgggttcagaacatccaaggtttcatgtgggatgaggagaaagtgaacaatgagctaaagacctacatgaccaaaggtttcatagatgtgaaggaaatgtgcaaaacccatgaatgtgatcttcgtatgggagccttcaccctggcagttaaccgtgtcgcacgtgctactgtccttaggggctgggaagcttgacatccattgcttctgctttcaataaattaattaaagagctcccactctcagcaacacttcacaaagtttttgttgctttcaactaatgtgttgggtgaatcgtattttcacgccaaattttctttcaataaattagtatagtatataaatctttttgtaactacatgtgtggttctatgccacttcttgtgacagccacgctttttaatataatgtcactttgctttg

SEQ ID NO: 10382 - DNA, 1026 bp, Glycine max
  Clone ID: 700906621_FLI
gtgaagtttgtttattctgagaaggaagagagaatagaacgccatggatgagatattgaacaaggtggggtcttactggttctccaagaaggccagcaaggaatttaactctgtcggcgatgatatcaactcactgtcaaccagtattgaagggggaaccaaatggttggtcaacaagttaaaaggaaagatgcaaaaggcattaacagagttgctaaaggagtatgatctacccataggaatctttcctcgcgatgcgacaaactacgaatttaacgaagagacaggaaagcttgttgtttacattcctcaagtgtgtgaggttggctacagggattcgtcagttctgcgtttctccaccagcgtgagtggctatttggagaaagggaagctagcagaaatagaaggaatcaagaccaaagtgctgatatgggtaaaagtgactgccatttcatccgagggaccaaagctccatttcacggccggcatgaagaaaacaaggaaaagggaagcatatgaggttactagagatggtgtaacggtagataagttctaatatattaacaaggagctccttttgttaagtagttttacaatttagtaaaataaattgtcccttcttgtggaccattttattctattagatttgaatgtagtgaaacctgagacttggtggaactcctcctgagtccttgttgatgatgtagtttcagtttttttctgcttgggtttattaagttctattcctaatgtcacatggcttgtattaaatactgaaacttatgggcaagtgatattgtcatagtattattttagctcattaattgactctaggatattgattcctcccctattattagaggctgccattaattgtgtagcgaatggttacaatgccaatggcacaattgaaacatagacactgtcggtgtgacattaacatcatactattatacggaataaatggtcgcctttaggaattgtcaaagtttgtgtcttaaattttaagttaatgcttttcttttt

SEQ ID NO: 10383 - DNA, 746 bp, Glycine max
  Clone ID: 700906636_FLI
gcgaacaccatggatgtggggaggtctgtgttggttcagaccgagccccgaacgaggttggatgccggcacctgggggaccatgggggttggtcttggttattgtattgctgccgcggttgcttcgcccgagcggcttgtggttgcggttgaaggggattctggatttgggtttagtgctatggaagttgagacgttggttcggtaccagctgcctgtggtcgtgattgttttcaacaatggtggtgtatatggtggtgaccgtagacgcccagaggagatagatggacctcacaaagatgatcctgcccccacagattttgtcccaaatgcagggtaccatgctttgatagaagcttttggtggaaagggctatcttgttgggacgcctgatgaactcaagtctgccctttcagaatccttctctgctaggaaaccagctgtagtaaatgttgtgatcgatccctatgctggttcagagagtgggaggatgcaacataagaattgatttcccttagttgcctaatgctctatagcatcccttcacatcattttctttttggtttaaaatatcacaaagtgtactcctatgactttttttttttgcttgaattatccggtgcagcatagctatcatcaaatatatattttttaacttcaatatagtaaattctctttaccctaagggtttcaatatccttcttatgtggatcaatagtaatttgacatttgtaccttagccacctc

SEQ ID NO: 10384 - DNA, 1441 bp, Glycine max
  Clone ID: 700906672_FLI
aacctcttcgttccttcgattcattccatttcttccaaaatggccaaagacccagttcgcgttctcgtcactggagccgcagggcaaattggatatgctcttgtccctatgattgctaggggagtgatgctgggtcctgaccagcccgtgatcctccacatgcttgacattcctccagcagcagagtcgttgaatggggttaaaatggaattggtggatgctgcattccctcttcttaaaggtgttgttgctacaaccgatgtggttgaggcatgcactggggtcaatattgcagtgatggttggtggattccctagaaaagaaggtatggagaggaaggatgtgatgactaagaacgtctccatttacaagtcccaggcttctgcccttgaaaagcatgctgctgccaactgcaaggttcttgttgttgctaacccagcaaacaccaatgcattgatcttgaaagaatttgctccatctattcccgagaaaaacatttcttgtttgactagattggaccacaatagggcactgggccaaatttctgagagactgaacattcaggtttctgatgtaaagaatgtcattatctggggcaatcactcatcaacccaatatcctgatgttaaccatgcaactgttggggagaagcccgtccgcgagcttatagctgatgatgcctggttgaatggtgaattcattactactgttcaacaacgtggtgctgcaattatcaaagctagaaagctttcaagtgcactatcagctgctagtgctgcttgtgaccatattagagattgggttcttggaactcctcagggcacctgggtgtcaatgggagtatattctgatggttcctacaatgttccagctggactgatctattcattccctgtcacttgtgccaatggggaatggacaatagttcaaggacttcccattgatgagttctcaaggaagaagttggacttgaccgcagaagagctttctgaggagaaggcattggcttactcatgcctaaattagagaccatcgctccttcttggctactgtccttgttagtaggttcccatggtttgcccacagaagtgtagcttcaattttgaataatgctccttctaagataccaaggaactatcactcgagagagtttgtctttcattggaattacttgtatttcaacatctaatccttttaggaggatagtatatttgagctttacagttttagtcatggaattagaccatgggccgcatattgaattttggatcagtcctctaattttatgtgttagtgccccttttttatggctagaactttttgctgtgtttgtggtggctgtacaagatttcttgatgtatgtgggatgcacaagcgtgcaaactcatacgtagagtattatgcactgctttttcccaataaggtcatcatggattatttt

SEQ ID NO: 10385 - DNA, 368 bp, Glycine max
  Clone ID: 700906708_FLI
cgcgaagagtcgagggttgccgttgatttggaatctgtggcgacgcacgagataggtcacgtgcttgggttgggtcactcttcggtgaaggaagcggtcatgtacccgagcctcagccccaggagaaagaaggttgacttgagaattgatgacgtggcaggagtccaagctctttacggctctaacccaaactttacttttagttctttgttgcagtctcagaattcattaaacgctgccgttgggttggaaaccggtttctataaatggaccctcactttacctcttgccttcttcctattatttttaagtgcttgattatttttttttatacatgtattttcattctttgatcatatattatatgt

SEQ ID NO: 10386 - DNA, 949 bp, Glycine max
  Clone ID: 700906722_FLI
agtcaagtgtttctgtttctgttttaatggagataaccaaacttggcaagagatttcaaggtaaggtagctattgtgacagcttccacccttggaattggctttagcatagcagagaggcttggcttggagggtgcatctgttgtcatctcttctcgcaaacagcaaaatgttgatgaggctgctggtaaactgagagctaaaggaatcgaagtattggcggttgtttgccacgtttcaaatgcccaacaaaggaaaaatttgatagacaaaactttacagaagtatggaaagatagatgttgttgtgtccaatgctgccgtacatccttctgtagatcccattttgcaaacacaagaatcgatccttgacaagttgtgggagataaatgtcaaatccactatacttcttctcaaggatgcagctcctcacttgaagaagggttcttctgttgttctcattgcctcacttgttgcttataatccaccacctactatggctatgtatggagtgaccaaaacagcagttcttggacttaccaaagctatggctagtgaaatgggccctaatactcgggtgaattgtgttgttcctgggattgtgccaactcattttgttgcactttatacctcaaatgatgctacaagagaggaacttgaaagaaaggcattgcttggaaggcttggtacaactgaagacatggctgctgcgacagcgtttttggcgtctgatgatgcttcttacataacaggagaaaatctagtggtttctgggggaatgccttctaggttgtagcttccagtttcttcttctggtggttgaatggtgggcctaccccccaaaacgttttgtttcctgactcatctgatgccattcaatatagagtggtgcttcatgtacctggtactattggtaaataaaataaaaatgaaggaaaataaaatacgaag

SEQ ID NO: 10387 - DNA, 335 bp, Glycine max
  Clone ID: 700906736_FLI
tttggtttgagcaatgcaggatttcaggtgagcaagtatatgccatttggaccagtggagactgttatgccatatctcctaagaagggctgaagagaatagaggaatgttggctgcttcgggctttgacaggcaactgatgaggaaggagttgggaaggagactaaaagctgctgtcttttaattttttatacttttatgggacgagttaatgagatgtaataatgtcttttaggcaacacaggattaggatactctttgtacaaatttagagaatcctgtaatctctttgaatgatgcattcaaatcaatgaaatgtgactgtggttaactctt

SEQ ID NO: 10388 - DNA, 1111 bp, Glycine max
  Clone ID: 700906933_FLI
ctcgatcttctcttccacggggctcaagttcacagacatgctcataacttcagggaagttcagcagtgtactcttctgtctatcaaaacaggagggtgcagtgaagattgttcctattgtcctcaatcctctaagtatgatacaggagtcaaaggccaacgccttatgaacaaggaagctgttctccaggctgcaaagaaggcaaaagaggctgggagcactcgcttttgtatgggtgctgcgtggagggatacactaggaagaaagaccaacttcaaccagatccttgaatatgtgaaagacataagggacatgggaatggaggtttgttgcacccttggcatgctggagaaacagcaggctgttgaactcaagaaggcaggtctcactgcttataatcacaatcttgacacttcaagggagtattatccaaacataatcacaacaaggacttatgatgagcgtcttcaaacccttgagtttgttcgggatgcagggatcaatgtttgttctggaggaattatagggcttggagaagcagaggaggatcgtgtaggtttgttacatacattgtcaacactccccacccatccagagagtgttcctattaatgcacttgttgctgtaaagggaacccctcttgaggatcagaagcctgttgaaatatgggagatgattcgcatgatagcgactgcacgtatcataatgccaaaagcaatggtaagattatcagctggcagagttcgattctccatgcctgagcaggcattgtgctttctggccggtgcaaattctatattcactggtgaaaagcttctcactactcctaataatgattttgatgctgatcaactcatgtttaaagttcttggactcctcccaaaagctccaagcttaaatgaaggtgaaactaatgtgacagaagattataaggaagcagctttttctagttgagctgtcaacggtttttaaaaagtgtgatctttcaatttctctaattgctcattagcatgtactgatgttaggtttcattgaattttgtctattctcagctttgaagacacaaactccaacagttaaaaataaatattgaaattatttatttttcact

SEQ ID NO: 10389 - DNA, 1072 bp, Glycine max
  Clone ID: 700906939_FLI
ggaaatatcaatatgctgcttgacaatgtaacgagcactagcactagcactaacactagcaaatatcctctattgagaagaaggcgtaggttgattgttatagcacttgatttgtatgacaataatggagctccggagaagaaaatgattgagatggtgcaaaagataattaaagctgtgcaactagaccctcaaactgctagagttacagggtttgctttatcaactgctatgccagtgatagaaacagtagagttcctaacatcaggcaatgttcaagtgaatgagtttgatgctttaatttgcagtagtggaagtcaagtttactaccctggcatcaatacagaagaaggaaagcttttgcctgatccagattatgaggtacatattgactatcgttgggggtgtgaaggtcttaagaaaaccatttggaaacttatgaatggtgatgagaacagccccattgaggaagatctcaaatccagcaatgcacattgcatctcatacaaaataaaggatcttagtaaggcaaaaaaagttgatgagttgaggcagaagcttaggatgagaggtctacgttgtcatcctatgtactgcagggggtcatctagaatgcatgtgattcctcttcttgcatctagagcccaggcactcaggtatctctttgtacgttggaggttgaacgttgcaaacatgtacgtcatccttggagaaaccggggacacggattatgaggagatgatttctggaactcacaagaccataatcatgaagggagtggtgtctaagggttcagaagagttactaagaggtccaggaagctaccaaagagatgatattgtcccaaatgagagccctcttgttgcatccattactgaaacaacacatgaaaacattgctaatgctttgaagcaactttccaaatctggaggaatctgaagtgctactatatattaagtaataaatttatgagagtggtatgaatatcttcacatatgtggtcactttcatatattacacactttatccatatctattatttttttatatcttatttttcttattggatcat

SEQ ID NO: 10390 - DNA, 1319 bp, Glycine max
  Clone ID: 700906963_FLI
tattggtatcttctacaatatcctaaagtgtttttcttcttcttcatcaccatgtctttactttcagacctcatcaacctcaatctctcagaatccacagaaaagatcattgctgagtacatatgggttggtggatctggtatggacctcagaagcaaagccaggactcttcctgggccagtgagtgaccctgcaaaacttccgaagtggaactatgatgggtctagcacagatcaagctccaggggatgacagtgaagtcattctatacccacaagctattttcaaggacccctttaggagaggaaacaatattcttgtcatttgtgatgtgtacaccccagctggtgagccacttccaaccaacaagaggtatggtgctgccaaaattttcagtcaccctgatgttgctgctgaggaaccatggtatggtattgagcaagagtataccttattgcagaaagatgtaaattggccacttgggtggccccttggtgggtttcctggaccacagggcccatactactgtggaattggtgctgataaagcctatggccgtgatattgtagatgcacattacaaagcttgtatttatgctggcattaacattagtggcatcaatggagaggttatgcctggccagtgggaatttcaagttggtccttctgttggtatctctgctggagatgaggtgtgggctgctcgctacattttggagaggattacagagatagctggagcaattgtttcatttgatcccaagcctattccgggagattggaatggagctggagctcactcaaactacagcaccaagtccatgagagaagagggtggttatgaggtgatcaagaaggccattgaaaagcttggattgaggcacaaggagcacatcgcagcatatggagaaggcaacgagagacgtctcacgggaagacatgaaactgcagacatcaacaccttctcttggggtgtggcaaaccgtggaagctccattagagttggaagagacacagagaaaaatggcaaaggttacttcgaggacagaaggcctgcttctaatatggatccctatgtagtcacctccatgatcgcagagactaccatcctctggaaaccatgaaaacacagtcatatgtctctagatttggaccacttaaaattgtgtgttcaatagtcatttgatctaaaattttatatttgcaaggtgttgtttagttaggaattgccaagtggtcttttgagcctccatgtaccatgtgtatggtagagaataatctcttcattaataacaagaattgcttcttgatttcacttttt

SEQ ID NO: 10391 - DNA, 1314 bp, Glycine max
  Clone ID: 700907016_FLI
atcaaaacaaccttctttctttcaggttcttgatcagtgtcaaaaccaaaagggtggttgcaaattgcaatggctaagcatgatgttgagggtggttccttcgctgcaaaggactaccatgatcctcctccagcaccattgattgatgctgaggaactcacacagtggtccttctacagggctttgattgctgagttcattgccacaatgctcttcctttacatcacagtgctcactgtgattggttacaagagccagagtgatgtaaaggctgggggtgatgtgtgtggtggagttggcattcttggcattgcttgggcctttggtggcatgatcttcattctggtgtactgcactgctggaatctcagggggtcacataaacccagcagtgacatttgggctcttcttggctcgcaaggtgtctttgattagagcaataatgtacatggtggctcagtgcttgggagccatatgtggagttgggttggttaaggccttccaaaaggcttactacaacaggtatggtggtggggccaatgagctcagtgaggggtacagcacgggtgttggattgggtgctgagatcattggaacctttgttttggtctacactgtgttctctgcaactgaccccaagaggaatgctagagattctcatgtgccggttttggctccacttccaattggctttgctgtgttcatggttcacttggcaaccatcccagtaacaggcactggcattaaccctgctaggagtctaggagctgctgtcatgtacaaccaacagaaggcctgggatgaccattggatcttttgggttggaccatttattggagcagcaattgcagccttctaccatcaattcatattgagagcaagtgctgctaaggctcttggatcattcaggagcaaccccactatttgagtcaatttcctcttcatggggggttagtggaaatggaaaaaaaaaagataattggaggcaaaaaaagttgatattgcaacaataataataataatatggaactgtttgtgctttgatcctctgcagattgaaggttctttcaagaaaaggaagcctttggtaaatagtaaagaccctttagtacttcgaagcactttcctttgtatttccttgttagaattgatgagcttttttttgatatattggaagtaaaatctattagatatcttgttttaatattttgtgatatgtaataagtcgacttgttggtgaactagtgtggtaacccatgttttgagggatgctaggccaatgtcacactttttgcttgtgatattgaattttcac

SEQ ID NO: 10392 - DNA, 919 bp, Glycine max
  Clone ID: 700907070_FLI
tctctttgcaactgcatccgttgtttacaatgaaggctactctgaagggaaagtacgacgtcgacaaaaacggcgctgcctttgccaacatcgccgtcaacgccggcgacgtcaagttccgagcctccgtaacggaagccactttcattaacggccccagcctcaccggcttggccctcgccgtcgagaaacccggttccttcatcgtcgactacaacgttcccaaaaaggactttcggtttcagtttatgaacacggttagggttggggagaggccgttgaacttgacctacgcgcacagcaggggcgacaacaggactgtcttggatggaacctttgtgtatgattctgcgaacaaggtttctgccaattacgcgctcgactcagggaactgcaagcttaagtacacctatgtgcacaaggggttgaccacgtttgagcccgcctatgacgtggccaagaacacgtgggacttcgccgtctcgcggagggtctacggcggcgacgacacgttgagggcctcctaccagacatccagcagggttctgggagttgagtggtcgcggaatcccaaacacactgctggcttcaagattgtagcatctgttaacttggccgaggaatttaaagctcccaaacttgttgctgagaccacatggaattttgagatgtagattggttccaatatattgttcaattgcttgataggtttactgtcaagttttgaaggctttttggtcaccattgggcatatttttgcctttgaatattatattcttggaagtgttttgatcatgttatgagcaactctggcattaattgtccaccaacaacttcccgtttgattttaaactatttcatattcacattacaaaaacctgtaattgcttgcctataaaatgtgctcaattattctcac

SEQ ID NO: 10393 - DNA, 991 bp, Glycine max
  Clone ID: 700907157_FLI
ccaacatcttgcttgatgagaatttcacagccaaggtttctgattttggtctttcaaaggatgcaccaatggggcagggtcatgttagcactgctgtgaagggtagctttggttatcttgaccctgagtacttcaggaggcagcaactgactgaaaagtctgatgtgtactcatttggggtggttctgcttgaggcactctgtgcaagaccagccatcaaccctcagttgccccgcgaacaagtaaacttggctgattgggcgatgcaatggaagaggaagggccttcttgacaagatcattgaccctctcctagttggttgcatcaatcctgaatccatgaagaagtttgctgaggctgctgagaagtgtttggcagatcatggtgtggataggccttcaatgggagatgttttgtggaacttggagtatgctttgcagcttcaagaggccttcacacaaggaaaggctgaggatgagactaagtcatcatcagcagtccctactgcagctgttcctacttcacctgccccaccaacacctcccatttcttctgatgaccgcccggctgcgcctgctcgtccggaagtgaataataatacttcatcggatgtgcattctattgatgaccattctggaactgcaatgtttgctcagtttagcaatctcaatggcaggtgaaggcctaatttggtttcatgaatggagcaaccatcacctggacagctacaaatttgatcatgtctaggaagatgttatagtagctttctgaaggcttggaccaaaaatttcctgtgtaatggtgtgatactgtatgctgtttctcttctagatactcttgtctttctgtattgtgttggggtactattttgcatgatagcaaaaagaaaaggtgtcaaaatatgtaatgtgattaagttgttggtttgtaagtatacatgcattcaacagtaccattaatcacatatggtattatattaatgaattgttgt

SEQ ID NO: 10394 - DNA, 865 bp, Glycine max
  Clone ID: 700907258_FLI
cttagagatgaagaatgtgatagacaagccgtgaaaagggccttggcttttgttgtagcctggtccttagatcccttggtttttggtgagtaccctcctgagatgcactctattctcgggagtcagttgccaagattctctcctgaggagaagagtctcataaaaggcagcatagacttcattggcatcaataactatggaactctctatgccaaggactgctccctcactgcttgtcctcttggaacagatcgtccaatacgaggcttcgtagaagcaactggaacaagagatggcattccaattggtgatctgacaggaaacccaagattttttgtggttccaaggggcttagagaagattgtagactacatcaagataagataccataacatgcccatgtatattacagaaaatggatattcgtcaccgcacaaaccaaatgtgacaatggatgatctactacaagatttcaaacgaatagattatcataaagcctaccttgcagctctgcttagagccataaggaaaggcgcggatgtaagaggatatatgatatggtcattgatggacaactttgaatggacaagcggctatggcgtgagatatggactttattatgtggatagacacactctcgaacggattcccaaacgttctgttcaatggttttctagttttctcaacgacacaagccacagcaataaacaagacttgagtgagcagtatgtcagaagcaaagatgtgacaactgctggtttcaaagttgtttgaacttgctgaaatgtatggattctagtgtaaactaagattctttatttatgataaatgctagcagcatacactataacattgttatttgctg

SEQ ID NO: 10395 - DNA, 902 bp, Glycine max
  Clone ID: 700907266_FLI
gctagaagcaataagatgaaaatgaaagtgcttgttttgtttgttgctacagttttggtagcatatgaatgccatggctcagactaccagaagttccctctccaaatgaaaactgggtttggtgggcaatacagcaatgaggtggcatgtgccagttggaggcttggcgtggaagcaaacaacgtagtcaagtggcaaactgttcctgcagcttgcggagagtacatagctgactacgttctaggagaccaatatagatcagattccaaaacagttaaccaacaagcttatttctatgctaaatccctcaaactcaccaacaaagatgtctttgtcttggacgttgacgacactactctctctaatctccagtattttgctaaccatggatttggtgtggaaccacacaatacgacggcgtttaagaactgggttcttgatggcgaggcattcgcactgccagagactcttaaaatgtacaacaaactgttggctctcggcatcaagattgtattcttatcagaaagaccactgagtctaggggatgtaacagccaagaacttaaaggaggttggattcaacacatgggagaagttaattctcagggatccatctgagtactctggtaagttatcatttgaatacaaatcagctgagagagagaagctggagaaggagggatacagaatcattggaaacgttggagaccaatggagtgacctcctgggaagcaacaaagggactaggacttttaagctgcctaatcccttgtactatgattaagctctcaaatcaagcctctaagttgctccttaatttctatgaaataagatcctgagtattattacttagtcatgtaggggcactgaacaatgttgttttcccttttcgaggctttcatg

SEQ ID NO: 10396 - DNA, 1099 bp, Glycine max
  Clone ID: 700907315_FLI
gcagagagtaacctctcaatcctagcttcaattatattgattttttcacatttctaaatccacctctaccatatatatctccctctaattaaacctctctatccatatctaaaatttcaaaaagatctcaattaattagatttccctctctctttctctctctaactatattgcaaacctttccctctgctttcaaaatcagcaaattcatgggtcttagagacattggtgcttcactgcccccagggtttcggttttacccgagtgatgaggagttggtccttcattacctttacaaaaagatcactaatgaggaagttctgaagggtaccttgatggaaattgacttgcacacgtgcgagccatggcaactcccagaggtggctaagctcaatgcaaacgaatggtacttcttcagcttccgtgaccgtaaatatgcaaccggctttcgaaccaatcgcgcgacgacatctggctactggaaagcaacggggaaggatcgtacggtgtttgaccctgccacgcgtgaggttgtagggatgaggaagacattggtgttctacaggaacagggctccaaatggcatcaaaacgggttggatcatgcatgagtttcgcttggagacgccacatttgccacctaaggaggactgggttttgtgtagagtgtttcacaagggcaaagcagacaacagtgccaaactcatcatgtacgagagcacagttccatccctaactttggcttcgtcatctccaaccaaccaaaacaccacaccatcaattgggtataaccaatttcttgccccattctcttcctcaatggcaacccatcatcacaatcacaatcatcatattccaaaccaaagccaaaacaacaacaacaactccttgatgggtctccttcagttctctagggaaacaaacaccaacaactctagcaccgttactcaaattagtcccaaatgtgatgataataatggatatgggttcttatgggacatggacctcgaagaaaatagcttcaatgatggcgtggcatcaaacttggatggaatgagattcttcgagcttgataataataatagtgtggtcttgttatg

SEQ ID NO: 10397 - DNA, 1009 bp, Glycine max
  Clone ID: 700907362_FLI
aagaaaaaaaaaaacccttagccaacacaaccatcatggccacctctgctattcagcaatcagcattcactggtcaaactgctctgaagcagctcaatgagttcgtccgcaagaccggtggcgccggcaaaggtcgcactaacatgcgccgcaccgtcaagagtgctcctcagagcatttggtatggccctgaccgtcccaagtacttgggtccattctcggagcagattccatcatacctgaccggagaattccctggtgactacggatgggacactgctggattatcagctgacccggaaaccttcgccaggaaccgggagctggaggtgattcacagcagatgggcaatgcttggtgcccttggctgcaccttcccagagatccttgagaagaatggtgtcaaattcggcgaggccgtgtggttcaaggccggtgcacagatcttctcagagggaggccttgactacttgggcaacccaaacctgatccatgctcagagcatccttgctatctgggctgttcaggttgtgctcatggggtttgttgaaggttacagagttggtggaggaccacttggtgaaggacttgacccaatctaccctggtggtgcttttgaccctcttggtctggctgatgaccctgatgcattcgctgagttgaaggtcaaggaactcaagaacggtcgcttggctatgttctccatgtttggtttctttgttcaggctattgtcactggcaagggccctattcagaacctttacgaccacgttgctgatcctgttgccaacaatgcttgggcttatgccactaactttgtccctggacaatgaggatgcctacatgcaatgcaatcttctgctcccttttgcagttcccttgtgtttaactccattttcactaatgtaactacacctgtgtagcagaaaaatctgtatgagaaccattatatttttatatattagaaatttgggtccccagaaaatatcaactcttacgtttggaattc

SEQ ID NO: 10398 - DNA, 1425 bp, Glycine max
  Clone ID: 700907439_FLI
agtgtactatgtgatgaaaattagtttatattttttcgctgaatatcagtacagcctaaaatagtagaatctttttgtcaccaaagtgctattggtctggtgaaaatcaataaattttcggtgctcagtacctattaaagtattaaggtatgattacgggtggagcagcagcgacagttttctacaatttgaggcaaaaacatcctacgcttgacatgccagtgatcgactacgacttggcacttcttttccaaccagtgctggtgcttggaatcagcattggagttgccttcaatgtgatttttgctgattggatgatcacagtcttgttactaataattttcgtaggaattgcaaccaaggcattcttaaaaggagttgagacatggaaaaaagaaaccattatcaagaaggaaactgctagacaatcacaatttaatggcactgaaaggaccgcggaggtcgcatatgagcctctaccgggagggccaaacacaagcaatcataaagagcctaaaaaatccaaggaaacgggatcaattcttgagaatgttcgttggaaagcacttggagttcttttcactgtctgggtccttatacttgcctccgagattgcaaaaagtcacacaacaacttgttcagtggaatattgggtccctgtggcattaggagcgacttcatatcaagctgtgcttctgtacacagggaagagagtgatagcatccaaaggagatcaacgaactcaatggagagcgcaccagctaattatgtattgttcctgtggcatatgcgctggtatagttggtggcttgcttggtcttggtggaggttttattttgggacctcttttcctcgagctaggaatccctcctcaggtgtcaagtgctacagctacttttgccatgacattttcagcatctatgtcagtggtggaatattaccttctaaaacggtttcctattccttatactctttacttcgtggctgtatccacttttgcggcctttgttgggcaagttttagtgagaaagctggttgccatactagggagagcatcgctgatcatttttatcctctccagcaccatttttgtcagtgcaatatcactaggtggtgtgggcatatcaaacatgatccaaagaattgcaaataaagagtacatggggtttgaaaacctttgtacctactcagcctagatattagaattcggattacaaattcaatttcaaggactatataattgacatttttcaattcgaattgttttttatctagtcagaatttttagtagtgttatgtcaagaattttaagcgatgaaaaataattcagcgcttaattttttattttttatttgtcaaacatggctgtatcttggacagagtttcttaaatatataatcaacgatatctctcttagcttcctcc

SEQ ID NO: 10399 - DNA, 2374 bp, Glycine max
  Clone ID: 700907443_FLI
aaaggaggatgaagttctatatgaggccacatttgacttaccagaagctttcgggaatgtgggtgctgttttagtacagaatgaggaccacaatgaggtgtttctaaagagcatagtccttgatggcttccctaatggtcctctgcactttacctgcgattcatggattcagccaaagagtgatagtcctgtgaagagagtcttcttttctgacaagtcatacttgccatcacaaacaccaagtggattgagaaagttgagggaagaggaattgaagcaaaaaagaggaaatggagaaggagaacgcaaaagcactgataggatatacgactatgatgtatacaatgatcttggtgatcctgatagcaacattgacctcaaaaggcctgttcttggcggcaccagacaatatccatatccaagacggtgtcgtactggtcgaaaacactcagaagcagacccttcttctgagaagaaagcatcgaatttctatgttcctcgcgatgagattttttctgagataaagcaaacacagttcacaacaactacaatatcctcagcagtaagtttagttttggaatctttagatgcaattctcactgaccaaagccttggatttgtgagcttcgaagacatagacacgctctataaagaaggatttcacgtgccagcgcttcaagccaatgggaatgcacttcaaagagtaattcccaagttactcagtgttgttaatgataaacagaaccttttgcgtttcgatactccggatgcatttaagagggacagattcttttggttgtcagatgagcaatttgctagggaaactttggcaggtgtcaacccatatagcatccaattggtcaaggaatggcccttgagaagtaaattagatccccaaatctatggtccacccgaatcagctatcactaaagaagtcattgaaccacaaataattggctattgcacagttgaagaggccattaaggagaagaagttgtttatgttagactaccatgatttattcttaccatatgtaagaaaagtgagagaaatcaagggaaccacattatatggatcacgaactctattctttctaactgaacaaagcacattaaaaccattagctattgagctcacaagaccagatatggaaggtaagccacaatggaagcaagtcttcacacctgctactcattcaagttctcatgcaaccaaactctggctttggaggcttgccaaagctcatgttcttgctcatgattctggttatcatgaactagtaagccattggttaaggactcattgtgcagtagaacccttcatcattgcaacaaatagacaactaagcaccatgcaccctatctatagattactgcatccacatatgagatataccatggagatcaattcactagcccgcgaggtgcttatcagtgcaaatggggtcattgaaagttcgttctctcctagaaaatattcaatggaaataagctctgtggcatacgatcaactctggcaatttgatttgcaagcactccccaatgatcttatttttagaggaatggctgtggcggatccaaatgcaccacatggcctaaagctaacaattgaagattaccctttcgccaatgatggtctccttatatgggatgccatcaaagaatgggtatctgagtatgttaaccattactatccaagctcaagcacaatagagtttgaccaagagctccaagcatggtggacagaaattagaacagttggtcatggagacaaatctgaagaaccatggtggccaaatcttaaaacaccaaaggaccttattgaaatcattacaactatagcatgggtatcatctgctcatcatgcagctgttaactttgcccaatatacttatggaggctatttccctaataggccaacaattgttagaaataacattcctacagaggacccctcgaaggaagagttggaaaaactcataaacaacccggagaaaacatttttggagtctttaccatcacaaattcaagcaactttggtgatggtagttttgaatttattatcgaatcattcgccagatgaagagtacattgggcaatatgtggaacaatcgtgggttgagaatcaaactataaaggcagcctttgaaaggtttagtacgaaattgaaggagattgaaggtattatagactcaaggaatgcaaattgtgatttgaaaaataggaatggagctggggtggtgccttatgaactaatgaagccattctcagggcctggagtcactggaaagggtgttccatatagcatatctatttaaagattgttattttatatacaatatttataattaatttcttactaatgcaatgtatgt

SEQ ID NO: 10400 - DNA, 1361 bp, Glycine max
  Clone ID: 700907506_FLI
cttctcttcactctttttaaaaaaaatggttctcaccatttccaattagacacacataaaaccattcccaatagccgcctctgataattgattactatcaacccaacttcaagttgtgttcttttgtggtgtgtaaccgtattctgtatttgttttcatcaattggaaactgggttttctcgctttttgcagataagcatcaataggatactagatcatggattggtactatgggaacggcattaatgattatctggttcccagagatcaggatttattggacaggcatccttcaccagactattggtcaaactggggaataagtgcaactgaagggattctgtacctgaaggtcttccatgtgttgacgttgaaaacctagacaaatccatcaacatttctcctgaaaaccaatgcagcagtacacctggtatattgcagaaagatataccagcttcaaagtctgtttctagcaactcagaatcaaagaattgcctggatatagagtgtagcagagatgatggcatgtgtgagcagtcatcatcacttgaggaattcatactgaaggatcttgagatggtaattggacaggtgaagtgactaagaactcaaatccctggcatctgattaactgcaataattttttttccttattctttttgtttcacatggcaagttcaccgagaggacccgtatttgcttccgagatgctctgtaccgtcttgctagaaacactgaagaacaacctgtaatgctggaccagaatgaagatcttaacatacagaaggcaataccacatacagatcacaatgaaacaatgaggtctcaggacaagaaaccaatggaatcagaaaccaacaatattgacagaataattgcaaatctcatgttcaagagcatggagttcaacatacatcattctccaattacatcatcaacaaactccgttcaacaagttattggaagtaataatggtccacgtggaaacaactcaaaagccatgaatatggaagacaaatcttgctactcccacccacaaaaattactagtagatgccgagattcccaggtttggactaagtaatcaaccaagggacacaggttcatatatcacatgagaagatcccatgaagacatctttcatgatagggtttggttaggtagtgtgattgtgagctttcttgtaggcattagcttaaccaaaatcaggaaaaaaaatatcaatttcttgtaattattcaatctatctgttaaggtttctttgaagtatctgaattattagtgttctgttatatttattcaaaggtttgttgtatacattcagctcaattttgcttggaatgtaagtgactgatttgttgt

SEQ ID NO: 10401 - DNA, 726 bp, Glycine max
  Clone ID: 700907520_FLI
cagatgaccaagtggaattcatcacaggaatacatgacggtgtttcaacagacgataaatctaaatgggaatgtgtgaggaaaggactttgctgtatatgctgcgaaagcaatattgattctttgttgtacagatgtgggcacatgtgcacatgttcaaaatgtgctaatgatttgctccaaagtagaagaaagtgtccaatgtgtcaagcaccagtggtggaagtgatacgagcttattctatacaatagttttgacattaaagggtcacacatataacagaatacaagatcctaacaagttctatctcctggacgtttccaggtacgtttattttaataaattttttttctgttcttgccggtgattactatatttatgtcgagtgcaccaatggaaaacttgatgtctctttttgtggccatgattctgaaatgattaaaaaaagtattttgtttgatttggttgtttgagttttttttctttcaattctatattgttatcaaaatcagatcggttgtcatgtaaatttgctttttctgttttcagcgtattgtttgtaggtttcttaatgaagaaatagccgaatttatgtgacaagtgacggctcagttcacgcttgggttatgtactatctagaaaaacatttttttcccataactatttgacattttgtttttgtatagaattgacattttttccttatatatttgatatttcttacat

SEQ ID NO: 10402 - DNA, 1045 bp, Glycine max
  Clone ID: 700907521_FLI
ggagagaataccacggcagcaacgactggaaagggatgttggaccctctcgacgagaatctccggcgagaggtcgtccgctacggcgaattcgtccaagccgcgtatcaagccttccattcagaccccgccatgtcaacggaggagccgccacacacccaacacgtggcacttcccgatagatcctaccgaatgaccaaaagcctctacgccacgtcatccattggtttacccaaatgggtagatgacgtggcaccggatctaggatggatgacccaacgatcaagttgggtgggatatgtagccgtttgcgaggacaggagagagataacacgaatgggaagaagagacattgtgatctctctcaggggaacttccacgtgtctagaatgggcagaaaatctcagggctcatatgattgacatgcccgacaacgatagctcagaagaagcccaaggaaagcccaaagtggagtgtgggttcatgagcttgtacaaaacaaaaggagcacaagtgccaagtctagcagaatccgttgtagaagaagtgaggagactgatcgatctatacaaaggtgaagagttgagcatcagtgtgatagggcacagccttggggcgacgctagccttattggtggctgaggagataagcacgtgttgcccccaagtgccacccgtggctgttttttccttcggtgggcctcgcgtgggtaacaaggcctttggggatcgcttagctgccaaaaacgtcaaggtgctgagaatagtgaactcgcaagacgtgattactagggttccagggatcttcgtgagcgaagagcttgaacagaaaatacggaacgttggtgggggtgtgttggaggagaacacgcccttagcatactcgcacgtgggaacagagctgcgtgtgcacaccaagatgtcgccatatcttaagcccgatgctgacatggcgtgttgtcatgacttggaggcttacttgcacttggtggatgggttcttggcctccaattgtcctttcagatccaatgctaagagaagcttggc

SEQ ID NO: 10403 - DNA, 997 bp, Glycine max
  Clone ID: 700907535_FLI
aggtggtctcagtgtggtttatcatcaacttgacgtagtagactattcatccatcaaccagtttgttgagtggttgcgggaaaattgtggtggtttagatattctggtaaataatgctggtgttaattttaatcttgggtctgataactcagtcgaaaatgctcgtaaagttattgaaacaaattattatggcaccaagcgtatgactgaagctattatttcattgatgaagccatcccttgttggtgcgcgtattgtaaatgtaagctcacgtcttggtcgactaaatggaagacggaatagaatcagcaatgtagccttgagggagcaactgagtgatgtagaatccctttcagaggaacttattggcatgactctgtctacatttctacaacaagctgaggatggaacttggactacagaggggtggcctcaagtatacactgactactcggtgtccaaacttgcagttaatgcatatacaaggcttatggcaaggaagctttctgagagaccagaaggtcaaaaaatctatattaactgctattgcccaggttgggtgaaaacagctcttacaggttatgcagggaacaatactgttgaggaaggggctgatactggagtgtggcttgcccttctttctgaccaaacattcatgggaaagttttttgcagagagacgagaaattaacttttaagctgttgcctattggggggattacaagaattttaagtcattctactgaattttgcaaatttttcaaaggaaaagaaatactgaatttgtatgttggcattagttcactagcaggtttaagtttccctcctgtaccatgtaattttagttgataagctaattcttttgaatactttatgcttagctagttgtaaccgcatatgcaggtgcacgtgcactcgcatatagggaacaaatagtgagaaatgaaaacagtaaattgggatcatgcatacatatgaatgtcaatggttaaaagatg

SEQ ID NO: 10404 - DNA, 1437 bp, Glycine max
  Clone ID: 700907558_FLI
gaaaaagttggtgtgctgcttctcaatctaggaggaccagagacattgaatgacgttcaaccttttctgtttaatctttttgcagatcctgatatcattcgtcttccaaggttgtttcggtttctccagcgaccattggcaaaattgatttctgtacttcggtctcctaaatccaaggaagggtatgctgctattggtggtggctctcctttacgcaaaattacagatgaccaggcactcgcaattaaaatggctttggaagcaaagggcatctcttcaaatgtctatgttgggatgcggtactggtacccatttactgaagaagcaattcaacaaattaagagggacagaataacaaggcttgtggtactacccctttatccccagttttctatatccacaactggttcaagcatccgcattcttgagcatatattcagggaagatgcctatttgtccaagcttcctgtttccattataaactcttggtatcaacgagaaggttatattaagtcaatgggtaacttaattcagaaagagcttcagagtttttctgaaccaaaagaggtaatgatatttttcagtgcccacggtgtacctgtcagttacgttgaggatgctggggatccataccgagaccaaatggaggagtgcatcttcttgatcatgcaagagttgaaagctcgaggaattagtaatgagcacactcttgcttatcagagtcgagtgggtcctgtacagtggctgaaaccatatacagatgaagttctcgttgagcttggccaaaaaggtgtgaagagtcttttagctgttccagtgagttttgtgagtgagcatattgaaacccttgaagaaattgacatggagtacaaggaattggctattgaatctggcatcaagaattgggcacgtgtacctgcccttggtgttaccccttccttcattacagatttggcagatgcagtaatagaagctctcccgtcagcaacagcaatgtatgcaccaaccagcatctctgaagatgttgatcatgacccagttagttattttatcaagatattctgtggttcaatcttggcattcatcttgttcttgtcacccaaaatgatcatggcattcaggaatcaagtcatttagaagaattagaaactgtttgctgaattcaatctgcaagcatatagatgaagcctattgatagcaacaaagtatacttggatttttttgtctttgttttactcatttcaacctctactgtatacatcaaagagctatgaagaagcaattttccgcagagaacttgaacctcggcttaaagaggattcaaagaataattgttgaccagggatctattcaagagccaagaggcattgtctcgatctccgatttaaacccgaacaagttattgatttttgtttattatttacttacacttttcct

SEQ ID NO: 10405 - DNA, 1349 bp, Glycine max
  Clone ID: 700907574_FLI
actcatcgtgcgcttgctcaaataacaattgaagtgtttattgtgtcaagttcagtttcaattttgagtccttagggtgggtttcgtaagatattatttaggtatatccaatgttttattggaggaagtgagctattttgatgaaagataacggatccttcttggatggattgttaatatgaccgtctaagcaaaacatgcctgaacctggcaatttcacgcattaagctgctgcaaaacaagagagatatgcaactgaaacaaatgtgcaaggagattagccaattcttgcaggctggccaagaggcaattgctagaatcagggtggagcatatcatacgggaacaaaatacatgggctgcatatgaaattttggagttgttctgtgaatttgttcttgcacgtgtacctataattgagaatcagagggagtgccccacggaattgcgagaagccattgcaagtataatttttgctgctcctagatgttcagatgtaccagacttattgcacatcaagaacttgtttaccactaaatatgggaaagaatttgtctctgcagtatctgaacttcgtcctgattcgggcgtgaaccgcacgatcattgaaaagctttcagttagtgctccatctggagaggtaaaactcaaggtcttgagggagatcgcagaagaatacaatatagcatgggattcttctaaaactgaggctgaatttaggaaaaaccatgaagatctcctgggtggagcaaagcaagttagtgctggagctacgctttctcatactcccagcagaaatggttctaataatccatcaccttgtattacggaaccttctatcaagcctgtgcaagacaagcaagaatataaacacctttaagctccgagcccttctaacaataattcttcgttggatactaatgaaatcgaacagtcacacaaaaacaataatgttcccgctggagatgctaaaagtgagacaagatttcaatcctctgatgtactggagaaggcacgggctgccattgcttctgcggatcgcgcatctgcagctgctcgtgctgctgctgcactagttcagagtaattttggatcattgaagctggaaggtaaataaaccttcacatcgatgaaaatgctgccctcccaggatcttaatgctggaaaaaaaatgttaagaactaaatgccaaaggagaaaattatgttctttgttgcggaggtgacagcttcatacagtgattctatgtaataagaattgtgccgtacttcattgtacattccataattaatacatgtatatcattgtaacggaacggaatactgaacagtgtgaacttttctattttct

SEQ ID NO: 10406 - DNA, 2309 bp, Glycine max
  Clone ID: 700907607_FLI
gcacatgttggtctcaaaatgagcatccggaaggtatatcgtttgtttatgtttcccggtagagtagttattagtttgcattagatgtcatcgttccatatcataattcaatttcaaagaagcaattgcagagtacaaatgcagtgtgctgtaatcatttgccatagtaatgtaaattattatgcatgtttctcgtgaaaggttgtcttgaaagtattgaatgagcaattattttttctattcttcaatatttatttcttattcttcattttcaatgtgatttatacactgaaaatgaatgttccttgtctttctgtttgtacagtcatggtaatgatattatagagagacacttgtactgaaatccctcctctttaattttctttaatttagatgtagttttgtttcattgtagggctcacatagtacaggcttccatagctgatggtgttttgtcaggtaatactgaccccaagaaaaatattgagttgctacaagatgctattgcttctattactctcttaggaagcataatcacgtccatccctttatcgaggtaccaattaattatggcaacaaatctataaacatgaagatgaataatttttgtggacagtttaaaattgtgtaatttgaaggaatttgcaatacttaagagactagtatttatacaattactttgttatcttaaaatttctaatacttaggaactattcatataatttccaatacttttggcactatttacgaaaaagtaatagtttagggaccaaattgatggatattcaaattattattgtataatggtttttccattagtttaattactttatcgcaatattattattagtcattggcatgtgtttctaggatataatgtgacatctttgtacgtctagtttttttttgttaagaaaaatctctactaattttgaaatcctacatttttttaattactgttttctaggagctattcccattttctttcatattcttgatatgttatccaagtccaatatctttctcgcatccttttttcttgaactcttctgaaaatgattgcagtgatagtaggtcatcgtttattatcttactatgatgattcactttaattaaattccatgtgcattgattgattaaatgttcctgaactaagtcatttattatcttacatgtgcatttatttctacatcctacaccttcacacttcacacatctagtaacagtaagtgatagtaaattaagaattaatagtgtacatataaaactccttatatttgatttatttagttggatataacattttatattagaataacattaatatattttttgtaagatggttatggttggttcattgtaaaaataaataaaatatttgaaaattttgcaaaaaaataacattggttcggtaagaaccgatgtcgtaagcacattcaatatcggttttttcaaaaaccgatgttatatataattttcaacatcggttttttacagaaccgatgtagaaagtatttcagaatatacaattcaatatcagtttttttcaaaaactgatgttgtatataactttcaacattgggttttacagaaccgatgtagaaagtatttcagaatatacaattcaacatcggtttatcggaaaaatcaatattgtaagtgcaccacaacatcgattttcttaaaaaccgatgtcatatagtgtattttaaccgatttttataaccgatgttaacgttcatacttttaacattggttcgaaaccgatgttgaatgtccaaaataaccgatgttaaaagtgttttttctagtagtgtccattttgtaataccattggtggatggggtgctgcatcttatttgatttcctattcttatttataggcaagcatgttcatagcttagctcatgcaacttctggatatcacaaagttcttgaagaaaatagcaaactatacaatcaagttcatgatcttaagggttctctggactaaaatgtattttatatatatatatatatatatatatatatatatatatatatagtatactattcaattacggctggaatcaagtcaagccgccaagacaagtgttcataatcttcagaatttagaatgcgcttataatagtgaatcatcagaaaaaattgattagtatcaattcatatgtgaacaaaaggttataaatctaaacttttcatgttcttggtaattcaaattctaggtcacaaataattaagacgttgttgaagtcaaaagcattattattgtatttctgaataaatttcccaaacatgattttatcggt

SEQ ID NO: 10407 - DNA, 1267 bp, Glycine max
  Clone ID: 700907612_FLI
catagccgcgcacctgcccaagagaactgacaacgacatcaagaactactggaacaccaacatcaagaaaggactcatcggaaagggcttagatccccttacctacaaaccaataaaatccaacacttttcaagcctatggtggtaatttccttgacccttccattgacaccaccaatatgaaccatgtggctcaatcggagagtgctcaaatcgaagccgaagcaagagaatctatgttgcaatttggatctctcccttcacatctccctgggctaatcttaagcaaaatcccaactcaaccttttccttcatcagcttctctattaacccaacgcattaatacaacatatgacatgtatgccctcgtgcttgcgacgaatcatcttgaccttcatccaccaccattcactgaccctgaaagcttccctagtaggaagcttcttccttcagtctctaccagtgttggacaatccactgatcctgaaagctcactctcttatgatggtattggttataatatgatagacaatagtagtagtcaaatgcaaatgacgatggaatgttatgcgacaaactttgaagatgatgatgttatgatagctctagaagcatttggaatagcaaggtttgagggcattcaagaattgtttgacgggcccactaccatggaagatctaatcaatgaatcttttgaaagagatgtgtagaagagtatggaaatggaaagtgcaatttccatgctttcctttgttggttccaataaaagtaatgtgtggttttgtaacttttcttttgagggattttctatttcatgttgagttgggtgcctcattacatgtgtttcaggttcagggtgtcttgtgtcctggactacatgataggtgttgagggttgttctgttatcggaatacacaacacttgtactgtagttttctcatgttttggtgctatagtctcgagcatttcttgcgtttattttcctttatttttaatgagttatttgccttactaaaaaaattacagtgaagccaaagtcgtgaggttgcaagtgttgtcatggttctaaattgtgtttgggattgtggttgtgatctcattgcaattatgatcagttgtaatgagttaaaaaaaacttttatgttacagtcacagttatgaatatgaactgcaatgggtgtcacctgttctgctattgcacctcttgttcacggtctttattccaatataatccataattagcaacttccatggaaagccatgttatg

SEQ ID NO: 10408 - DNA, 1230 bp, Glycine max
  Clone ID: 700907615_FLI
aaacatggcaatgaagaagttcttgtgggttgttctgtccctttctttggtccttggagtggccaatagctttgattttcacgacaaggatttggagtccgaggaaagcctgtgggacttgtacgagagatggaggagtcaccacacggtttcgcgaagccttggtgacaagcacaagcggtttaacgtgttcaaagcgaatgtgatgcatgtccataacaccaacaaaatggataagccttacaagctgaaactaaacaagtttgctgacatgaccaaccatgaattcaggagtacctatgctggctcaaaggttaatcaccatagaatgttcagagacatgccacgtgggaacgggaccttcatgtatgagaaggttggtagtgttcctgcttcagtggattggaggaagaaaggtgctgtaactgatgtaaaagatcaaggccattgtggtagttgttgggcgttttcaactgttgtagctgttgaaggcattaaccaaatcaagacgaataagctagtctccttgtctgaacaagagctggtggactgtgacaccgaagaaaatgcaggatgcaatggtgggttaatggaatctgctttccagttcatcaagcagaagggaggcataacaacagaaagctattacccttacacagctcaagatggaacatgtgatgcatccaaggcaaatgacctagctgtatcaattgatggccatgagaatgtacctggtaacgatgaaaatgcattgctcaaagctgttgccaaccaacctgtttctgtagccattgatgccgggggatctgatttccagttctactccgagggagtatttactggtgattgtagcacggagctaaatcatggtgtggcgattgtggggtatggagcaactgttgatgggactagttactggatagtgaggaactcttggggaccagaatggggagaacagggttacatcagaatgcaaaggaacatatctaaaaaggagggactttgtggcatagctatgttggcttcctacccaatcaaaaactcctccaataatccaacaggaccttcatcatctcctaaagatgaactttgaagtttgaatgcttcccacaaaatcatactctaattagctttggttgttgttttctattagtatctcagattcaatgccagtgtatccatcaatatatttatgcttattacatcccaaagaaataaatattttatatg

SEQ ID NO: 10409 - DNA, 956 bp, Glycine max
  Clone ID: 700907616_FLI
gaaagaaagaaagaaagtgcaacttcctctgttttgctcccctgtttaagccttatcataagcttagaatggcacacaaggaattttccattgccctagtgactctcattgttctctttgtcaacacgaacctccaaggtgccacggctgactatggtggtggttggcagagtgctcatgccactttctatggtgggggtgatgcttctggcacaatgggtggagcatgtgggtatggaaatttgtatagccagggatatggaactgacactgtggctctaagcactgctttgttcaacaatggcttaagctgtggatcttgctatgaaatgagatgtgatgatgacccaagatggtgcaaacctggctctattaccgtcactgctactaacttctgcccaccaaacccatctttgcctaacaacaatggtggttggtgcaaccctcctttgcaacactttgatatggctgaacctgccttccttcaaattgctgaatatagagctggaattgtgcctgtggccttcaggagggttccttgtgtgaaaaagggaggaataaggttcacaatcaatggccactcttacttcaacctagttttgatcaccaatgtggctggagctggtgatgtgaattcagtgtccattaaagggtccaaaactgggtggcagcccatgtcaagaaactgggggcaaaactggcagagcaactcatacctcaatggacaatccctctcttttcaagtcaccaccagtgatggcagaactgtgacaagcttcaatgtggcaccagccaattggcaatttggccagaccttccaaggaggccaattctagagacattattgcaatgagggatagaaaatagtgcaaaaaaaaaaaaaatgtttgtatacctattattaatcacctcattggaagaaccattaagtgtcattaataggtattgattcttgt

SEQ ID NO: 10410 - DNA, 1447 bp, Glycine max
  Clone ID: 700907636_FLI
tgagccttctaatgaaaagtgtagatgagaatggtgatggtagcaagagagttatttctctgggtatgggtgacccaactctcaccacttattttcccatctcaaatgtagctgaaaaagctgttgctgaagcacttcagtcacacaggtttcgtggctatgctcccactgcaggtcttccacaggccaggattgcaattgctgaatacctgtctcgtgaccttccttaccaattatcaagtgatgatgtttacatcacttgtggatgcacacaagccattgatgtttcagtggcgatgcttgctcgccccggtgcaaacatcattcttccaagaccaggtttcccactctatgaacttagcgcttcatttagaggagttgaagtgaggcattatgatctgcttccagagaaaggttgggaggttgatctagatgctgttgaagctcttgctgatcagaacactgttgctttggtgattataaatcctgggaatccttgtgggaatgtgtacagttaccatcatttggagaagattgctgaaactgcaaaacgggttggaacaattgtgattgctgatgaagtttatggccatcttgcatttgcgggcaagccttttgtgccaatgggagtttttggctctattgttcctgttctgactcttggctcattttctaagagatggatagttcctggatggaggcttggttggtttgtgacaaatgatccatctggcacttttagaaatccaaaggtagatgagcgctttaaaaagtactttgatcttttgggaggtccagccaccttcatccaggcagctgtacctcagataattgagcatactgaaaaggttttcttcaagaaaaccattgataatttgaggcatgttgcagatatatgttgtaaagagttgaaggatattccatacattatttgcccttataaaccagaagggtccatggctatgatggtgaaactaaacctttcacttctggaggatattagcgatgatattgatttctgtttcaagcttgctaaggaggaatctgttatcattcttccaggaactgcggtagggctgaataattggcttcgtattattttcgctacagatccagttgctcttgtagagggtttgaagagggtaaaatctttttgtgaaagacatgcaagaaagtggtcaatgactacagaataaaatccacaaattaaggcggctactattttgtattgaatacctagcttctcaaatatccaatttttacaaaattggatcgttttacgaataattgggttctcaaatatccatttttttgtgccagctctagtttatcactagcttttaaggaaggattctccaagtatctaggtgtttatcaattggtatttgtgtttattgttgtatctaaaaaattatatattttaaataattttgtgacgctatatatt

SEQ ID NO: 10411 - DNA, 641 bp, Glycine max
  Clone ID: 700907728_FLI
atcccctatgatcagatatgaactcagtagagtgtcagcaatcttatttgttgcaatgggtacaagaaaactgcaatgccctttggaagctagatcagggcttctccaagcatggtttggacctatgctgttggactttggttggctgcagagatgcagaaaagggcttgatatgaggaccttggaagaggctatggggcagacacttcttactctacctttaaagcagcagtatgtgctgttcatggaatggtttcgccatttctcaaggcatggaactgagtgcccaaatatgagcaaggcattccagatttggtggcgcagatctttcttaagaggctctgagacttatgctgttgaatcaagataaatggtactgtggtttctcatttctagtgtgtgtagagttggaataaattagacattttgaataacgtagataagtaggatcattgtcttagcagcttcatgactaactggtgtcaaattttctagattttttccccttcattatttgtttgcttgcctgagctgaatgaaaagctgaaggctcctactgtattttctatgactgctgcccatgctttgcaacttgattgggtacacttgggtgtaaatggaataatgctatgttgttgggt

SEQ ID NO: 10412 - DNA, 426 bp, Glycine max
  Clone ID: 700907868_FLI
caaaaatcaagccaatgtttgttgttgttgttgttcccaacttgattaagcatgaaccgtttgattgaatcacttggacttgaagggaatggccctgtattacgacctggtgattcaatcaaacggttcatgcttaatcaatggaccacacacaaaatcaagccaatgtttgtgggttttggtttcatttcattaagatgatctgtttatctcttttcttctttttaaaatttaaagtctttgtatttgtatgtaaagatgtaaaattatgattattaggtggtgcatgtgtcgcgtcatgggccaatgttatcctctgcttttaagttggaagaggcccaactcatgtgtgatgtacggctgtgattgtgtaatttaatttgcaaaatcaaaaataacaccagagtcatatatatgcatctcttt

SEQ ID NO: 10413 - DNA, 355 bp, Glycine max
  Clone ID: 700907915_FLI
ctttaagtttccttaaggtccatgatgcgggtcacatggttccgatggatcagccgaaggcttcgttagaaatgctgaagaggtggactcagggaaccctttcagaatctgcagctgatgcggagaaattggttgcggagttgtaatcactttcgttattgcaattagtccagaaaagggatacaaaagtattatgcaataaagagaagggaattaaagtgatcagcatgtgttattaattataaagtgagattgaatcaaggccatgcaggaaaaaaactattcatatatagaatttcgtgtgtgcatgtatactgttttaataaaatgctgagatgtaaattgcttacacctc

SEQ ID NO: 10414 - DNA, 1287 bp, Glycine max
  Clone ID: 700907943_FLI
gcaagatggaagtgcttcccacttcttccatagagcaatcaacgcttacaacaccggcacccgaaagcgccgaaaaatactagggcaagattttggtgatgtccgctggcacaagactggaagaactaaaccagttgtctttaatgggattcaaaaaggctgtaaaaagattatggttttgtatgttagcaatgtaaggggaggaagagctgagaaaactaattgggttatgcatcaatatcacctaggaacagaagaagatgaaaaagatggagagtacattatctctaaagtgttttaccagcagcagcaagtcaaattgggtgataaagatgataaagatgttcctgaagccactgaaatcaatgaatcaacaattgtgaaagtggatccagtcactcccaaatttgtgactcctgaaactccttgtaatgaaaggtggtgtgcagatctagaccttggacaagaaacacataacagtccgcagcttcctcagatggattgtttagatgagattcaagctgattaccaagaccttgcaaatgaatcatctatggtagaaactcaacacaatgaagggatggatgataaagaaaaaaataccgaggaaggccaaaaatggtgggacagtgagtcacagaatctgttggattcacaacaactggtcgaggcactatcactgtgtgacgatctactccaaagccagtctcccagtagagatggaaaacatgaagatcataagaaccaacccggtctttctgtttatgctcagctaggaccagaaaatctgaagaaggatattgaagagtgtcaaaatcttgcccttgataaagcaaatatagagaatgatacaccttcagagtttcgactaagtcagctggaatttggttcacaggacagctttatttcctggggctatggcaaggcagtgaactaatatggttcttcacctcagctgggcaagctgatgtttttgtaactacattttgttgttgagattcctttcaaaattatgggctaatccttttccccttttggttgaagggctaaactcaactgttgctcctttgcttgactaattgagctgtaatgttaaagcaatgaactttgttgcttgatactttgatcaagtagtattgtaattataccttgttttggcttgttgaagttattgtatcttccaggttctctttatatcttggatgtgtggacctgacttggccacatataagcatacaactctcatgctgaagtaatggacgcaggtgcatgtcactatgttgtagg

SEQ ID NO: 10415 - DNA, 1816 bp, Glycine max
  Clone ID: 700908011_FLI
gcaaactctatgaaggtggagttacactacctacaaactttcttagcaagatcgcccctataccagtggtcaaggaaatttttcgaactgatggcgaacagttcctcaagtatccaccacctaaagtgatgcaggtggataagtctgcatggatgactgatgaagaatttgctagagaaacgattgctggtgttaatccaaatgtcattaagattcttgaggagttcccaccacgtagcaagctagattctcaagcctacggtgatcatacctctataataacaaaacaacacttggagcctaacttgggtgggctcaccgttgagcaggctatccagagcaagaagttgttcatcttagatcaccatgactatctcattccatatttgaggaaaataaatgcaactaccacaaagacttacgctacaagaaccatatttttcttgaaaagtgatggaaccttgacgccattggccattgagttaagtaagccgcatcctcagggtgaaggatatggtcctgttagcgaagtctacgtgccttcgagcgagggagttgaagcttacatttggttactggcaaaggcttatgttgttgtgaatgattcgtgctaccatcaactcgtcagccactggctaaacactcatgcggttgttgagccattcgtcatagcaacaaacaggcatctgagcgtggttcaccctatttacaaacttttgtttcctcactatcgtgacaccatgaacattaattcacttgcccgcaaatccttggtcaatgcagacggtattatagagaaaacattcttgtggggtaggtactctttggaaatgtctgctgttatttacaaggactgggttttcactgatcaagcattgcctaatgatcttgtcaagagaggagttgcggttaaggatccatctgctccccatggagttcggcttttgattgaggactatccttatgcttctgatgggctagagatatgggatgccatcaagtcctgggtgcatgaatatgtctcattctactacaagtcagatgcagcaattcaacaagatcccgagctccaagcttggtggaaagaacttgtccaagtgggtcatggtgatttgaaagataagccatggtggcaaaagatgcaaactcgtgaagagttgattgaagcctcggctaccctcgtatggatcgcttcagcccttcatgcagctgttaactttggacagtatccatatggaggtttaatcctaaacaggccaaccattagcaggagattcatgcctgagaaagggtctgctgagtatgcagctttggctaagaaccctgagaaggagtttttgaagactattactggcaagaaggagaccctcattgaccttacaattatagaaatcttgtcaaggcacacatctgatgagttctaccttggggagagagatggtggtgactattggacttctgatgctggtccactagaggccttcaagaggtttggaaagaagcttcaagagattgaacaaaagcttatacagaagaacaaggacgagacgttgagaaaccgcagtgggccggctaaaatgccttacactttgctctatccttctagtgaggagggattgactttcagaggaattcccaacagtatctccatctaggggctctatggttgttgcagtactttccctggttttcaataaaagtgaatagaaggaatatgattccttcatctacctatgtatggttaagttatgtatttggggtgattgaatgttctcgtgtttgctgttaagtgttaatgaagaaattctgtttgtat

SEQ ID NO: 10416 - DNA, 1124 bp, Glycine max
  Clone ID: 700908158_FLI
ggcagtcaaggcttgaaagggtccataagtgatcagattagtcttttgtcagatttggaatttgagttctaatttgttcgtgggtgaaataccttctggacttggtcagaaatccctgatacacctggacttgtccaacaatcagttaacaggccccataccagatagtattgcctcttcaagtttgcagctcgtgctactgaatggtaacttattggaaggacgagtaccagagcaactttattcgattggtgtgcatggtggagctattgatctctctggaaacaaaggtctgtgtggtgtaccatctctgccagattgtcctatgttttgggagaatggcaaattatctactcagggtaaaattgcaataggcttgtcctgtctttttgttttctgcgtgatactgctgctggtctatatttacattaggaggagaagaaatgactatgactttgctctacctcatgaattaacatcattagccgccaagagaaacagatatcagaggcagaaatccttaatggttcttgagatggaaagtcaacacgccaagggattaccttcacattttactacacaataaccatttatcttaatggaaatggaatactcattttcatagttttcagccaaatatacaacgagacagcttatagaaaatggtttgaatgtgttgcagcatcaatgatcaacactgcggctttaggaaagaaatgctttgtctcggcgaggtttttggaagccacttattgtacgatgcatgctccccccgtgtcattgtttcttgacccatgaaggaaaaaaagcatataccctgttatgtcaatacttagccgcaacttttgctgaatgtgataggtacaagccattaatttatgaaatgagtcacaaattagagtatatttttcatggcacatagattctgattgaagctaacattgtataccgatctatgtagcaaaagactagtgattggactttactgtacattgtatttcgagccttttcattctatattcattcagacttgaagaggattgtaactagagcacgccgcaccaaaatacttttgtatatcaatttcttttatgctatataaacctttaatgacaaataccaat

SEQ ID NO: 10417 - DNA, 2290 bp, Glycine max
  Clone ID: 700908176_FLI
cggaaagagagagagaagctagagagagaaagagaccaaactaattagtgtagaagaaacagagacgctgtgtgggtgtgggtgtgggtgtgggagagagagggagagagaaagcagagaaaatccgaagcagttttctcacactttttgatcggaacctctcattccgcgttcagattgcgccccccatttggtccttacaatggagcggtacgggcgggccagcgaagggtcgcagtctgatccgtcgccggaatggaccgtggccgccgacgccgacgccggcctcgaagagtcgtcgtggcaactcggattacccggtgctgaatcttaccctatgcgtcccgatgaggcggattgtatctactatttgagaacgggattttgcggttacggcacacgctgtcgtttcaaccatcctcgtgaccgtgccgcggttattggagctgcgccgaggactggaggagagtttccagagcgcgtgggacagcctgtgtgccagtactatatgaggacgggatcatgcaaatttggtgcgtcctgcaagtaccaccatcctaggcaggtgccaggcactgctacccctgtgccactaaattattatggatacccattgcgagtgggtcagaaagagtgttcctattacgtgaaaactggacagtgcaagtttggtgcaacttgtaaattccatcatccacagcctgcaggcgtccaagttctagcaccatcaccagttcctccagtttcacctctgcctgtacctgtaccttcaccaatgtatccaactgtacatcccccatctggtccttcacaacaacaatatggtgtacttgttgcaaggccacctatgctacctggctcagtagtccagggtccctatgggcctatggtagtgtcccctaccatggtccctttttcaggctggagtccttatcaggctcctgccacaaaccctctacttccatccagcactacatctaatgttggttctacacagctttatgggataacccagctaccttcatcagcagctacttatactggaccttatcaaccttctggttcttcaattggtccttcaggtgctagtcagaaggagcatccatttccagaaaggcctgatcaaccagaatgtcatcattacatgaaaacaggggactgtaaatttggcccgttgtgtagatatcatcatccaccagacaagagtgcaccaaaagcaaatgtaacccttagtcccgtgggtcttccattgcgtccgggggcaccaccttgcactcattatacccagcgtggagtttgcaagtttggttctgcatgcaaatttgatcatcctatgggatcactgagttatagtccatctgcctcttccctagctgatatgccagttgcaccctatcctgtgggttcctcaattggtactcttgccctgtcatctttgtcatcagagttgcggcctgaacttggtgcaggatccaacaaggagtctgttgcatcgagaatgtcttcaatgagcacatcgactggatcggttggcttgaccttgtcaagcgttggtcccatttctcactcaagcacccaaccatctgctcagagttccagttctccggaaactaccagtgctaccacaagtagcactgtatctcacacctcaagctaagcaatgtgaatgaattcctcattattactcctttttatgtcaatttttcaaccggccatcattactcgaggttctcaaataggttttatttttcaattatcccagctccacattcaggtctatagcacacattgcaccaattgtctgtgttcatataatctttttgtggccatccctttgatcttgaataaaccatggccaaccttgagaattttagcaacccatacacgcaccttgcttttgaataacttcaaaagaatctgcaactccattatgcacatgtccattcacatctccaattttcgtagtttgttgtgcttatctatgcttcaatctttttttatatgagaaaatttctgcccggagtttcattgacagtgtaatctctcttcacctgaaccctttttttgcaagtgggaataatctctagttctgcctggaaggtcctgtttgccactgttcccaacttatctaaggtttgaagtgaagagaagtaatcaggagactacaatgaggcttcacattgctatcttttgtgattttagatacacggtgatgttgtgacaagtaaaatgcttgacttggtactttattacacaatacatatatgaagaaacacatttaaattaacac

SEQ ID NO: 10418 - DNA, 2060 bp, Glycine max
  Clone ID: 700908207_FLI
gtggttgcttcatctatgtgatgcacatcaggaaatgcagtcatgggcagaagctgctcagtgtgctgttgctgttgctggtgttgtaatgcaggcccttgttgccagaaacgatggtgtttggagcaaagaccacgtttctgctttacggaagatttgtcctatggttagcaatgagattacgtctgaagcatctgctgcggaggttgagggatatggtgcttcaaaactgactgttgactcggctgtgaaatacttgcagcttgctaataagctcttctcgcaagctgagctttttcatttctgtgcaagcattctggaacttgtaatcccagtttacaaaagcaggagggcttatggacagttggctaaatgtcacacattacttactaatatctatgaatcaattcttgaacaggaatctagtccaattcctttcacaaatgcaacgtactacagggttggattttatggtgttagatttgggaaacttgataaaaaggagtatgtatatcgtgagcctcgtgatgtacgtctaggtgacataatggaaaaacttagtcacacatacgagtctagaatggatggtaatcacactttgcatattattccagattctagacaagtgaaggcagaggagttgcagcctggtgtctgttaccttcagattactgccgttgatccagtaatggaagatgaggatttaggaagtaggagagaaagaattttctctctctctactggaagcgtccgagcccgcgtatttgaccgattcttgtttgacaccccatttaccaaaaatggcaagactcaaggtggattggaagatcaatggaagagacgcactgttcttcggactgagggttcttttcctgcattagtaaataggttattggtaatcaaatctgagtcccttgagttctctcctgtagaaaatgcaatcggaatgattgaaacacgaaccgctgccttaagaaatgagcttgaagagcctcgaagttcagagggggatcaacttccaagactccagagtctacaaagaatcctacaaggcagtgttgcagtacaagtatgttttactgttggttcttattacattatgcattttttaattgtggttacaagttgtgttctgaaaactagaccaggtctgcccgtctgactggaaaactggtgaatcggttcagtgtcctttcaataaagtactgaaccggtcttgacaaaaactggtcaaataatcagagaaccagtcaaaacctggcaaaaccttggttcttcacgagccaatgaaaatttctttatttttttaaaaaaaaaaatgaaagatcaacctaaagtatttgtcattttgttttttggttctagatgtaaacttgttactgttaatgaatatttttgtgtatttttgaaactttatttattttttagttatgatattattattattattacttgtttggccagggttctgaacccataccatatctggttcaatgacctaaccggttttaaaaacattggttgataattctatttttggcctcccagatttgaatattttacttttggtctttcaattctgtcagcacacttctctttgtgcaggtgaatagtggagtcttgagtgtctgcactgccttcttgtccggggagcctgcgaccaggttacgatcacaggaactgcagcaacttatagctgcccttcttgagttcatggctgtttgtaaacgtgccatccgtgtacatttcagattgattggtgaggaagatcaggatttccacacacaacttgtaaatggtttccagtcactgacagcagagttatcacattacattcctgccattctctcagagctatgacaagtgtttgcctcttaatattttgcttcgatttgttcatattgtagtctcctcattccctttcaccctctttctatcgcttgcaaagatgtgtaattgaatttgcatcatggttcgtatacttagaattatgcgaaccaggtgattcaggaaaaacacgaatcgtcctgtttgtgtatcatgatgtttctagtttcccc

SEQ ID NO: 10419 - DNA, 1255 bp, Glycine max
  Clone ID: 700908259_FLI
gttccaagtctgccttatctgctgttctagtttattggcattgggatcagtaactgcaattcccaatgcaaattttcatcgggcgccaaggagcactagtgtgcttctggttgttgtctgtgttttttgtggtaacaggattcaacaatgaagagcacaggacagtggaggtagttggcctaggagaatgcgcagactgcaggcagaacaatattaagaataaccacgctttctcagggttacgtgtgacggtagattgcaagtcacgacatggacacttcagaacgagaggggcaggtgcgcttgatgaatatggaaacttcaaagtatcacttccacaggacatggttgaagatggtgagctaaaagaagattgctatgcccagttgcatagtgcatctgctgaaccttgcccttcccacggaaactccaaaattgtgaccaggtcagtctctgaagacacacacacccttgcacctgctgctggaaaactcagattctcatcagcattgtgcacttcagccttcttttggcatttcttcaaacaccacccagaattcccttaccctcctaaagatgactactctctccctccccctgtgccagtctataaggaacctcttcctccagtgccagtgtataagaaacccccagcaccatataagaaacctcctattagtactccatctccagttgtgaataaaccatgccccccaaaggaaaaaacaccttctcccactcccatttacaagccacttccacctcccactcccatttacaagccacttcctcctcctactcccatttatgagcctactcctaccgcgccgtcgccaccatattttaaatactttcctcctttccatttcaagaagccgtgtccacctcttcccaagatggaacctccaaagttcttttaccaacacccatggtttggaaactggcctccctctcattcatagactatcattgttctcggagtaacgttttttatatgtgcgttttctagcgtttttgcttcttatgttagcaataaaatccgaataacatccatgtcagtggatacagaatgtgagcagaagagcatggaaatgagagtaaaagagaaaaacaaatgatggagcaatgttgtttgagaaagtttgaagttaattttggtgaccaagttgaatgtgatgagttaataagtgaaggtttctctgttagttttgtacaagtacgtataacttaaaaatgctttatgatccttatggtg

SEQ ID NO: 10420 - DNA, 670 bp, Glycine max
  Clone ID: 700908266_FLI
gttgttatgctaggaggaaggatacttgagatattgtccataaatcttgggcttagagaggattttctcctaaatgcatttggtggggaaaatgaccttggtgcttgcttaagggtgaatttctaccctaaatgcccacaacctgacctcactcttggcttgtcccctcactcagaccctggtggcatgaccattcttctccctgatgaaaatgtgtcaggacttcaagtacgcagaggagaagattggatcactgttaagccagtcccaaatgctttcatcatcaacatgggtgaccaaattcaggtgctaagcaatgcaatttacaagagtatagagcacagggtgatcgtgaactcaaacaaagatcgagtttcattggcctttttctataaccccaggagcgatatacctatccaaccagccaaggagcttgtgactaaggataggccagcactatacccaccaatgacatttgatgagtatagactttacattaggacaagaggacctagtggaaaagctcaagttgaatctttgacttccgaatgagattccaattgagtagttgtttgcagtacagaaaattaatttgcatatgaataacttatcatgatctttgtgtttgtatttatcagactcagtaaataaaaatatcatatcccactct

SEQ ID NO: 10421 - DNA, 1665 bp, Glycine max
  Clone ID: 700908268_FLI
ggagagtgagaataaaaaagaaagaaaaagaagggttttgataaagcaaaagaatattattgaaacataaattttggactttctttgcatttggcacccaccccacaacgaaataaaacaaaacaagcacacaaccagagacacgcacacgcatatagagagagagagagagagagagaagaagaagaaggaagcagaggaagaagaaggaggagatcttgagagatcaggtcgcaactgatcatggggagagaagttacaggaatgcaagttgtggacaagaagccaaatggcgtaataccagcttcaaatggtagttctaatgataaagtgtgcatttctcctaaaaggacagcagctaaggttcaggcgaaggatcacgaggtaaatgaatgtaccaaagctaactcttttgttgaaaaaagccaagagaagatggatggtttgagtgccaaagcaacaaactgtaatactggcttgcctgaggaggagattgagatatctgaagtgcagaaaatgggtgacagtaaaaagttaagcccgcctgctgcaagaaaagagcatactagtcaccttgttacacatccatctgatttggttactgaaaagcatggatcccacacacagattgttgatgctgaagctgatgcaactggtctgaacttatcaccaaacactaacaacatgctctcacctatctcatcaaagaattcacagccaaactctcctttttcatcaagaaagactttgcaacatgacaagaagaactatgatgatgaagataattggtctgtcgcctcctctgctatgtctatgcgcacagctagatctaaggtaactcatggttcagcccctacatttagatgctccgaacgtgcagagaaacgtagggagttttatctgaagttggaggagaaacaccgagctcttcgagaagagaaaaaccagtatgaggcgaggtttaaggaagaacaagaggcagccatcaagcagttgagaaagaacttggtaattaaagcaaatccagtaccaagtttctactatgaagcgcctccccctaagactgaactaaagaagctgccactgactcggccaaaatcaccaaagctaagtcggagaaggagccttggggatgctctgaacccatctcctgaagtttgtagtcgagggcgtcacagcactggaggtgtaggtcacaccaagggtggttccaatgcctctttccctcacaaaaacaacattcgacgcaacagcaatggcgtttgcaaacctaaagaacgaacaaaagaggataaggaaacaaaaacggctcctcctaagatcaccgaccacgcaaatgcagacattccagttcaatcatgtccgttgagaccgaaatagccttcatcacttcattttcatggggactgacttttgtgacttgcaatggtgtatatgttttgtaacttataatattgctacacggtatctcttcctattatataatgagagttattgatgtaatatgatgatgattatgatgtttcccagactagtcccataaattagctgctttctgcaggagcattagggttcttattatacggatttttctatggtgctaaaattgggtgtgttttgcgtgttcttatcatgtgattatgatatgcacctttgtttttccac

SEQ ID NO: 10422 - DNA, 520 bp, Glycine max
  Clone ID: 700908337_FLI
gccaactagaggaccctaagactcagagatcaggctggcagcttgtatttgttgaccgggagaatgatgttcttcttcttggtgatgatccttggcaggagtttgtgaacaatgtgtggtacataaaaatactatctccactagaagtgcaacaaatgggcaaaggtcttagtccttctacttctgccccaggtaacaaactttctactcctgccaactcttgtgataattatgtgagtcaacaagagttgagaagttcgagaaatggcatggcatcaatgggatcttttcactactaggacactctcccatgtaaggaaatattagttgagaaattatggtggcagaattttatgttacaagttttcttatgtatggattggcccagcattcttgtacacattaatggttgacatgtagtgattttgcaaggtctaaatagatcaacagcaaatgactgtaaattataataggtggccttttttctgtaatggttagttgcttatagcagttattaatt

SEQ ID NO: 10423 - DNA, 1753 bp, Glycine max
  Clone ID: 700908340_FLI
gcaaaatgaaaggcagtggaaatgtgccaaaacaagtggcactgtgatttgtgaccacaacaaatgcatagttcattttatggttcagaccaatcaacccgtagactccttataagtgcgcagaagttcaagtgtagagaatgagtcagcctaagattaaacgccgagttggtaaatacgaggtggggaggaccattggtgaaggtacatttgcaaaggtgaaatttgcaaggaactctgagacaggagagcccgtggctcttaaaattcttgacaaggagaaggtgctaaagcacaagatggctgagcagatcaggagagaagtagctacaatgaaactaatcaagcatccaaatgttgttcgattgtatgaggtcatgggaagcaagaccaaaatatatattgttttggagtttgtaactgggggggaactctttgacaaaattgtaaaccatggaaggatgagtgaaaatgaagcacgtagatatttccagcagcttataaatgctgttgattattgccatagcaggggtgtctaccacagagacctgaagccagaaaatttgctattagatacttatgggaaccttaaagtttctgattttggtttgagtgccctctcccagcaagttagggatgatggacttcttcatactacatgtggcactccaaattatgttgctcctgaggtccttaacgatagaggctatgatggggcaactgcagacttgtggtcatgtggggttattctctttgtattggttgcaggttacttgcctttcgacgaccctaatcttatgaacctgtataaaaagatctcagctgctgaatttacttgccccccatggctttctttcactgccaggaaattgattacacgaatcttggatccagatcccaccactcgtatcactatacctgagattttggatgatgaatggtttaagaaagaatataagcctcccatttttgaggagaatggggaaatcaacctcgatgatgttgaagctgtctttaaagactctgaagagcaccatgtgacagagaaaaaagaagagcagcctacagccatgaatgcatttgagttaatctccatgtccaaaggactgaaccttgaaaacttgtttgatactgagcagggatttaaaagggaaacaagattcacctcaaaatcccctgcggatgagataatcaacaagattgaggaagccgcaaaacctcttggctttgatgtgcagaagaaaaattacaagatgaggcttgcaaatgtgaaagctggaaggaagggaaaccttaatgttgccacagagatatttcaagtggcaccttctcttcacatggtagaggtacggaaggcaaaaggagatacattggagttccataagttctacaagaaactttcaacaagcctggatgatgttgtttggaaaacagaagatgatatgcaaatgcgagaaacaaagtgatgtggatattattatcattgtctattaagtgtaattttcttcgtgtctgaggttttactattttccaatttcttcattcgttatattcctcccccgtaggtttgtttggacattaattacatagtactcatttattgcataccatgctattattttttgaaagcatgcagagttcatgtaagaattttactcatccaacagtcgcggttatgttcatgaaacaaaaaattgtaagaaatttgtatattgtatatatctatctatttatatcttttcaatttgttgtt

SEQ ID NO: 10424 - DNA, 1487 bp, Glycine max
  Clone ID: 700908343_FLI
cgccctccaagcataaaatttgcaggattagacatttccagcaacacttgaagttgtcaatcaatggccatgaagccctcaacttccacaagtgggtctggcaagaagattagaaagccttatactattaccaaatctagggagagctggtctgaggaagagcacgacaagtttctcgaagctcttcaactatttgacagagattggaagaaaattgaagattttgttggttcaaaatcagttattcagattagaagtcatgcccagaagtacttcttgaaagttcaaaagagcgggacagtagcacatgtgcctcctcctcggcctaagcgcaaagcttctcatccttatccacaaaaggcatccaaaaatgttttgttgccaatgccagcttccatggtttatgtttcttccactagtacccttccaccagggtatgtcacatgggatgaaaattccttgctcatgaattctggatccaacaaatcagtgccttgtaaggatgagctcgccaatcttcttggaaatgaaggcacgcacacttcttttagttcttatatttgttggttcaattgcttgtttgatatgaagagtctgtgatggctgtactaaatggaacttttccaccacttaattatgttatatgacgttactgattcagctgatattggatcaaaggggataacacgaattgaccacagcagtcttagtggtgttgggaactctactagaaatctgcctgctactgagatgccaaaacaagggaaacaggctcaggttattcatggtttgccagattttgctgatgtttacagcttcattggaagtgtttttgatccagacacagaaggccatgtccagaagctgaaggaaatggatcctataaattttgaaactgttttgttgttaatgaaaaacctcactgtcaatttgtctagtcctgactttgagcccgttagggaggtcatgtcatcatacgatgtccatacaaaaacagtaggagttaccgcaggaattgacgtcaagaagcagacaaatgatctatcatgtcaaacagcttgacaaccattaattgaacttattatcaaatttggatggaagaccgaggttttgcccaaccagcagcattagcaatgcattcacattaactcgttgtgaaacttgaaaatgcaaccaaaccatcagcctatgtaaccacaaccaggagagtttgttttaatggaagtgctagcaaagccaaaaatatattcatcgggtaattctaaggtgcacaaggttttgtagtattgcagtgattctagtacttatttatggaatgtggttttcaagtagacacatgggtctaactgtaagataagtttgatggctcaggtgtattaattggagaggtggggggctagtcatagtagcttatatcaatgtggcctaactttcaatgtaaatcataaagagcatcataacaggaagtggtcccaatttctaattct

SEQ ID NO: 10425 - DNA, 1389 bp, Glycine max
  Clone ID: 700908442_FLI
gtaagcaactgcttaatttattgatcaaacgtacagctcctaattttcaagtatttttctttctcttcttgaagaattaagaagaaagtttttgtagttaatttttctccaaaggaaggaaaaggaagcaattatcaaggaggggactacggaaatagaaatggaaggaactcgtgcaaaagagggaaccctaccaccgggatttcgatttcaccctactgatgaagaacttgtcacttgctatctcgtaaataagatatcagattctaattttacaggcagagcaataactgatgttgatctcaacaaatgtgagccatgggagcttccagggaaagcaaagatgggagaaaaagaatggtacttcttcagtctgagagaccgtaaatacccaacgggtgtgagaacaaatcgagcaactaacaccgggtattggaagaccacagggaaagacaaggagatcttcaacagtgaaacatcggagttgattggcatgaagaagactttagttttctacaaaggcagagctcccagaggagaaaaaagcaactgggtcatgcatgaataccgcattcactcaaaatccagctatagaactaacaggcaggatgaatgggtggtttgccgggtattcaagaagagcggtggtgcaaagaagtaccattcctccaaccatgcaagaacagtgaatccatacagcttggaaattggaccaagtatcatgccaccaccaatgatgcaactgggagatcctagtgctcatttcctttatggaagaaactacatgaacagtgctgagttagctgaacttgctagggttttaagagggggtggatcaaccagtagtgtcaacctcccaattcagtctcagttgagctaccctacatcatcatcagctggaggaggaggattcatcatttcagggctcaatttgaaccttggaggaggagcaacagccacaacacaacccattttaaggccaatgcaaccttctcctcctgtccatacaatggcccaagtacttgatgtgaattccagcatgatgacaaccagttctcttggtgctgagaataatgttggttatggaacagaagtgagtaacaatatgaattctcatgggaataggtatatgggcatggaccaccattgcatggatcttgacaactattggccttcctactaaattatgatgagagatttttatttagttaattaggcataatctattactatatatttagctttagttggatcagctaccataaaattgaagttctgctattttcttgtgtttcgaagttttatgccggaaaatgacgaccggtatggtattctagtgatcgtgtaccttttcaatccaataatattttaaatgtttgtttatcgatt

SEQ ID NO: 10426 - DNA, 693 bp, Glycine max
  Clone ID: 700908449_FLI
attgggtgatggtaacaaaaatataactgtccaaaatgtgaactgtggacctggtcatggcattagtgttggaagccttgggaggtacgataatgaagaggccgttgaaggtcttctagttaagaattgcactttgaacaatacagataacggtctgaggattaagacttggcctagcacgccattaacaattacagttactgatatgcattttgaagatattaccatggaaaatgtttcgaaccctgtgatcatagaccaagagtattgtccatggaaccagtgctccaaaaagaatccgtcaaaaatcaagataagcaaggtttccttcaaaaacattaagggcacttcaggaactaaagaaggagtgatttttatttgtagtagtgttgcaccatgtgagggtgtagagatgactgatgttgatctcacattcaatggagctgcaacaacagctaaatgtgctaacgtcaagcccgtaataacaggaaaagctcctacttgtgcagcctagaatgagcaactacaataatgcccatttttttaacaatgttcttatggttttttcctttcttgagttagcaagccatccccattaaaagaggagatgtctagctagtaattgtattcccttgtaaataaatacttcaacgcaactattcaataacaaaggacgtcttctttatttatatt

SEQ ID NO: 10427 - DNA, 2532 bp, Glycine max
  Clone ID: 700908603_FLI
caggtcccaaccaggaaaaatggttctgtcggatgccgttaattttgctcggaatttcgcagttatggtcagagttcgtggccctgacccaaaagggttgaagatgagaaatcacgcttttcatcaataccgttctggtgaaacaaccctttcagcttcgggggtatttgtacctgatactctttgtgattctcaagtagctacgcgtcttaatggtgataactgtgaggatagggtattggttgtaacggttgcttcagttgttgagccttttctgtcacctcaacagagagacaatattcctcagggtaggccagacttgattgccggtgttcagattgatgttatgaccgaggaaaccaatgaaaaatccaatcggggaactccttgttggcttttggcacagcttttgtcattagttgatattcctgcttcatcgaattgtctccagtcacttattgaagcgtctttgggcttgccagagcatgaatgggaggttggttggtctttggcatcttacaataatgattctcaaccttccaaagatttttttcaaactcatcctcgggaaagattggctgcgggaggatctggcagtgcaagtcttgtgtacaaatcacttactcgaatggcaattcttagtgtttctttatctttcagggacttgctggatagtaaagtatctgccatgaataaaagaggtgattttcttctggcagttggatctccttttggagtcctgtcacctatgcacttttttaacagcatctctgtaggatgcattgcaaactgctatcctcctcattcatctgatggatcgttgctgatggctgacatacgctgtcttcctggtgtgagccatttctctgttgcataatccattggtcatttatggaagtggttctggctctattttgacactctatctaccaggaatggaaggcagtccagttttcagtgagcatgcatgtcttattggtgtcctgatcagaccattcagacagaaggcgtatggagcggaaatccagctggtgattccatgggatgccattgtgactgcttctagtggcttgctgcacaagaggcctcagaacacacagaaaggtttatgtaatcaggagggcaacctttatgctgcaggaagtgtacctttttctgacactgacaaattagatgtttgctctaggaataaacacgagcatttatattttggtagctcgtcaccattaccaattgagaaggcaatgacttctgtctgtcttgttactattggtgatggagtatgggcatctggtgttttactaaatagtcaaggtctcatacttacaaatgctcatctgttggaaccatggagattcgggaaagaacatgtaaatggaggaggatatggaactaattcagaaaagatttcttccatgttggagggaactgcatatgttgttaacagagttgagagcaatcaagttagtcaaacttcaccgttgaagatgccaattctttatcctttcgctgcgaatgagcaggggggatataagtcgagtccaacttatgacaaccatagaaacatacgtgtacgtcttgatcatatcaaatcttgggtttggtgtgatgcaaaagtagtgtatgtttgtaaaggaccatgggatgttgccttactgcagcttgaatctgttccagatgatcttttgcctataacaatgaatttttctaggccatccacaggatcacaggcatttgtcattggccatggattatttggcccaaagcacggattcttcccatctgtttgctctggtgtggtagcaaaagtggttgaggcaaagactcctcaatcttatctgtccgttcagccagaacatctccacaaccatgagcacttcccagcaatgcttgaaacaacagctgctattcatcctggtgctagtggtggtgctattatcaattcagatggtcacatgattggcctggttacaagcaatgcaaggcatagtggaggagcaataatacctcaacttaattttagcattccatctgctgctttggcacccatcgtcaacttctcaaaagccatggaggatttatcacttctacggattctagacgaaccgaacgaatacctttcatctgtatgggcattgatgcggccatcatatcctaatccccatcctatgcatgatccacctcagtcggttacagacaataaaagtaaagagaagggttctcggtttgctaagtttattgctgaaagaaaggacattttcaatgctggaaagagtggagtgatttctaaggaagttattgctagtaagttatgatctctgatgaagtgacaaagtttacctaaatgaccatggcaaagctttgccaacatacaacttgtcaatgactacacttccgttgattaaaatctttggactgaaatcttctgccctagattgttagccaaagaaaatcaaggaaataaattttctagaatctctaaacgattatactagtacttaattaaagtttaaaactgattttacataagac

SEQ ID NO: 10428 - DNA, 894 bp, Glycine max
  Clone ID: 700908638_FLI
tgcaagtgaaaccaccccttctcagaaaaaggctagagggcgccctcctggctctggaaggaagcaacagctagctgctttaggtgaatggatgaatagttcagcagggttggccttttcacctcatgttatcactattggagttggggaggacattgtggcaaaattattgtcattatcacagcagagaccaagggctctgtgtatcatgtcgggcactgggacagtatcttcagtcactctgcggcagcctgcttctaccaatgccagtgtaacttttgagggacgattccaaatactatgcttgtctggttcttacttggttgccgaagatggtggacccttgaatagaactggtggcattagtgtttcactctctagccctgatggccatgttattggtggtggtgttgctgtgcttattgctggaagccccgtgcaggtgatgttgtgcagttttgtttatggcggctcaaagaccatgtctaaacaagcaaccactctcaaagatgaaagttcagagccacctcctcagcataacgacaagttagcttctccagccagtgctcctgctccacctggtcaaaacttcctccctctttctgcagcaaacctttggcctggatcccgaccagcagagctgaaaagcgcacacatgcatactggcatcgacttaactcatgggtgagatattatttcggaagaaacatttgcaaatttgtaaataactgttgtagtaaatgagcttgagtttgtgagcattgtggctgctttgcactaacatatgttataacaaatgaattattcggggttaagtgatgattcttggcaaaaaaaaaaaaaaaggggcggccagccgacttagtgatcgctcgtcgaccccgaggaatttat

SEQ ID NO: 10429 - DNA, 1025 bp, Glycine max
  Clone ID: 700908643_FLI
tgttctccttctcagaaatcaagagcctcactggggatctcaaggatcaaattgggccaaacatgttcaagggtgtgctaccgaacaatcacctgattgcagttaaagacctgaatgcatccatagaagaaaggaagttccggagtgctgttatgaagttgggcaacatccaccacaagaaccttgtgaagctggaaggttattgttgcgagtttaaccatagatttttggtgtatgaatatgtcaaaatcggttcactgcataaatacataaatgattgtaccctttgcaagaggctaacttggagaaagagaattgaaatatgctcaagtgtggcaaaggccatttgttatttgcacactggatgtagggagttcgtgagccatggaaatttaaaatgtgagaatgtcatgttggatgaaaattcagtggccaaggtgtgtgaatatgggtttgcaatagcggatggtgaggccacatatcgtggcttttcagctgagaaggatgtgggggattttggaaagttagcgttaacgttgttcacagggtgtctagttcatgagcaactttatgagtgggcttatacagaatggatggaaggtagggcagttaatgttgttgataaaagacttgatggtgttgtcaattcagaggaactggagcgtgcgttaagaatctcattctggtgccttcaaatggatgaacgtagaagaccttctatggaggaggtagtgagagtactagatggtacattgaacgttgatccaccaccgccgccatttgtcttgcacaggccgttacaggaagatgatccacaagaaaatggttcagattaagggtttcagtagtgtttatttatgccagctgaatttttaggaacttttttcatttatttcactttttcagtctccttcatattcaacttgtatagtagaataggactaacatcttagtaaaaagttagccatgcgctatattttttgcccctcaactaaacctatatgacgatgtgagccagtgactgt

SEQ ID NO: 10430 - DNA, 1471 bp, Glycine max
  Clone ID: 700908654_FLI
caacatttcacgcttcctctgtttgctcgcacacgtcgtttttttctttttgttgcttcggagccaactcaacaacaacgccgtgcctaatccttaagaataacgaattacaacaaccaaccatgttgcattgtctcaacacttcctgttcggacatcacagtcttggaaagacaacgggaagcaaccatcaagtgccagaaccaccaaccaccctacttaacggactttaacgccgtcttcccttcttcttcttcttcttcttcttcttcctcttcttcttctcatagtcagggcttgctcatgatgtgctcggattcctcgctcggccaggtcctaactcactccgtcaaacccgatccgggcgtctggcccgaattcggttttctacccgccatttcgagaacttgtagcagagacggagacttggtttcgcccaaggaaaacatggccagtgggaaagaaaatgctaagaagagaaagcctcagaactccaaggttgttgcggagattgataataacaaggacaaggacaagagagtcaaagtaactggcgaggaaggagaatccaaagtaaccgagcaccataccagaaacaagaatgccaaatccaacgcaaataagaacaacagagaaacctctgcggacacttccaaaggctccgaggttcaaaatcagaaaccagactacattcatgtccgagcgcgtcgtggacaagccacggatagtcatagcttagctgaaagagtaaggagggagaagattagcgagagaatgaagtatttgcaagatttaataccgggttgcaacaaagttgcagggaaagctggaatgcttgatgaaattattaactatgttcagtctcttcaacgccaagttgagttcttgtcaatgaaattagcggctgtaaacccaaggcttgacttcaacattgacgaactgtttgccaaagaggtgtttccttcttgtgctcaaagttttccaaacatagggattccctcagatatgagtattagtaacaacccttcgtatcttcagttcaattcagcgcagcaacttgtatcgtgctgtggtggattaataaacagcatgggaataagccctcccaacatgggactccgaacgaacattattagtactagcactgtacctttgcccgaaacttttcttgactcttcctgtttcgctcaaattctaccctcctcaaattgggaaggtggtgatttccaaagcctttacaacgttgcttttgatcaagggcgaacagcatcttttccccctcagccatttacaggtctagttgaagctagcaatctaaaaatggagatgtaaaccagataatccattattacaatatgttggattaggtcactcggaatgcctttgtcaagattttttttctattagagtacatcgcatatattggttgtatactgctccgtagaataaataagatcatattaatacctgtt

SEQ ID NO: 10431 - DNA, 963 bp, Glycine max
  Clone ID: 700908719_FLI
ggaaaattcaacctccatggagttttgggagagattgttgaactgataaaaccaatagcatccgtgaaaaagttacctatcaccttaattctgtctcctgatctgcctactcatgccattggtgatgaaaagcggcttacacaaactcttttgaatgtcgtgggtaatgctgtcaaattcactaaggagggctatgtttctgtaagagtatcagttgcaaaaccagaatcttcacaggattggcgacctccagagttttatccagcatctagtgatggccatttctacattcgagtccaggttaaggactctggatgtgggattctcccacaagatattccgcatctctttaccaagtttgcccagtctcggagtggaccagctcgacctagcagtggtgcaggtcttgggcttgccatttgtaaaagatttgtaaacctcatgggaggccacatatggattgagagtgagggccttgacaaaggaagcacagctacatttatagtcaaacttgggatttgtggcaatccagatccatccgatcatcaagctgcaaacagaagccaagcatatagtggaagtggtggcctcgctagatttaaacccttcatcacagatgaaaacgacactggtttttctactagacgcaatcaaagaagtttctaatatccaagacaccaaaattgcatacctctcaatcacagtcgacaagatggagtaaacctcctactttcattttgcatgtgctaaattgtataatttgcagtttgcggctgtagaataggattactatgtcaggcatatttctaacaaacaggttttatgcgaactcctgttgtattaactagaatacaatacaacaaaacaaagttgagagacgatctgttacttaatttgacttgtagtatatattgtcagtggcttttgccgtttagcgttcataaaaatgacagtattggcatg

SEQ ID NO: 10432 - DNA, 872 bp, Glycine max
  Clone ID: 700908741_FLI
gcaggatgccgctgatgctgctagaagtgctatggttagtgtgataggactggactcagagaaggtccaacaattgtgtgatgcagccaatcaggaagttcctgaagctgagaaggttcagattgccaattacctgtgcccaggaaactatgctgtctctgggggattaaaaggagttgaagtgctagaatccaaggcaaagtctttcaaggctcgaatgacggtgcgcctagctgttgctggtgctttccacactagttttatggaaccagctgtgtcaagattggaagcagcattggcaacaacagaaatcagaaccccaagaataccagtcatctccaatgtgaatgcacagccacatacagatcctaacacaataaagaagatattggcacgccaggttacttcacctgttcaatgggaaacaacagtgaagactcttctaaccaagggtctgaagaaaagctatgaactgggacccggaaaggttattgctggaatcgtcaaaagaatggacaaaggtgctgatattgaaaatatcggtgcttaatgtggggaccttgctccttcttcgggttggaatgaacaaaactaaattgtgttagctataaatcaggatgcgtggaacttgaagctttgaaagcaaggagcagctacagtcatatttgaatgccagttttgaagttaaaatgttaaattataattcacgagttagataagtgattgtacttggcactagaattttttagtttttctaatcttatattcaatctgtctcggagttaattatgcctatgcttctttgtaccaaatatagcttttggcctttacacaggcttaataataattagaagaaacaacactttccattc

SEQ ID NO: 10433 - DNA, 1105 bp, Glycine max
  Clone ID: 700908801_FLI
caaacactaacaacaatgctgataaaaaacaaaatgcggcctaggtcaagtacatattgcgtggggatgacaaccggacaacgctcatgataaaaaatattcccaataagtatacttcaaagatgcttcttgttgccatagatgagcaatgtcgaggaacttatgattttctgtatttgccaattgatttcaagaacaaatgtaatgttggctatgcattcatcaatatgattgatcctggacaaattattccattccaccaggcttttcatgggaaaaaatgggagaaattcaacagtgaaaaggtagcggtactcgcctatgcccgaattcaaggaaaatctgctcttattgctcattttcagaattcaagcctaatgaatgaagataaacgttgccgccccattctcttccatacagatggcccaaatgctggtgatccggagcctttccccttgggtaacaatattagagtgaggcctggaaaaattcgcatgaatggtaatgaggagaatggcagccaagggaatccttcatctttggcaagtggagaagagtctgggaatggaacagaatctacatcgagctcttcaaaaagttctgactgatttagcatcatgatctaacagttcaatgtgcatgtgatgtcatctccaagactgtatatttacattttctttttgttcgatcgagcgagagaggagttggagccggtaggaaagggggctcacaatttttttcctatagaggagccttgcaagagtttttggaagttgaagtacataaccaagaatgaagtaactgattctattgttttccgttattttcctaaaattttgcatggagtactgctaccatcttaccactttagagaatagcttaactgaagcttaaaattttggctagctgtgaacggggacaatgtgacactttgcagtttccttgagataatgtgcatcattgcggttttcaagggttctttgctgattttgttttcatggttatctttgttattcatatgtaattttgtttccttatattccttatattgctgatttattgtccatatactttattgattagaaaaaatgcttaattcagcctt

SEQ ID NO: 10434 - DNA, 1771 bp, Glycine max
  Clone ID: 700908878_FLI
gataattgtaaaaaattggatttgggcgtattgttttgttattagttatggttcaatttcaatgacatagtaaattgtctgtttttgttagatgggattccaatttgctggcaaagctgtttactctgcggtatggatagctgccttttcactgtttatggaattgctgggcttctctacccagaaatgggttactgcaggaggtcttgggacagttttgttgacccttgctggtcgtgagatatttacaaacttcctttcaagtgtgatgattcatgcaacccgaccttttgtggttaatgaatggattcaaacaaagattgaaggatatgaggtttctggtacagtcgagcatgttggctggtggtcaccaacaattattagaggtgaagatcgtgaagctgttcacattccaaaccacaaatttacagtgaatgttgtgcggaaccttagtcaaaaaacacattggcgaatcaaaacccatctagcaattagtcatttggatgtaaataagattaataacattgttgccgacatgaggaaagtattagccaaaaatcctcaagttgagcagcagaggttgcacaggagagtgtttttggacaacataaatcctgaaaatcaggcacttttgattctggtgtcttgttttgttaagacctcacattttgaagaatatctgtgtgttaaggaagctatactgttagatcttcttagagttattggccatcaccgagcccgacttgccacaccggtccgtaccctgcagaaaatatacagtgatgctgacttggagaacataccatttgcagattcgacatttggtcatggtgctgggacagtacctcaccgtccattattagtgattgaaccatcttacaagatcaatggagatgataagaaaagtcgagctgcacggccagctgttgatcaagataacaagacagctacgcaaaccaaagttgacaccaagacacacaacgtggctagaggaacccaggatgacactgagggggataacaaagttttgacacctaactctgatgcaaatggaaactctaagacagttgtgacacccaaacctgatcctgaagtgggtgaaaacaagccattgaaatcagattcaaacaaggagaacgtggaggtgccagaatctccttctaaatccaaagttactggtttggtagtggataattcagcccagaaggacgtagatgtcaaacaatccaaggttcagatcactaaaaacataaagccaaatattgactctgacaatgtagtgtcctcctcaactaacaatgctgacaaaattggtggatttaatacgaatatgccaatgaaacagcaaggggaaaagaaacctgctgcacaggctcatgcatccaggactgttctggaagagaatatagttctaggtgttgcattggagggatcaaagagaacacttcccattgatgaggagattgacaatgtgacatgtcgagaggcaaaggaaatggctgctttgcagggtggaaatggatctccaaaggcttcagatggaaatgacaagtagttattaaagcagtgagttcaacttgtttgaaagctcaatgttccaagtccagtagtacactgctttgaaccagtttcccacccctaggaagttgtatatattatcacttcatgtgtcacacaccccttttacaaaggactcgagctgtattgtcatatcatttcattatttttgctgtttcagcaatatatggagaagggctttctccaatttttc

SEQ ID NO: 10435 - DNA, 1388 bp, Glycine max
  Clone ID: 700908902_FLI
gtccaacctacccctttttcttctcccaccaacttcaccgtcttcttcctcgatcatgtctcacttcaagggcaagtaccatgatgagcttattgccaatgctgcttacattggcactcctggaaagggtattcttgctgctgatgagtcaacagggacaattggcaagcgtttggccagcatcagtgtagagaatgttgaatccaacaggcgtgctcttagggagctgcttttcaccgctcccggtgctcttaaatatctcagtggtgtcatcctctttgaggaaactctctaccagagcacagctgcaggcaagccctttgtggaagtcttgaaggaggctggtgtgcttcctggcatcaaggttgacaagggcacagttgagcttgctggcactaatggagaaaccaccactcagggtctagatggccttggtcagcgttgcgccaagtactatgaagccggtgcacgttttgccaagtggcgtgctgtgctgaagattggtcccaacgagccatctgagctggctatccatgagaatgcctatggcttggccagatacgctgtcatatgccaggagaatggcctggttcccattgttgagcctgagatccttgttgatggatctcatgacattcacaagtgtgctgccgtcaccgagcgtgtccttgcagcatgctacaaggctttgaatgatcaccacgtccttcttgagggtaccctattgaagccaaacatggtcacccccggatccaattctgctaaggtttcccctcaggtggttgcggagcacactgttagagcccttcagagaaccgtgcctgctgcagttcctgctatcgttttcttgtctggtgggcagagtgaggaggaggcatccgttaacctcaatgccattaaccaggtcaatggaaagaagccatggtcactctctttctcctttggaagggcacttcaacagagcacccttaaggcatggagtggaaaagaggagaatgtgaagaaggctcaggaagcccttttggtaagagccaaggccaactcagaggcaactctgggaacctacaagggtaactcaaagcttgctgatggtgcctcagagagcctccatgttgaggactacaagtactgatcaatctaagtgcgggtaggaatcggtattttatgggtacaaccgaattttcttgttaatgagtattgtgcttcgactcttcccagaataataatcgtttggaattttgctttttgtttttcctagtgttccttcatatcaattttagtaattcggtgtattggtcaaacctgtgcaaacaggggaggggatgtaactttgttttcttgatagacaccaccaccttgctgttaacgaggctttgtgtttattttgc

SEQ ID NO: 10436 - DNA, 1401 bp, Glycine max
  Clone ID: 700908904_FLI
gagatctttttctgctctttgaagaaagaagggtctttgcttgattttggagatgtctctgctctcagatctcatcaaccttaacctctccgataccaccgagaaggtgatcgcagagtacatatggatcggtggatcaggaatggacctgaggagcaaagcaaggactctcccaggaccagttagcgacccttcagagcttcccaagtggaactatgatggttccagcacaggtcaagctcctggtgaagacagtgaagtgattttatacccacaagccattttcagggatccattcagaaggggtaacaatatcttggttatctgtgatgcctacactcctgctggagaacctattcccactaacaagaggcacgctgctgccaaggttttcagccatcctgatgttgttgctgaagtgccatggtacggtattgaacaagaatacaccttgttgcagaaagatatccaatggcctcttgggtggcctgttggtggtttccctggacctcagggtccatactactgtggtgttggcgctgacaaggcttttggccgtgacattgttgacgcacactacaaagcctgtatttatgctggcatcaacatcagtggaattaatggagaagtgatgcccggtcagtgggaattccaagttggaccttcagttggaatctcagctggtgatgagatttgggcagctcgttacatcttggagaggatcactgagattgctggtgtggtggtttcctttgaccccaagccaattaagggtgattggaatggtgctggtgctcacacaaactacagcaccaagtccatgagagaagatggtggctatgaagtgatcaaagcagcaattgacaagttggggaagaagcacaaggagcacattgctgcttatggagaaggcaacgaacgtcgtttgacaggacgccacgaaaccgctgacatcaacaccttcttatggggagttgcaaaccgtggagcttctgttagggttgggagagacacagagaaagcagggaagggatattttgaggacagaaggccagcttccaacatggacccatacgtggttacttccatgattgcagacacaaccattctgtggaagccatgagcaaaacctgcatgttttctccctttggatggaaaggaacagttatgcttttcttagtaggatttggtctctctctctttttaccttttgattggtactatggttggtgccttgttggttggtgcaactaactggcaagggttgttcattgttttcttctattcctttccctcgttttccgattgttacaatgacaataatttaatggttattatcagtcttgaacaaagaaatgctgattgtgaagtataataataatatatgaaattgtcatgttc

SEQ ID NO: 10437 - DNA, 1252 bp, Glycine max
  Clone ID: 700908972_FLI
cgttgattccatatcgattcgcatttgcgtacacccctgaccccttgatttctctcagttccgttctgcatcatagagtatggccagccacgatcttcgattcttcgagttgaacacaggcgctaagataccttccgttggtttgggaacgtggctcgctgaacctggcgttgttgctcgcgccttggccactgcaataaacgttggatatcggcatatagattgtgcgcaaatttatggcaatgaaaaggagattggtgctgccttgaagaagttatttgctgatggtgtagttaagcgtgaagatatgtttatcacctccaagctatggtgtaatgatcacttgccggaaaatgtcccagaggcatttgataaaactttacaagatttgcaactggactatttggatctctaccttatccattggccagtcagtgcgaaaaacgggaagcttaccaaacctgacatacctagcacatggagagcaatggaggcactctacaattctggcaaggctcaagctataggggtcagcaatttctctgtaaagaagcttcaggatttgttggatgtggcaagtgtgcctccagctgttaaccaagtggaattgcacccttcattacagcagccagaattgcatgctttctgtaaatccaagggagtgcacttatcaggctattcaccactgggaaaaggatacagtgaaagtaatattcttaaaaatccatttctgcacacaactgcagagaagttagggaagactgcagcacaaatagctcttagatggggactacaaatgggccacagtgtgcttcccaagagcacaaatgatgcaaggctcaaggaaaactttgatctctttgattggtccatacctgcagatttgcttgccaacttctctgacattaagcaggagagaatagttactggagatggtttttttagcaagacatctcccgggtacaaaacaattgaagaactctgggatgagtaatggacagtttccatattggccacatccccccctcttgcttaatgcaaaaatgagcctatctttatgattattgtaataatctacgatgtgtttataattttggacttgagatgtgtcaagggagatttcgagtttacattaataacgtgtcattttggaattcagttgtttgagtcttgaccttattgtgtgtttgacaaaactattgttagaagtctaatatcgtttagatcggaaaatgttagttattaatatgtt

SEQ ID NO: 10438 - DNA, 1326 bp, Glycine max
  Clone ID: 700908983_FLI
gttcagagattactagtatttgactacatggccaatggaaatttgagggactgtttagatggagtttctggaaaacatatcgattgggccactcgtgttatgattgcaataggagctgcaaggggcttggagtatctccatgaagcagctgctccaagaattcttcatagagatgtcaaatcaactaacattcttctggatgaaaattggcaagcaaaaataactgatcttggcatggctaaaaacttgagatctgatgacctccccagctgttcaaattctccagcaagaatgcagggaacatttggctattttgcacctgagtatgccattgttggtagagcttctcttgagtcagacgtctttagttttggggtggttcttcttgagcttatcagtggtcgccatcccatccataaatctacaggcaaagaagaaagcctcgttatatgggctacacctcgcttccaggatagtaggcgagtaataacggagttggttgatccccaattgaaaggaaacttcccagaagaagaggtgcaggtaatggcatacttagcaaaggagtgtttgctgctggatcccgacactcgaccaaccatgagcgaggttgttcagattctttcgagtatttccccgggaaaatctaggaggagaagaaacattccagccagcctctttcaggaaccagaagatgcacaaaagcaaaggcaagctccacctagtaaatttccaacacatagttcaatgccaatatataatgatcacaatctttctgttgagaacaaaaataaagcagaagatgcactttcagctgagtatatggagagtttgatcctcttgacttcgaaatctgatggctcttgtgcatcagaagaggaaatagtagacctgactgagcctaggtttgaatcattttgcatcacaaatggcaatgtcccatgaaaacataagaccaggcacgggcagatgtgcagatggcagaaatctgaggagtttatgttgtgtgaactggtgatacacctctgttgcttgttctaccaccggttactgtacatggctgcattgagatatcataagagatgctgcaattattttgttttaagattatcttggtctacatgttttctttttccttgttttgaaagcaaaagcacataggtgttgttagatgagcactgaaaagtattcgtttgtttcttgtacagaaaagcataggatgatataggagattctggttcttctttatttggagaggaactggatgacatacacattaaattaaaggttttggtcacagaaataattgtcttacaattatgtttg

SEQ ID NO: 10439 - DNA, 1131 bp, Glycine max
  Clone ID: 700909008_FLI
ggccggtgtcgaaaagtttgtacagaaggatcaaccgggtagtagcagagctcttgtggctggagcttgtatggcttattgattggtgggcaggagttaaggtccaaatattcacagatcatgaaacctttcgtttaatgggtaaagagcatgcacttgtgataagcaatcacagaagtgatattgattggcttgttggatgggtttcagctcagcgttcaggttgtcttggcagcactctagctgtgatgaagaaatcttcaaagtttctgccggtcattggctggtcaatgtggttttctgagtatctttttctggagagaagttgggccaaggatgaaagcacattaaagtcaggcatccagcgactgagtgatttccctcttcccttttggctagctctctttgtagaaggaacgcgttttacacaggccaaactattagctgctcaggaatatgccacttccactggattgcctgttcctagaaatgttttgattccaagaactaagggttttgtttctgcagtaagtcatatgcgctcatttgttcctgccatttatgatgtaacagtagccatccctaagagttcccctgctcctacaatgctaagactcttcaagggacaaccttcagtggtgcatgttcatatcaagaggcatttgatgaaggaactgccagatacagatgaggctgttgctcaatggtgtcgagatatatttgtggccaaggatgctttgttagacaaacatatggctgagggtacttttagtgatcaagagctgcaggatactggtcgaccaataaagtctcttctggtagttatatcttgggcgtgtctggttgttgcggggtctgtaaagttcctgcaatggtcttcgttactctcttcctggaagggtgttgcattttcagcttttggtttggcagttgttactgcacttatgcaaattctgattcaattctcacagtcagagcgttcaaacccggccaagatcgtgcctgcaaagtcaaaaaacaaggggtcttgatttatttggcgaacttaaagttgcatttatgtgtgatgagtgactcatgtaatactcattattttgctttcaacatcttatcatagtatgcttctattct

SEQ ID NO: 10440 - DNA, 1386 bp, Glycine max
  Clone ID: 700909018_FLI
ggatattctgaaatcccatccaatcgaaggctgtgaagtgtgtgatgcactctatccttctttctcttgaacccataattccatgactcggcgttgctcccactgcagcaacaacggccacaattcccggacatgcccttcgcgtgggggcggaggtgtgaagcttttcggggtcaggctgacggatggatcaatcattaagaagagcgccagcatgggcaacctaaacctctcctccgccgccgcacatcaccaattccattcatctccttcttcttccaacctcgccgccgccccctcatcccccaatccaagctccccatgctccgaccctccccaaggttacttgtccgatgaccccgcccatgtctccaccttcgctaaccgccgcggtgatagaaaaaaaggtgttccatggactgaagaagaacatcggctgttcttaattggtctccagaagctaggcaaaggagactggcgtgggatagcacgcaattttgttgtatcaaggacccctactcaagtagcaagtcatgcccagaagtattttatccggcagagtcatgctaccaggagaaagagacgttccagtctttttgacatggttccagatatgtcttcagatcaaccttctgtgccagaagaacaagtgttgcttccaccttcccagaactcacaaccttgcaatggaaaatcacagccttcattaaatctctccctcaaatcagaatttgaacccatggagactacttctcaagaaaatgcgcaacagaccaatgaaactatgatgggatcaatcggactgacaccaatggctcctcatggattctttcctgcatatttacctgttccatttcccatgtggccatcaactgtggctcccccgtttgaagaagttaagggaggagagacatcccaccatcagatccacaagccaatcccagtcattcccaaggaacctgttaatgttgacgaacttgtgggaatgtctcatctaagcattggggaagcaaaggtacgtgatagagagccttcccctctttccttaaagttgttaggagagccctcaaggcagtcagcattccatgcaaatgctccagttggtacttcggatttaaacaatggcaaggacaacgcaattcaagctgtctgagcttgtaaggtccggtgaagacagcagcagaattaagccttcttttggtcatttttcatttgtactatcatatataattttgttttcctgatccctagcattttaatcttccaattagtagcaagttatatggtggtacgtagatcaggttagatcaattcttggaaaatacttattctaactgtaaacaaatgaagcttaaataaagaggttctgttcctctaggtttggtt

SEQ ID NO: 10441 - DNA, 1038 bp, Glycine max
  Clone ID: 700909044_FLI
gttcatctgcacttgtagtggaaaagaactttttcttaatttggtgatggaatatgttccagactcgatacatagactctggaacatattccatcaccaaattaagaaaaagttccagagtctatgtatcgagtctcaaagttctatagtaatactaatcagagcatgccacttatttatgtaaaactttacatgcaccagattttcagggggctggcttatatccacactgttcctggaggttgccacaaagatttgaagcctcaaaatatactggttgaccctcttacacaccaggttaagatatgtgattttggaagtgcaaaagtgctggtcaaaggtgaagctaatatatcacatatatgttcacttttctaccgggcaccagaacttatgtttggtgccactgagtatactacttcaattgatatttggtcagctggctgtgtccttgctgagctgcttttgggccaggttactcaaatgaagcaggagcatgacaagaggcaagcaagcctcatagctgaacacaacgaacagctaaagcgtacccaactgcaagctgaaaatgaattgagagagaaaacaatgtttatgaggaatgatcatgaagctcagatcaaagcattgaggtgtgaacttgaagatgagtgtcggaagctggaagaggagttgcatcttcaaaaaatccaaagaagacaggcaaagggctttgttgcagttgcagtggaaagtgatgagtgacaagcctaaagaggaccaagaagtgaattcaaaacaggttgacttgtgtttgaatctatttgtctgtgtctgtcttcaaatggatgccatatttgctcattttcatgttgggttacctttggtagtttggtttgacatattacatttatcatttggtaggcacagttggggaaatgagaagacatttgttgtatacctaaatgtgcttctttaatattctttcaacacaagcctgagaattgtgaacttaaatacatagaagggtgatgcaaataaaggcccactggttcacat

SEQ ID NO: 10442 - DNA, 1504 bp, Glycine max
  Clone ID: 700909063_FLI
gcatttgctaatggattgcagactattaacaatgatgatttggaggagatccgtgagcttggttctggaacctatggagctgtttatcatgggaaatggaaaggttctgacgttgccattaagagaataaaagccagttgttttgctggaaggccatctgaaagagcaagattgatcacagatttctggaaggaggcgttgatgttgagttcattgcatcatccaaatgttgtctccttttatggcattgttcgtgatggccccgatggttctttagcaacagtcacagagttcatgattaatggatctttgaaacagttcttgcataagaaagatagaacaatagatcgtcgtaagaggctcattatagccatggatgctgcatttgggatggagtatttgcatggaaaaaaacattgttcattttgatttgaaatgtgagaatctattggtcaatatgagagatcctcaacggcctatctgcaagattggtgatttgggtttatcaaaggttaaacagcacactctagtgtctggtggagtacgggggactttgccatggatggctcctgagctacttagtgggaaaagcaatatggtgtcagagaagattgatgtctactcattcggtatagtcatgtgggaattactcacagggaatgaaccctatgctgatatgcattgtgcttcaataataggaggaattgtcaacaactctttacgtcctcaaattccaacatggtgtgatcctgagtggaaatctctaatggaaagttgttgggcttctgatccagtagaaaggccatcattttcagaaatttccaagaagctgaggagtatggctgcttcaatgaatttgaaatagtcaattgatcttgaataagttaattgaccttctcacgttgtatgtagcctagaattggtaaaagggaaataaggtgaagcatggttcttccagttcaaggcaccaacaagcttagctttaaaaagggaaaaaataatttaaaggagtgttcaagcttatccaagcttgtatcgtaatatcatgccttggtttagtctaaaaatgttttttgtaatgttgcctttaatggtattttccttggtgcagttacttgcactatagcatggattctctcccagaagcagcttggtgttctgaagaaagctacatatatcactctggtgatgacaactatagctgtggctttaccatcacaaatgaaccgtgccttctggagagatgtgtacataaaatcaaccaacgacatgcctcctgtgctttcacatgggaaggataatgatgaattgtgcttcccattttgatggaacaaattcaatttatcatcgatattttgtttgaattgctttatcatattgatataccatattcttttttttttttgaaaggagatagaccatattctaaatggcatgatgaatgtgcatacttaaagatgtgtttaagctctcgaagctgtataaataaaggtaatttttccat

SEQ ID NO: 10443 - DNA, 1131 bp, Glycine max
  Clone ID: 700909093_FLI
aaaatcggcactcatgagttattattagggtttgcaacctttaaactctgaagctgcaatagcacagcacagaatggggcgcaaagagaagcagaacgcgaaggcaatagatgaggaacacgacgtagtaaattttaacggcgcttcaacgccgtccctcgttttcagcagcgacgacgatgaagccaaccaagatctcagcctcaagatcgtcgaaaaggccatgcgaatccgcgccgccaaacacgccccaaacgacgacgtttcttctccgttttcgcagaaatccgaactcgcagtgcccctaaacgacgtcgtttcggatttgcccagcgcaatcgctgattccgaagtgacggaaaagaagaaaacggccaagttgaagagggaggcggctggggatcaaagtgttgttatagcggaggagcaagagatggaggagacaagcaatgctacagagaatcacgagtttgtggaaggaagcccggttctgataggccacaatatggttctgcgaaagctgcttcggggtccaaggtattttgatccaccggatagtagttggggagcatgtttcaattgtggtgaggatggtcatgctgctgtgaactgttcagcagcgaagcggaagaaaccatgctatgtttgtggtggtttgggacacaatgcaagacaatgcactaaggcgcaagattgctttatctgcaagaaaggtggtcaccgtgctaaagactgtctggagaagcacacaagtagatcaaaaagtgttgctatttgcttaaagtgtggaaattctgggcatgatatgttttcatgcaggaatgattattcaccagatgatctcaaggaaattcaatgttatgtctgcaagagagttggccatttatgctgtgtcaatactgatgatgcaacaccaggagaaatttcttgttacaaatgtggtcagctgggtcacactggtttggcatgttcaaggttgcgggatgagattacaagtggagccacacccagttcatgcttcaaatgtggtgaagaaggacattttgcccgggagtgcacaagttctatcaagtcagggaagaggaattgggaatcatcccccccaaaaaataaaagaaccccccctccctt

SEQ ID NO: 10444 - DNA, 1495 bp, Glycine max
  Clone ID: 700909103_FLI
acgcagaactgcccaatcttcaagctaacataaacaccatggaagccgtccaagtcatatccaccactacaatcaaggcaccaccgagtcacaataaccatgactcagttcagaaaatcgatttaactccctgggatcttcagttcctcccaattgaaaccattcagaaaggccttctttttcgcaacaaaaaacacacagaaaaccaaatcgagcacctccaacactccctttcatccactctcgccttctttccacccctcgcaggtcgtcttgtcattctccaacaccacgacaacactgtctcgtcccacattgtatgcaacaacgcaggagcactctttgtccacgccgttgcagacaacaccactgtcgttgatattcttcaacccaaatacgttcctcccattgtttactccttctttccgctcaacggagttaaaaaccacgaaggcacgtcacagccagcgttggcagtgcaagtgacggagctacttgacggcgtcttcatcgccttcacaatcaaccacgtggttgcagacggcaagtcattttggcatttcgtgaattcctgggctgaaatctcacgcggtaaccctaaaatatcaaaaatcccttttttcgaacgtttctttcccgttggcattgaccgcgccatacggtttccgttcacaaaggtggaaggaaaagaagaaggagaacactcacaaaaccttgaaccaaaaactctctctgagagggtcttccatttcaccaagcgaaaaatctcggaactgaaatcaaaagcaaacgcagaggccaacacggacaaaatatcttctctgcaggcggttttaactctactttggcgcactgtgagtcgttgcaaacatatggggccacaagaagaggttcattttgttcttctgattggagctagaccaaggcttattccaccactcgcagatgattatttcggaaacgcagcactggttggtcgtgctaccatgaaagcagaagaactattacagaagggtggattcggaaagggtgcttcggagataaacaaggtgatttcttcgcactctcatgagaaggtgaggagctactacgagtattgggtgagaaccccaaggcttttcacgataggtagcctcgctaagaaccccaaggcttttcacgataggtagcctcgctaacagtaactcattggccactagcagttctccaaggttcaacgtttacggcaatgattttgggtggggaaagcccctggcagtaagaagtggcggcgcaaataaaagtagcggaaaaattactctgtttgctggcgctgaagaaggttctattgacattgaagtgtgccttccttatgagattctcgaggcaattggaaatgactctgagctcatggatgccatttccaactagcatggtttggtttatgtatagttgatttcaaattcatgatattgtagtattgagtaacgaataattatgtatgtcttagtttctt

SEQ ID NO: 10445 - DNA, 1296 bp, Glycine max
  Clone ID: 700909108_FLI
acgattgttgcaattgtggttccaattacggtcgctgtgcttatatttatagtcggaatttgtttcttgagtagaagagcaaggaagaagcagcagggttctgtaaaggaaggaaaaactgcgtatgacatccccaccgtggactccttgcaattcgatttcagcacaattgaagcggccacaaacaagttctctgccgataacaagttgggggaaggtggatttggtgaggtttacaagggcactctttcaagtggacaagtagtagctgtcaagagactctccaaaagctctggacaaggtggagaagaatttaagaatgaagtggtggtggttgccaagcttcaacatagaaatttagtcaggcttcttgggttttgcttgcaaggagaagagaagatacttgtttatgaatatgtgcccaacaaaagtctcgactatattctctttgatcctgaaaagcaaagggagttggattgggggagacgttacaagattattggagggattgctcgaggcattcaataccttcatgaagattctaggcttagaattatacatcgtgatcttaaagctagtaacatattgttggatggagatatgaatccgaaaatctcagattttggcatggcaagaatatttggagtcgatcaaactcaaggaaacaccagcagaatagtagggacttatggttacatggctccagagtatgccatgcatggagagttctctgttaagtctgacgtgtacagttttggagtcctgctcatggagattttaagtggcaagaagaatagctctttctatcaaacggatggtgctgaggatctattgagctatgcttggcaactttggaaggatggaacacctttggaactgatggaccccatattaagagaatcctataatcagaatgaagtcatcagaagcatccatattggtttgttgtgtgtccaagaagatccagctgacagacccacaatggcaacaatagttcttatgctagacagtaacactgttactctaccaactcctacgcagcctgcatttttcgtccacagtggaactgatccaaacatgccaaaggagctgccattcgatcaatcaataccaatgtctgtgaatgacatgtcgattagcgaaatggatcctcgataagcttgatcgcttggaggttctaatatgtattattatccatgtacttatttctcctagttttaaatgacgaaaccttggaacactttgtattatagttgcttatttttcaactaaataaaatatatgtattatgcaggt

SEQ ID NO: 10446 - DNA, 1202 bp, Glycine max
  Clone ID: 700909138_FLI
aaagaaacaggctttatttgagcactttgggactctcaattctcagggttaccttctctatcagcttctgcagattagctggaagaaataaagaaagaaaaagataacaaaagttgttcaaaggccatggatgttgcacattttttgtttggaatctttgggaatgcttccgctctgttcctcttcttggctccagtgatcacattcaagaggattataaagaacagatccacagagaagttctcgggcattccatatgtcatgacactgctcaattgtctcctttcagcttggtatggtttgccttttgtgtctccccacaacatattagtgtcaacagtgaatggcactggatcattcattgaaatcatatacgtgttaatcttcatcgtattggcaccaaggaaggagaaggctaaaattcttggtctcttcaccttcgtgctctcggtgttctctgcagttgttttcgtgtccctttttgctcttcatggcaattccagaaagctcttctgtggcttcgctgcagccatattttccattatcatgtatggctcgccactctcaattatgagactagtgatcaaaactaagagtgtggagttcatgcccttcttcttgtcgctgtttgtgtttctctgtggcacttcctggtttatctttggtctgctaggccgtgacccatttgttgcagtacctaatggtgttggttctgctttggggacaatgcaactaatattgtatttcatataccgagacaataaaggtgttccaaggaagcaagccccaacagaggaggagtccatggagatgggggatgcaaagccccaacaagggaagcaatccaatgccaatggaattcaaggatgatatgtcaaggaacatgtttggatcactcgcaacacatgccaaagacaatagtcagctttgtaatttgtaagctacaaagtctgcaactgagagcaagaacctcctctatgatttggtctgctcttgtattagttccataaatggctgtaatttacttcttgctaagacactggcatcttcaattagacggataatattgcacggaaacaagcatgtttgtgtgagtttttagtagctccttcccctggtctcggggattttatgttagtggctttttcgtagtgcacaacctaccaaataaaagtgctaatttgaaattgaaattttcaatt

SEQ ID NO: 10447 - DNA, 878 bp, Glycine max
  Clone ID: 700909142_FLI
aaatagactttgagttcttgggaaacagaaccgggcaaccttatattttgcaaacaaatgtgttcaccggtggcaagggtgacagagaacaaagaatctacctctggtttgaccctacaagagaatatcacagatactcagtgctatggaacatgtaccagattgttttctatgtggatgactacccaataagggtgttcaagaacagcaatgacttgggagtgaagttcccatttaaccaaccaatgaagatatacaacagtttgtggaatgctgatgactgggccacaaggggtggtttggagaaaacagattggtccaaagcccccttcatagcctcctacaagggcttccacattgatggttgtgaggcctcagtgaatgccaagttctgtgacacacaaggcaagaggtggtgggatcaacctgagtttcgtgatcttgatgctgctcagtggcaaaaactctcctgggttcgccagaaatacaccatctacaactactgtgctgaccgcaaacgctaccctcaagtctctccagagtgtgctagagaccgtgatatttaatttgaataacgtgatattaatgcgaagtatctatcagttttactgagtattatcacctctcagccatagaacctaccaagacatataatttaatataagcttccatctcctatttttattaccactaccataaagttcccatctacttaatttcatgaaggccgcacctaagtgctgatacaaaattcaatttggggttattgcttgtattgttgataatttatgtcatcatctattgctgttgttatggtatgtataccagtttgaggtatgtaacaaaagatatggcaatgtgccttaatttgtatctgt

SEQ ID NO: 10448 - DNA, 1572 bp, Glycine max
  Clone ID: 700909222_FLI
atgggagttacacagtgcacaatcgcgcatgcacttgagaagacaaaatatccagattcagatttatattggaagaaatttgaggataaataccacttttcatgccaatttactgctgacctaatagccatgaataatgctgattttatcatcaccagtacataccaggagattgcaggaacgaaaaatactgttggccagtatgagagccacgctggttttactcttcctgggctctatagggttgtccatggcattgatgtttttgatcccaagttcaatattgtctctcctggagctgatatgtcaatatatttcccctactctgaaaagcagaacagacttacagccctgcatggttcaattgaacagctattatttgctcctgagcagactgatgaatacattggtttattgaaagacaagtcaaagcccataattttctccatggcaaggctagacagagtaaaaaacataactggattggtagaaagctttggtaagaacagcaaattgagggaactggtcaaccttgtcatagtagctggttatattgatgtaaagaagtccagtgacagagaagaaattgcagaaattgagaagatgcatgagctcatgaaaaagtataacttagttggtgattttcgttggattgctgcccaaacaaatagggcacgtaatggggagctgtatcgctacatagcagacacacaaggtgctttcgttcagcctgctttctatgaagcttttggacttacagttgtggaggccatgaattgtggactccccacttttgctacttgccatggtggtccggctgagatcattgagcatggtatatcaggattccacattgatccttatcaccctgatcaagcttcacagctattagttgaatttttccaaaagagcaaggaggacccaagccattggaagaaaatatctgatggtggtcttcaaagaatttatgaaaggtacacgtggaagatttattccgaaaggcttatgactttggcgggagtttatagtttctggaaatacgtttccaaattagagaggcgtgaaactcgacgatatcttgagatgttctatatcctcaagttccgtgatttggcaaattctgttccgctagctaaggatgatgcaagttaactagctatataatttcaccaaaggcttgacagcagacataataagagtcatttatgtaaatataatagtctgcttctcgtgttttgaaatctagtgaggcgacctagaggagtttcatggaagacttgtcttgtctatgttaacttcgattatgtaagagatggcgagcactggttgttgaatttggatgtctcttgttttcgtttgattagtagtcatcaatgatatagacctggaaattacctgtgactgaggattgttatccttactgatgggtaagaataaagcattatgaatcaatggcctaatgatctgtattgtggcactgtataatgttaatgtatatgatgagacggtctagccaacccactgttgggttgggtgtaacacttgctaaatgaccttgaatttttaagtttg

SEQ ID NO: 10449 - DNA, 1946 bp, Glycine max
  Clone ID: 700909266_FLI
caataatgagtttgatagcttcgaggacgtgcgttgtctctttgatggcggagtttatctccctacagatgtactcagcaaaattagccccataccggtgctcaaagaaatcttccgcactgatggtgagcaagccctcaagtttccaccacctcatgtcatcaaagttcgtgagtctgaatggatgactgatgaagaatttggaagagagatgcttgctggtgttaatcctggcatgattcaacgccttcaagagttccctccaaagagcaagctagatcccacagagtttggagatcaaactagtacaataaccaaagaacacttggagatcaaccttggtggactcaccgtagaacaggcactgaaaggtaacaaattgttcatattagatcaccatgatgcattcataccgtttatgaatttgatcaatggcctgcccactgcaaagtcttatgccacaaggaccatccttttcttgcaagacgatggcacattgaagccattagccattgagttaagtttgccacatcctaggggacatgagtttggagccgatagtagagtagtcttgcccccagccgcagtcaacagcgctgaaggcacaatttggttaattgccaaggcttatgttgctgtcaatgacactggctatcaccaactcataagccactggttaaatactcatgccacaattgagccatttgtcatagcaacaaacaggcatcttagtgtgctccaccctattcataagcttctcttgcctcactaccgtgacacaatgaatatcaatgcacttgcacgacaatcgctcatcaacgcagatggcgttatcgagcgatcatttttgcccggcaaatactctctggagatgtcttcggcagtttacaagagttgggttttcactgatcaagcccttcctgcagatcttatcaagagaggaatggcaattgaggatccctgtgccccccacggccttcgccttgtgatagaggactacccttatgctgttgatggactagaaatatgggatgctattcagacatgggttaagaactatgtctccttgtattacccaacagatgatgcaattaagaaagactctgagctccaagcttggtggaaggaagctgttgagacgggtcacggtgacttgaaagacaagccatggtggcctaagttgaacactcctcaagatttggttcacatttgctccattatcatatggatagcttcagctctccatgcagcagtgaattttggacaatacccttatggaggtttgatcctaaaccgtccaactttaaccagaagatttctccctgaaccaggaagcaaagaatatgaggagctttcaaccaattatcaaaaggcttacctgagaacaattacaagaaagattgaggcccttgtggacctttcagtgatagagatattgtcaagacatgcttctgatgagatctaccttgggaagagggacagtgacgattggactgatgaccaaaaggcaattcaagcctttgaaaagtttggaaccaagctgaaggaaattgaggccaaaatcaattcgaggaacaaagattcaagccttagaaaccgtaatggaccggttcagatgccttatactgtgcttcttcctaccagtgaggaaggccttactttcagaggaattcccaacagcatctctatctaaggccagagtgcgtttatgtgtggttctctttccaaacctacgttacctttctcgttgacgagtaaatatgcaagcttatgcatgcatataataattgtcttatgcattcttaagtgttgtatgtggacgttatctagttttcgtatttaataagaatggtatcaccattactttgtttttactatcatgttcacccgtagtatgtaagattgatatcccaaactatgattatgaaatcaaatttctctatggc

SEQ ID NO: 10450 - DNA, 1427 bp, Glycine max
  Clone ID: 700909302_FLI
tgcaaagcgcaaattaaagcgcaaaaaccattctccttcggtgctcttgaaaacatgggaaaacagagcacagaattctctgccctcaactgcatcgacctctccaaccctgacatcaaccaatccgtcaatttactcaaacaggcatgtttggattccggttttttctacgttgtcaatcatggaataagccaggaattcatggaagaggtttttgcacagagcaagaaattcttctctcttcctcacaaggagaagatgaagattctcaggaatgaaaaacacaggggatacacccctgttcttgatgagttgcttgatcctgaaaaccaagtgcatgtaggagactacaaagaggggtattatattggagttgaaaaaggtgaagatgacccagaatcgaataaacctttttatggaccgaataactggcccgcaccaggtgttcttccagggtggagggagaccatggaaaagttccatagagagacattagaagtagggaaagcagttgcaaagataatagcccttgcacttgatttggatgctaatttttttgatcagccagaaatgcttggagagcccattgcaactctgcgtttgctgcactatgaaggtcaagtttcggatcccttgaaaggattatatggagctggagctcatactgactatggtttaattacactgttagcaacagatgatgtctcgggtcttcaaatatgcaaagatagggatgctaaacctcagaaatgggaggatgtagcaccattgaagggagcattcatagtgaatcttggtgacatgctggagcgctggagcaactgcgtttttaagtccacactgcacagagttctaggaaacggtcaaggaagatattctattgcatacttcttggagcccagtcatgattgtctagtggagtgcttgcctacctgcaaatcagacagtaatccgcccaaatttcctcccatcttatgccatgactacctaactcagcgctacaacgacactcatgctgacttgaatgtttataagaaacaacaagcttgagtagtcaacctttggaactgaacagcctggagatttctcacaaggacactcacctaagctgatttggatgtttacaataaacaacatgcttaagaagttagtcttttggagctgagcagctggggaattttggactgcattatgtgttagagttaacagcatcatattgcattggcgatgttatgtagaatttgtttgaatggcaaattagttttgttttgtggaaggggggattcagctgtatggtttggtacttaatgttaaacctaaaagaaaaacatgtatgaaattagcagatgtattttttttattcagcactaaagttgggaaatgggaatgataggaagatgaaaaatgaaaattagtattttgctttc

SEQ ID NO: 10451 - DNA, 1260 bp, Glycine max
  Clone ID: 700909321_FLI
gactctcacacagctcctgagactcaagaccaatactcttctagaagcaatgcagattaaaagagaagataacatacaaatactcaaaaattttcttcagcatttcaagcaggttaaggatctgagtatcaaagatttgatggtggagaacgtagaagaagaggaccctaacatggctgtgaacttgctaactgtggcaagcactggcaatgctgcttttcttgaggagcttctaagagcaggtttggatcctgacattggagactccaaagggaaaactccattgcacatagcagcatcaaatgggcatgaagggtgtgttaaagtcttactcaagcatgcatgcaacatgcatataaaagacatgaatggtaacactgcactatgggatgctatagcatcaaaacattactcaatattccggatcctcttccagctttctgctctctctgatccaaacatagcaggcgatctcatgtgtacagcagcaaaaagaaatgaactaacagtgatgaccgatcttctaaggcaaggactaaacgttgactccaaagatcaccgtgatacaactgcaatccaaattgccatggccgaaaatcatgttgacatggttcagttgcttgtcatgaatggtgctgatgtctctgatgtgcataaccatgaattttgttcatccaccttaaatgaaatgctgcagaagcgtgaaattgggcatctaattaatgtaactgaggtcatgctcagtgaagttgtattaaaagggagacatcaagagcaggagcacaatggaggaagatctaatagtggactaaagtttccaagggtaagcatatatagaggtcaccctgtagttagaagagaaaaatgttccatggaagctgggaagctaataaggttgcctgattcaatagaggaactaaaaactattgcaggtgaaaaatttgggtttgatgcaaaagatgcaatggtgacaaatgaagaaggagctgaaatagactccgttgatgtgatcagagataatgacaaactttttttttgttggataagctgagatgcgaaaatgtcaagtgtaaatatatatataatctcgcacaacagatttacttagatgtttcttttgtgttagtaattttgtcttcttcctgtagccataaagaagtggtttggttggaaactagttttttttttttacttccaataactgaaaatccatttcctattacacaaaaaactgaaaatatagttgacattttttctttt

SEQ ID NO: 10452 - DNA, 986 bp, Glycine max
  Clone ID: 700909342_FLI
ccttggagtgcaatttcctggatcaactcttccaaaccatggctaatcatctactggtgaaggattcttccttggttgtgatgtgcatggttttgggtatgcccttggcggatgcagctctttcatgtccttaagtgcaattcattgtagcaccatgccttggtgactagagaggccttggtggtggagttttccctctaccatgttgcaatggggttaggaccctaaacaactaggccaagaccaccccagatcgtcaaggggcttgtaggtgccttaagcattacctacaaaaaagtctttcaaagataatttgtaagcaataacaaaacttgctccaaaataatagtaataataagtaacaccttctaacactctttctatttttagcttaaatttattaaaaaattacaaaatcatcatcaaggtcaaataataaagaataaaaacgctgcataattattatgatttctaataaatttgagcttagcattttttcctgcgagtgtgagaatgaaaatgaagaacacaacagaccaagcgtggacaggatcgtgatccttagggagaaagttgttgagaaacctcagccgcttcgaaaccttggaacaaaggtccaccgaagttcctaaccacatatgaatcctcgttcatcaagtcttgtcgtagaatgtccctaaagcctgttcccaactccctaaatgtctatgaaatagaagtaacaaaatagagggttcttacctctatgacgaaggcggcacagtgcgacgcgggagacaccttctacaaccgatgagtgaggacacgagctaagtgagggagggagggcacaaggggtaaagtaatgaagcacctagcttgcaagagggtgcacgctagtggatcttagtacttggcttgtggtagtaataattaactagctagacaaaggttttatctcgcagcatgtgaattcagccatggctcctagaaacggtgcacccaag

SEQ ID NO: 10453 - DNA, 949 bp, Glycine max
  Clone ID: 700909378_FLI
tgccatcgaaaaagactactgtgaagcacaagaacttaaatcctgaatggaatgaagaattcaatatggttgttaaagatccagactcccaggttttagagattaatgtttatgactgggagcaggttgggaagcatgacaagatgggtatgaatgtgatccctttaaaagaagtttcccctgaagagactaaacgtttttctcttgacctcctaaaaaatatggatcctaatgatgtccaaaatgagaagtcacgagggcagattgttgtggaattgacttataaacccttcaaggaggaggatttgggcaaggggtttgaggagacacagacagtaccgaaagctcctgaaggtactccagctggtggaggtttgcttgtagttatagtccatgaagctcaagacgttgaaggaaagtatcacactaatccacatgtacgtcttattttcagaggggaggagaaaaaaactaagcgcattaaaaagaacagagatccaagatgggaagatgagttccaatttatggtggaggagcctcccaccaatgatagattgcatgtggaggttgtcagtacttcatcaagaaacctgctccaccaaaaggaaccattgggttatatcgacatcaatcttggggatgttgttgccaacaaaagaatcaatgagaagtaccatcttatagactccaagaatggtcgcctccagatagagttgcagtggagaaccttggaagcatgatgattaaattctccatagatttgtacttctgtttctttctccccttctttcctttttaaaaatttgttttccatgcagtgtaaggaaaaggtgagaagggtatttcatgtgttcctgggatatatattggttttatttgtcaatcatgtacatgtttgagataaaaaggtttgaaatagcaaaagcatagatatgatttggtttggatt

SEQ ID NO: 10454 - DNA, 1048 bp, Glycine max
  Clone ID: 700909505_FLI
aaggcatctcaggttcctccgcagcagcatataccatctggagaagttgttggtaattcagcatcaactgcatcgcagactaaggctagaatgcgttggactccagaacttcacgaggcctttgtggaagcagttaatcaccttggtggtagtgagaaggctactccaaagggtgtgttgaatcaaatgaaagttgaaggtcttactatctatcatgtaaaaagccacttgcagaagtatagaactgccagatacaaaccagagccatcagaaggaacgtctgagaaaaaggtgactccaatggaagaaatgaaatctctagacttgaaaacgagtaaggggatcactgaagcattacgtttacagatggaactccagaagcgacttcacgaacaacttgagatccaaagaaagttgcagattcaaattgaagaccaagggaaacgtcttcagatgatgtttgagaaacagagagagatgggtgacagcaaggttaacgtctccttggacgagccttctgctgctgcaccatcagaaacagtagaaaccacaaatgaggaacgccacaaatttgaaagcattccaaaagccatacccgaagagaaggagtcaagcacaacaaaacaaattgcaggtgaagctgaagaaatgatcaaggaagatgaagttgcaccacccacaaaacgggtgaaaagttcgtaacagcaggatcgttgttttatgccttctagatttgtttaatattcttagactggtttggactccatggaacttgtagaaatattattggatccaaggatgtttcaacttgctcatttatcacagccatttcctatgaaaatatggcatgagtgccacaagtaatggtggctcattgtgatggaaattttgttaccatcctcttagtggtccttgaggttttttttttttcttttctttttcacatgtaaactagcatttatttatacctgtgtttaatgtattatatagaaaatcagaattgaaaaataaaagtaatattaagactccaaagaaataatacattttc

SEQ ID NO: 10455 - DNA, 894 bp, Glycine max
  Clone ID: 700909520_FLI
gaagagttggctgatataaaagatcaatttgatgctatagatgtagacaaaaatggttcgattagcctggaagagatgagacaggctcttgccaaagatcttccttggaaattgaaagaatcacgtgtactagagatattgcaagcgatagacaacaacactgatggtctagtggatttccgggagtttgtagcggctacattacacgtgcatcaattggaggaagactctgacaagtggcagcaactgtcacaggctgcttttgagaaatttgacctagataaagatggctatattactccggaagaacttagaatgcatacatgcttgagaggctccgttgatcctttgctagaggaagctgatattgacaaagatggaaaaataagcctaccagagtttcggagacttcttagaactgcaagcatgggttctcaaaatgtttcaagcccatctgttcatcggcggcagaggttctagattagaggtgcttcagaggctgagataagtttggagaaacgagtggtggagttcctctaagtaacttattgtgtgattgtgctgagtctcttaagactatcttctatcatgcagattgacaatctatgatactcaaaactccagttttggactgtggtaatcccctgcgcggggattatgtccacaatgtcacgaggactacatcaagaagtgtttggtagagtttatgtagacgattcatggactggcttcagttctcttctctgaagaattagtgggggggcaacaatgtgattgtggattgatgacttaagggagtggttgatgtctctgatgacttgcattggaggtcacttgtgggtatgtgctcttgctgtgtttctattattatgaatgatatgacaggtttttatt

SEQ ID NO: 10456 - DNA, 1444 bp, Glycine max
  Clone ID: 700909620_FLI
gagattttgctgctctttgaagaagggtgtttgcttgattttggagatgtcgctgctctcagatctcatcaaccttaacctctcagacactactgagaaggtgatcgcagagtacatatggatcggtggatcaggaatggacctgaggagcaaagcaaggactctcccaggaccagttagcgacccttcaaagcttcccaagtggaactatgatggttccagcacaggccaagctcctggagaagacagtgaagtgattatatacccacaagccattttcagggatccattcagaaggggcaacaatatcttggttatctgtgatacttacactccagctggagaacccattcccactaacaagaggcacgatgctgccaaggttttcagccatcctgatgttgttgctgaagagacatggtatggtattgagcaggaatacaccttgttgcagaaagatatccaatggcctcttgggtggcctgttggtggtttccctggaccacagggtccatactactgtggtgttggcgctgacaaggcttttggccgtgacattgttgacgcacattacaaagcctgtctttatgctggcatcaacatcagtggaattaatggagaagtgatgcccggtcagtgggaattccaagttggaccttcagttggaatctcagctggtgacgaggtgtgggcagctcgttacatcttggagaggatcactgagattgctggtgtggtggtttcctttgatcccaagccaattcagggtgattggaatggtgctggtgctcacacaaactacagcactaagtccatgagaaatgatggtggctatgaagtgatcaaaaccgccattgagaagttggggaagagacacaaggagcacattgctgcttatggagaaggcaacgagcgtcgtttgacagggcgccacgaaaccgctgacatcaacaccttcttatggggagttgcaaaccgtggagcttcagttagggttgggagggacagagaaagcagggaagggatattttgaggacagaaggccagcttctaacatggacccatatgtggttacttccatgattgcagacacaaccattctgtggaagccatgagcaaaacttgcatgttgtctccctttggatggaacaaggaacaaggaacaaggaacaaggaacagttatgcttttctaagtagggtttggtcctttttattttttaccttttgatttttctaggatttcgatttgtggctactttggttggtgcaaccaactgccaagggttgttcattgttttctattcctttccctcgttttccgattgttacaataataataatgtaatatggttattttcagtctcaaacaaaagtaatgctgattgtgaagtataataatatatgaaattgtcatgtccattggagttgggatttgttgctgtt

SEQ ID NO: 10457 - DNA, 1283 bp, Glycine max
  Clone ID: 700909621_FLI
gtgacaagttgagtatgcaagttaaacaaacaactgcaagggaaataggggcctaactttatatatctgcgtgagtgagtgcgtcatttctttctttctctgcttccctaaccaactgaaccagcagcaacatttgcgcaaatcgaaattgattctctgccacttaacctaaaatggaaatctttccgattcccgccgaatcctacactctcggcttcatcggcgccggaaaaatggccgagtccattgcccgaggcgccgtccgctccggcgtcctgccgccttctcgcattcggaccgccgtccacttcaacctcgcccgccgtggcgccttcgagtccttcggcgtcaccgttctcccttcaaacgacgacgtcgttcgcgaaagcgacgtcgtcgttttgtcggtcaaacctcaattagtgaaagacgtggtgtcgaaattgacgccgcttttgacgaagaacaagcttttggtttcggtcgctgctggtaccaaattgaaagatcttcaggaatgggctgggaacgacagatttataagagtgatgcctaataccccagcagctgttggccaggcagcatctgtaatgagcttggggggatctgcaacggaagaagatggaaatattatagcccaattatttgggtcaattggcaaaatatggaaagctgaggaaaagtattttgatgcaataactggcctgagtggcagtggtcctgcttatgtttatttagcaatagaggctttggctgatggaggagtagcagctggtttaccacgtgatctttcattaagtctagcttctcaaactgtattaggggcagcatcaatggtctcccagactgggaagcacccgggacagctcaaagatgacgttacttctccaggtgggacaacaattacgggcattcatgagttagaaaatggtgggttccgtggaacactgatgaatgctgttgttgctgctgctaagcgcagccgagagctttcctgaatcaagagattaggattctacttttttttttagaccaaaatctgatttcggtcgaattttcagtcactattatgagaacttggggctcttctttgagaggagtaaacaagaatgtttggccataacagtcttttcgagctagcatcatgaatgcatccgagtctatatgagaacttgaagtttccttgcaaaagaagagtactagcagtaaaaataaaataaaaccacttggccactaagctgcattcgagtctatatgcattgtttctatttcttatctttcct

SEQ ID NO: 10458 - DNA, 1970 bp, Glycine max
  Clone ID: 700909695_FLI
tattattctgagtgtggtgcaagccacctatgtactatttttcctttacttatgcaaaagctacctttgtactatttttcctttacttctgcacaagccacctttgttttgcaggtacatgggtacaataactggcataagtgacctggatcctgttcgttggccgaattctcattggcgatctgttaaggttggttgggacgaatcaaccgctggagagagacagccacgggtatcattatgggaaattgagcctttaacaacgtttccaatgtatccatctctatttcccctcagattgaaacgaccctggcatccgggcacctcttcttttcatgatggcagagatgaagcaactaatgggcttatgtggctgaggggtggacctggagaccaagctctcaattccctgaattttcaaggttctggtttgttgccatggatgcagcagagaatggatccaactttacttgcaaatgatcataatcagcactaccaagccatgtttgcatctggtttgcagaacttagggagtggagatttaatgagacaacaaataatgaattttcaacagccttcaattatcttcaacaatcaggaaaccccaatcctcctttgcagcttcagcaaccgcaagcaattcagcaatccgtatcttctaataatattctacagccacaagcccaagtaatggcagagaacctgtctcagcacctccttcagaaatcacacaacaatcgagaagaccaaacacagcagcagcagcagcagcggcacacttatcaagatacagttttacttcaaagtgatcagctccatcagaggcaacactctggtctaccttcaccgtcatattcaaaaccagatttcttagattcaagcatgaagttccctgcttcagtttcaccaggacaaaacattcttggttcactttgtcctgaagggagtggtaatctcttgaatttatccagaagtggtcagtccatgctgactgaacagttacctcaacaatcatgggccccaaaattcacaccgttgcaggttaatgcttttggcaactcaatgcaacatgtgcagtattctggaaaagataccgcaatggtgccaccacattgtaactcggacacccaaaatcctattctatttggggtcaacatcgattcatctggtcttctgctccctacgactgtcccgcgttatactactgcatcagcggatagtgatgcatcagcaatgccattaggagagtctggattccagtctcctttatatccttgtggtcaagattcatcagagttggtgcaaagtgcagggcaagttgaccctcaaaaccagacacgaacattcgtcaaggtttacaaatcagggtcagttgggcgctcacttgacatctcccggttcagcagttatcatgagctgcgggaggagttggcacagatgtttggtattgaggggaaattagaagaccctcttagatcaggctggcagcttgtattcgtcgacagggagaacgatgttcttctccttggagacgatcccgtgggaatcatttgtcaataatgtatggtatatcaaaatactttcacctgaagatatccataaaatgggagaacaagccctggaatcccttggtccaagtccaggacagaggctgaatagcactggtgcagattctcatgaaattgtttcaggactaccatcaattggctcccttgaatactgagagaattttaacatgtatttttctctcaggtcctacggttaagaagactattacatatccacatgtttagtacttctgtttgaacactacttttcgaccttgcatatctgaatcaatatatactgtattgtctgtttcactttcaaaaacatcgttattatttcgtagaggattgttgagattttcaggacaaaaaatctatattatatatatgatgagaaagaaacctaggacaaacttttgtgcc

SEQ ID NO: 10459 - DNA, 1510 bp, Glycine max
  Clone ID: 700909708_FLI
ggttgcaggagctgctgctgctggtggtctttctcttgctgatgttgctgctgaagcaaaacatgcatctgaaatagtgggaacaatgggtgttgctttgactgtgtgctcaattcctggtcaagttgcatcagatcgtttggggccaggaaagatggaacttggtcttggaattcatggagaacctggggcagctgtggctgatattcagcccgtaaatgtggtggtttctcatgttctacagcaaatattgtccacggaaacaaactatgtaccgataactcgaggagaaagagtggtccttatggtcaatgggttaggtgccactcctacaatggaactaatgattatagctggaaaaacagttccaaaattacagctagaacatggattggctgttgatagagtttatacagggtcatttatgacttctcttgatatggcaggtttctcaatttctattatgaaggctgatccagttattcttcaacgattagatgctccaactaaagctccttattggcctgttgctgctgatggtaatcacccgcctgctaagattcctgttccaattccagcatctcgatcagcaaagactgatgagccacgaagtcagccattacaactaaatgagcaaggccaaattcttgaggtagccattgaagctgctgcaaatgcaattataaatctgaaggacaatttaaatgaatgggatggtaaagttggtgatggtgactgtggatcaactatgtatagaggtgcaaaagcaattcttgaggacatcaaaaattaccctctaaatgatgctgcagaaactgtcggtgaaattggttcatcaattggaagatccatgggaggaacaagtgggatcatatatactatattttttaaggcagcacattcggtgctaaaagcaagttcccattctggtgtcacttcaaaacaatgggctgaagcactcgcagtttccattgctgctgtaagtaaatatgggggggctagtgctggatatagaacattgttagatgcccttatcccagcatcgttggttcttgaagagaaattaaattctggagttgatccttgcatcgcatttgttctctcctctgaagctgcattggctggagctcagtcaacggtagacatgcaagcacaggctggacgttcgacttacttttctggagagattctttcaacagttcctgatcctggtgctatggctgccgctacatggtacagagccgcggccttagctgtgaaggccaaataccagagctaagctatatacttgaaatgtcctgtttgtgcggatatacccaagttttgttccaaattttgtactctcctgtaaccatttaaggctctccgcttatgtctttcatgcataaagctgagagagcaattcccagtcactttcatatacgccaaaaatttaaaagtggatgtaaatttgaaactttattactacaatcgacaataatgtcagtctcaatttgagctcatgattgtt

SEQ ID NO: 10460 - DNA, 1076 bp, Glycine max
  Clone ID: 700909752_FLI
gggctctgtatgaggagttaactagaaaagttgtcactttggtggcagagaatgaaaacctaaagagggagaaagaattggctttgaaagagtatgagtctttggagactacaaataagaacttgaagacacagatagccaagtcaataaacactgaagtggagaaaactcctgttgagcctgtgtcatctgtggctgagataacaccttcatccggtaatggtccatggttcctttataacctttttccagttccacaaatattttggccttccatccttcaatcttctaatccaattcatctacaaaatacatcatttaattccatcgccattccacctaatgctaatgtttcatgttcttctgagtctgaatcacatcacaagcaaaataaccttataaatgataatcgaactcgagtaatcactttttaaaattttattttgatctatccttttgatttttgaggttgtaagtttctttctttagcttaatcactagaagaagataagaaagcttttgaaatgactgagtcaaaagaggcaacattgcttgaagcagagaagatttcctgtcgtaaatctgaagtggatttcaagttcctgtgttttttgctggtttctcaagtcaagaattgggaagtaacacattcctgtttttgggatttattgttctttattattattattattattattattaagtcatgttttaggaaattggacgatctgatggtgcaacttctccagcagttgaggctttaaccttctctcatacttactgtttgctgctagctttaattcaatttagttgtccaccattttttcctgcattatttaaattctactcatcttaattttttgcttaatattttttaagcatttaatttaaacctgattcttgccgagtttcagttggtgatatctaattatgataccattgacagggtaacgtgcttattggataaaagcattatgagtgcacatgctttgatgcatttatttttcatcttttctaaactctagaatgtcatgtctcctggtaattgagattatctaattttgaattttgtcatt

SEQ ID NO: 10461 - DNA, 1225 bp, Glycine max
  Clone ID: 700909782_FLI
ataatgaccagttctcgagagcgtttggtgaaggcggtgaagcagtttgtggaggttcgctacaaggttttcggcgaccgttatggccaaaacatcatcgacatcctcgactttccgattaaggttgtcttgtctcccttcactctcgccttcgatattgcaggctctgctcctcgcggcttcggcgtcccggaactcatctccaagctctctgccacttccgtcttcgctatagctgctcttgggacttatgacattgcctttgagctggggaggaaggtgatatgtcaaaggaattgtaactcatgcaatggatggcgggccttacattgtacaatgtgtcgaggaagtgggagggtgcattatcaagtgaagaattgcaacttgaatactggagagaaagcaactgctgaatctgtagcagacgccattgccaataaccgggctgagttggtgcatataccatcatccttggattttcaaaaaccgctaccttcaaaagagtgtccaacttgtgatggaacgggtgtaatgagctgtcctgaatgcaaacacagattgctgcatgttaggatctcagcagatgatattatggagcccccatggcaagcttataatgtcttgaaaaagattgattatccatatgagcacatattgcacagcatgaaagatcccagtattgctgcattttggttgattacatttcctcagattatgggtggatttacctatgacgatgatgtgaagcagaaaatatggtggcagtacaaggaaaatatgcggtatgaccaactccgagatgtggtggccaagagaaaaccagggtgggagtatctgcaggatgccttgatatctattgatcctgcccgtgcaagggatgatcctgtcatagtgaaaaatgtcccttactataaggctaagaaggctctggagacagaggttatgaagattgatcctccaccaagaccgccaaattggggtgagcttgaccttccattgaatgcatcatcttggagtgaggaggatctcaaagatccagataagttctatgaaatgactgttcttcttaatgcccaaagagaaatctctgataagatcttggatgcacagtgggaaactaaatggcgtcaggacaagttgaatgagatgttggaggcaaaggtgaagccttacattcaggatatagacaatgcagttcttcctgagcctattttattaaagcctc

SEQ ID NO: 10462 - DNA, 1835 bp, Glycine max
  Clone ID: 700909795_FLI
attggagcgagcctgacatgccttgttagccaacgaaggtggttcggttggtaagaatacgatcaaaacacttgtgtaaacatggcttaaggggataagttcttttggttttcagatgtggaatttgctagggagactttggcaggtgtcaacccatatagcatccaattggttaaggaatggcctttaacaagtaaactagacccgcaaatctatggtccacaggaatcaacaataactagggaagtcattgagccacaaattatcacttatggaacaattgaagaggcccttaaagaaaagaagttgttcatgctggattaccatgatttattcttaccatatgtaagcaaagtgagaaaaattaagggcaccacattatatggatcacgaacattattcttcctcactgatcaagggatattaaagccattagctattgagctcactagaccacctatggatggaaatccacaatggaaacaagtcttccaaccttcttgtgattcaaccaatctctggctttggaggcttgctaaagctcatgttctggcccatgattctggttatcatgaacttataagtcattggttgaggactcactgtgtcgtggaaccttttgtaattgcaacacataggcaacttagttccatgcatccaatttatagattattacatcctcatttgagatataccatgcagattaattcccttgcacgtgaggcacttattagtgcaaatggggtcattgaaatttcattccttactaataaatattcaatggaattaagctctgtggcatacgatcaactttggcaatttgattcgcaagcacttcccaatgatcttatttccaggggaatggctgtggcagatcctaatgcaccacatggcctaaagctaacaattgaagattatccttttgccaatgatggtcttctcatatgggatgccatcaaacaatgggtcaccgactatgtcaaccattactatccaaccccaagcatcatagaatctgaccaagagctccaagcatggtggaaagaaatcaaaacagtgggtcatggagacaaatctgaagaaccatggtggccaaatcttaacacatcaaaagatcttattgacatcataaccacaatagcttgggtagcatctggtcatcatgcagctgtgaacttttctcaatatgcttatggaggctatttccctaaccgacccacaattgcaagaaacaaaatgccaacagaagacccttctgaagaagaatggggaaattttctaaacaaacctgagcaaactcttttggagtgtttcccatcacaaattcaagcaacattagtgatggtagtcttgaacttattgtcagatcattcacttgatgaacagtacattgggaaatacatggagccatcatgggctgagaatccaactataaaggtagcctttgaaaggtttaataggagattgaaggagattgaaggtattatagactcaaggaatggaaatagtaatttgaagaacagacatggagctggaataatgccttatgagttattgaagccattttcagggcctggagtcactggaaaaggggttccatatagcatatctatttaaagtttggtaatttaattaaggccaaattagaacaatttatttttattgttatgtgcctcatagggtcctaaataataaaatataatggcacaatgtattcttcatattttacattttatgtacacggattatgttatggcacaggaaaattccatatctagttcttcatttagtaaagaactagtctgcaacccgtgcacatgcacgggttgtttggt

SEQ ID NO: 10463 - DNA, 1864 bp, Glycine max
  Clone ID: 700909810_FLI
acttacttgaagttgtgctattcaatcccaaagccacagaaataatattattcagattttagagactgaaaacatcatggccaacctcgacctcgacccattccagacaagcatcttaatcctcgtcccaatagcactcctggtggcgttactatctcgtactcgtcgaagagcaccctacccaccaggcccaaagggtttaccaatcataggaaacatgttaatgatggagcagctaacccaccgcggcctcgccaacctggccaaacactacggcggcatcttccacctccgcatggggttcctccacatggtcgccatctccgaccccgtcgccgcgcgtcaggttctccaagtccaagacaacatcttctccaaccgcccagccaccatcgccatcagctaccttacctacgaccgcgccgacatggcttttgcccactacggccccttctggcgccagatgcggaaactctgcgtcatgaagctcttcagccgcaagcgcgccgagtcctggcagtcagtccgcgatgaggtcgacgccgccgttcgcgccgtcgctagcagcgtcggaaagcccgtcaacattggagaattagtgtttaacctcaccaagaacatcatctaccgcgccgcgttcgggtcgagttcccaagaaggccaggacgagttcattaaaatactgcaggagttctccaagctctttggcgcgtttaatattgcggattttataccctatctcgggtgcgtggatccacaaggtttgaactcgagactcgctagggcacgtggcgcgctcgatagcttcattgataagatcatcgacgagcacgtgcataagatgaagaatgataagagcagtgaaattgttgatggagaaacggacatggtggatgagttgctggcgttctacagcgaggaggcgaagttgaacaatgaatcggacgatttgcagaactctatcagactcactaaggataacatcaaggctatcattatggacgtgatgttcggaggcacggaaacggtagcgtcagcgatcgagtgggccatggcggagctcatgagaagcccagaagatcaaaagcgggtccaacaagagctggcggatgtagtgggcctggaccgtcgggccgaagagtccgatttcgagaaactcacttatctcaaatgtgccctcaaagagaccctccgcctccaccctccgatcccgctcctcctccacgagacggcggaggacgcgacggtcggcggttacctcgtccccaagaaggcgcgtgtcatgatcaacgcgtgggccattgggagggacaagaacagctgggaggaacccgagagcttcaagcccgcccggtttcttaaaccgggcgtgcccgatttcaaagggagcaacttcgagttcattccattcgggtcgggtcgcaggtcctgccccgggatggtgttggggctctacgcgctcgagttgacggtggcgcacctccttcactgcttcacgtgggaattgccagatgggatgaagccaagtgagatggacatgggtgacgtgttcggactcaccgctccaagatccacgcgactcattgctgtgccaaccaagcgcgtggtgtgccctctcttttaaaaaaacaacaatttgaatcttttttcttccttttttttgtattttctttttatccctcaattatacataatcatattaaaataatataaagggaaaaaaggcagctacacaataagaatgtgagagtatttggaagaaaaaaaaattgtaaacaatcaattatatgtattttgttatttttgccccatttccgttttgattcttatatacgagtagagtaatgatggagtcattcttttt

SEQ ID NO: 10464 - DNA, 1416 bp, Glycine max
  Clone ID: 700943541_FLI
gttggtaaggcagtaattaaaaatttcacagttgttgtgactagtaacgctttggagattcggttatattgggctgggaaaggaaccacttctattccatttagatcagtttatggtcctcttatatcagctatatctgttgatcctaactttatacccccatcagaaagtggtactagcagcatatccataataagggttgtggttgtagttgtggttgctggagcaattatcatcttgatatttggtatattgtggtggaagcgctttttaggatgggaaagatcagtgggcagagaactgaagggtttagaatcacaaactagtttatttaccctacgacaaatcaaggcagcaacaaataactttgacaaatccttgaagattggagaaggagggtttggtcctgtttacaagggtgtactatcggatggcactgtagtagcagttaagcagctttctgctaggtcaaggcaagggagtcgggaatttgtaaatgagataggcctgatttctgctttgcaacacccttgtttagttaagctctacggctgttgtatggaagaggatcaattgttactgatttatgaatacatggaaaacaatagtcttgctcatgctttatttgccaaaaatgatgactctgagaaatgtcaattgagattggattggcaaacaaggcataggatttgtgttggtatcgctaaaggtttggcttaccttcatgaagagtccaaactgaagattgttcatagggacatcaaggccaataatgtgttgctggataaagatctcaaccccaagatatctgattttggattggcaaagcttaatgatggggacaaaacccatttgagcaccagaatagctggcacttagtacatctcttgaaagaaaacggtaatctaatggagattgtggataagaggttgggtgaacacttcaacaaaacggaggcaatgatgatgatcaatgtagcccttttatgtaccaaagtctctctagcactcaggcccaccatgtctttagtggtaagcatgcttgaagggagaacacatattcaagaggtggtgttagacaaaagagaggtattggatgatgtgaaattttagatgatgcaacagtattatcaacactgaggagaaaataacataattgagtctcagaacctaagtgaccctacgtgagaaacttctaaacttttcgatgatacaagttcttctggtgagcaaatttaaagttagagaacttatagaaatgaacatcttgttgttgctctatatatatttagtttttggcacaacttattttgcaaaactgaagatatggttcttgtatctaagtaagtaagggtttgaacaagtttgcataaccaattgtaatagaatttaatgagtggaagaatactacgttttc

SEQ ID NO: 10465 - DNA, 2330 bp, Glycine max
  Clone ID: 700943793_FLI
accccaattccgaagcaaaaactaccttcacatccacaaaccacacctccgccataaataaaagtaacctccctcatggaagagctctcagcggggcctctcgtccccgccgtcgtcaaacctgaaccgtccaaaggcgcctccgccgctgcctccggcggcacgttcccggcctccacgtcggagccggacaaggacttcctctgtccgatttgcatgcagatcatcaaggacccgttcctcaccgcgtgcggccacagcttctgctacatgtgcatcatcacgcacctccgcaacaagagcgattgcccttgctgcggcgactacctcaccaacaccaacctcttccctaacttgttgctcgacaagcttattgttatacggtttctgtaccacatttgtagctactgaagaagacttctgcgcgtcaaatatcaaaaaccgcttcacctgtcgaacattttcggcaggtattgcaaaagggttctgatgtgtcaattaaggagctagacacccttttgtcacttcttgccgagaagaaaagaaaaatggaacaagaagaagctgagagaaatatgcaaatattgttagacttcttgcattgcttacgcaagcaaaaagttgatgagttgaaggaggtacaaactgatctccactttataaaagaggacataaatgctgtggagaaacatagaatggaattgtatcgtgcacgggacaggtactctgtaaaattgcagatgcttgacggttctgggggaagaaaatcatggcattcatcaatggacaagaacagcagtggccttttatctagtcctctaaatcttcgaggagggttgtcatcagggagccatactaagaaaaatgatggaaagtctcatattagctctcatgggcatggaattcagagaaggaatgtcatcactggatccgattcacaatatataaatcaatcgggtcttgctctagttagaaagaagagggtgcatacacagttcaatgatctacaagaatgttacctacaaaagcgacggcatgcagctgataggtcccatagccaacaagaaagagatataagtctcataagtcgagaaggttatactgctggtcttgaagattttcagtcagtcttgacaactttcacacgctacagccgattgagagtcattgcggaactaagacatggggatatatttcattcagcaaatatagtgtcaagcatagagtttgaccgcgatgatgatttgtttgctactgctggagtttcgcggcgcatcaaagtttttgacttttctgctgttgtgaatgaacctacagatgctcattgtcctgttgtggagatgtctacacgttcaaaacttagttgcttgagttggaataaatttgctaagaatcaaatagctagtagtgattatgaaggaattgtgactgtttgggatgtaaccactcggaagagtttaatggaatatgaagagcatgaaaagcgtgcatggagtgtagacttttcaagaacagatccctctatgcttgtatctggtagcgatgactgtaaggtcaaaatttggtgcactaatcaggaagctagtgttctaaatatagacatgaaagcaaacatatgttgtgtcaaatataatcctggatctggcaattatattgcagttgggtcagcagaccatcatatccattattatgatttgagaaatattagccgtccagtccatgttttcagtgggcacaggaaggctgtttcatacgtgaaatttctgtctaatgatgaacttgcttctgcatcaacagatagtacactgcgattatgggatgtgaaggaaaacttaccagttcgtactttcaaaggccatgcaaatgagaaaaactttgttggtcttacagtaagcagtgaatatattgcgtgtggcagtgaaacaaatgaagtctttgtttaccacaaggaaatctcgagacctttgacttcgcacagatttgggtcccctgatatggatgacgctgaagatgaggctggatcatatttcatcagcgctgtttgctggaagagtgatcgccccactattctaacagcaaatagtcaaggcaccatcaaagtgctggtgcttgcagcttgaacacgagaaaaaaaatgaaatagaatgtggaattggtattatcttttcccatatgctatgattgattgtatcatttattaaattgtacatagtattcgagtgtatatggcaggcgttagggatcttaatgaaatattagtcgagtgcttaaacctttatcaataaaccaattaagggactcaacttcaatttttgtcaattgaggacctc

SEQ ID NO: 10466 - DNA, 1400 bp, Glycine max
  Clone ID: 700953566_FLI
ccttgcttattgaaggtaaccatgttcgattaagtggtcaggatgttgaaagaggaacttttagtcaccgccatgctgtagttcacgatcagacaacaggagagaaatattgtcccctggacaatgttataatgaaccaagatgaagagatgtttaccgttagcaatagttcactttctgagtttggtgttcttggatttgaatttggttactcaatggaaaatcccaattcattgataatttgggaggctcagtttggtgattttgctaatggtgctcatgtcatatttgacaatttcttggcttctggtgaggctaagtggctccgtcagactggtcttgttgtgttacttcctcatggttatgatggccagggcccagagcattcaagtgcaagattggaacgctttcttcagatggctgatgacaaccctcatgttatccctgagatggatccaactcttcggaagcagattcaggagtgtaatttgcagattgtgaatgttacaactcctgctaattttttccatgttctaaggaggcaggtacatagagaattccgcaagcctctcattgtaatgtcccctaagaacctgcttcgtagcaaggcttgcagatcaaatttatctgagtttgatgatgtccaaggccacccaggctttgacaaacagggaaccagattcaagcgcctcataaaagatcaaaatgagcacaaagatgttgaggagggtattagacgtttagtactttgctctggaaaggtttactatgaacttgatgaacatcgaacaaaggttgatgcaaaggatgttgcaatatgtagggtggaacagctttgtcctttcccttatgaccttgtccaacgagagcttaaacgatatccaaatgccgaggttgtttggtgtcaagaagagccaatgaacatgggtggatacacttacattttaccccgacttatatcttcaatgaaagctgtaaataggggaggttatgatgatgtcaaatatgttggtcgtgctccatctgcggccacagccactggtttcctcaaggttcaccagaaggagcagactgagattgctgaaaaagcccttcaacaggaaccgatcgacttcccattttgaaaaggcatttgcacatgcatccatcttttttgagagtgataataatgcatttagtttaatttatccaccacgtaaggagctatagttggaaggaaggtgacttcatacatttgctttcgagttttgaccttttatgatcttttggttccttgcaaaaagtcagctaagctgaatttcaacatgcctatgctgaaaatatttttatttccttgcgatacgcaaaggcgtggttgccttactggttgaattgatgccttggtaattaccatttttttt

SEQ ID NO: 10467 - DNA, 1247 bp, Glycine max
  Clone ID: 700953878_FLI
tttattttgcggcgactgaaatctgatgtgatgcaacaacttgttccaaaaatacagcaggttgaatatgttataatggaaaagcagcaggaaactgcttacaaggaagccattgaagagtatcgtgctgtttcacaagctcggatggaaaaatgttccaatcttaattcaaagagtgttcttgaagttcttcctcgacgacagataaacaactattttgttcagttccgcaagatagcaaaccatcccttgttaataaggcgaatctacaatgatgaggatgtcattcgctttgctagaaagctacatccgataggtgcttttggttttgaatgtactttggacagagttatagaggagcttaaaaattacaatgacttctgtattcaccggcggtggcatgattatatgctgagattgagctactccatggataatgtaggccttagcagaacttcttccttcactaaaggagggtggtcatcgagccttgatctttagtcaatggacttcaatgcttgacatattggagtggactttggatgtcattggattgacctataaacggcttgatggaagtacacaggtggcggagaggcaaacaatagttgatacgttcaataatgatacttcaatatttgcatgcttactttccacgagagctggtggacagggcttaaacttaacaggagccgatacagttgtaattcatgacatggattttaacccacagattgatagacaagccgaagatcggtgccatcgaattggtcagacaaagcctgtaaccatatatcggctggtgacaaagggaacagttgatgaaaatgtgtacgagattgcaaaaagaaagctagtattagatgctgccgttctcgagtccatggaggagattaatgaaggtgacatgcccgagaagaccatgggagaaatattgtctgcaattttattgagttaaaatattgatctaagaaaaacagtttaatttatcgtcactcctttcctatagttccaatcttgaattaatctgttgatttgggatagaagagaactggcagcctacaaattagtgagattcttctctcctaattatgtttttttctttaactcgagattttgtttaaagggatcgaatacaatacaatatcaattgaccaaccacttgttggttggaatgaggtgtttataccaagaaaaagagagatcagaaataaagaaaaaaaaaacaaatatgataaattatgtat

SEQ ID NO: 10468 - DNA, 1455 bp, Glycine max
  Clone ID: 700954109_FLI
gttttcaaccagaccgtccttcgtcagttaactatgggctaatcacaattcaggaagcccaaaactattaaagaaaccgacaacacaaaggatttgcagaaagtgcagctacttagttccattttcatcctctctccattaactttcagtcaaaacaaaacaaaacctctttaggtgtgaaattccacgtgccaaaatcatctccgaggcaccaacatcggcagccacatatttctttatttattgaaggaatcagtatataaaacacctgctttctaacggtggcgcaccagaggggtttaggttcaggttcggggaagttcttcgcggcggagcaaggcggcgatgaggaagcggaagagagtactgaggtaggttctgttccgagccatgtggtgtcagcctctgcagcttcggcccaaaccaatcagtgggtgccgcggggaagtggttttcccatgatgtcacgttttatgcatgcgccttctcccgttctgtcttcttcgcatcctcatttgggagttggccacaagagagagcgtgaagatgacactggcgctggtgcgagtggaggtgttgctattgcagcagcttcttcacaaacgcaaacacaagagattgaaagtgctggcggcgacaggaggaggagatacaggggagtgaggcagaggccgtgggggaaatgggcggcagagattcgcgatcctcacaaagcggcgagagtgtggcttgggacattcgacactgccgaggctgcggccagagcctacgatgaagccgcattgaggttcagaggtaacagagcaaaacttaatttccccgaaaacgttgtaccggttccacctcctcctccggttcccgatttaccggcaagtgcggtagccggttccgattccatttccggttccggttcagtggtggcaggtttttcgccgacgctgatgcagggagcgccgtttcagggctcctctgcttttctgagagattattgggggtattctcagctgctgaggagtacaggggacttccatggactcgaccagtggttctttgattctcaaatggcagcgtttcaatcttcttcatcgtcgttgttgccatcgccgccgccgccgtcgttttcgccttcctctgcttcgtatcctctgttttcttccagccagcaaatggggattttccggccgccgggagagcagggtcatggcggagaagacggtggtagtgggtcagagttttcggagcttccaccttcgacgtggtcagataccagtggctatcctcctccaccacctggttgacatggaatacacatttttttctttattctattttttctctttctttggttaaagaaagaacaaggctttcttctgtttatttattttaatttatctgtttttgcttttttagattatttggagtccagttcactgaatttttatgtggttttgggtt

SEQ ID NO: 10469 - DNA, 1309 bp, Glycine max
  Clone ID: 700954121_FLI
cttcagcagcaaagggaaaagcaaacagagtgtctaatcgaagatagaagaagagatggctaaatctccagaaactgaacttcccgtcgaagctttcggttgggctgcttcagacacttctggcacccttgcaccttttcatttctccagaagagaaaatggcgttgatgacgtcactctcaagattctcttctgcggggtttgccactcggatctccacactctcaaaaacgactggggtttcaccacttaccctgtcgttcctgggcatgaaattgttggtgttgtgacaaaagttggcaacaatgtgaaaaacttcaaagtgggtgataaagttggagttggtgtgatagtggagtcttgcaaggaatgtgaaagttgccaacaagatctggagagttactgtccccgccctgtttttacctataactctccttattatgatgggacacgaaccaaaggtggttattctaacatcatggttgtgcaccagcgttatgtgctccgatttcctgagaacttgcctcttgatgctggtgctcctctgctgtgtgctgggataactgtgtatagcccgatgaaatattatgggatgacagagccaggcaaacatttgggagtggcagggcttggtgggttaggtcatgttgcaatcaaacttgctaaggcgtttgggctgaaagttactgtcatcagtagctctcctaacaagcaagctgaggccattgaccgactcggggctgattctttccttgtttcatcagaccctgcaaaaatgaaggtggctttgggaaccatggactatatcatagacacaatttctgctgttcattccctgattccactgcttggtctgctgaagctgaatgggaagctagttactgtagggttgcctaacaagccccttgagcttcctatctttccattagttgcaggacggaaacttataggggggagcaactttggagggatcaaagaaactcaggaaatgcttgatttctgcgcaaagcacaacataactgcagatattgagctgattaagatggatcagatcaacacagccatggaaaggcttagcaaagctgatgtgaaatatcgctttgtgattgatgtggcgaactctttcgcaagtttgtagaagccaccatgattctccaactctttgcatgtgtggcctttagatgtctcagtattttgaaagtagattggtggtataagtagtctataagatgttgaactttaaagatgagaacatctgctaattaataatactttgggttttgaatttatattatgttcctttatgttg

SEQ ID NO: 10470 - DNA, 775 bp, Glycine max
  Clone ID: 700961505_FLI
atctcgttcttcctttcttctctcagattccccctttgcctccttcttcaaccccttttctttctctctctgtctttcgcactttcattctctcttaaaaatctaaatcccttttggtcttcatctttgcctctgacccaggtatggcttcgaaacgcatcctgaaggagctcaaggatttgcagaaggatcctcctacgtcatgcagcgcaggtcctgtggctgaagacatgtttcactggcaagccacaatcatgggacctgctgatagcccatatgcaggtggtgttttcttagtttcaattcattttcctcctgactatcccttcaagccaccaaaggttgcttttcggactaaggtgttccacccaaacatcaacagcaatggcagtatatgtcttgacattctcaaggaacaatggagcccagctctaaccatttccaaggtccttttgtcaatttgctcattgttgacggatcccaaccctgatgatccacttgtacctgagattgcacacatgtacaagaccgacagggccaagtatgaggctacagcccgcagctggacccagaagtatgccatgggatgaccgtattgagtttttagctgttcaatgaagctgcaaaatcataatttatgtaaaagaacaaaagatattttgaacggaatttgaatgctttcttttattattagtgaaactccacaatggtaagaagagacccggttgccaatttgtgaatattttctttgctatggaagaatgtaatgttatgc

SEQ ID NO: 10471 - DNA, 986 bp, Zea mays
  Clone ID: 700968667_FLI
catccgtacccaatctaatcgacacccggccgagatgggccgcaagttcttcgttggtggcaactggaaatgcaatggaaccacagatcaggttgagaagattgtcaaaaccctgaatgaaggaaatgttccctcttcagatgttgttgaggtcgttgtcagtcctccttatgtgttcctcccggtggtcaagagccagctgcgccaagagttccaagttgctgctcagaactgctgggtgaagaagggaggtgcattcaccggtgaaattagtgctgagatgctcgtcaaccttggcgttccctgggtcattcttggacactctgaaaggagagctctgctgggagaatcaaatgagtttgttggagacaaggttgcttttgctctgtctcagggactaaaggtcattgcatgtgttggtgagacccttgaggagagggaggctggttcaaccatggatgttgttgctgcacaaacaaaagcaattgctgagaagatcaaggactggagcaacgttgttcttgcctatgaaccagtctgggctattggaactggcaaagtcgccaccccagctcaggctcaggaagtgcacgcctccctgagggattgggtaaagatcaatgtcagccctgaggtctctgaatctacaaggatcatctatggaggttcagtaactgctgcgaactgcaaagagctggcagcacagcctgatgtcgatggtttccttgtgggcggtgcttctttgaagcccgagttcatcgacatcatcaacgccgccgccgtgtgaagtccgctgaagatgttccaacccttcaccctgttgcggtgatgtgctgaagacagatcagactatttttttgtttaaccgtgcagtgctatgtaagctactaactttgcgctggtgcggatgctgatttccctccccctagctttttgtgaggctactctacagcttgattcagcttgctaataatgtttgcctctgg

SEQ ID NO: 10472 - DNA, 829 bp, Glycine max
  Clone ID: 700976529_FLI
ctcgaaactcgcctccgattaccgccccttcgaggcgaagcgaaaactctgcgattcttatgatttgttttttgcagagaagagcattgtgccactcctgccgcggcttctggggaagagttttttcaagaagaggaagattccggtgccggtggacctgaagaaggggagctggaaggagcaggtggagagggcctgctcgtccgcgatgctgttcatgaggacggggacctgtagtgtggttagggttgccaaggtgaggatggagagggatgagattgtggagaatgtcgttgccgcgattgaggggattgtggaggttgtgcccaagaagtggggcaatgtgaggtcgctgcatttgaagctgctggagagcgtggctctgccggtctaccagactgttcctgatgtgaagttgaagattgagggatttaaggttgaggagaagaagaatgagaaggagagggatggtgaggttagtgattcgattgagggagggacggagaagaagaagaagaagaaggggaggattcatgaggttaggtatatggatgagaatgttgtggaggctgggatggaagatgaattggcgagtgatgacgatgatagtgaagatgagatggtgagtaagaagaggaagaaaggggtttcgagtgagttgagtggtgttgagcaattgaagaagttggtatttaatgagttgagtgccaatgggaagaagaagtcaaagaagggctgcttgtctgttgggaagggggttaagggaggtttgattgaggggagtggaagtgaattggttgtgaaggatgaggagtcgggggtgaagaag

SEQ ID NO: 10473 - DNA, 1320 bp, Glycine max
  Clone ID: 700985896_FLI
ctaccaggccttcaccatgtaatcctcattggtgatgaaaaacaacttcctgcggtagtcaaaagccaggtttctcaagaagctgaatatggaagaagtttgtttgagaggctggtatcgttgggacacaagaagcatctgcttaatgttcagtatagaatgcacccatccatcagcttattcccaaataaggagttctatgagaagcaactttctgattccccttttgtcagagaagtgagctacaacaggcatttccttgaaggaaaaatgtatgattcgtactcgtttataaacatagccaagggtaaagagaagatgcctcgtggtggacatggttggaagaacatggttgaggctgctgctgtttgcaagattattgaaagccttgaaaatgaattttttagtacagggaagaaagttagcataggaatcatatctccatataatgctcaagtgtatgaaatccaggaaagaatcacacggcaaaatttggtttctgatcctaacttctctgtcagtgttcgttctgttgatggctttcaaggtggtgaagaagatataataataatctccactgtgagatctaataagaatggaaaaataggtttccttgacaataggcaaagagctaatgtggcactgactcgcgctagatattgcctgtggatattagggaatgaaaacactttaagcagtgactactctctatggagaaatctagtcaatgatgctaaggaaagagggtgtttccataatgctgatgatgacaagaaactggcaaaggccattgaggaagaatccttgcttattgaactacttgatgaatatgagtccccatttaagaaactcagtctagggagcacttcacgaacaagaacaactgctaccaccttcagagggtctttcaggggcaggccaaggacaccaaggtggtgatggtgagggaagggattatatagatttgcaccggggaacaatgatacacgttgtaatagtttgcctgaagatgttgtaaaatgtgtccttttatattatattagagaaatgctagcactcctcttaaggcaaatccaaggctgtgtttacctgaagatggtgtaagatgtgccctcttatctcgagtatctgcactgtcgaagagtgaatgagaaagggcgtcagggtgtgccagttccaagtatgctaaatccacgagggagttaatatattgtatatctgtgtacaagggtcaaagtaaagcaaaaataactttagtgatttctcaaatccaataaaaataatgttatactctatatatacgaattacatgttcaaagc

SEQ ID NO: 10474 - DNA, 1712 bp, Glycine max
  Clone ID: 700986053_FLI
agcacattgatatctaaggaaggaatggaaaagatgttagggagaaattgtgggaagttgaagaccaagattgtgtgcactttgggaccatcaagtaggtcagtggagatgctggagaagcttctgaaggcagggatgaacgtggctcgcttcaacttctctcatggcactcactcttaccaccaagagacccttgataatctcagaactgcaatgaacaacaccggcattctctgtgctgtcatgttggacaccaagggtccagagatcagaactgggtttttgaatgaagggaagccaatacaaatccataggggacaagaaatcacaatcacaactgattacagcataaagggtgatgagaacatgatcagcatgagctacaagaagttggcacaccatttgagtccagggagtaatattctgtgtgctgatgggacaattagtttcactgtgctagaatgtgacaaagagaatggcttggttcgatgtcattgcgaaaattctgcagttctgggggagaggaagaatgttaaccttcctggagtggttgttgatcttccaaccttgacagagaaggacaaggaggacattttggagtggggggttcctaataagattgatatcattgctctctcttttgttagaaaaggttcagaccttgtggaggtcagaaatctacttggaaagcatgcaaaaagcatacttctcatgtccaaggttgaaaatcaagagggtgttgcaaattttgatgaaatactggaaaattcagatgcattcatggtggcaagaggtgacctgggaatggaaattccaattgagaagatctttctagctcagaaagttatgatacacaagtcaaacattaaaggcaagcctgtggtgacagccacccagatgttagagtccatgatcaaatctcctcggcctacacgagccgaggccaccgatgttgccaatgcagtccttgatggcacagactgtgttatgcttagcggggaaactgctgcaggagcctatccagacattgctgtccaaaccatggccagaatctgttcagaggcagagagtttcatagactatggtgacctattcaagagagtgatggaaacagctccaactccaatgagtcctttggagagcatggcttcagcggcagttaggactgcaaattgcatcaatgctgcactcatcttagttctaactagaggaggaaccacttcaaaacttgtggcaaagtatagacccagcatgcctattctgtcactggtggttcctgagataacaacagattcttttgaatggttctgcagtcaggaagcccctgcaaggcatagccttatctaccggggactaatacctgttttgggcacaggttcttttggagattccatgactgaatcaacagaagaaaccatacagcttgctctttcatatgcaaagaaaaatgacttgtgcaagcctggagactctgttgtagcacttcaccgtcttgagtctggtactgtcatcaagatattggatgtttgttaactgaagtcgcaagtcaaggactaggactaatcccttgttttgttcagttttccactttttacttgtaggcttgttttcttgttctggttttcagaaaatagttctttgttctctttctgatttgattgacgatggtatctaatgtgagaattaaagaataatatactgaattattcctg

SEQ ID NO: 10475 - DNA, 946 bp, Glycine max
  Clone ID: 700909815_FLI
aggaacgtgaaagtaaaacggacggtggcgatagaagcgtctctcatctccatcgtctcctcactcctctcttctccagcgttcattttttctcgcgcccaaatacaaaatcacatcacaacagggttccggcgaccatgtccgatgctccggcgagtccatgcggcggcggcggcggaggcagccacgagagcggcgagcacagtccccgctccaatttccgcgagcaggaccgcttcctccccatcgccaacatcagccgcatcatgaagaaagcgcttcctcccaacgggaaaatcgccaaggacgccaaggaaaccgtgcaggaatgcgtctccgagttcatcagcttcgtcaccagcgaagcgagcgataagtgtcagagagagaagaggaagaccatcaacggcgacgatttgctttgggctatgaccactttaggtttcgaggagtatattgatccgctcaaggtttacctcgccgcttacagagagattgagggtgattcaaagggttcggccaagggtggagatgcatctgctaagagagatgtttatcagagtcctaatggccaggttgctcatcaaggttctttctcacaaggtgttaattatacgaattcttagccccaggctcaacatatgatagttccgatgcaaggccaagagtagatattgatcctctccttcagtgtttgacatgtgtgatctaaatgccagtggaacttttatgtcaatatgtgcccttggtatattgaatgcattttatgttatgtaaacactacatgcggggatgttggttcttgtgaccagatattatttattaagacttacatttatctttggaaaagaatcattattcataagttatattgtaaattctggaacaatgcttgtctgattccatcaatcgtcctggtaacgattttatgtacctgattggaagc

SEQ ID NO: 10476 - DNA, 2086 bp, Glycine max
  Clone ID: 700909837_FLI
gtgtgatactttcctttcatcttcttcttctctctgcgataaaagcaaaacctaaaatttggtttaggcataggaatctgttgtagagttgatctacctggaatggagggagcatcgtggaatagtagtgtttgtgtggcaccgtttctgagcaagacctacgacatggttgatgatccttccaccgacttagtggtgtcgtggggcgaaaacaacaactcctttgttgtttggaacgttccccaattcgccacagacatcttgcccaatcattttaagcacaacaacttctccagcttcgtcagacagttgaatacttatgtgggcatcacatcactttttctcccatcattatcatcttatcttatttcttcttcttcttcttcttcttcttcttcttattattattattattattgctttttgcttatgctaaacccctctttttctattatggggtgaaaagggattgaaggattgttgttcttttctattggggttatatctgtgctttatgggaagccctatctgtcttcttgttgttttatttcgattcgatgtggcacattctacctttcatttctgtggcgtctcattgattggtattatgaatctcgaatttgcagggttttagaaaggttgacccagatcgatgggaatttgcaaatgaaggatttttaagaggtgaaaaacaacttttaaaaagtatcagtaggcggaaatctgctcatgtaaatggtagtcaacaagcatctcaagtgcataaatcagctgctggagcatgtgttgaagtggggaaatttgggcttgaggaagaggtggaaagactgaaaagggataagaatgttcttatgcaggaacttgttaggttgagacagaaacagcaagggactgataaccaattgcaaaatgttgggcaacgtgtgcagtcaatggagcagcgtcagcagcaaatgatgtcattcctggctaaggccatgcagagcccaggcttcttagctcaatttgttcagcagcagaatgaaagtagtaaacatatccctgggagcaataaaaagaggaggctccagcgacaagaagaagatagtttagccaccaaggatctccatagttctcttgatggacacattgtcaagtaccagagttccataaatgaggctgcaaaagcattatttcgccagatattgcaaataaacaattctacaacacaatcatcaattaagaaccctgatgttttccttattgatgatattccttctgccattgcatcagatagcagtagttcatccactcaggtttctaatgtgatggttccacctatatctgagctgacgtctatggaagtaggatcacagtttcctctcagttgtatgcccagtaacatatctgaggtgcagtcttcacctgctgttttgggtttctgtagaagtcaggggatggagacagaaagcagtttattgaatcatgagctgaatgttatgggggctgatactaggaacatgggggagatagatatgatgtcaactgttttagatgaggcagacgaagctgatcatttttcacctgacacagatggaatttctaaactcccagaaatcagtgatgaattctgggaactgtttttaaggccaagcccacttacagaagacacagaggaaactaaatgtagctctctaggatgtggtttgactgaagatcagggtttgccttcagaaatgggaaataagcaggaaaattttgatacaatacaacatgttgactgtcttactcaacagatgggacttcatgcattggagtactgattgtgtgtatatatgttactcacaactgaaggtaaactttttagcttgcagcctctcacttatgcataactttataagcatactggctcaattagttccctgaaatgaaaccagtgtaaaatctcctttcattatcatcatacccaattgctgccattaaagagtgagaacagtgagggagtaaatcaggagtgtttaaaacaattacattgaatgtctacaaaaatgtctgatgtattatgatcatacatacacattattaagatagaaatttactacgtaac

SEQ ID NO: 10477 - DNA, 838 bp, Glycine max
  Clone ID: 700909874_FLI
gaattcggctgagatcgtcccaatgctccattggtgcttaagggcatcacttgtacttttaaagaaggtagtagagtgggagtcgtaggaaggactggaagtggaaaaagtacactcataagtgctttgtttcgcttagttgatccagcaaaaggttatattcttatagatgggattaacatatgctcaattgggttgaaggatttgagaatgaagctaagcatcatccctcaagaaccaactcttttcaagggcagcattaggaccaacttggaccctctaggcctgtactcagatgatgaaatatgggaggctttagagaaatgtcagctcaaggaaactatcagccgtctaccaaatctcttggactcttctgtgagtgatgagggaggaaattggagcttgggacagcgccaactgttttgtcttggaagagtactacttaagaggaacagaattcttgttctagatgaagctaccgcatccattgactccgccacagatgccattctacaacaaataattagacaagaatttgtagaatgcacggttataactgtggctcacagggttccaactgtaatagatagtgacatggtcatggtcctctcctatgggaaattggtggaatatgaggagccttcaagactaatggagaccaactcctcattctcgaagctggtagctgaatattggtccagctgcaggaagaattcttcctcaaatcttagcagacagcaacattgaataatgaataataacattatggaaaatcacgtgcagacttactttttcactgttttacttttaaaataatctacctgatgcagagttatat

SEQ ID NO: 10478 - DNA, 728 bp, Glycine max
  Clone ID: 700909943_FLI
ggcttttgcaatactccccaagtctccggtgcactgcgcttgaagcatgtgcacatcctttctttgatgaacttcgtgaacctaatgctcgcttgccaaatggtcgtccatttccccctctatttaacttcaaacaggaattatctggagcatcttccgagcttgttaataagttgatacctgaccatgtgaagcggcaaatggggatacagtttatgcatctgggaggatcgtgacgataaagcttaggggacatagtgtatactagctgataagttaaaaaaaagtggcaccattattttttgtcttaataccatgttctgtgacctggcgaatgtagtttcaagctgaaccgagactgagattcgcgatgccggatggccgcagttgatccgtcagtatatgtaccttttgattcccttgtgctaactggtggatctttatttccccaggcatatatagccttgtttattgtaaacgtctacaatgtcatagtaatatttgacctgaaatggtcacacagatcagaactcagaatgcttctgtttggggaaaactaaagccttggctggaaggaggggagggtcgagaagagtttttttgatggtggggtttgttggttggcttttgtttcctcttgttaatatgtgcctcatttgcaatgttgcacaatgcacaccagttcctttccttgtgaaatgtaatgtggtatctatctgtttttcttc

SEQ ID NO: 10479 - DNA, 1907 bp, Glycine max
  Clone ID: 700909970_FLI
taataatcctgtttaattaactaaaggctagcttcataactcttcccctcaccccaccaaaacaccccctttagtttcctggtattcttcttccacgtaggtttaatttggaggacacaagagttttcaaagcatcattggtggtggattgaaagacttggtgagtgacatcgtacacatgggaagacactcttgttgctacaaacagaagttacggaaaggcctttggtctccagaggaagacgagaagcttctcaatcacatcaccaaacatggtcatggatgttggagctcggttcccaaactagctggtttgcagagatgtgggaagagctgcaggttgaggtggataaattatctaaggcctgatttgaagagaggagcattctcacagcaagaagagaacatgattgttgaacttcatgcagttcttggaaacaggtggtctcagattgcagcacagttaccaggaagaacagacaatgagattaagaacctatggaactcgtgcctgaagaagaagctgaggcaaagaggcattgacccaaccacacacaagccactctctgaggttgagaacgacaaggacatgaatatgatgccaccctcaaccgacaaaagcactcagaaagcctctgtgggatccaatgaagtagtgagtaatttggttgatcatcatcagccaccaaaaaccatgcctaattcttcatcagagagataccctcttgaagtttccactactagttccacccaggaactgttcctagataggtttggcaccaccaccaccacctgccacgaaaacaacaacaacacttctgatttggtaggatcatacttctccttccagcacttgaactatggaacaacaacaagcatggccctctcttcaaaccccaacacctctctttgtttcattctaccctccacttcttcagacattaataataacaactccatcataacctcctcctccatgctcccttcaattttcccaacacaacatgtgaagctccaatctaataacaacaacccttcttccatttcatctgatggggttcaaaactgggaaacaagtaacaacacaaacaaaaacaatgggaatatgcagttacaaagtagcacaaactaccttgacagcacgtggggggtggcagagtctatgaagattgttaacattaacaaagaggctcaagtagtgcctctacaagcagaacaagaagatctaaaatggtctgagtatcttaacaccccgtttattctgggaaacaacacaacgcagaatcatcaaattcaaacctctcaatctatctacactgaggttattaaaccagaaacaggtttcataatagacgagtcatgtactagtaattggcaccatcatcagccaccaccagcttttcaactttccgatatatatagcaaggatctgcagagattttcagtgactttcggacaaaccctgtaacgtgtgtgtacgtaattaatatatgtggaaacttcaattcaacgaaagagacaaagatgttgctgccgacttaattttccaatatgatgatgatccaggtcagaattttctctagtcagttctgaccacaggtgtgtgctataaaaaaaaaattactttctttctttctatattgtaaattgtgttacagtgtaatatttgtgattaattccagcttcttattccacccaccattttgttaatcaaacatttatgtagaggcgctactgctgaataaggcttgttccaatccaaggcttctcttctcctcttacaaaatattcttcagttgttaattatggatgtgtagcttgtgagttgtgagtttttttttttttttttaattcgtgtgtacacagttgacagcattaattgttatacattttttttaccttaattc

SEQ ID NO: 10480 - DNA, 2120 bp, Glycine max
  Clone ID: 700910011_FLI
attccacaatactagcaccatcaccatgaaactcttccactacctcttctcactactcacactactcttcctcttccaagccaaagaaggagtttccattagccctttgcaattgatcacacacccacttgaccccttaacaaagcaagaaatcaccctcgtccaagccacagtcctaaagaaataccccacaccacccaaccatgtcttcttccactacgtcggcctcgacgatcccgacaagacccacgtcctaaagtgggcctcctccggcaccaaaaccccaccccaacgcagcgccttcgttgtagccatcgtcaacaactcccaaatccacgaactcatcatcaacatcaaatcctccaacgttgtctcgtacaaaattcacttggacacggggttcccgaccttgacgctggaagaacaaagcttggccatatcgctgccgctaaagtacggtccctttgttgagtccattaacaagaggggtttgaacttgtcggaggtggtgtgctcctgcttcaccgtggggtggtacggggaagccaagagcactagggctttgaggttggagtgtttttccaagaatggaactgcgaatatctacgtgaggcccattagtggcataaacattctcgctgatcttgacacaatgaagattgttgagtaccatgataacgttgttgagcctgttcctaaggcggagaacaccgaataccgggcttcgcatttgaagccaccgttcagtccacggcttcattcttttgcctcgcatcaacccgaaggacccgggttcactatcaaaggacatagtataagctgggccaattggaagttccacataggttatgatgtgcgagctggtgtgataatttcaactgcatcaatttacgaccctgaagtgcataagtcacgtcaagtattatacagagggtacatttctgaattatttgtgccatatcaagacccaggtgaggaatggtattacaagactttctttgatgctggtgaatttgggtttggtcaatctatggtttctttggaacctttgcatgattgtccaccacaagcacagttcctagacgtatattttgcggcaagtgatggtagcccacaacacttggagaatgcaatttgtgtgtttgaacaatatggtggtatcagttggcgtcacactgaatcaggcattcccaatgagcaaattcgagaagttagatctgatgtgagtctaattgttagatcagttgttaccgttggcaactatgacaatgtaatagattgggagttcaagccaagtggttcaatcaagccttcgatatcactatcaggcattttggaaattaaggcagtggatattactcacacagatcaaataaaagatgaccaacatggcacattggtctcagaacacagcattggtgtttaccatgaccattactacatataccatcttgactttgacattgatggtgtggacaactcttttgtgaagacaaatttcaagactgtgcaagtcacggattacaacagttccaagagaaagagctattggacaactagtagtgaagttgcaaagactgaatctgatgcaaagaccaaactagggttcagcccttcagagatagtaattgtgaaccctaataagaagacttccactggaaatgaagtagggtaccgtttggttccaaatgcagcatctcatccccttctcagagaggatgattaccctcaaagacgtggtgctttcaccaattacaatgtttgggttacaccttacaataagactgagaagtgggctggtggactttttgttgatcaaagtcatggagatgatactttggctgtttggactaagcagaataggggtattgagaacaaggatattgtgttgtggtacgtagtgggaatccaccatgttccatgccaggaggattttccaataatgcctttgttgagcaccggatttgaattgaggccaactaatttctttgagagaaatccagtccttaagaccctttctccagacattgttaaatggcctggttgtgggaagccatagattggtcacatgtgtgctatgatgagaaaataataaatttgaataaattaatgatttctct

SEQ ID NO: 10481 - DNA, 1478 bp, Glycine max
  Clone ID: 700910022_FLI
ggtctccaccgtgcacgccatgtcggttctcagggactctgagccaccctccgccggaaggtttcatcccgaatacgacaccgttttgcaggggctgttgtcgtttaacaatgccacgggctcgccctttaccattaacccttacccttactttgcctacagaagcgaccctggcagagctgataaccttgctttttgccttttccagcctaacgctggcagagttgactccaacaccaacctcaagtacatgaacatgtttgatgctcaggtggacgcggttcgatctgcgttggatgctatggggtttaagaatgttgagattgtggttgcggagacagggtggccctacaaaggagacagcaatgaggctggtccaagtcttgagaatgctaaggcttataacggcaatctgattgcccacctgcgatctatggttggaaccccattgatgccagggaaatcagtggacacatacctctttgctttgtacgatgaggacttgaagcctggacctgcttctgagagagcctttggactctacaaccctgatcaatccatgatctatgatgctggcctctccaaacagcaagaaactagtagccccgtgccgacggttgccccgactccggatgtgtcaaaatctccagtgattccagcgccaacagacccgggtcaacaaacacaaaaatctccagtgattccagcgccaataggcccgggtccaacaccaaataaagcagaactcttaattggacatgaagccaccattttgaagtctttaataatgttcacagttctcatcttaatgttgtaacaccaaataaagcagaactcttaattggacatgaagccaccattttgcagtctttaataatgttcacagttctcatcttaatgttgttctagctagtagtggtatttaatataatatgtttcttaatttcattgaagactactccggatgtgtcaaaatctccctctactccaaagccaacagtttcaagtccaaccaaaacaaataatagtgcaacatggtgtgtgccaaaaggaggagtggcagatgcacagttacaagcaaatttggattatgcttgtgggcaagggattgattgtaccgcaattcaacaaggaggggcttgttttgaacctaacactttggtaaaccatgctgcatatgccatgaatctattgtatcaaacagctggacggaatccattgacttgtgatttctcgcaaacagccatgttgtcaacgaataatccaagttacaagagttgtctttatgctggaggaaatgcctaacccagaaaacaagtagataaaggagggcactttttgttgttttaattattctctcttaattgctaagaaatgttctggttcttggagtgttcatgtatggaggaggatcttcttcctctatttgtagtctcaccttttttagtctttatcagaagcaaattgatgctttgttt

SEQ ID NO: 10482 - DNA, 1224 bp, Glycine max
  Clone ID: 700910061_FLI
ggctaatccctcactcttgttcttcagtctcctcctattatccgccaccgtagccaccaccttctccgccttcaagacaaagttcggcaagacctacgccacgcaggaggagcacgaccaccgcttccgtatcttcaagaacaacttgctccgcgccaagtcacaccagaaattggatccctccgccgtccacggcgtcaccaggttctccgatctcactccggcggagtttcgccgccagttcctcggcctgaagccgctccgccttccctctgacgctcagaaggctccgatcctaccgaccaacgacctccctaccgatttcgattggcgcgaacatggagccgttactggagtaaaaaatcagggttcgtgcggatcgtgttggtcctttagcgccgttggagcgttggaaggtgctcattttctttctacaggtgagctcgtgagccttagcgagcaacaacttgtggattgcgatcatgagtgtgatccggaagagcgtggagcatgtgactcgggttgtaacggtgggttgatgaccactgcatttgagtacacactccaggctggtggactaatgcgagaaaaggattatccttacactggaagagaccgtggtccctgcaaatttgacaagagcaaagttgctgcttccgtagctaacttcagtgtggtttcccttgatgaagaacaaattgcagcaaatttggtccagaatggtcctcttgcagttggtatcaatgcagtttttatgcagacatatattggtggcgtctcatgcccatatatctgcggcaagcatttggatcacggggttcttttggtggggtatggttctggtgcttatgctccaattcgttttaaggaaaagccttactggatcataaagaattcatggggggagagctggggagaagagggatattacaagatctgcagaggtcgcaatgtatgtggggtggactcgatggtctcaactgtcgctgctatacatgtttctaacaattaaatataaggatggatgcctaaacgtggtaggggcaccagtatagtatgtatgtaaataatttgcacgatgtaatgttatgaaggaggaaactgctaagcacatgtttatgcttttattctgtaattctctatgctagctagtctagccacaaatcattacccactgttatagttattgcaagtaacctgaatgaaattaatttgagttctcac

SEQ ID NO: 10483 - DNA, 3237 bp, Glycine max
  Clone ID: 700910085_FLI
ttggaaaacaagttatagcaatggcactcacagtccatcttatcattttaatgcatgtttgcacccttgtagttgttaggagtgatcctctccctaaacccaatttctcatccattctagttttcggggattcatcagcagattcaggtaataacaactacatcatggggagtttggctaaggcaaatcatttgccctatggcaaggattttccaggtcatgtacctacaggaagattctctaatggaaaattggtaattgactttcttgcctctatattaaatatcaaagatggtgtccctccttatttgaacccaaacctaccaaacaaagaacttctaacaggtgtttgcttcgcatctggaggatcaggttttgatgattgcactgcagcgtcagccaatgccatatcgatgaccaaacaaattgagtacttcaaagcttatgtagcaaagctcaatcgaattacaggagaaaatgaaactaaacaaatacttggagatgctcttgttattattggtgcaggttctaatgactttcttctcaagttctatgaccgtcctcatgcaagagtgatgttcaacattaatatgtaccaagattacctgcttgataggcttcaaatccttattaaggtatgccaaagttattcattaaaactacattatgcattattttaagttaataacaacaagaaaatcatgagagaagacatatagataaaaaatgtataatttatttaagaaatttctatgcttgttctttcttttagataaacaatcatgagaggtgtaattatctgttttagtaatattgggatatattaaagtgtttacaaattttttaaagtacttaactggaatctctataatatactaaagttctttataaaaactaaatcttatgaattatcttttcttataattatagaagaaacactaaaaacaaaatatttttgacagtgtaataacttaatagaataaattatatttgctgaaattcttaacttccaagtcgattttcctactaattttattgaattcaaatcacatatcacttttatttgtatattttcttttgttgtcttttctatttcaaaataataccttaaccagaaacttaactattaattaagagcgggaatattgttatttttaagaggtagaaatttcttaatgatatatagaataaggatggaaaaagatcattcacaaaaaaaaaagggatgggataaagataaaggaaagtaatttcaatctaatttttttcagcaagaaacttgtaattttacagaggccacatcaaattccatttttttgttaattcattgtcttgttatccattttctttttgtagtatgcatctgcatatcgacaactaatatttatgcttgtttggtagatactataaattaaaaaatactttttaaaaagtattcttaagaaattaccaaaaaataattatttcataaaaaatccaaaccttcttatagttaatcatctttttgtgcgtaatattgtaggacctatatgactacgaatgccgaaaatttcttgtcagtgggcttcctcccattggttgcataccttttcaaataacattaaagtttgaaagggataggaaatgtgtattgcaagaaaattttgatgctgagcaatataatcagaaattggtgcagagattacttcaaatacaagctatgcttcctggaagcagacttgtttatctagacttatattactccatactcaacctaatcaaccatcctgaaaattacggtgagatgtatgtatatatatatatatatatatatatatatatatatatatatatatatatatatatatatatatatatatatatatatatatatatatatatatatatatatatatatatatatatatatatatatatatatatatatatatatatattggtatttaagtttgatttcttcaaagtaagaaagtaaacgcgtctatttattagcattaattttaaaaaaaaatttataaagtattttaatttaaattggtcatattttgcactcttaggagttaagtttttttgggggaaaggagttaagttaaacccttaatatttagaccaaaatattttgaattcttttgtacttaagagtatatgcatagagagggaacatatcaattaaaaaatatttttaatttgagaaatgagaacttttatttgaatcgtatcatcatacataaatgattaaagttaagagctagttaataattatatttttgagaggagttaatgattacataatcacttataaaagttatcttaatttttttattcttagcatttaaatataatctagattaactatatttatagttatattttttgggtgaattttatagttttcatttattacaataagattgaatcatatatacattatacatagatgattaagattaaaagttagttttttcagaggattaaaagttaattagttagtgactacataacattcgtatttttttattaagttaataaaaacatttgtattttgtattttgagcatttaaatacaatctaattatctatatttataatttttttttttttgaaatttgatagttttcatttattaaaataagaagagttctaatttgatatgttctccgtgcacgcgtgcacacatatacaaagtgcatgctaatatgtttcgaaaatattatagaatggtttgtgccttggaaaccttaggaaaactttcttcgtatttgctttatatttccataatgtttttctttctataggaaaaagttttctggatgattttaaaataatgaaaataatttgttcttatatgtattttgagcctttgtgggaattttatcaaatatataggtctggaggtaacaaatagagggtgttgtgggctcggcgcattggaagtaactgcattatgcaacaaactcacaccagtatgcaacgacgcttcaaaatatgtattttgggacagtttccatcttagtgaagtatcaaaccagtatcttgctaagtgcgttgaaataaatgtcctgccccagttttgtaatagtagttagttcttagtgagaactaactacaacaatattctcttcttatattttaagtgatgtctttataatttgcacctcgaatgtagttaaataattcatctttgtaataatggacaaatttatataagttcttcgtttgttactgtttattatttgt

SEQ ID NO: 10484 - DNA, 1245 bp, Glycine max
  Clone ID: 700910094_FLI
gtctaggtggatttgacacagcacatgcggctgctcgtgcttatgatagagcggctattaaattccgaggagtggaggctgacattaacttcaatattgaagactatgaagatgacttgaagcagatgagcaatcttaccaaggaagagttcgtccacgtgcttcgccgacaaagcactggatttccgagaggaagctccaaatatagaggtgtcactttgcacaagtgtggaagatgggaggctcgaatgggccaatttttagggaaaaagtacgtttatttgggtctctttgacactgagatagaagctgcaagggcttatgacaaagccgccataaaatgcaatggcaaagaggctgtaacgaattttgatcccagcatctacaacaatgagctcaataccgaatccacaggtaacgctccagatcacaatctggatttaagtttgggcaatgcaacttcaaagcctggcaataatcaagcgttggggaatcacgccacaaatgctgtaacccatgatcagcacctgccatctgagtctaattggcgtaatgggggaaacaagcctaagctggtgaatatactccccaaaccatgtaatagaagcaacaacaaggactcacatggaagggatgtgcacggggagagtgaaacactgaggatgctaagtcaaacccaccttcattctccagcctccaatgaaatgcaactaagatatggtccctacaagtctcacggtggagagtcccaaatgcttcaaaattttgcacacattcacccaccaaattttcattttcccagcagcagcattggaggccgaattgggagtgatctttcattatcaatgactgatcaacaacagtggcaaaccgggccttcacattatttagcaactgctgcagcatcatcaagtttccaacaacagataagaccctcttctcaaggttggctgcagaaaaatgggttccacattctcatgagaccctcatgatccctattatatatagagaattttctgcctcgccaagtactagttacattcaaataatcattaatctgctcctcaagtaatattattattattacccttcaacggttccaccccaaaaaaaattattattttcttttcttagcatgtaaaaaggatgcagtgttagattgtgcccatgtccaacccagacccctgctcacacaagaccacaactttactattgaggtgaaaaagaaaggataaaagaaaaagg

SEQ ID NO: 10485 - DNA, 1412 bp, Zea mays
  Clone ID: 700930118_FLI
ctcgtctgttgtatttattagtagacaggggttttcatcctagctgcctaattcttaaaagggaaaacaattggcgctgtccactttgtattttttagtgaaaagcgtaattaccatgttcgccttaaattaaatatattgcttcttgtaggttattaatctgacaggatgggttgcccctcggacatgtgtgatattgatatggctacattttttccattttgtcgtccacatattttttttacagtcaccaactccctccagtctaaaatacttcctacttttggctttgcgtagtctttaatgcttatttttgaccactagtttatagaatactagtgtgttctgacttgcattttgttgtatgtgaaagtaggttcagggtcaaaagtacgatccggacggtgaatatgtaagaacttggattcctgaacttgctagaatgccaacagaatggatccatagtccatgggctgcgccaaactctatattacaagttgctggagttgagctgggctttaactacccaaagcccatagtagaacttcatatggcgcgggaatgtttagatgacgccatctccacaatgtggcaattggacacagctgcaaaacttgctgaactagatggtgaagttgttgacgacaatctgaataatatcaggaattttgatatcccaaaggtggttttgaacaagaaattatcaccaagcacttcatccatggagcacagggtgctgtctactaatggcaaggacgaaaagtcgcagcctactgaagtgaaggccctgtacaaacagattattcgagatgatatgatgaatgactcaaacatggatgatacatgctctactgctaacttgaaagtgacaaggaaaagatctagcaatgatagtgcgttcaatgttccctcatgttcatcctcattagtcatggaatcacggattcatcataatgaacctagttctgttctgtattcaggctacttccagaagacagcagacagagatggcactagtaaggttgaagataatgacagtgaagatagtggtacgagcatctctaggccatccaagaaagctgcttagcattagcgcattgaagatgttgcaaatcttcaatgagaaatatttaccgtcacatgtaatttagttggtgcgtttgtagtgatcatgcaaaagctgttctatgaattataattagttttacacggcctatccttattccgatagaaggcaatttttgtttggtgaaaaaacatcgctcacggacaggccatagtttgctgtcgctgctgaacagcctaaagcctggtgtaaatgactcatcaacgttacgacattattagcgctggttggttttgctatcaatccatattcatggattgggtaagattgagtggatttaaatatc

SEQ ID NO: 10486 - DNA, 582 bp, Zea mays
  Clone ID: 700930120_FLI
attgaacaagaatgctgtcttcggtgacagcagtgcattgtctccgggtggtgtccgcattggcgcgccagcaatgacctcgaggggtctactggagaaggatttcgagcagattggggagttcctccaccaggcagtgaccatctgcctgaacatccagaaggagtacggcaagctcctcaaggacttcaacaagggcctggtgaacaacaaggacatcgagaacctcaaggtccaggtggagaagtttgccgactccttcgacatgcctgggttcacgcttgagagcatgaaatacaaggagtagatatgcctctttcatgcgcggcaaggtcctcctgtaccgatgtctttccttgtggtggcgcagggtgccatggcactgcattgccgccacacttacgatgatgatgatgggttatggattttgtctacaatgtcagcaggataggctcacaattgccccctgccctccggtttggtcgcctctcaggttttcatttggtagttgttcgcagggaaccatatgagaattgcaatgtcaatcaggtgtttgccaataataattgggtggtttctgct

SEQ ID NO: 10487 - DNA, 1155 bp, Zea mays
  Clone ID: 700930139_FLI
ctttggaagatggggattttagagaagatatcagatattgaagcagaaatttcaagaactcaaaagaacaaagcaacagaacatcatttagggttactcaaagcgaagttagcaaagttcagagcacaacttctcgagccaagcaaaactcccggccaaaaaggagatggctttgaagtttcaaagagtggagacggtagaatagcactcattggttttccatcagtaggaaagagtacaattctcacagagttaacagacactgagagcgctcaagcagcatacgagtttaccacattaacttgtattccgggtgtcattcaatacaatggcgcgaaaattcaacttttagatatgccaggtatcattgaaggagcagcacaaggaaaaggacgaggaaagcaagttgttgctgcagctcgaactgcagatttgatattaatgatgttagatgcaacaaaaggtgaaactcaaaaacgacttttagaaaatgaacttcactctgttggtcttcgtttaaataaacaacctcccaatatttcgctcaaagtgaaaagtggaggaggtttatcgttcaatagcacaatacctctcactcatatggacgagaagttagttcgaggtattttacatgaatataaaattcataatgctcaagttcttttccgtgaagatgccactgttgatgatttcattgatgttattgaagcacgtaatcgatcgtatcttccttgtttatacgtttataataaaattgatcaaatcacaatcgaagaagttgattctcttgcccgtttaccccatagcgtcgttataagttgtaatttacatcttaatctcgactacttgttagagaaaatatgggaatatctcagccttgttcgagtttatactaaacgacgaggagagcaaccaatgttcgaaggagcgttaattatgagaaaaggagcgctagtacttgatatatgtagagcgattcatcgcgattgggaacatcaatttaaatatgctcttgtttggggtcgatcagcaaaacattcacctcaacgtgttggcctaaatcacgagttattggatgaagatgttattcaacttgttaaaaaataactttcgcctttcaattttgaatatttatataaacattgtatgatcatc

SEQ ID NO: 10488 - DNA, 692 bp, Zea mays
  Clone ID: 700930143_FLI
ctcgccgccgggctcaccgtcatcgggcactaccaggacgaaaagatcccatgggccatcggcgtggccatcgcgtctaccatggcctacgtggccttcttctccatcggcctcggccccatcacgtgggtgtacagctcggaggtattcccgctgcatgtgcgcgcgatgggctgcgcgctgggcgtggcctccaaccgcctgaccagcggcgtgatctccatgaccttcatctcgctgtccaaggccatcaccatcggcggcgccttcttcctctacgccggcgtcgcggtgctcgcgtgggtgttcttcttcaccttcctcccggagacccgcggccggacgctggaggcgatgagcaagctgttcggcgccaccgacgacgagctgaaaccccaggacggggccacgaaagacaagcagaagctcgaactggccgccaccggcaccaactaacttcacattattagagggtcttgttgagggtggtcgtgcgaagaacttgtgcagtaggcagctagctagctagctgccattgttgccatatgagctaagctaggctgaagcaacgtgggaagattcgctcgctggtccggcgcagctggagagcgacggccagcaagctcaggccggccagctcgtggctcttaaagttttttaaatcatgtctctaagttcgtggactgtatttc

SEQ ID NO: 10489 - DNA, 757 bp, Zea mays
  Clone ID: 700930218_FLI
gttggggccttgggggagctggccaacggttccgttgtcgctccatcgctgccgtccgccacgccatccccgacggaaactgccctgccgcggctgcctcactgtctgccagactgcccacccggccccgtctatcccttggaaagtcagacgagaaagcgtgctgggcaccgcaaggaaagcgaccacgaaaccgcgcgcctcctgcctctccatcttctccatatatactacctatcgaccgtgtccggcgggccggacctcttgtcgtcttggtgcgcgcgctcggtttcccttcctttttccctcgcgcgcggccaacctagaaagcgacggcggagccggagagggaaggggaggcgggccggctggtcaagggcggacgatgtgctgcggcggcgacggggagtgccggccgctcgggtggctcctgggcctgcccttcgcgctgctcgccgtcctcgtctccttcgtcggcgccgtcatctggatcatcgggctgcccatctcgtgcatctgcccctgctgcctctgcgtgacggtgctgctggaggtggccgtggagctcgtcaaggcgccgctccatgtcatgacctggtttacctccaagatcccctgctagctgtcccctgctttctgctgtgcggatcatacatacatcttgctttagccggagaggttgctgtactgtactgtactgttgtttcgtttcgtcgtcgcttggtccgttcgtcctagtgctactttgggtttctgc

SEQ ID NO: 10490 - DNA, 1586 bp, Zea mays
  Clone ID: 700930219_FLI
cgccgcttctagcgccccgatacgcggcgccggcgcaggcgtgcagccatggcgatgagctggatccgatcggttgttaggagggccctcatcgctccgaagccgcggggctcccgccagtttactgtcaccgccgccggcggcggcgcgacgcagaccgaaagggtggcggcggagatggtccgctacgccctcggcggcgccgtgcaccggagctcgccagaggaggcgatgcggatactggagcaaggcgcctcgaacctgcagggaggaggcgagggcagtgccgaagctgttgggttgctcatgctcgctatgtccacgctgctttaccggagtggaagacgtcaagacgcagtggaaaagctcaaagcaacccaacaagttgccccttctgcagtttttagagttgcagcgtgggaagcactaatgggattacacatggaggcagggcaggagatgtcatacttgatttccccaaatgattcagttgatctgtcaatcaaatatgatagcaaatggtctgatcaggaccatcttaaatttcgggttaatgctgtcagaggacttgttacacttctgaatggagaaacagaatcagctgcccagctgttcgatggttggtgcagagacttttctagaggcgaaaaccaaacagaaaatgctgccgtttcatacggtgaatatttgcattgtgttggggattttcaaatggcagcacaagtgtatgagaaaattctcgaggcattttgcatggatgatatgtctggaaaccttttagcagctggaaacatggttcccgaggaggcttctcttggggccacttgctcatatggccagcttttatctcactctgggaagtttgctgaggcagaggattatctcacaagagctctacagaaggctgaagaacaatttggtgcaaaccacccaaaggtcggcattatattgacctgtgtagctagaatgtacaaactaaaggcaaaatctgaaggttctacttcaattatggtccaggaggggctgtacaggaaggccctagaagtattgaaagcccctgctattaattctgagggtaccagcaaacaggttgactggagagatatcatctccctcgctagaggtgagtacgcggagctgttattaattcagtctaataggaaggcggaaggtgaacggatgaagcagtgggcagaagatgcttggaggaaccgtaggctaacgctagcacaagctctagagttttcagaaccttcaaagccgactgtcgttgttgacacccgaatcggcagggtcgtgtagcttcagtcaacaatctcgtgagatgcacaaatgaagcaatccgtggatgcacctcgtgtcgtgtatattttcgaaagtgttgctccttgcgggctgcatccggtttgatccgttcaagtcccagcacactcgcctgcttgtttttcatatcacctttttgaatagggggacattcgaggatcacaaagcttgtgcatgtgatcactttaaacatttaatagcatatgtatatgttattgtacacagaataacaccacttaaagcatctttacattttgattgct

SEQ ID NO: 10491 - DNA, 765 bp, Zea mays
  Clone ID: 700930274_FLI
cgacgagagggaagcctgataaaggcttcgtatccttaaccgtacgattcgtgaggcatatacggatcagacggtttgcgattgtaaggatagcgtgctgattagatgaggaggtaaaaggattggttgtgtcattgtgtgtgcgcgtgcctgcgtggctgaagcgtcccgatcctttgggactcaaatgtgaaacaattactagtcccaggaggctagtaaacacattccttacttcaaatagtacagagtttagataaatttgttacaataccggggtacaagctcgagagagccaaatagagagcgcagaaggaaaaatacactagcccaagccacaggcagaactgggtgcagacacagccctcttaatcgagcatagcagaaaagaagtcctcggctgctgaaaaacataataaatctgggtgaatacactaggtattccgcaagcccaccccgctcccatagagagaaagagacctatgatgtacatgctcaatttggtggagttgtagtcactcatcattttcttagagagaggcagttacttgaaaaaaaaaaaaaaaaataaagaaaaagtggagatttataaatagataaagatgaaaggtatataaatataggtgtaggtagttcgctaaaaaataaaatatgggggccacccctatgttcccctttacccccgggatttattccggaacgtgtcctgtggagtgcaaccttttcccaatagggggacccatataagctgggggaatactgggc

SEQ ID NO: 10492 - DNA, 830 bp, Zea mays
  Clone ID: 700930323_FLI
ctcgagtcgagtcttgccgacctggggcctgctgcgcctggatgaagagctgtgctgagagaatcattaaagcagcaccgggtccttgctttgcgcgttgctgttcgcataaacaagagatcctagttctactcccaagcaatgtatccgtcagcccctccggacgcgtataacaagttcagcgccggggctccgccaacggcgccgccgccgccggcagcgtaccaccagcagcagcagcagcacggagcgaacatggacacttcacgccccggcggcgggctgaggaaatggtccaccggcctcttccactgcatggacgacccggggaactgtctcatcacatgcctgtgcccctgcgtcacgttcgggcaggtcgctgacatcgtggacaagggcacctgcccatgtatcgcgagcggactggtgtacgggctcatctgcgcgtcgacggggatggggtgcctgtactcgtgcctctaccggtccaagctgagggccgagtacgacctggacgaaggggagtgcccggacatcctggtgcactgctgctgcgagcacctggctctgtgccaagagtaccgcgagctcaagaaccgcggcttcgacctggggatcggctgggaggctaacatggaccggcagaggcgaggagttgccggcggcggcgcggtgatgggggcgccgccggccataccgctgggcatgattaggtagatgattgattgatgcggtggcagaacttgctttcgtggttcttttgtttgactatgtaatgtatcttcgtttccatcgattctatgtaatttaactgtccctttttttggctc

SEQ ID NO: 10493 - DNA, 1226 bp, Zea mays
  Clone ID: 700930330_FLI
gaaggaccaaagctaaaccccacgtccccctcacgcgctcccatctcccaccccccggcacgcgccgaaacccaagctcgcgcgaaatccaaggtaagaatccatggggggcggcggcgccctcacccccaccagcaccccctcctcaccgtcgagcccgtcggagtcctttcctcccgagttcgtcgagtgcgtagccgtctcgccggtctccgatgacgacgaatcagatgattgctgcgtttgcgacggcgacgatgtggactccatccgctacttcaaccgccaactgcgtgaggcgaaagagttcatcaggaggtataagcctggggactggattgagggagtcggaagtgcaaaggctggacattttgtcttgcctgaggtcaccacattgctcttggtgggccctagaggttctggcaagagcacacttgtaaaccgaattactagggtctttgacaaggatgatgatccttttgcaccagatcgagcacaggtgtcatgcaattcaaaatcaaatggtacaatgtttcttcgcgagtatccaattccaaggaattcaagtgccgtatgtatttacgatacacgtggctggtcaaacgacctagagaaaaatttcaaaatgctgcatcagtggatgacaaaaggaataagccatggggagacaacaatgtgggatgatgatgaaggcaataagatagggaacatgaaaccattggggaggcaatacagttttcttcgttacaaaatccggaaggtcaatttcgtgttatttgttgttgatggtgttgctgtcctcgagtcaatggatgacagcaataaaggatacactgagatacttcgtcaaacttttatgtatccgttcttgtcgattggagatgataaacctgttgttgttgtcacacatggtgatagactgtcgatacagcaacgtgttcacgttcaagctgagttagcagagctactagatattcctgcccagcaaatttatgatataccaggtgcttgggcatgaaactctcaataaaatggcagagcaattgatgggcttagatgcagtcattgaagtcgccattattttcctatgcatcctggtcctgctgcttcgattttccgataaattggtgcagccgtagctacgttctgcacttggggttgtaactaagaaaacatcatggtgactacttgtcctcctcagctagtagagtaccctaactactttt

SEQ ID NO: 10494 - DNA, 462 bp, Zea mays
  Clone ID: 700930374_FLI
gaaatggttttagtgagaacattgtggctgttcctgttaccaaagtggtttctgaacttttgccaatgttcgaagcagtgccagtgcgaagcgctgtccaggcttgattccatactgagctgactgaaggaaactctccacgctgaggtctcaattctgtctgggatgacaagaaatggttttagcgagcacgttgtggatgttcctattaccggagtagtttctgaacttttgcctacgttcgaagcagtgccagacgaagggctgtccaggcttgattccatactgaatagttgatggttgtattcattttgtcattcacatagattcttattttacctccacgattacacgctgttttctggtgatgagtggtagttgggggctagcctccaggtaaagatactttctgaacagaatatggttgctgaagctattgatagctgtacagttatggccgct

SEQ ID NO: 10495 - DNA, 732 bp, Zea mays
  Clone ID: 700930453_FLI
gtttttacagacttaatggttatgcactagatgatgtaacgttctcggttctccccttccgtaccgccagtcggtacttcagttattagtcagcagattgtgaagaaacagctgtctccaaagcgagaagacgaagaaaggggaaatcgagagatgagctaccagagagtccctcccgaggaaccctaccctcctccaggacatcctcgatctcaggcgcacccttacccaccgccaccagatgtgtacccgcctccccctcggggccatggacatccaccaccaccccatggcgtgtacccgccgccgccgcagggtccttaccccccaccacagcagcctccaccggggtaccagggctacttcaacgaccagcagcgtccttactacccgccgccgcatggagagcatcaacacaaccaccaccagggaaaccagggtagctcctctgggttcctcaaaggatgtttggctgctctctgctgctgctgcgtgctggaggaatgctgcggctgcttctgagacgtgagatgtccgggaatccgatcgcaagttatcgtcgctagcattcgggagcaccccagttattatcatataatagtaactgtgcttgtaaataatctggagcagcagtgttcatgagctcccagccccgcatttatattctcataatttgtagtacgttctatgatttatccgaaaataaaggactctatatatgggattctaaat

SEQ ID NO: 10496 - DNA, 774 bp, Zea mays
  Clone ID: 700930466_FLI
aaagactggaactcctattgcagtgcagcatgcgccagcgccaccagcagaaaaaccgcgtgtcgccccaaagcctccgactccagcaaccacaagctatgctgatcggccatatgtctgcccctatgaaggttgtgacaaagcatacattcacagttacaaattgaaccttcatctaaaaactcagcaccctgaacacggtcaagaggaaaacggtaaggtcggtgcttctggtgggcagcatgctgcgaacgaacacacttaccagtataactatgccgaggttggcgagattgcaccaaaccccaaaaggagcaagacgaatcatgggcacaaggtccactcatccaaagcctacaatgccaaggtttcgagagcaatgccttctgacattggcgtcaggaaccagtggccaggtaaagctacgtaccaagatgatagtgaagagacggaagaagatggaggcaacaacattgaagatggctggagatatggcaacaatgatgacgatgaggaaacaccagatgaagattgacctttatttaggtttggatatgtagatatatgagggtgatctgttgtcctttagtttcaatgcagtcatggggaagttcaagctttaaccttaggtagtagttcattcagatggtgcatggatatattgtactcagttacctgctcctaaatgctttcactcccctatcttccagagccacatgtattttagatagtttggatatgtttgccttggaataaattttcatttgaaatgtt

SEQ ID NO: 10497 - DNA, 1106 bp, Glycine max
  Clone ID: 700940966_FLI
tcctaatggacgacgtatagctgtgaaaagattatcgacaaattcatcacaaggttcggttgaattcaaaaatgagattttatcaatagcaaaactacagcatagaaatcttgtggagttaataggtttttgtctagaagtgcaagagaagattcttatttatgagtacatgtccaacgggagccttgataactttttatttggtttgattcttgactttaaactcttgaataatatcaaattgatgattaatgtattttgcattcttttcaatacattatatctttacaaatatatgtttcgttctatcttaattcatttaacctaatattgcagatcctcaacaaaagaagttgagctggtcacagcgttataaaattatagaaggaactgcacgaggaattctttatttacatgaacattctcgccttaaagttatacatcgtgatcttaaaccaagtaatattctattagatgaaaatatgaatcctaagatatcagattttggtatggctagaattattgaactaaatcaggatcttgggaaaactcaaagaatcgttggaacatttggttatatgtctccagaatatgcaatatttggacaattttctgaaaaatctgatgtttttagtttcggagttatgattatagagattatcacggggagaaagaatataaattctcaccaattgcccgatattgtagatagcctcatgagttatgtttggcgacaatggaaggatcaagcaccactgagcatattggacccaaatttggaagaaaattattctcaatttgaagtcattaagtgcattcatattggtttactatgcgttcaagaaaataaaaatattaggcctactatgacaaaagttattttttatctcgatggtcacacacttgatgagttgccatctccacaagaaccaccatttttctttcgagatataaaggataaaaaaatacctatgcaacatttttctgtaaataagatgtctacaagtatattttatcctcgataataagttaattctattttgtagcattatttacttgtgtttctaatgattgaactctcatttatagttatgcttatggttatc

SEQ ID NO: 10498 - DNA, 681 bp, Glycine max
  Clone ID: 700941045_FLI
ggaattgaacactggggtcaggatcatcaacctagctagctagtgtatacaacaacaatatgaggaagcccgaggtttctggaaaaaacaacaacattaataacaagcttagaaaggggttgtggtcacctgaagaagatgacaagctcatgaactacatgctaaacagtggacaaggttgttggagcgatgtagccagaaatgcgggccttcaaaggtgtggcaaaagttgtcgccttcgatggatcaattacttgaggcctgatcttaaacgaggtgcattctcaccacaagaagaggaaatcatcatccatttgcattcccttctcggaaacaggtacaatatcctctacacccttcttttctacctacatatgcatgtttttattaccatatttgtatgatcatgcatctttaactatatatgccataatgcattttatacttaattctatatgatcttcagtgttgcacatgtattatgtatttgtaaatccaaatatacttatatatacgagcgtgtgtacgtatctcaattatttataatgcaaatccaaagtaattaagcgtatctgacatttctaacatatgtaacacccactagctccttctaactttagccatcgtctttatttgaaaaagtgaaagggagatagatgcatgattaatatgtttgaaaag

SEQ ID NO: 10499 - DNA, 546 bp, Glycine max
  Clone ID: 700941055_FLI
ccggttcaaaacgaggaaattctagccaagaagtataggattcggttaaggggaattgatgcaccagaaagtgcaatgccatatggaaaggaagctaaaactgaactgaccaagattgttcaaggcaagcctttgaggatccttgtttatgaggaagatcgttatggtcgttctgtaggtgatatctattgtaatggcatttttgtacaggaaatgatgttaaagaaaggtttagcatggcactacgtagcatatgacaaacgaccggaactggaaacatgggaaaaacaagccagagcaaagcgtgttggattatgggcttcaaaaaatcctgagaagccatgggaatggagaaaggacagacgagaggctgcatgacaacacctaaaatcagactagcagcattattgccaaaagaaattgagtctagggcaaaacaaaagcccttcattcaatattagtgtatcattgttgtaacaaattgcatgtatataaaacaactgtcaaccaactagatctatttgtcaatggaatgcttggattatt

SEQ ID NO: 10500 - DNA, 1404 bp, Glycine max
  Clone ID: 700941060_FLI
ggtatccattctcatccactatcttagagactccaatggaggatccgtttagcaatttgccagatgaaattctaagctgcatagtttcttttctgccactagaaaccagcctcatatctactaggtggagagacctgtggaaccaagcccttgttagacatggaagcacacaagacgacgtagctagtgttgttgctggttttctgtctcgttttgaagagcttgatccattaaaacatcctcgcaaacttcattttcacttttctgatcaagacactgcactctttgcatccattgcaaccaacagtaagcttcttcttgatttccctgctgggatcaaagacctcaaaaagcagtatgagctcaagtttatactcaacaagcatcacatcacacacaacactgtcccccccactttcttagtcaaaactctttatttgaaatcagtgagtcatttgactagtgagttgatttcctccatcgtttcaaatttagagcatcttgagaagttggtgattgttgagtgcaccgggttgcaatctttgttcattgagtctgaatcaaagcttcacgagttaaccatattagattgcccccagttgaagtctctccatcttagaacttctaagcttaaaagtttcagacttgatggacctcttccaacgatttggccagaatcccatttcaaccttagccatgccatgcttaatttcagacttggaccaagctgtgctgacttcaaggctcaatatttcaaccaaacactgttgacaataaagaattgtgaagctctcactttatgtgagtggacttttcaggaattgatatggccatcgatttctccaagtgggaactttatattctataaaataagagagctatggtggattcacaaccataggggtgaaaatagcatggacaccttagtctcctttttgaaattatgtcctgccttggagcaactttttgtgacgaatgattctacaagttattcggctccacggtccaattcatattgtttaacgcaagaaactgaatatagtacaaaattggagcatctaaaacggataaagtttatgggatttacaaatcgagtggatgaaatctcagtggcaaagaaattgattgaattagtcaagggagagcctccaaagatagagacatcggatgagagttgcttgaatgtagtgatcgtgcagtgatttttttttttttatgtagaaaggaaaattatatgaacaagtcatttcccatgctctttcaggctggggctggcatagcgttataattcagaagagataaaatatgtcacttttggagcctttgtttctatatatccttttctgcaatgtaatcttgtaggggacagcacatctttaaatatggtatgattcattttacggc

SEQ ID NO: 10501 - DNA, 742 bp, Glycine max
  Clone ID: 700941062_FLI
aaaaatggacggcgaactaagagtgattgtggatggatttctgtctcattatgatgaagttttcaggctgaaaggggtggctgctaaaacagatgtgtttcatcttattaatggcacatggacttcaccagctgagagatgcttcctctggataggtggttttaaaccatcagagctcatcacaatgttgataccacagttagagcccctggcggagcagcaaattatggtcatatgtgaactcgggcattcgtcactgcaaacagaagaagctctcagtcaaggtcttgaacagcttcagcagtctcttgttgacaccattgccggcgggcccatcgccgacggtgttcaacagatggtggcagccatgaccaagcttggccaccttgaagaatttgttgctcaggctgataatttgaggcaacaaacccttcaccaattatgtcgattgctgacagttcgtcaagcagcaaggtgttttcttgtgattggagagtattatggccgtcttagagcccttagttctctttgggcatcaagaccacgagagtcattgatcagtgatgataactcatgccaaacaaccactgaattgcaaatggttcaatcttctcagaatcatttctcaagtttctgaaatacattgtaattgaaacctggtgcaagtggatttctttgggctgctttagaaagaatggaaaagagtgtcagcatcatcaaagaattaatatctttttttttc

SEQ ID NO: 10502 - DNA, 800 bp, Glycine max
  Clone ID: 700941125_FLI
actcaaagttgatcgaaacctcttttacaccatcggtttggccaagaattcttgccccacatgcgtcaatggaactcggctacttgcttccttaaacaatgtctcttttgtgatgcctcaaaccgcgcttctccaagctcactacttcaatatcaagggggtttacagaactgattttcctgataagcctctaactgcttttaactatacaggtgcaccattaacggctaatcttggtacttcagttggcacaagaattagcaaggttccctttaattctacagtggagctagttttgcaagacaccaacctcctcactgttgagtcgcatcctttccatcttcatggctataacttctttgttgttggaactggaattggtaattttgatcctgcaaaagaccctgctaagtacaacttggtagatcctattgagaggaacactgttggggttcccaccggtggttggaccgccattcgtttcagggctgataatccaggtgtttggttcatgcattgtcatttggagctacacacaggttggggattgaaaacggcgtttcttgtggaagatggtccaggacaagatcaatctgttgtgcctccaccgaaggaccttccagcatgctagacatgaatgaatttgttaacaaccttggattgtgttatatggaattaacggtgttttattcaacatttattgtctgttaatacttcctgctaaagatgcagagagtttcaattaagagttaacaaatgtaagcaaagtttggaccatgtacaaaatttattgacctgat

SEQ ID NO: 10503 - DNA, 1237 bp, Glycine max
  Clone ID: 700941157_FLI
gagggagttaagggtgagaggagcagtggtagagctcaacaataccctttgaggccagaggctgaagactgtgcattttatctcaaaactgggacttgcaaatttggattcaattgcaaattcaatcatccgcttaggaggaaaaaccaggctaaaaaagagaatgcgggagaaagagaagaacaggcagaaagatcaggccagatggaatgcaagtattatttaaggtctggggggtgtaagttcggaaaggcttgtaagtttaatcacacaagaggaaagagttcatcagcatccgctaccgagcttaacttccttggcctgcctattcgtgtgggagagaaagagtgcctctattacgcgcactggctcttgtaagtttggagcaaactgcaggtttaatcatcccgatcctacaactgttggaggaggtgattctccttctggttatggtaatggaagttctatttcgttacaaggtgtatcacaatcatctatatcctcatggtcttctactagaccattaaatgaatctgctccttttgtgccggtgatactttcacctaatccaggggtttctccccaaagttctgaatggaatggatatcaggcacctgtctatctctctgagaggagtctgcatccaccttcaacatatgtcatgaacaacccagctatggaatcaaatgtttatatgcaccatcaaaaacaaatgctggttgaagagtttccagaaaggcctggtgaacccgaatgcagctatttcttaaaaactggggattgcaagtttaaatctaattgtaaatttcaccatccaaagaatcggatagcaagattacctctatgcaacctcagtgacaagggtctacctttgagaccggaccagaatgtttgcacatattacagacgttatggaatttgcaaatttggaccggcgtgtaagttcgatcacccagcgccctcaactatggctggacatgatcaacaatccacatatataaactcagctggtgttgatgtggctgaaaatggaggtgccgaagatgggaatcagcagtctgtgtaaaacattttctggctttgaatatgcatatcacccataatttgtaatcttatctaaaaacatgataaatttatttaatttcactagttatgctaatgtggcacaagccttacagaatagcaatatatacggctaatagaagttttattacagtaacatgtagattattatctt

SEQ ID NO: 10504 - DNA, 1684 bp, Glycine max
  Clone ID: 700941180_FLI
ctgggtactagcagttttcccagctgtgccttttctacccattgggagaactgcagggtccctgcttggtgccatgcttatggtcatattcaaagttcttagtccagatcaagcttatgctgcaattgatctcccaattcttggtcttctttttgggactatggctgtcactatttttcttgaaagagcaaacatgttcaagtacttggggaaattgctctcttggaaaagtagaggaccaaaggacttactttgtagaatctgtctcatttctgctatctcaagtgcttttttcaccaatgacacttcttgcattgtgttgactgaatttgtgttgaaaattgcaaggcaacataacctcccaccttaccctttccttcttgcacttgctacaagtgctaatattggatcctcagcaaccccaattgggaacccccagaatttggttatagctattcaaggtaaaatatcatttgggaggtttctgataggtattcttccagctatgcttgtaggagttgtggtgaatgttgtatttcttatagccatgtattggaaggtactatcttgtcctaaggatgaagaggatccagtttcagaagttgtagtggatgaggaggttgtttctcatcagttttctccagccagaatgtctcattttacatcctttaattctcaagaatgcaatggcagtgtagaacttgctaatagtattcaaaactcttcccaagttcatgttatgagagaccaatcaactccaagtgaaagtgaagttcagatggttcatagtggcacaaaggatttcacaacaaactcaaatgcatccaaggaagggacaaatgatacaaaggaggaaactaatccttcaaaaaatgttgcaatagtagtggataaacctattgaagcacttgttatactctcttcaggagaaaaggactatatgaacaaaaaatggaagagggtactgtggaaatcttgtgtttatgcaatcacactagtaatgttgattgcaatgctcattggtttgaatatggcatggactgcaattgcagctgcaataactttggtggttcttgatttcaaagatgcagggccaagcttagacaaggtctcatattcacttttggtattcttctgtggaatgtttatcacagtagagggctttaagtccactggaattcctagtgctatgtgggacttaatggagccctattctcgaatagatcatgctagtgaaacagctatacttgctatagttatacttgtcctatcaaatttggcttcaaacgtaccaacagttctattgcttggagcaagagttgcagcctcagctgctgcaatttccaaaggagatgaggagagggcatggctaatcttagcttgggttagcactatagcagggaacttttcactattaggatcagctgccaacttgatagtgtgtgaacaagctcgtcgagctccaaaccttggatacacattaaccttttggactcatctaaaagttggccttccttcaactcttatagtcactgctattgggttgacactcataaaatgataagagtttactaaaaatccaaagaatcttatcgtagaagtttacacaagcaaagtcagttaattgtaatgtattttaacgttgtgttagaaaatataggtagatgaacaaggaattttctct

SEQ ID NO: 10505 - DNA, 298 bp, Glycine max
  Clone ID: 700941190_FLI
aaggagctcatgaactcggataggggaaaagagattagacagaggattttcaaaatgaaaaacagtgccaccgaagcaatgactgaaggtggatcctcagtagttgcattgaataggttggtagaaatatggagggagcattaatggtatagaacttgagaatgagagaatgatttagaaatgtgcatgagattcagtataagaactgaatttctttctcaataaagaatgagcacgagttaagttgttgtaaattatcgatgttctgaatatgaattcggtcgtgatatttattact

SEQ ID NO: 10506 - DNA, 608 bp, Glycine max
  Clone ID: 700941195_FLI
gggagtttgtcattcttccacttcccatgccaccctagagaagaaatgtataggaaagccaagatgcacggtcactgtatcaaacagtaactttgggcaagacccttgtcctaatgtgttgaagcggttatcagttgaagctgtttgcgctcccaactaattggagaggctgaatgattaaggaagcacccttttacgtgtagtgtgaagtgacttaacaagcacacgaaagaacaataatagtataggtaaagtaaagtgccatagttgtttttagggagagaaagtaactatgttctgacatgttggtgccgaaggcacgaggttttatagtttcatttggtgatgtttttacgggagtgtataaattagtgattgttggataggtgaatctttaatcagggagtccaaaatttggacccctggtgtagtagttcccggccttttaagttttaactataggcacggggaagagagggagtttggttggtgtgatgttttttcgttttactttgtggggtaaaattaatctccaaatcaggttcaagttgggagcggatcctactgtaaccattctacgtttatttaaagtctccattgttatgtgc

SEQ ID NO: 10507 - DNA, 721 bp, Glycine max
  Clone ID: 700941245_FLI
caaactggaactgatggaagccttatatctgaagagggttccacacataaggcagcagacccgtttgatattgggggtggacacgtggatcccaacaaagcaatggatccaggactaatatatgatatcaccactgaggattatgttcaattcctatgttccatgggtcacagtagtgcatccattagcaaagtgaccaagaccaccacaagttgtaagaaaggaaaacaccaaacactgaacctcaaccttccttccatattagttccaaacctgaagagggttgcaacagtaatgagaacagtgacaaacgtgggaaatattactgcagtctacaaagctctactgaaggttccatatggcataaaagttagagttgaacctcaaactttgagtttcaattcagatgcacgaatccttaactttagtgtcagtttcctgtcaactcaaaagtttcatggagattacaaatttgggagcctaacatggacagatggcaagtattttgtgaggaccccaattgctgtgaggaccatacagtttgaatgaataataagcggatgttatatgtagaaatgagcttaattggccaacaaaatatttaagttcttgtttggagtcatactataaacatagcatattctttggtgagaacatccagcatatttctttgaggaaagagactcgttactcatggaatataatgttcatttttaagatt

SEQ ID NO: 10508 - DNA, 929 bp, Glycine max
  Clone ID: 700941304_FLI
tgagatcgttgtcatcggttcctgcatgacccccgcggactccattttcaacgaatgcgaagagagtttgaagagcatcttgtcggagataaggctgaatttgaagacaggcaagtccacgagaaaacccattatctcggaatccgaacaagtcaacttggaagccgggatggtcaacagaaacaagctcgggagaaagacgaagttcgggtacttagcacttgcggagccgtggcctaaggtttcgggttttgccaaggttgatttgttcagtggggaggttaagaagtacatgtatggcgaagagaggttcggaggggagcctctgtttcttccaaatggtgtcgacggtgatgaagacgatggccatattctcgcattcgtgcatgatgagaaggagtggaaatcggagctgcagattgtcaatgccaaaactttgaagcttgaggcttcagttaagcttccttccagagttccttatgggtttcacggtacttttattcattccaaggatttgaggaaacaagcttgaattcaattattgggtgacgacggtaaaaaaaaaaaaaatgtgatttttttttcactttgggaggagagatttaactgcgggatgcttgcagatacgcccccggaatctactcctcttcttttctgttgcagatttttatttttactttttcttcattttttttttaaaatttggggttaattacttttgagtgagaggttttggggaccagcgtgtagcttttgggtgtagttagcaatgaagctcagctggtctctgttttttctttcgcttgatgtgcatgtaaagtatattagatgaaaaaaaaggtacatatataatatatcacagtatagaatgtgatatactatgatattatgtggttacggtttactataaactacttctgttcatcatt

SEQ ID NO: 10509 - DNA, 736 bp, Glycine max
  Clone ID: 700941353_FLI
attcggtcgagcgacaacggttcaaacaattctgcatttgctgacccttttgcatttggttcaggccatgttaaccctgaaagagcttctgatccagggttagtctatgacatcaccaccaaagattacttaaattacttgtgcagtttgaaatacacatcctcccagattgctatactgtcaaaaggtaattttaaatgtgacaaaaaatcagctcttcatgctggtgacttgaactacccttcatttgctgtgctatttggcacgagtgctagaaatgctagtgtggcatacaagagggtagtcacaaatgttgggaagccctcaagttcttatgcagtgaaagtggaagaaccaaagggagtatctgtctcggttgaaccaaggaatattagtttcagaaaaattggtgacaaattgagttataaagtgacctttgtttcatatggaagaacagcaattgctggcagttcatcatttggatcacttacttgggtatcagataaatatactgttaggagtcctatagcagtaacatggcaataataggaaaggtctttgtaacgtttgagacttcagagaagcataaaactattttttaagctcttagctagcaggggaactttacttgatgaatgatgatccgtcacagtactattgttgtaaccttgttaccatctttaaactttatagaataaaaagaacacactttgttgtgaaattatcactcatagtt

SEQ ID NO: 10510 - DNA, 562 bp, Glycine max
  Clone ID: 700941478_FLI
ggaagttaagaaaaatggaggggttggcatgattttggcaaatggtgtatttgataatgatgaagaaaaagttggagctgatattgtgaaaagagctcttagttaccctttgaaattaattgccaaaaacgctggtgtcaacggtagtgttgtcagtgagaaggtattgtccagcgacaatccaagatatggatataatgctgccaccggaaaatatgaagatttgatgtctgctgggatcattgatccaacaaaggtggtcagatgttgcctggaacatgcagcctctgtagccaaaaccttcttaatgtcagattgtgtggttgtcgagataaaggaacctgagcctgtacctgctggaaaccccatggacaattcaggatatggtatctagagcaacggctgcttcagtgagaagagtattttttttctcctcggatgaaatgcaaaatttggtatagccatatagcaagagtcgaaatgtattgaagtgtggtgaactagatagtgatgcatcctctcctcccttattttttttaagttaataataatttttttgctg

SEQ ID NO: 10511 - DNA, 1199 bp, Glycine max
  Clone ID: 700941569_FLI
cgggttcgaagcctattttcgtaaaaaaaatagtcgtttttctgagctcgtcgttttggtcttcgtgttgttgaagtgcaaggccatggatccagatcagggctcttcaaaagcccggaagctcaagtttaaacccaggaatctcaaaccagtccgaactcccaaaaccgaagcggatgataagcagaaggaagatagcgcagtgcctcgagctctctcgcgtcgacaagaaaatcctacaaaacgcgagcctaaagtggaaacaaaatctagcgtggaagttgcatttagtcttggaagttcatcacattccctcaggacatatggcataagtaaatctgtagatagtggctcgccatctaaatattttgccaatgagcaaattcgttcaagacattcttcggttgctactgaggatcaaaattatgcttgcatgatagaagttactgatgatgatgatgataccactgatgcatctgccaggaaaatcaaaagagagtacaaggaaccatgggattatgaaaactcatactatcctactactcttcctctgaggaagccaaattctggagatccagaaattcttgatgagaaagaatttggtgaagctgcttctagtgcggagtatgatgagaatactgttaattctgctgcagaactcgggctcttgaagaagagtcagcaacaaaggatgcttttctttaagtttcctactctgcctttggtcaagcagactaacaaggggaaggagaaaattggtaaatcaacagtatcgcaagaggccacaaagtcaaagagtgccttggaagagttgccaaggggatatatgggcaaaatgctggtgtacaagagtggagcaatcaaactaaaactaggagaaactatgttcgacgtgtctccaggttcaaatagtgtatctgtacaagatattgtggcggtgaacactgcacagaaacagtgttgtaatcttggcgagcttaggaaaagggttgttgtggttcctgatcttgattcaattgaactgtaaaacactctagacaaatatgactaaggggccacttagtagcacagtaccttcttggcttatgtgaatatatgtgactaaaaagacacccacaattggcgagtgaaaattggatactagacctaatttgacattaatgaaatatcaagtggaagattgaactcatttttttgtt

SEQ ID NO: 10512 - DNA, 323 bp, Glycine max
  Clone ID: 700941686_FLI
tgatctcaagaggggtgggaataacaggttcttgaagactgctgcatatggacacttcggcagagaggaccctgacttcacatgggaagtggtcaagcccctcaagtggaatgaatgggagttttttagcgttgcccttataatgtctattatccataactttccacgtcccttgctctgtgtttttctctcgtcgtcctcctcctattttgtttctcctgcctttcatttgtaattttttacatgatcaactaaaaaatgtactctctgttttccgaccattgtgtctcttaatatcagtatcaaaaagaatgttccaagtt

SEQ ID NO: 10513 - DNA, 1036 bp, Glycine max
  Clone ID: 700941703_FLI
ataaattagtgtagcattgtgaagaaatagatggattcaattgtggtcttgtcatggtttttgtgcgttttggtagtagctgcccgtggaggtttaggggcagtttctagggacatatttattctggcaggacagagcaacatggcaggacgaggaggggttttcgggggaaaatgggacggtgatgtcccagaggagtgcaggcccagcccgtgggttttcaggctgagcgcgggcctggagtgggaggaggcgcgtgagccactgcatgcggacatcgatgtgggcaagacatgtggcgttgggcccggaatggcatttgcgaacgaggttgtcaaagcccgtggagctggtgggctggtgggccttgtcccttgtgccgtgggtgggaccaagattggacagtggagtcgagggacgaggttgtacgatgagttggtacaacgcgcgatgcaggcgattggaggtggcacgattcgagcagtgctttggtatcagggggaaagtgacacggtgagaaaaaaagatgctgagggttataaggataagatggagaggtttattatggaccttcgatccgatctcaaccttccctctctccttgttatccaggtagcacttgcatcaggggaaggcaagtttatagagaaggtgaggcgtgctcaaatgggaataacattacctaacgtcaagtgtgtggatgcaaagggactgcgtctgaagccagataaacttcaccttaccaccatgtctcaggttcaattgggcattcggttagcacgtgcctatctcgattccaccacccaccatcactaccaatttaattttaacattaatcatacgcaagttttagcttgttgagaatgcatttttgtatatttggctgtaggcaaagaaagcgtggctcctcttgaaagctacaatgtgagagaaggctttggttttctcatctatagtagcccttgtttggattaagcatggctcattaagctaattcggaacatatataagaatagagttaatttctttaaagttt

SEQ ID NO: 10514 - DNA, 1994 bp, Glycine max
  Clone ID: 700941739_FLI
tttattgctctcatggcttttagtcttgcgtggctagttattgaagctggagttggtgttgctgtttttgtgcgtttctttgttaacaagagaggaatggagtctgaaatcattgatagactcggaaatggattctctcggcccccatttgcagccgttgtggttgtatgtactgtagtttctatcttggcttgtgtgcctttgggtgagcttttctttttccacatgatactaattaggaagggcatcactacctatgaatatgttgtagcaatgagagccatgagcgaagcacctgctggagcatctgttgatgaggatttgccaaatatactttactctccaacaggctcagccacaactggattgagtggaggaagttcacttggtttgcagtataaaggggcttggtgtacccctcctagggtattcgtggattatcaggatgaagttgtgcctcacttggagcctggaatgctaccatcaactgttgatccagatgcagctgggattgcagaaagagggcaaaagatgccaaaaagacctgttcgtattagtgcttggaagcttgctaagttggattcacaagaggcagtgagagcagctgcaaaagccagggcatcttcttcagttttgcgacctgtagataaccaccgtctaccagatggagaattgagctctagtggcaacatgagcatcagaagtagtttgagcacagagactggaactaacaaggaaataaaacacgagttgagattgtctccagtgagaaattctattgctcctagtcaaggaagtcgtgatgagtatgagactggaactcaaagtatgagtagttttagtagtcctagccatgttcaagaggcagttacactcagccctcttccacaggaccacagtttgggtggcttcagggcaggtacctcaattcctagtttggtgcctgagcgtcctttaacttctaaagcaacattgtcaaacttcaggaacccaatatctagtccttctcttggatttgatgggaggacagcaatgccaaaaggaattggtaatgatccattgttgctttcaacttctaacacttctattctaagagacgtgaaacgggcatcagttgtttgggatcaagaagctggcagatatgtttcggttcctttattgccctctgaagctcgaaataggtcatccatgcgcatagaatttccaaatgtaaatgctgaaacaagcagtattgggagaaaatcagtgattcctcagcaggagttgtcatcatctgcacccaaatctcctgggcagcacatacagaatctgatgtatacaggagattctatcttttatggaggtccatttttgagtgcccctgttaaagatggtttgagaaatgaaagacatttggcatcaactgatgcccaagagggcagcatatcggtgaacttgcctcaagagccaagatataaaaggaatttactctcaaatcagcttcctgtgtttgtccctggtgggtttgagaatatccttcaacctcgatctggcatgaattagcttatgttgttttgagattccaatgagtggacaaagtttttgttggaatcgagaggatagtgaagagcaattaaaagggtctatgtggtagacacggttttagcctttcagaccatacaaatgaaaagtatggtgaacatctgactccaacaggtggttgtttattctgcctaatcatctagggttaacgtctgttgtcatcaaaatgcctctgggcgtttgagagagtgaaagaatttcattgtgccatttgctgaacatgccttgagaaatgtgaatcttcccttatgcggtagatgaaatctcaaagcagttatcacttattacttcagtaagcatgagcatgacatgagcctccttaatggattttaatttattattgtagcttttgttccactagatactaaaattgtcattatcttgccaatagagtattgtttggcctgtggctt

SEQ ID NO: 10515 - DNA, 540 bp, Glycine max
  Clone ID: 700941783_FLI
ggtccaagaaggagcaggtttgctttcaattgtgatccaagaggctgaagaggttgagggggaccatcacaacaacccatttgcagtgctgacctttagaggcgaaaagaaaaggacaaagacgatgaagaaaactcgacacccgcgttggaatgaagaattccaattcatgctagaggagcctcctctacatgagaagatacatattgaggttatgagcaagaggaagaactttagttttctgccaaaggaatcattggggcatgtggagattaacctaagagatgtggtgcacaatggtcgcattaacgataagtaccatctaataaattcaaggaatggagtgatgcatgttgagatcagatggaaggtggtttaagaaaccaaattagtgtgttataaggtctttttccaatagctgggtttaaattcaatactgttaaatagaagaggcaaaccacaccattgagacatccataagaaattgtcttttcgagcaacattttggccacagatatgtatatataatataattcaatt

SEQ ID NO: 10516 - DNA, 1146 bp, Glycine max
  Clone ID: 700941791_FLI
tccttcccataatcatttcttacattcataaacgacgtcgtcatcgctcttccgccctaatctctatcaagccccctctcttcctcgcctccgccctcatcggactcctcaccggcctcgacgactacctctacgcctgcggcgtggctcgccttccggtctccactttctctctaatccaagcctcccacctcgccttcaccgccgtcttcgccttcctcctcgtccgccacaggttcacgccctactccgtcaactccgtcgtgcttctcaccgtcgccgctgtggttctggctctgcgttccagcggggaccgccccgccggtgagtcgagtcgccagtacgtgattggttttgttatgatacttgcggctgcggcgctgtatgggttcgttttgccgttgatggagttggtgtacaaaaagagcaggcagcgtatcacgtactctctggtcatggagattcagcttgtcttgtgcttctttgctaccttattctgcaccgttggaatgataatcaataatgacttcaaggtgattccgcgagaagcaagagattttaagcttggggaaacaaagtactacgttgtgttggtgtggagtgcaataatgtggcagtttttcttcttgggagcaataggggttatcttttgtgcctcgtctttgttgtccggtattataattgctgcttttcttccagtgacggaagttttggctgttattgtatacaaagagagctttcatgcagagaaaggggttgctttggtgctctctctttgggggtttgtgtcctatttctatggagagataaaacaagacagggaaaagaacaagaatcgttgtccagaaacagatctgcctcaaagtcttcctcccaatgcatgattgcaagtaattaaagttgatttcactatcttttcttgtgttgaattgtcaatattgaaggctagctttggccccagatagaggaaaagaaaaaataagacaaagacaaaccgtgcaatgaataagacaaagctgttttttaatacagatttggttgcactactagatgtcatgaatatttttaatacaaacattttagtactaagttcaaatacaaacatgataacgttctacaatgtgtggaattttttgatatatatct

SEQ ID NO: 10517 - DNA, 2193 bp, Glycine max
  Clone ID: 700942124_FLI
agaattgagtgaatccatcagatatgcttctggggatcccattgaaagctggcttaactctctactttgcttagatgcttcaaacaccatccctaatattagcaggttacctccacctagcgagtgcgatttatactatgttaatcgggatacgctcttctcctatcacagagatagtgaattatttttgcagcgaatgatggccttatatgttgcatctcattacaagaattctccaaatgatttgcaactgatggcggatgctccagcacaccacttatttgtactacttggacctgttgatgaatcaaagaatcaacttcctgatattttgtgtgtcatccaggtttcccttgaggggcagatttctcgtaagtcagcaatccaaagtttgaccgatggtcatcaaccttttggagatcaaattccatggaaattctgcgagcaattccgagatacagttttcccctcgctttcaggtgctcgtattgtacgcatagcgacacacccaagtgccatgaggcttggatatggttcacaagcagttgaacttttaatacgctactatgaaggacaacttattcctatttccgagattgatgttgaagataaagtgcaggctccacgagttagagtcacagaagctgcaaagcaagtttcactacttgaagaaaatataaaacctcgaacagatcttcctcatttgctagtacatctgcgtgaaaggcagccagaaaagctccattacattggtgtctcctttgggctaactttggacctttttcgcttttggaggaaacataaatttgctcctttctacattggccagattccaaatgctgtgactggtgagcatacatgcatgatcctgaaacccctaaacaatgatgaaattgaagctgatggatcaaatcaactgggcttttttagtccattttaccaagattttagacaaagatttgctaaacttcttgcttccacttttcgtgtcatggaatacaagcttgctttgagcataatagatcccaaaatcaatttcaagaaccaagaccctacggaggccacatctgataaatgtctgcagtcagtcaaagattatttatcaccacatgatatgaagcgattagaggcgtatgttgacaacctggctgactttcatctgattttagatttggttccaacccttacacatctgtacttccaagaaaagctcccagttacgttgtcgtatgctcaagcttctgtgttactctgcattggtctgcagaatcagaacatttcatacattgagggacaaacgaatttggaaaggcaaacgatattgtctctatttataaaggttatgaagaagttctacaaatatctagatggccttgcatccaaggagattgaatcaaccttgccaagactgaaagaaattgtcatggaacctcatagtgtctctttggacgaagatctcaataatgcagctaaacaagttgaggatgacatgaaatcaaaagcagaagcaacctttactcccgaattgctccagcagtttgccattgaaggagaatctggctttgagactgttttacaaaataatggtggaaaaatacccataggtggtcttattagcgtgaaatccagcaaagtgaagcatgaaaaggagaagggaagtcataagagtgacaaaaagcggagtaaagataaccacaaccataaatcaagcaaaaggaaaagatcttgaattgaccatgggaagaaccacccaagataactatgatgatttcggggattgttggtccttgagtcagaacagcaatataggagcaaagtgaacgcccaaattgaagggggaatccactgacaaaagctcagttcatattcttcataaatttcaattgcaggattccgtattattgctgctatacttcaattttttttttttttttcatgtttcatgggaattagtggacaatatgacggcattagtatcaatgtgacggctgcagagaaatatatcaattttaccagctttttctttggcagctcaagaggataagatgaccacaatttccagttttttctccttttgtggacaactacatcattactatatatgcatttttgcaagaaagtatatcttatacgatattattgtaaggtgttacacttgaaaattgaaattgcatagtataaagtgttaatacg

SEQ ID NO: 10518 - DNA, 1071 bp, Glycine max
  Clone ID: 700942135_FLI
ggattaacttgtttgcacagtcttttttcttgttattgtctaagaggaaggtggagaacagatggagtgagcttttggggctgcttgcgttctgggtttggtaccctttgttggtttccttcttgcccaattggtgggagagggttttgtttgtttttgtgagcttttctgttacgggtattcagcatgtgcagttctgtttgaaccatttctcctcggaggtgtacctagggccaccgagcggcggcgattggttcgagaagcagaccaaagggactcttggtgtggactgctctccttggatggactggtttcacggcggcttgcagtttcaggtggagcaccatctgtttccccggctgccacggtgccatttgaggaagattgcgccattggttaaggatctttgcaagaagcataatcttccttataattgtgtgtcgttctggaaggccaatgtgctgacgattcagactctgaggaatgctgctttgcaggcaagagatggttccaagccggttcccaagaacttggtttgggaggctgttaacactcatggatgaaggggatttgagtggagcttcctgtggttttgctgtcattgatggtttgatggaggtgcattggtaggtagggatgaaagttatatatagttgcataggtgctcttggtgttgttctcctatcagaattggagtttttctatcattattatgtggattaccaacataaaacttcaaatctgattggaggaaaaaaccaaacgcatccaagaaactgcatataagttttgtcccgtaggtgtccttggttttgaagagagaataattgatttgcaacggttactcattgtcttggcaggggattggctaatctccttttggaaatgggtaagaaagaaactactgacacttgtcatatgtggtttagtaatgctcagcacttcatgcttgagaatgtaagaacggtttatcctgctttggcctttggcagtttcattatgagcccaagggtctctatattattatataaccatttgtattatgtctttgaatacattgtcatttggagc

SEQ ID NO: 10519 - DNA, 1468 bp, Glycine max
  Clone ID: 700942145_FLI
tatgatccactgattccactcagtgaattatgaagtgatctgaaatcacccgcgaagccgttaggataaggcaaagagagagaaacaaagcggcttccaatggcgactctgcggctcaccttctccgactcaaccaccttgttcaggccttctctaccttccacgcgaaccttctctcgaaaccgaagcctcattgtcaaagcctcttcttctgaagacgatttctccagaagcagcagaagacgcttcatcgccgaaaccgccgcactctcggtctcgctccctcagttaacggcgcgttctgaagacgcgctttcggagtgggagagagtgtacctccctatcgaccccggcgtcgtgcttctcgacatcgcttttgtccccgacgaccccaaccacggttttcttctcgggacgaggcaaaccattctggagacgaaagatggaggaaacacttgggctccgcgttcgattccttctgctgaagacgaagatttcaactatcgattcaattctatcagcttcaaagggaaggaagggtggattgtcggaaaaccttcgattctgttgtacacttccgatgccggagacagttgggagaggatacctctcagtgctgaacttccaggggatatggtgtacataaaggcgaccggtgagaagagtgcggagatggtgaccgacgaaggtgcaatatatgttactgcaaacagaggttacaactggagggctgctgtccaggaaactgtgtcagctactcttaacagaacagtttctagtggtattagtggtgcaagctactacactggaactttcaatactgtcaatcgctctccagatggaaggtatgttgcagtctcaagtcggggaaacttctacttaacctgggagcctggtcagccattctggcagccacataatagagcagttgccagaagaatccagaacatgggatggagagctgatggtggtctgtggcttcttgttcgtggaggtggtctttatctcagcaagggcaaagggttaactgaagaatttgaggaggttcctgttcaaagccggggttttggcattcttgatgttggatatcgttcaacggatgaggcttgggcagcaggaggaagtggtattctcttgagaactactaatggtggcaagtcatggatccgtgacaaagctgccgacaacattgctgcgaatttatactcagtgaagtcagtctaactattactaagcctcacttttataattatacttatttatctgtctatactataaaagcataaattacttggaagagctccccgccaggctccttatgttgccaatatgtcttgtatttatattttccatctgtctttatgataattcttttaaattttaccatggatgcagttaactcgaagcaaactgttatgtgttatgttatttaaaaaagaatgagatgacaaattgtccatgacagagt

SEQ ID NO: 10520 - DNA, 467 bp, Glycine max
  Clone ID: 700942147_FLI
gttttacattgacgtgtattacaaaaatcaaatgctagttttttgggcggggctggatgtggggttgtacctggacgccatttccaccggcgcggccggttccaagtcgcttgatttgtacggaaagagaatcttgaatagggatttggaaccggggttcttcgtgaaccacttcgttaaggatttggggatttgcttgaaggagtgtcagaatatggggattgctttgcctggcttggctctcgctcaacagctttatgtgtcgcttagggctcacggtgaaggtaatttgggcactcaggctcttattttggtccttgagcgactcaacaatgttactcttcctccctcctccaatacctgaaatttttaaacatgcattgtattgtatctatagtctactttgcagaatgaatgctatcgcataataactatttggctgtttatggaatggaacttgttcagtg

SEQ ID NO: 10521 - DNA, 1033 bp, Glycine max
  Clone ID: 700942321_FLI
ttgattgcaagaatggaactccgttgcttactgttctccatttctgttcttttcgctcttggtcttgcaagagaaagccatgcccaatcatcaataccagacgaagatttttggcatgctgtttggccaaacacttccattcccagtgcattgcgagagcttctaaagcatggccgtgaaggtgttgaaattgataatctccccatgcaaattgatgatacgcagtacccaaaaaccttcttctatgaacaagaccttcatcctggcaaaacaatgaatgtacaattcagcaaaagtccctttacacaaccttttacaatattgacatggttaaagggcttgaaaattaaagacattgataaagaaggatatacttttgatgagctatgcatcaagacaaaacctaatggagcagagcacaagttttgtgcaaaatccttggaaacattaatcggttttgcaatttcaaagctgggaaagaacattcaagtactttcaagttcctttgtgaataagcaagagctatacaaagtggaaggagtgcaaaatcttggagacaaagcagtgatgtgtcataggctcaatttcagaacggtggcattttattgccatgaagttcgtggaacaacagctttcatggttccattggttgctggcgatggaaccaaaactcaggcacttgctgtttgtcactcagatacttctggcatgaatcgtcacattcttcatcaaactatgggagttgatcctggaactaacactgtttgtcatttccttggaagcaaggccattttatgggtaccaaatttagctatggacactgcctatcagactaacattgttgtttagtcaattcatcttgagaatgagattgtgtacgcagtaaaaaataaattattatgtgctgtgtgttctgcaagtacctagctatgtgcactcttaagatttgtttccctatagaagcatcatcctgtgatcagtgtgctttgatgatgctaatttgatgcaataaatatgcagtgtgtttgttggt

SEQ ID NO: 10522 - DNA, 1590 bp, Glycine max
  Clone ID: 700942358_FLI
ctttagttaactttagtacattggatattctcacaacaggagacatcaataaacagtaccaaaaaatggaggtctgtaaaacccctttacctgaggtaaccagcaaaaatgaagttgccggaggagagttacagaagtttcctgctagactttttgcagtccctcctcgaatagcccagggagctattccaggggttacagctgaatcttatcaagaggacaacaaattatggaaaaagcatgttaacgcttacaaaagaatgaataaattgattggcactactagatatcggaatgtgatggacatgaatgcaggccttggaggatttgcagctgcacttgaatcaaaaaagtcttgggtgatgaatgttgtgccgtcaattgctgagaacactttgggtgttgtctatgagagaggtctgatcggcatttatcatgactggtaagtttctaaaactctgttgaactttgtaggagtcttctaatttcatgaaaattttccttgcaaatgagcttcatatactcaaaagaatgattcattaagttgagatgcatgttaattgttgtttgatctttcatttatgataactgtaatacaaaatgggcatctttgtatttgtttagacagccatttttcctccctaattcggaacctactcaaagatatattggaattgtttgctgttgctgcttctggttactcgccattcaataattgttgtatttcactatttctgatggaggacttaaattaagcaagccatcatggatgagcgattcaatactgctcattatttcctccaccaataaaaataattcaacaggcaattattccctttatgcctattggtggaaggaaattatgtactatgaaattgcaatgacattatttttctttcttcaggtgtgaaggcttttccacatacccaaggacatatgatcttattcatgctaatggtttattcagcatataccaggacaagtgcaacctagaagacatccttctagagatggatcgcatcctaaggcctgaaggagcaatcatcatccgggatgaagttgatgttcttaaccaggttaagaaaattgttgggggcatgagatgggatgccaaactggtggatcatgaggatggccctcttgtgcctgagaagatattggttgctctcaaagtgtattgggttggcaccagcaaaaacaaaacatccaatgaggaataaaaccactattgttcgggtgtgaatcttgtacttcagcctgcagtaacatccaaggtttctaaatccaacccaaagaaggaatggggaaaaatatgaataatgagaagagaaaaaagattgtagagcaaagcaaaagcaaagattggtatggttattcgagtttattctacgtctgccttacaccaagtgtagaactgtagataaaataggttctaagtagtcttaaattaattttggaggatatggaccagcaagtttagctgtctgaataatttaagcccaagttgttgtgttgatgcccagatatgaatatttgatgttagaatattgaaatattgcaattttatttattctcatcattattcagtat

SEQ ID NO: 10523 - DNA, 900 bp, Glycine max
  Clone ID: 700942511_FLI
aagaataggggatatgatgatgagtatgtttttgatacaagccgtatttacgatacattcaaatggaattatgaacctagcttattggaagaaataagctcaaatgtctctagtgaggattatgatataccgtctcctctaattatcagttctaagaaatttggaaatgtggctagatacatgaatcatagttgctccccaaatgttttctggcagccagtcttgtatgcagaaaataatcaatcctttcttcacattgcattttttgccctcagacacattcctcctatgacagagttaacatatgattatggctgttctggtcatgctgatggtagcagtgcacccaaagggagaaagaaatgctcatgtggatcatcaaaatgccgtggttcttttggttgatgttttgttgcagttgctgatggacaggcatggtgctggcaaatgtattcacagctaaaagatggggacattcaatgtgaaggccagatacagcttggaagttccaacttcgctgatgcttgtttccaaatatggttgtcaagggtggatgtactcgattaaaagttaaccatgttagtccttaggcatggctctttcttggcttctacttgtagttagtgacttttgatcatcttaccccattcctagttttgaggggaaaaagttttagtgagcagcttgtgtaaaattattgttgtagggaatggccatgagtacttgaaaatatcattaacatgcatatctttgtacccttttggcttttgtaattgtaatagagttagtgttgatgttgattagaaggctagaactatatatcatattttggattctagaaactattttgttaaaacatgctatgtatcttttctatgccaattgaattgatctgaactc

SEQ ID NO: 10524 - DNA, 252 bp, Glycine max
  Clone ID: 700942546_FLI
gagaatttcacttcatcccttcatgattaaatcagctatggttcaaaaaggctcatcaaacataactgcttaagtattaggtggtgtgagtgatttgaaatagaaatttgaggttttgtcaagtttattgtctatcagaagctcacaagaccagcttatttgttaatgtcatacatttaaattgtattgtttttctttatgttcctgttctttgtatcaaatagtttgtatgtgattttgattttcaccaac

SEQ ID NO: 10525 - DNA, 1876 bp, Glycine max
  Clone ID: 700942547_FLI
aaaaaacttgatataactccttgttaaacgaagaaaaaaaaactatatattgatgtattagtccatagttttagtgtatcgagaactagaagcgtaacagcaatggagctgtcttccagtgcatttgtggtaatattgttggcagtcgcagctacagcagtactctcaaatgggttggatctatctttcttgcccagcgatttcctctttggcattgcttcttcctcttaccagtatgaaggagcttacaagagtgacggcaaaggactgagcaactgggataactacactcacggaccaggtagaagtgtaataatggatggaagcaatggggatatcgcgattgatcattatcatcgctacctggaggatatagatttaatggaaactttgggagtaaacagctaccggctatccctgtcatgggcaagaattctaccaaagggtagattcggagagcccaaccatgctggtatcgagttctataacagactaattgatgttctactactcaaagggatccaaccctttgtaactcttagtcactatgacattccccaagagcttgaagacagatacgggagttggctaagtccccagttacaggaagattttgctttttatgcggacctatgttttaaaacctttggtgacagagttaagtactgggtcacattcaatgagccgaatttcctagtgtcacttggttaccgttctggtttatatcctccatgccgttgctctggccaattagcaatggctaaatgcagtgaaggagactcagaaaaggagccctttgtagcagctcataatgttatcctgtcacatgcagctgcagttgatatctatagaaccaaataccagactgagcaaaaaggaagtattggtatagtccttcaacatgaatggtttgaaccaatgagcaattcaacagctgacaaattggctagcgaaagagcaagagcattcaacttcaattggttcttggacccaatcatattcggaaagtaccctacagagatggagaacgttcttggaagcctcttgcccaaattttccagctacgaaaaagagaaactcaagagaggattggatttcattggcgtcaattactacacggctttctatgtccaagattgcatgtactccgcttgtaaaccaggacccgggatctccagaacagagggttcatacaagaaaagtggagaaaagaatggtgtcccaatcggtgaacctactccatttagttggtttaatatttacccagatggcatggaaaagactgtaacatatgtgagagatagatacaataacactccaattttcctaactgaaaatggtaagcaacacatattaaacttctttttttttacacacattctgttcattgatgataatgcaaaaaattttataggatatgccgaagaagttgatccaaatttcacttcggaagaacatctcaatgattttaaaagaataaagtacatggtggatcacatagaggctctgttagcagcaataaggaaaggagcagatgtgaggggatactttgcctggaccttaatcgactcgtttgagtggatatatggatatacggtaagatatggattccatcatgtggattatgcgacgctgaaaagaactccaagattgtcagcaagttggtacaagcaactccttgttcagtacaagaaaacctttttattaggcacgagcatgacagggcatgaaaaactcgtacaacacacttgacgcaaaaaagcttataaccctaatgtagaaccttatcagctacaattctaataatttatgatatattgtgggtacttctgtctttaatcaatactaggagaggagatcctatatttttgttttc

SEQ ID NO: 10526 - DNA, 1526 bp, Glycine max
  Clone ID: 700942615_FLI
ctccctctcccactttctattaacacccctctttccttctctacctctatttaactaattctacaatctgttattacttttgcttgcatctctctgtgttcaatcttcaaagacttgaattcttcttacttaggttctgaatggctggaatttgctgtggtgttgtcggagaaggtgacactccggctccactcgagccaactactcgcccctccaggcgccggagtttggacatcttacccttaaaatacatcgctgacatggcggtgccgccgtcggatggttcacggaaacgtcccaagctggatctcagggaccgcgataacgtagttcaaaattgcgacgaatccactggacacaaggtggtgaaaaaagaagccaaagtggaaatccacgacaatatttccgaaacgaaaaacgtaactgttgcggatgcttcggaagttgaagattctcctaagttcggcgtgacgtcagtttgcggcaggagaagagacatggaagattccgtttcggtgcggccttccttcacccaaggcttccactactttggcgttttcgacggtcacggttgctctcatgtcgcgactatgtgcaaggagcggttacacgagatcgtgaatgaagagattgacagcgcgcgcgagaatttggagtggaagctgacgatggagaacggattcgctcgcatggacgacgaggttaatcgcaggagccagagcaaccagaccttcacctgcaggtgcgagctccagactccccactgcgacgccgtcggatccaccgccgtcgtcgccatcgtcacgccggacaaactcgtcgtttccaactgcggcgactcccgcgccgtcctctgccggaaaggcgtagccatccctctctcctccgatcacaagccggatcgacccgacgaactgctccgagtccaatccaagggagggcgcgtgatttactgggacggtcccagagtgcttggtgtgttagccatgtctcgagccataggtgacaattatctgaagccgtacgtgatttctgaaccggaggtgacggtgacggagcggacggaggaggacgagtgtttgatactggcgagtgatgggttgtgggatgtggtgtcgaatgaaaccgcatgtggtgtggtgaggatgtgcctcaaggcgcagaagccgccgtcgccgccgggatctccggggagtgacgtggcggcggacggttccgaccgggcttgctccgatgcgtcgattttgttaaccaagttagcgttggcgaggcatagttcggataatgtgagcgtggtggtggttgatttgaggagagatcaacgacaatcatcaaactccaattaattaacgttggcgagaaacaaaaccaaaaccctttgttttcaggacttcgttaagaacgggaagaccaaatcagagggaggaggggcttgtggcttttgctttatcaaatgttgattgtaatgtaatgggattttaggttaaaaaaacaaaggagcaaggaaattgtaactttggaaaatg

SEQ ID NO: 10527 - DNA, 961 bp, Glycine max
  Clone ID: 700942632_FLI
ttcatttctaactttctttttctttgcagtttaccttgtagctcatacatatttcagtgtagagactagagacagacagatcctgtgtgcacttgttccgatccaacaccatatcgtatttctctggatgataagcttgagaaggggaaagaaatatcgccatcacttgttagagcaatggaagaatcattcatttcgttgatcatattctgaccggactatgcatcttcacgtttgtgcttagaagaactcgtgacaatacttgaatgcagagataaatatggacagactgtaatccctgttttctgcaaaatggaacccgcagatataggacatcaacttgagagttagataaatgcatttgctgagcatggaagaaaatatgagaccaacgtagtgcaactctggagagatatgcttagaagaaaactgctaaggtatccgggattgtgtcgtcaaatcggttcctctgtctgtcctctcaacaaagctcatcctcaaagccaatgtgtaaggtctgcgacaccacattcgccgcgtcaacccagatgtgtcccgatttcaaattttggttgtgcaccatctcctggttgttaaaatccatagccattcccgaggatcaatcgagtgaactgtactattctgtaggggccattgcagttggaaaccatccatattatgcatattgtagagtggcaagtaaccgaagctggagtttgacttgaatgatggttctaatgtcttcatcttatataaaaagaaagttgtagttatagtcaatggtggaggctacggtggaccacctttatagggttctctaccaaaaaaactaagactattttgtgttaagcacgcatgatatgaatggttattgaccatgtagaacgtgccaacacattctagcattaattttaattagtatgtaacttgcatgttttatttaaaggagaatgctcttgtt

SEQ ID NO: 10528 - DNA, 1009 bp, Glycine max
  Clone ID: 700942642_FLI
cagagagtgatttcagtgagtgatcggtgttcacttgatctcatcataatcgtcagcgtcaattgaagaagatgccgatcagaaacatcgccgtcggaaggcctgaagaggcgactcaccccgacacgttgaaggcggctttggctgagttcatctcaaccttcatcttcgtgttcgccggctcaggctccggcatcgcctacaacaagctcaccgacaacggcgctgccacccctgccggcctcatctccgcctccatcgcccatgcattcgccctcttcgtcgccgtctccgtcggcgccaacatctccggcggccacgtcaaccccgccgtcaccttcggcgccttcgtcggcggcaacatcaccttcctccgcggcatcgtctacgtcatcgcccagctcctcggctccatcgtcgcctccctcctcctggccttcgtcaccgcctccactgttccagcattcggactctccgctggagttggagttggcaacgccttggtgttggagatcgtgatgaccttcggtctggtgtacacggtctacgcaactgccattgaccccaagaagggtaatttgggaattattgctcccatcgccattggtttcattgtcggcgctaacattttgttgggtggggccttctctggagcggccatgaaccccgctgtgacatttgggcctgctgtcgtgagctggacctggaccaaccactggatctactgggccgggcctctcatcggtggtggaatcgctggccttgtttacgaggttgtctttatcagccacacccacgagcagcttcccaccactgactactagagggggggaaatgaaaataaaaaaaaaaaaattgtgtattattgaatttctctggaatcttcttctgtgtatggttttccttccttgtgttttcttcctaattcactttcgagggttgtacttgttcctttcgtcttaaatccttggatggttgatgatcatgaagttctctttaaagttaaatt

SEQ ID NO: 10529 - DNA, 880 bp, Glycine max
  Clone ID: 700942655_FLI
gtagcatctcaacgagcccgtgatttttttgttggttggattatggaacccctgcaatatggagactatcccatttccatgaagacaaatgcaggtgaaagaattccggccttcacaaatcatgaatctaaacaagttaagggttcatttgacttcataggcgtaattcactacaccaatctcaatgtctcagacaattctgacgcccttaagaaccaactgagagatttcactgcagacatggcggcaaatatctttggagaggatctgttttcaaatgaagagtaccttataacaccgtggggtttgcgtcaagagttgaataaattcaagctcctttatgggaatcctcctatatttattcatgaaaatggtcaacggacagcaagtaattcgtcactgcaagacgtgacaagggtgaaatacttgcatggatatattggtagcgtgcttgatgccttaagagatggatcaaatataaaggggtattttgcatggtctttcctggatttgttcgagttgctagatggatacaagtcgagctttggcctatactacgttgatagggatgatccagagttgaagagatacccaaagctctctgcaaaatggtacaaccggtttttgaagggtagaaggacctctatagttggaactattgaacttgagaaggatccatcacttgtttttgtttcccaattatttgagtaggttctttattaatttcttttcacaagatcatgcttagtggtgttattagctatgcttacttttccttgtatacatacataaaataagaatttatgtggagggagcctagctgcccgggcaaaattcctctcaaatattggtaatgtttaaaagagatattccttttctg

SEQ ID NO: 10530 - DNA, 885 bp, Glycine max
  Clone ID: 700942657_FLI
ctcttggcagcctacgtcaattgtcaaaaggttggggctccgcctgaagtggtgggaaggttagaagaagcatgtgcatctgctgcagtgataatggcaggtggaacagccagcataggcgaggatccagcgctggatcagttcatggaggcttactgtgagatgctgatcaagtacgagcaagagctctccaaacccttcaaggaagccatgctctttcttcagaggatcgagtgccagttcaaatctctcactatttcttcttctttggacactactgcgtgtaatgaagctattgataggaatgggccatctgaagatgttgatgttcagaccaacataatagatccgcaggcagaggaccaagaactgaaaggtcaactcttacgcaagtaccgtggatacctaggcagtttgaaacaggaattcaccaagaagagaaaaaagggcaagctgcccaaagaagcaaggcaacaattacttgaatggtggagcagacactacaaatggccttacccatctgaatctcagaagctggctcttgcagagtcaacaggcctggatcagaagcaaattaacaactggtttatcaatcaaaggaagaggcactggaagccttcagaggacatgcaatttgtggtggtggatccaagccatccacactactacatggaaaatgttctgggcaatccctttcccatggatctctcccacccaatgctctaaaaaataacgttttggtgcttgtgtgctcttaaagtatatgtattgtgtctaaatgcaaggcattcatataataataagtatgttactctgattagtaacgatatttacacagtaaaagatgtctcaaatgctaattattgatatttacacattaaaaga

SEQ ID NO: 10531 - DNA, 777 bp, Glycine max
  Clone ID: 700942684_FLI
ctcaaccccccttcctcaaaaccccgccccctcccctccctccacgtcaccccctccctcctctcctccctcgaccccaacggcgtcgttcgctgcgccgtctgcaaagaccaaattaccccccacgccgaagccaaacaattaccctgcaaacacttataccactccgattgcatcacgccgtggctcgaactccacgcctcgtgtccgctatgcaggtttcggttggaagaagaggaggaagaaggcggtgacggcgttatgacgaagatcaggagggagattattgccaggctgacggtgctgacggaagaggatttctacgggctgaggaccacgctcaaccacattgcctcgcgccacgcgctcatccaagagaacgagaatcgcggcgcccagattggggaaactcaaggtggcgattcggcttgctgatcatattggttcataaggtatatagtgtattaaaataatgctgaagttgtatcaccatagatcgtcttttcaagtgtaaatctgcaccgacgattatgctgctgttcttttccctccttttttgggaatctccaactagctaggtctagtgctatagctaaaaaatacaataaattgatggagtgcacgggtaatgtgcacttctctacccatcttccactctctctatgttggtccttgtaactggatttccttagccaaatttcttgtgtaaaacttagctttcttttagttgtgtctgaattgcccaagtggatgatggtacctacccaatgcatagac

SEQ ID NO: 10532 - DNA, 2047 bp, Glycine max
  Clone ID: 700942707_FLI
gttggaatggtctggatgtaacaacaacagtaccaacttccaacttgaaatagatgtgctttgcaagttacagcctcactttaacattgaatcgttgagaataaaaggctataaaggaaccagatttccagattggatgggaaattcttcctactgcaatatgatgagtctaaaattgcgtgattgtgacaactgtagtatgcttccttcacttggacaactaccttctctcaaggtccttaagattgcacgattgaataggctgaagactattgatgcaggtttttacaagaacgaagattgtcgttctgggacgccctttccctcccttgaatctctgttcatttatgaaatgccttgttgggaggtgtggagttccttcgattcagaagcttttcctgtgcttaaaagtcttaaaatacgtgactgccccaaactagagggaagtttgccgaatcaccttcctgctctgacagaacttgtgattagaaattgcgagctgcttgtctcttctctcccaacggctcccgccattcaaagtttggagataagtaaaagcaataaagtagcactgcatgcgtttcctctcttgctagagactatagaagtagaaggaagcccaatggtggagtctatgatagaggccatcacaaacatccaaccaacttgtctccggtctttaacattaagggattgctcatcagccgtatcatttccgggtggtcgtttacctgaatcactgaagactctgcatatcgaggatcttaaaaaactggaattcccgacgcaacacaaacatgagttactggaaacactgtcaatacaaagcagttgtgattcactcacatctgttccattcgttacctttccaaatctcagagctcttgcaatcagaaactgtgaaaatatggaatatcttttggtttcaggggcagagtcatttaagagtctgtgttctttggaaatttatgaatgccccaactttgtatcattctggagagaaggattgcctgcgcccgaagttcggggctctgacaagttgaagtcgttgcctgaagagatgagtactcttctcccaaagttagaatgtctctccatatcccactgcccagaaattgagtcgtttccagaagggggtatgccacctaacctgagaacagtttggattttcaattgtgagaaactactgagcggcctagcatggccatccatgggcatgcttactcatctcagtgttggggttcgatgtgatggcatcaagtccttccctaaggagggtttgctgcctccctcccttacgtctctgaagctatataagttttcaaatctggagatgttggactgcacggggcttctccatctcacatccctgcaacaattaaccatagagagatgtcctttgctggaaaatatggtgggagaaaggcttcctgactctctaataaaattaaccatatgggaatgtcctttgctggaaaaacgatgccgcatgaagcaccctcaaatttggcctaaaatttgccacatccctggcattaaggttgacgatagatggatttagccaccaaggatgatcaacagagaatcaacaaattatcaaaaggcaacgtgtgatatcatctaaatcaaattcactgaagagtgctgcttaacccctagcttcgaagaagtaaccatacaggtactaagtaacaacattgataaatacttaaatataatgattctccggaaaaatgttacacattagtgttgttatattccaacttaatttctccttaagattattgaggacagagtgaaattcatgaccatgggaaactttttttttgtttttcagatatgattgattggccaggagtacctacccatgaatctaatttcaaatttgaacaagtgctaaatgtaacttttgatttaattgacgtgaaattgacactttctcaatagctgaatttttatttgaggtttttggttatgtacaatgtgaaggatgaaaaggtgtaccaagtgaatttcagaaggatcggatgattttaacttatccctt

SEQ ID NO: 10533 - DNA, 828 bp, Glycine max
  Clone ID: 700942721_FLI
tgggcagcatgaaggtgcatcagttcacacgtggattaatctgggagcacgaacctttcctcacacttggctgcaagagattacgccctcttgctcccaagcttcccaacaccaaaactatcactacccctttcgatctcaagagcttcatcaggcccgaaagtggccccagaaaacccgtttcctctgacgacactaagaaggatccaccttcaccccaaggccagattgaaacgcacccaggagggacacggtggaatcctacgcaagaacagataggcatattggagatgttgtacaaaggagggatgcgaactccgaatgctcaacagatagagcagatcactgtccagcttggaaagtacggcaagatcgaagggaagaacgtgttctattggtttcagaatcacaaagcacgcgagagacaaaagcagaagcgcagcagccttgcatcttctcatagtcctcgaactcccacaattcacagtgttgttactttggagacaacaaggggggaagtggtagagagagatcacgaggaagatagtccgtacaagaagaagtgcaggagatgggtatttgactgcttggaagaacaaaacatgtcatcaccttgtgaacaagaggaacatagaactctggagctttttccattgcacccggaaggcagatgaaggggtttgagtttgattgaccatttatctatcatttttcactttgctttagttccgaatcgcagctgattattgaatgaatgtggtttaattaatttgctttacttttcttttttctttgtattgggaaagaagaaagacaaagttgtctctg

SEQ ID NO: 10534 - DNA, 641 bp, Glycine max
  Clone ID: 700942737_FLI
aaagaatggcaatgagcataggcattgcaagaggagttcaattcttacacacaggagttgctcctggcatatatggcaacaatttaaagattgagaacattctgttggatgatagtctcaatgcaaaagtcagtagatacaacattccattgccatccaagattgcacatattgaacaaaatgccaccaatcatattggcagcacaaacgatgcagaaaaggaagatatctatcagttgggtattattctacttgaagttatcactggcaaacaaattacatcctcgagtgaaatagaggagctgaaggaagagctggagaatggttcatcagaagcaacatcagtaattagaagcgcaattgatccttcactgaggggaacttatgcatatgaatcaatgaaaactgcagttcagatcaccatcaactgtctctccaaggtttctagtcagcgcccttcaatagaggatgttctttggaatttgcagtacgcaatgcaagttcaagagtcctggaccagcagtggaaacctcagcacaaaattgtaaaccacacttgtcaataaaaaaatgcttgcttacatttccatatgttcattatcataatgaataaaatgttgatgtacatatgtaatttctttc

SEQ ID NO: 10535 - DNA, 842 bp, Glycine max
  Clone ID: 700942776_FLI
gcttcccagaggagaccaaataacatctgcactttccaaggcaattcaagagtccaggattgctattactgtgctttctcaaaactatgcttcttcctcgttttgtttagatgaacttgtaaccatccttcactgcaagaggaaagggttgttggttataccggtcttttacaaaatagatccttctgatgtcagacaccagaaaggtagttatggagaagcaatggctaagcatcagaagagcttcaaagctaagaagcttcagaaatggaggatggctttgcaacaagtagctgacttgtctggctatcatttcaaagatggagattcatatgaatacaagtttattgggagtattgttgaggaggtctctaggaagattaatcgtgcttatttacatgctgtggattatccatttggtcaatggtcacaagtgatggagaatcaaataaacatgggttaaagcaccttcaaagcatcctactttcaaaattacttggtgagaaggacatcaacttaacaagttggcaagaaggagcttcaatgatacgacataggctccgacgaaagaagattctcttaattttagacgatgttgacaagcgcgagcaattaaaggctattgttggaagatctgattggtttggtcccggtagcagagttatcattaccactcgggacaaacatctgctaaaatatcaccaggttgaaagaacttatgaggtgaccaaatctctagtgaatacaagtatattggtaatatcgttgatcaaatctctagtgagattaattggtaggataacaggaataggaaacaacaaggcaccagtaacaggaagcac

SEQ ID NO: 10536 - DNA, 1261 bp, Glycine max
  Clone ID: 700942855_FLI
ccaatctgcgctgcctacgacaactacctccgcctccctgagctcagagccctctgggcctccaacgacttccctaattgggccaacgagcccatcttaaagcccaccttacacgccctcgaaatcaccttccgcttactcgcaaccgttttatccgacccgaggccgtacataaacaagcgcgagtggacccggcgggtggagtctctcgccacggcccaaattcagatcatagctatgctgtgtgaagatgaagaagaaaaccccgagacacgtggcacgacgccaccggtgagtgacattaacggcttcatcgctcaaagcagaagctacagcgaggagagcctgctcccgcgcctcgccacgtggcacaaatccaaggacgtggcgcggagaatcctcgattcggtagagtaccagatgatgaggtgcacgtacaccttaggtttaggagaggcgaatctcgcgggtaagaagatattcctttacgacgccgtttgcaggccgagcgagattcactcgttggagacgacgccgtttgattacgtggggaactgcgagaacaagacgctgcacgcgacgcagcagatcgcggagtgttggacgcgcgcggtgaggaagctgctggagagagtggtggagtcggtggagagaaaaacgttggagaaggcggcgagggagtgtcacgcggtggagcggatctggaagttgttaacggaggttgaggacgtgcacgtgatgatggatccggaggatttcttgaggttgaagaaggagttggggatgatgagaaattgcggggaaatggtggcgttttgcttcaggtcgagggagctcgtggaggtggcgaggatgtgtagggatctgaggcagaaggtgccggagatattggaggtggaggtggaccccacgggtgggcccgggatgatggaggcggcgatgaaggtttactcggagaaagagaaaaggaacgggttcgagaaggttcatgttttgcaggggatgcaggcgattgaggtggcgatgaagaggttcttctacgcctataagcaggttgtggcggttatgatggggagctccgaggccgataatgggttcactcagatattccttgaacccacttatttccctagcttagatgctgccaagacctttctcgcttattattgggaaaataataatcaaaatggggttccctgctagttaattaaaaaattaatcaattaattcctagtcatatatacttactcacacaaacggg

SEQ ID NO: 10537 - DNA, 1958 bp, Glycine max
  Clone ID: 700942893_FLI
gcttttggaccatttcaagcattctggtcccaatggacagcatgtttgcatggtgtttgagtaccttggggacaatcttttgactcttattaagtactcggattatcgggggttgcctattgccatggttaaggagatttgctttcatattctggctggattggattacttgcaccagcagctttctatcatacatactgacttgaagcccgaaaacatcttgctcttgtcgacaattgatccgtctaaggatcctaggaagtctggggcgccacttattcttcctaatagtaaagataagatggcgatggagtcagcagggatgaaagatacgaaaatgttgaatggggatttggttaagaatcataagaaaaagattaagagaaaagctaagcaagcagcccatggatgtgttgagaaggaagcttctgaaggagttgagggtaatgctgaaacctctggggctgtggagtcatctcccaatgcgagttctgcgagagaacagacttctagttctgcaggaactagtcagttatcggatgctgatggaacaaagttgaaagagcagggtaacaaaagaggaagccgctctatgagacagaagctgctggcatcggttgatctcaagtgcaagttggtggactttggtaatgcctgctggacatataaacagtttacaaatgatatccagacaagacagtatcggtgcccggaggtgatccttgggtcaaaatattctacatctgcagatctttggtcctttgcttgcatttgttttgagcttgcaactggagatgtattatttgatcctcacagtggtgacaactttgatagggatgagatgtttaaagtgttgttcaaattcagagacagctgctggtttagttgtgcagcaacttagtccagcaggcaattgtaaatggagttggcctatggtgtgtttaatgaattttgggttaggtttgcttggataatttggagcagttctttattgagttcgaatgtttggcagaagcaagaaggttaaagtcttatggctatttgttttgtatgctgtcatctgattccttcaactggtgtggaatgtgggatagctttgaaatctctgcttaaggagaaagtcaaggttgtttatccacacattcttaaagtggaaagagctgataagaaacatgttaagctgaagtgtctcagacaagatgccgaaatgtatcttcccaagttcttgtgaacaatgtaaccattaatttcataatttaattggatttgcaagtcaccctttgagagagtgaatgaaaatggtgcattttggaaatcaatctatgatggataacattgagtcgtgaaccttatgatccacatgtttgaaaatcaacctcaagatgtgtattgtgagtttttcacaatcatgcttggtcataatctgtccaaaccaggaaattgtgtgctctgctagttgacctcgtgaacttgggcattaggtaaatttaaatctaggaggtcagattcctttataaaagcattgaagcccctcatagtaggagttacctcatcacctattaatttttcattatgaaatttcaaagcattgaaataatcccctgcagatgagcacacaagcaatatacaaaactcagctcctttcaaagaagagagcttggcccgagcattgtgtgatcttaacctgtacatagtaaaccactaaccactgatgtccccttcccaattatatgaagatggactgcatctgggacatggagggagccagtctttttagataccctagtgattggttttagatgaaggaaaaatctgtcatgaaccaactattttgaaaacttaagctgttaggtgaagacacatgaatgcttttattttattttattttttatgttaaatctctaacataccccaaatgtaaaagatatttgtgctcaaagcatggacaattcatgaac

SEQ ID NO: 10538 - DNA, 1651 bp, Glycine max
  Clone ID: 700942962_FLI
gtttttatgtatgatgacattgcattcaatggggaaaacccaaggcctggagtcatcattaacaaaccagatggaggtgatgtttataaaggagttccaaaggattacaccggcgaagatgttactgttgataacttttttgctgctttacttggaaataagtcagcactgactggtggcagtgggaaggttgtggacagtggtcctgatgatcatatatttgtatactatactgaccatggaggtcctggggtgctcgggatgcctgctggtccttacttatacgcggatgatctgattgaagtcttgaagaaaaagcatgcttctggaacatataaaaacctagtattttatctggaggcatgtgaatctgggagtatctttgaaggtcttcttcctgaagatatcaatatttatgcaaccactgcttccaatgcagaagaaagtagttggggaacatattgccccggggagtatcctagtcctcccccagaatatacaacctgtttgggtgacttgtacagtgttgcttggatggaagacagtgacagacacaatttgcgaacagaaactctgcaccaacaatataaattggttaaagagaggactatatctggagattcatactatggctctcacgtgatgcagtatggtgatgtagggcttagcagagatgttctcttccattatttgggtacagatcctgctaatgataatttcacttttgtggatgaaaactccttatggtcaccttcaaaaccagtcaaccaacgtgatgctgatctcatccatttttgggataagttccgcaaagctcctgagggttctctcaggaaaaatacagctcagaaacaagttttggaagcaatgtctcacagaatgcatgtagacaacagtgtaaaactgattgggaagcttttatttggcattgaaaagggtccagaagtactcaacgctgttagaccggctggatcggcacttgttgatgactggcactgcctgaaaaccatggtgaggacttttgagacacattgtggatccttgtctcaatacgggatgaaacacatgaggtcctttgcaaacatctgcaatgtagggataaagaatgaacaaatggctgaggcttcagcacaagcttgtgtcagtattccttccaatccctggagttctctgcaaaggggtttcagtgcataataactccctgtaatgtgcactagtaaagaccaaagtatgattattgttacattatgttacatggttgtacttgtatatacatatcttgtcccacctttgtaaatacaattgggacactactaggattgggaagaagggtctttacatttatagtttggcaaatagatattgcaactacctttgtataattctatttctgaagaagcaattacaatttacaagggatggtgccatttacggcataaggattaaggagggataaagggaccaattgctttggaatatccactcattacaatgcatgtatgacaacacatagtaatatgatgtgtgtttttattcagtgggcaactggcagatcgggttttccctggtcacttttgtataattattccggaagaatttatgatgccaaaattattgtttaatattaatgacaacttgtatttatttttgt

SEQ ID NO: 10539 - DNA, 1060 bp, Glycine max
  Clone ID: 700943068_FLI
caagaatggcacttcgttgcttggtgatgtccctttctgttctcttcactcttggtcttgcgagagaaagccatgccagagacgaagatttttggcatgctgtttggccaaacactcccattccaagttcattgcgagatcttctaaagcctggccctgcaagtgttgaaatcgatgatcaccctatgcaaattgaagaaacacagtacccgaaaaccttcttctataaagaagaccttcatccaggcaaaacaatgaaagtacaattcagcaagcctccctttcaacaaccatggggtgttggtacatggttaaaggaaattaaagacactactaaagaaggatatagttttgaagagctatgcatcaagaaagaagccattgagggagaagagaagttttgtgcaaaatccttgggaacagtaattggttttgccatttcaaagctgggaaagaacattcaagtactttcaagttcctttgtcaataagcaagaccaatacactgtggaaggagtgcagaatcttggagacaaagcagtgatgtgtcataggctaaatttcagaactgcagtattttactgccatgaagtccgtgaaacaacagctttcatggttccattggtggctggtgatggaaccaaaactcaggcacttgctatttgccactcaaatacttctggaatgaatcatcaaatgcttcatcaacttatgggagttgatcctggaactaaccctgtttgccatttccttggaagcaaggccattttatgggtacccaatttatctgtggacactgcctatcagaccaacattgttgcttaattagtccatgcatcttgagcaccatgagaatgagattgtgtataaaataaattatcatgtgctgtgtgttgtgcaagtactaccttctctagctagattgctagagctagaatttcaacctacctatgtgtactgataagatctgcttccctacttaaagagagcatcatcctgtgatcagtgtgcttcgtattctctctctctatatatatatggtaaaaagtggttatctcgtg

SEQ ID NO: 10540 - DNA, 884 bp, Glycine max
  Clone ID: 700943089_FLI
aagcaagcgcatccgcggcgacaaggccaagctcaacttcccggccaccgctccgccaccctccaaaaaagtggtgtcatcatgtgagaagaagaagaagaaaagtgtgagtgcagaaaagaagagtggtgggcgagctcggaagaacgtgtacagaggaatcaggcaaaggccgtggggcaagtgggccgcggaaataagggacccacataagggcgtccgcgtctggctcggcaccttccccaccgccgaggaagccgcccgagcctacgacgacgccgccaagcgcatccgcggcgacaaggccaagctcaacttcccggccaccgctccgccaccctccaaaaaacaacgctgcctcagccctgacaccaccaccgaacaaagcagcagctcacaatccaccactggatccaccggatcgccgccttccgccgccttccacggcggaggagatgaactcgacctgaaacaacttgaacggtttctagggttggacaacatgggtgctgagtgggacaacatggatgacctgtggatgctggacgacgtcgttgtgcccaaccgtcacttaatttactagaagggagataattaattaattaataaatggcgttttcttaagttatagttttataaaactatgttggtgtatgtgttcttagttttctgttttgtcttgtcctctcgctttggtaatttctgttttgtacggtcgaattatttcaaaattaggtgcaacgtatcatgagagggatgattatatgttatcattatgattataaataaaggccaattagggtgtgttagcgtttgggtcgtgcatgtttatatgtagtttatgcgttgtatataatatatttggcatgacattatttggttct

SEQ ID NO: 10541 - DNA, 432 bp, Glycine max
  Clone ID: 700943115_FLI
gtgataataaatttgaggttgagagagtgaaagaggagatgggtgcgataacgagcgcggtgatagcagttgtaggagttcttctaggttggatcacaatagagatcgcatgtaaaccttgtcttgaaaagggtcgcgaagccatcgatcgaagtctcgatccagattacgatcccgacgacaccgccattcgcgccccactcaaccccaccgccgcctccgccaccgtcaaagccgtttgagaaattgatgtcccatcttctcacgtttccgcctggtattcaattcggtgtctaaatcaaaaggctattttttttctttttttgatgtttgtgtatttgcgcgcttttgatggcgctattaaatggcgaatttaggatataaagtgtgtggagacttgttattatgtgaatggagattgtaatttatctc

SEQ ID NO: 10542 - DNA, 488 bp, Glycine max
  Clone ID: 700943152_FLI
atgatcgtgaaaccgccagggtaccagagtggatcgcctccggtttctcctgccggttctactcctccgatttctccgttttccggaggaaaagattcgcttcggtttcgaagaaggtcgggatctgatgcgtacgagaagagagggcagaacagatcaggcccttcttctcctttcgatgtgtgacgcattttctcgtacctgaaagctgaggatgtagcagcttttttggcctttgctgtattcatttttgtttagtctttgtgtgcatgtataatgtctgaatgtctgtaaggaagttctgccaagttcatgcaaggtagcttttggtttagcttctttaagtctttacttaagtaagctgcgtagtggttgccaaatcgtaagtagaaagtgtaagggtagagtagcggtgtatctttactccttatcatgtaatgtatatttataattaataagccattttgcgtttgtttttggtattgttc

SEQ ID NO: 10543 - DNA, 1373 bp, Glycine max
  Clone ID: 700943173_FLI
tgctggctaaacctttctctcacataacataaggaaaaaggaacatattcactttagttacttcaccacaacaaaacactaacgttgttgttgttcacttcaccaagcattctcttatgctctgacagacactctggttggttgacatggattccaattccaaggccattttggattatgctttgtttcaactcactccaaccagaactagatgtgagttgttagtctttcgtggaggtgttcatcagaaaatagcttctgggttgtttgagcctttcgtttctcatctcaaattcctcaaagatgagatctccaaaggtggatactcaattaagcttctgcctcccaaccacggtggcttctggttcaccagagccacgtttgagagatttgtgcgctttgtcagcacaccggctattctggagaggtttgttagccttgaaaatgaaattcttcagatcagaagttcatttcaagctaatgctttttcaatgtccgttgcaactccagatgaaggatctgtgccacaagccaatggcatcacaaggaggttaagtgattctacaaagttaaatgatgtacttgaaggagttgacaataaagaggaaaactcaaaggtttccctgcatcgtctgttagagtctcgaatagcactactccggaaggagcaagcaatggcttatacacgtggtcttgttgctggatttgaaattgacagcattgatgatctcatatactttgcaaatgcatttggagcagcccgtttaagcgaagcctgcatgaattttaaggaattatggaagaaaaagcatgcagatgatctttggataaaagaagtagctgctatgcagtcaagcttaccaccagcactctcattgtctggatcatcaggaattatattggcaaatgatataaccacccataatagctctagggacagcattgcttctggtgacgaaaatgtatctctggaaacattgaattctgctttaaacaaaaaagaagatgtgaacctgcctacagcagatcataaactttcacatacagcaaatgttaatatgccaatgccctggccttacaatgtacctccatatatgtataatcttcaaaatccgcaaatgccttcataccaaggatatcctatgactaatatgcagtctgttcctccttaccttgtaccaaatatgcaatggtctcctgacctgggagtgaatcagaaaccatcagaaaccaaaagggataaatctcacaagaaaagagcagaagaataccaagaccagcagacagagtccagtgaccctgattctgggagtgaatctgattcagataaacagaatcactccagtcattcttcgaaggatgatctgaagagg

SEQ ID NO: 10544 - DNA, 750 bp, Glycine max
  Clone ID: 700943187_FLI
atcttatccctctaatcactctagctgttgcaaatttctactatttttcaatggcttctgcagatgttgagttccgttgctttgttggtgggcttgcttgggtcaccggcaacgatgccctcgagaaagccttttcaatctacggcgacatcgttgaatcgaaggttatcaacgaccgtgagactggaaggtccagaggattcggatttgtgaccttcgcctcagagcagtcaatgaaagatgcgatcgcaggaatgaacggccaggaccttgacggtcgtaacatcactgtcaacgaagctcagacccgcgccagccgtggtggtggtggaggcggtggtttcggaagtggtggtggatacaaccgcggtagcggtggatatggtggtggtggtggcggcggcggatacggtggtcgtcgtgaaggtggatacaaccgtaatggtgggggtggaggtggaggatacggcggtggtagagaccgtggttacggtggtgatggtggttctcgctactctcgcggtggggaaggcggtggatccgatggaaactggagaaattaggcatatgaccctgtaaattagggtttatgattaagttcaattattttaaggtgttgtctgtgtgtggtttaagtttcggtatctgtgttggtttcgtttcgtgttcctgtggttttcgtttttgacctacaattctagttgtgtttatagtcgatcgaatgaaatgatagtaagaaattatcgcatc

SEQ ID NO: 10545 - DNA, 1316 bp, Glycine max
  Clone ID: 700943251_FLI
ggtggggctgcttttgggttcccaccatcaatagatctaaacaactgaacattccatgtctcatgatcttcaagaaatgttactggggatgttcagttgtttagatctattgatggtggggctgcttttgggttcccagagactcctgaagatgctgccagagctggtcttattagtgggaaggataatatcattgatcgtagtattcaagatgcttatattaatgctattcgacgtgcaaagaacttcatctatattgaaaatcagtatttccttggaagctcttttgcctggagtgctgatgatattaagcctgcagacattggtgctttgcatctaatcccaaaggaactttcactcaagattgttagcaagattgaagctggggaaaggtttgctgtgtatgttgtagtcccaatgtggccagagggtgtcccagaaagtgcatcagttcaggcaatattggactggcagaagagaacaatggagatgatgtacagggacattattcaggcactcagagctaagggaatcgaggaagatcctcgaaactatctgacattcttctgccttggcaaccgggaagtgaagaaaccaggagaatatgagccttctgaacaaccagatcccgattcagattatcagagagcccaagaggcccgacgattcatgatttatgttcataccaagatgatgatagttgatgacgaatacataatcgttggatctgccaacatcaaccaaaggtcaatggatggtgctagggactctgagattgccatgggtgcttatcagccctatcatttggctaccaggcagccggcacgtggccagatccatggtttccgcatgtcattgtggtatgagcaccttggcatgcttcatgactccttcctccagccagaaagtgaagaatgcattaataaggtgaaccaagttgctgacaaatattgggatctgtattctagtgagtcacttgagcatgaccttcctggtcaccttctccgctaccccatcgggattgccagtgaaggagatgtcactgagctgccaggatttgaattcttccccgacaccaaggctcgcattcttggtggcaaagctgactacctcccccctatcctcactacttagtttgattttgtactttgttacaaacttgtgattgcttacatcctaatttgtgtttttattactacttagtaataatcttaatatagtctgtgatgtcttgtggagatttttttttcttctatttttttgaagatgtcagtgacagattttagttatctgatggctttgactggtttctaatc

SEQ ID NO: 10546 - DNA, 1325 bp, Glycine max
  Clone ID: 700943363_FLI
tggagaaaacagtggtgggctatgcccaatgacgatgatgcctttggtaacttcccatcatgcaacaaatcctagtaatcctagtaataatactaataataatgaaaacacaaactgtctcttcattcccaactgcagtaacagttctggaactccttctatcatgctccacaacaacaacactgatgatgataacaacaaaaccagcactaacactgggttagggtactatttcatggagagtgaccaccatcaccgcaacaacaacaacaatggaagctcctcctcctcttcctcttctgctgtcaaggccaagatcatggctcatcctcactatcaccgtctcttggcagcttacgtcaattgtcagaaggttggagccccaccggaagtggtggcaaggttagaagaagcatgtgcttctgcagtgacaatggctggtgatgcagcagcagcagctggatcaagctgcataggtgaagatccagctttggatcagttcatggaggcttactgtgagatgctcaccaagtatgagcaagaactctccaaacccttaaaggaagccatgctcttccttcaaaggattgagtgccagttcaaaaatcttacaatttcttccaccgactttgcttgcaacgagggtgctgagaggaatggatcatctgaagaggatgttgatctacacaacatgatagatccccaggcagaggacagggaattaaagggtcagcttttgcgcaagtacagcggatacctgggcagtctgaagcaagaattcatgaagaagaggaagaaaggaaagctacctaaagaagcaaggcaacaattacttgaatggtggagcagacattacaaatggccttacccatccgagtcacagaagctggcccttgcagagtcgacaggtctggatcagaagcaaatcaacaactggtttattaatcaaaggaaacggcactggaagccttcagaggacatgcagtttgtggtgatggatccaagccatccacactattacatggataatgttctgggcaatccatttcccatggatctctcccatccaatgctctagaaaagtatccatcctttgtgggctgataatagattcataagctcgtgctgtcacttattaaaaccttaagcaattattaattaatatgctttctagtgctcatataagcattctaagaaatcctagattgctatatactatatttatagtacgcaggtgtatcctgctagcttaaagagacggtcctttgtgtggatcatctagttcaaggagttatgaataaataaaattccataaatttaaagct

SEQ ID NO: 10547 - DNA, 1967 bp, Glycine max
  Clone ID: 700943365_FLI
cagccagtcatagtgctcttcaatgtttcacgcgtagagaccactcccttcgatggccagaagcctggaacctctggtctccgcaagaaggtgaaagtgttcgtgcaacctcattacctccataactttgttcagtcaacattcaatgcattaactgtggaaaaagttagaggtgcaacgctagttgtatctggtgatggtcgttatttttcaaaggaagctattcagattataactaaaatgtcagcagcaaatggagtaagacgtgtttggattggtcaaaatggattgctttcaactcctgcagtatctgctgttatacgtgaaagagttggagctgatggatccagggcaacaggtgcatttatactgacagcaagtcacaatcctggtggccctcatgaggattttggaattaaatataatatggaaaacggtggacctgcaccagagggaattactgacaagatatatgaaaacacaacaacaattaatgagtacttgattgcatcagatctgccagatgtggatatcaccacaacaggtgttacaagctttacaggccctgaaggaccatttgatgttgaggtttttgattcagcaagtgattatataaaattgatgaagtcaatttttgattttgaatctatcaggaaactgctgtcatctcctaaattcacattctgttatgatgcactacatggggttggtggagcatatgcaaagagtatatttgtggatgagcttggggcacaagaaagctctttactgaactgtacaccaaaggaagactttggaggaggacacccagaccccaatttgacatatgcaaaagagttggttgctcgtatgggattgggcaaatccgaaccacaagatgatcccccagagtttggtgctgcttctgatggtgatgcaggtcgcaacatgatacttggtaaaaggttttttgtcactccttcagattccgtggccattatcgctgcaaatgccgttgaagctataccatacttttctgctggtttaaagggtgttgccaggagcatgccaacctctgctgccctggatgttgtagccaaacatctgaatttgaaattttttgaggtccccacgggttggaagttctttggtaatttaatggatgctggattatgttcagtctgtggtgaagaaagttttgggactggttctgaccatattcgtgagaaagatggaatctgggcagttttggcctggctatctatacttgcatataaaaataaagataaacttgaagacaagcttgtcactgttgaagacatagttcgccagcattgggctacttatgggcgccattattatactcgatatgactatgaaaatgtggatgcaggtgcagcaaaggaactgatggcatatttggtcaagctgcagtcctcactttcagaagtcaatcagattattaaggggataaggtcagatgtttcgaatgttgttcacggtgatgaatttgagtacaatgatcctgtggatggttccatctcatcacatcagggaatccgatatttgtttgaggatggatcacgattgattttccgcctatctggaactggatcagaaggtgcaacaattcgactatacattgagcaatatgagaaggatccatcaaagattgggagactttcaaatgaagcccttgctcctcttgtggaagttgcattgaaactttcgaagatggaagaattcactggtcgatccgctccaacagtcattacatgaacacatacaggtggaaggtggttagatcctgaagtttctcccagtcatttcttctttgttcagtttcttacggatggccgaacactagtgttggttgtttgcagcctttgctatgggcacttgagtggaatttgatcagttactttatcaaaattttgatgtgctgaataagttgcaactgccgagtgctaattctattatatagtctt

SEQ ID NO: 10548 - DNA, 1156 bp, Glycine max
  Clone ID: 700943384_FLI
ttggctttgtggcaaatgaggaaaccttatatgatggaaaaagacaaaatgaacaacaacattaagagcaagctaaggaagggattgtggtcacctgaggaagatgaaaaactcctaaggtacatgatcactaagggacaagggtgttggagtgacattgctaggaatgctggccttcaaaggtgcggcaagagttgccggcttcgttggattaactacttgagacctgatctcaaacgtggtgcattttcaccccaagaggaagaactcatcattcatttgcactctattcttggcaacagatggtctcagattgcggcacgtctccctggtcgcacagacaatgagatcaagaatttctggaactccactctgaagaaaaggttgaaaatgaacaacaatattaacgccacttcatcaccaaacaatagctactcatcatcagagcctagagatgtcaatgtcatgggtgggatcatgcccatgaacgagcatgacctcatgaccatgtgcatggactcctcctcatcaacatcatcatcatgcatgcaatccatgcatacaaccaacatggtactaactgaccaatttgatccctttcccttgttgtccaacaaccgttacgacatgaccggcgcaaccgatttccttgacaacatggctgcatgcttaacccaagttggcatggtagatcatgatcatggggttgttcatgatggttatgggacattggagcctaacaaaacgggtttagaaagtgacttttcccttcctccactagaaagtagaagcattgacgacaatagtagtaccccaattgatcatgtgaaaagccataacaacaacaaccacttcaagaatagttgcttcaataacactgatcatcaccatcatatccaatgctccaacaacgtagttgtagaggatttgtttgggtttggaaatcatggacatggagaaagctttagaatggaagaatgggactttgagggtttgattcaagatattccctatttttcttcccttgatttccaagtttaagtatgtgtttggatcacgttatcgcaatcgataaacgctacaatttgtagcttctgcattgacatgacgcgttgatacagtttcaaacacactttaaatgttggccattcttttg

SEQ ID NO: 10549 - DNA, 282 bp, Glycine max
  Clone ID: 700943485_FLI
ggatgctcggtcttcagcaaagcgccttactgaagaagcagttaacaggaaaagcaccgatgatatctcctgcatcgttgtgaaatttcagtgatctcaaggctcgcatgatagactttgatccagcaacttgcaagtgtaacataaacttcggtgtaatgaataaaacgataatgcttcatagccatcaggtggtgttattatgttgagtcattcatgcaaattaaatgggacaactgtgttatttaaagtaataatgtgggaaagatgtagattctgatt

SEQ ID NO: 10550 - DNA, 662 bp, Glycine max
  Clone ID: 700943844_FLI
ctaagatatctctgatatatatagtttctgtgtctgatcccgtttttaattcgggttaagattgaaagcgtgagaatgccggtgaagaagtattactgcgattactgcgacaagctattccaagacacaccagcagatcggaaacgacacgttcagggcattcaacaccaccaagccaaagctcgctgggattttgccgctacggcgactcttgcaaatatctccatcccgttcccaacaacaatgtccagcagccgccaatcgtaaccacaccgtcgccttcaccagggagtgtggtaggagtgtcattcggcaatcttcccccctccctgcagcctccgcctgacggcgtatatctccaccttccctttctcgactggggatagatttgtaattctacccacttctcataactgcatctccgtgtctgtgttctgttcaatcatttcttaatttaaccttttagttcttctaattttcattgtgtggctggattctagtgatttcttatgacctagctccaccgtattatttggagttttcttatatctacccaacgcttaacttatgattaaatccaaaatctatcttattgtaatacagtatgataatagactgctgagtttgctttaacacatacatttataagcatttttcacctg

SEQ ID NO: 10551 - DNA, 688 bp, Glycine max
  Clone ID: 700943922_FLI
ggctttagcaaattccaattcccaattcccaattcccaattcgaaacccttattcctttcaaagaaccaaattgagtgatcgtgatggcaccaaaggcagagaagaagccagcggagaagaagcccgcggaggagaagaagtccacggtgggagacaaggctccggcggagaagaagccaaaggccggaaagaagcttccgaaggagggaggcgccggcggagaagggaagaagaagaagagaaacaagaagagcgtggagacatacaagatctacatcttcaaggttctgaagcaggtccaccctgacattggtatctcaagcaaggccatgggaatcatgaacagcttcatcaacgacatcttcgagaagcttgcccaggaatcttctagacttgcccgttacaacaagaagcccaccatcacttcaagggaaattcagaccgcggtcaggcttgtgctgcccggtgaattggccaagcacgccgtctctgagggtaccaaggctgtcaccaagttcactagctcttgaactgactattatgccccttcgcttcgatctaggtgtctctgttaggaatatgttttatgttgaagtgttggtttattttttctttttggtgaaagcaatttgtaagtgaagaatatgggatttgttgatccttctttgtatggaattagttgctaat

SEQ ID NO: 10552 - DNA, 1088 bp, Glycine max
  Clone ID: 700943933_FLI
actggctcttgcaagtgcgcatgtaataggggcactctctttcccccggacgaataggcaggccaagaaagagagtgcccctattaatggcggctcttgcaagtttggagcaaactgcaagttcaaccatcctgatcctacagctgttggaggaggaggaggtaatcctccttcagggtatggtaatggagggtctatttcattacaaggtgtatcacaaacatctgtaccctcctggtcttctccaagaacattaaatgaagcatctccttttgtgccaatgatgctttcacctactcaaggagtttctacccaaagttctgattggaatggatatcaggcatctgtctacttacctgagaggagcattcatccaccttctacatttgtcatgaacaacccagcaattgatacaaatgtttacatgcaccatcaaaagcagatgcctgttgatgagtttccagaaaggcctggtgaacctgaatgcagcttcttcttaaaaactggggattgcaagttcaaatctaattgtaaatttcaccatcccaagaatcgggttacaagattacctccatgcaacctcagtgacaagggtctacctttgagacctgaccaaagtgtctgctcacattacagtcgctatggaatttgcaaatttggaccagcttgtaagtttgaccaccccgataaacttgcagcccgtgatgattcctggacttgagcaacaatcctactcaaactcagctagtgctggggtggctgggataggtggaagtacaggcgtaactgatgcgacaattcagcaatctgtgtaaacatgtttgtctgaggatcttcttgctttgaggatgcatatcaccccaaattgttttcttcttaaacatgataaatttattttacttttcctagccctgtccaatgcagcacaagctttgcaaggaatagctgacatataatatatatcaaacagtttttatgtatttattacaagtaacatctgcatctgtagattatctcttgtttatggtttgttttctgtcagttggatcagtgttggataataattagactgttttgaaatggttgtc

SEQ ID NO: 10553 - DNA, 764 bp, Glycine max
  Clone ID: 700943934_FLI
gaggaaagtccaagaccgaatctaagagagccgatcccaaacttgctgtgaataagaagggagccgccaccaaggctaggaaacccgccggcaaggggaaggcagcgaaagaccctaacaagccaaagaggcctccaagtgctttcttcgttttcatggaggagttcaggaaggtattcaacaaagaacatcctgaaaacaaagcagtgtctgctgtgggcaaagctgctggagcaaaatggaagaccatgtctgatgctgaaaaagcaccttatgtggcaaagtctgagaaaaggaaagtggagtacgagaagaacatgagagcctataacaagaaacaggcggaaggtcctactggtggggatgaagaagaatctgagaagtctgtatctgaggtgaatgatgaagatgatgatgaggaaggcagtggcgaggaagaggatgacgattagagaatggactgataattgcatttatgtaggttctgatgattttgatcatctgttgtaggtggtctggtcatttcctgataaacatatttcttgcttccaaaaaatatttccctgctccctccgtaaattggttgtctttccaaaacgtgaatagtttaaagaagggagttctttatttgtacttctaaatccaactgtttagttaaggggtgtttatctcttgtagagcttttagtttgatttagagttttcttgttgaaatctggttaagtttgtatcaatataattggcttatcattcgctttctgctgt

SEQ ID NO: 10554 - DNA, 1681 bp, Glycine max
  Clone ID: 700943986_FLI
agaatctgttctggctgtaatgctgagattggccatggaagatttttgagttgcatgggaggttattggcatccagaatgcttttgttgccatgcttgcaaacttccaatcactgattatgagttttctatgtctggaaatcgtcgttatcataaatcctgctataaggagttgcatcatccaagatgtgatgtttgcaagaactttattccaccaaattcagctggtctcattgagtatagagcacatcctttctggctacaaaaatattgtccatcgcatgagcgtgatggtactcctcgctgttgtagctgtcaaagattggagtcagtggataccaaatatctgttgcttgacgatggtcgaaagctgtgcctggagtgtcttgactcagctatcatggatattcatgaatgccaacctctctatgtcgaaatacaagagttttatgagggtttacatatgaagatagagcagcaagttccgatgcttttggttgagagacaagcactgaacgaggctatggagggagagaagaatggtcatcatcacttacctgaaaccagaggactttgcttgtccgaagagcaaactgttcccactattttaaggagaccaaggataggagcaggataccagctcatagatatgataaccgagccttttaggctggtccgtcgttgtgaagtgacagccatacttgttttgtatggccttcctaggttattgactggatcaatcctggctcacgaaatgatgcacgcatggcttagacttaaaggctatggcaatctgaggccagaagttgaagagggaatttgccaagtcttggctcatatgtggttagaatcagagattattcctggcactggggatgaaggtgcatcatcatcatcatcctcatcatcctcatcgccttcgtcttcttcatcatcaaagaagggtaaacgttccgactttgagaagaaactaggtaagtacttcaaacaccagattgagtcagatagctcagcagcttatggagatggattcagagagggtaaccaggctgtggctaagtatggacttagaagaacccttgaccatatccgattgacaggaagttttccatattgaaaaatggtatttgacccttttagagtgagtaattcactttaaagagcaaagtaagggacctcaactgttgatgagataattaaagagttgtttgttaaactttaacaaatccatgaaccgttgatttttcatcaatggttgaaacttacttttctctgtaaagtaaagattcactttagagaaatcaaatccagaaatatgatacaattttctttcctttacaccaaccaatatatcaactttgtcttttaaattatgtaggattcaaaggttccaaaattatatagttttcacgctactccggactagtaaggaatgaaaaatgctcctgttagtctgcggttgccgaaatctttcttttccttttttttttctttttcttttaggggggtgctgatgaggagtgatgaaatgtgcagtttctgcaagttccagataaatgtaggcagataaatgtaggcacctcagattcgatatgtattacaaaataccttgcaacagttgaaaatgataaaacagttgaagtaattatagtaaaagtttgtatattttgtattttgctgat

SEQ ID NO: 10555 - DNA, 859 bp, Glycine max
  Clone ID: 700944027_FLI
aatcacttaggcccagttcccccttaaaccctattcgccgcaataaaaccttctaggtcgaagcaataaaacgccggagacagaggtagtttccacgacggtgcaggtcgcgacacgaaggggcttcttgcggcgtgagatcgtgcgattataccgatcctaacagagtgagatttcagggttacataatgaccaagaagaagaaacaaaatggggttgttgttggagagggtgatggtgttggtggtgttgtagatttggagtctgtcatacacaaccacgctctttttttcgacaagttgattgaattgattcccgccaagttctatctgccaactgatgacaaggagaagccatggtttcagggtctaaacaaggctgcaaaagctaaggcaaagaaagagaccaaggagaatatcaagaagtctcggagggaccgtttagaccctgacaaaccttctgcaactacccttgaccttctcaaggaaagctttggaaaagagaaggtggaccacagtgacgtagagcagggtgcggtggcggttgctaagcctcttgtttctgggatgatgaaaagagatgatgggtctgtgacatatgaagagcttcagcaaaggcttcgtcgcaggctcgaagagtttcgtgcaggtcgtaatactgggaattcggataggaagagggaagaaaggaatgctaggagaggatataaggacaacaaacgcaagagggatggtgaaactgaggaaggcaaccctgtgcgtggtgaattggcggcggcagaggagaaagtgaagaaggatgctgcagaggcctccaaggatcttgtgtttggacatgtcaaacttcagaatgacgaagg

SEQ ID NO: 10556 - DNA, 507 bp, Glycine max
  Clone ID: 700944035_FLI
ggagtatgaagcaggaaatgagttggggaggctaaattgtgaacacatctatcactttcagtgtataaaacaatgggctgcacaaaaaaatttctgcccagtatgtaagcaacaagttgcggctcgacactgagtgacacaaccctactactgtttagcttccattctcatccataaatttgtgtatagttttccatatccaatacaagcaagaattttcattctctgctgtcaatcatcatttcatgtttcaaaattcctgcatcctctgcgagaagtcggcaattatatgttattgagtaaaggttttttattcgggctgagacctttgcatattatacgcaagatttgtcttgcctaagagcagttattttttattttcttttgggtttttaatgaagttgtgtctgtgacatagtagggtgttcttatttggaatgcttgtcctcaactatacccattttggatcctatggtgataagtttttgttggctgttgctacttgct

SEQ ID NO: 10557 - DNA, 1139 bp, Glycine max
  Clone ID: 700944067_FLI
ctttcaaattctcattttcaagctgtttggtgtaaagatgggacaagtgcttggttgtgttcaagtgaagcagtcaactgtagccgtcaaggaatgtttcgggaagtacgatgatgttcttcaacctggttgccattttgtgccatggtgtcttggctgcggtgtggctggtgtcctttctacgcgtgtcatgcagctaagtcttcgttgtgaaactaagacaaaggacaatgtgtttgttaatgtggttgcctcaatccaatatcgagcattggcagaaaaggcatcagatgcttactacaaactcaccaataccaaagcacagatacaatcctatgtctttgatgttatcagagctactgttccaaagatggaacttgatgctgtttttgagcagaagaacacaattgcaaaagcagtggacgaagaacttgggaaggctatgtcagcatatgggtacgagatagttcagactcttattgtggatattgtgccggatgagcatgtgaagaaagccatgaatgagattaatgctgctgcaagattgagggtggctacaaacgacaaagctgaagcagagaaaataatgcagataaagcgagcagaaggggatgcagaatcaaagtacctagcaggccttggagtttctcgtcagcgccaagccatagttgatgggctaagagacagtgttctagcattttctggtaatgtgcctggaacatcatcaaaggatatcatggacatggttctcatgactcaatattttgacacaatgaaggagattggtgcatcctccaaatccaatgctgttttcattccacatggacctggtgctgtgagtgatgttgcttcacaagtaaggaatggtcttctccaaggaaatgcaacaacagagtcttgaagacatacacatatatcatcataccatgatttcctcctccaggcacttgtagtttagctttgcaactaaatctttatatatgctactattatgaatcatccatggcaagttggcaactaatgccttctatatgtatatggtcttcctaatcaaccatggcaactttcttaattttatccactattatgaatcttcaacttttatgatatctcattaaatataatataattacataccc

SEQ ID NO: 10558 - DNA, 1164 bp, Glycine max
  Clone ID: 700944072_FLI
gaaacttggatatcgtatcgaggagctatgcctatggtctcccaggaagaaaccttagtggaagcggcgctccgagttctgaacaccgccgacccgttcgagaaggcgcgactcggcgactcggtggcttcgcggtggctcaatggcgacatagcagaaccctacgacccttccggctccgatctcacgctccctgatcgccccgcaagactatcctctgtgaagttggtggcgccgagcttgatgccgaagctgggtagagcgggcagcttgcagagcaggatagccattgttcatagcctcactcacactgaaagctgggccattgacttgtcttgggatataatagcacgttttggcaagcaagagtcaatgcctagagagttctttacagattttgtgaaggtggcacaggatgaagggcgacacttcagtcttcttgctgcacggcttgaggagcttggttcttattatggagcattaccagctcatgatggcctttgggattctgccactgctacttccaaggatttactagcacgattagctgttgaacactgtgtccacgaggccagaggacttgatgtggtgcctacaacaatcttacgattccgcaacaacggtgataacactacggcagatttactagaaagtgtagtttatccagaagagattactcattgtgctgctggagtgaagtggttcaagtatctatgtgagaggtctagaaatccagcctcagagcaagaagaagaaagtggaagtggaagtagaacagaggagcatgaagcgatagcaaagtttcatgcaatagtgagggcatattttagaggacctttaaaaccaccgtttaatgaggcagccagaaaagaagctggatttggtcctcagtggtatgaaccgcttgcagttaaagaggttaatagtatacccaattactaacttatgtccttaatttaagtagcagttttttactccatacttgagctgctgtaacacagaatagaagttttgagcctttcatgtttcaaagtttttgttttttcttctctttttcgaaagacctttgttgctggccgaaagcataaagataaggtcaacaacttatatgaattttaaaccatacgttgatcagaaaaagattgagaaagaaaaaacaatttt

SEQ ID NO: 10559 - DNA, 893 bp, Glycine max
  Clone ID: 700944139_FLI
gcattgcgtaatggctctgattttccctatgtatctcgggatggtggcaggttaattgaagctaaagatgtagtatttgaatgtggtcccaaatgtggttgtggtcctggttgtgtgaaccgaacgtctcaaagaggacttagatatcgtctggaggttttccgtactgccaaaaaaggatgggctgttagatcctgggattttataccttctggagcaccagtttgtgagtacaccggaatacttgctagggccgaggatatggatagcgttctagaaaacaattatatttttgagatagattgcttgcaaactataaaggggctcgggggaagagagcgacgatcacaggatggagagattcctgcaaatcttttggacaaatatcatgatcaatgttctgaaagtgtgccagagttttgtattgatgcaggatctactggaaatattgctaggtttataaaccattgttgtgagcctaatctgtttgttcaatgtgttttgagcacacacgatgatttgagattggctcgtataatgttgtttgctgcagacaacataccccctttgcaggaattaacatatgactatggttacgtgcttgatagcgtgttggactcggatgggaagattaagcaaatgccatgctactgtggagcctcagtctgcaggaagcgattattctaatactctggaagttgtatgtggtatttttgcaattgcaaaactagtgcggttaagtattggttgtttaaaacatgagctgcaaagtggtctctattcattcacggttaatttgcgcagtttatgtattgggctgaaatggcagcagaggaacattgtaactttttgtgcagatgcaaggaaatgatataggtttattttttggctag

SEQ ID NO: 10560 - DNA, 325 bp, Glycine max
  Clone ID: 700944140_FLI
agcgagttttccgaagaagaggaaatccggtgcatggcgaactgcaagcacattttccactgcgcgtgcgtggaccgttggatcgatcacgatcagaagacgtgtccgctgtgcagaagtacgttggtgccacatcagaagctcgaagaatacaaccagcgactatgggcggcttctggagtttcgcagttttattaccaagacgattacacggcttccctctgaatttttctttttctttttccacttatataattatatatatctttttttattatggtggggggacttgacagctagtgtagccaaatgtatatagctaatt

SEQ ID NO: 10561 - DNA, 932 bp, Glycine max
  Clone ID: 700944149_FLI
caaagccctcaaagcataatctcactcgtattagcgttgctgagagagaaagacaaatggcaacaagcgaagaagtggttgcggcggcgccggaggcagccgcgctggaggcagggctgaagcacaaactggagagaaaatggacgttttggtgcgacaaccaatccaaacccaaacagggcgctgcttggggtacctctcttcgcaaggtctacaccttcgacaccgttgaagagttctggtgtttgtatgatcaggtattcaagcccagcaagttgcaaatcaatgcggattttcacttgttcaagactgggattgagcctaaatgggaagatcctgagtgtgccaatggaggaaagtggtcagtcaccagcaacagcggcaggaaggctaaccttgataacatgtggcttgaaactatgatggctttgattggggagcaatttgaggatgccgaggacatatgtggtgttgttgcgagtgtgcgccagtggcaggacaaactttcgttgtggacaaagacagcggcaaatgaggctgcccagatgagcattggaaggaagtggaaggaaatcatagatgttaacgacaagataacatacaactttcatgatgattctagaaccaaaggagcatcaaagggtcgatacaccgtataaacacctcttgagcatcttcttgcacttgtgctgggctgctggcaaagctgtagtatttgatatcttcatcatgtgccatatgtactaaagagcatactactactttggtggatgggtgatctggagcttttggaggagcttcagtggttatggtgtttgatcgtggtgggtggcacggtcctgttaggaaagagttatttgcattttttttctttaattttcatgcaatttatgtctatttttattcttaaagaaatgtgttttgattattgt

SEQ ID NO: 10562 - DNA, 1907 bp, Glycine max
  Clone ID: 700944294_FLI
atggtcacagaaacaaggggcttacacatcacagcacaaaatttcttaccttacataccggttgcgtgaaagacgcgccactcatccttttccgattgggcgagaggcatcagatcagagcagggtcccctgatatctacatattctcattattctgtccagaaactaactacactgacgtttttgttctcgtgtcaatttctaaatccaccaccacaccctctcttctcttctcttctctccactcaacacaacgtaaccttcttcttctctcgaatcttccaccgcaatgaccaccgccaccgagaagctctccgctctcaaatccgccgtcgccggattgaacgaaatcagtgagagtgagaagaacggattcatcagcctcgtcagccgctatctcagtggcgaagcgcagcatgtggaatggagcaagatccagacgcctacggacgaagtggttgtgccttacgacactttggcgccaactcctgatggttcttcggacgtgaagaatctattggacaagcttgtggtgttgaagctaaatggaggcttgggcacaactatgggttgcactggtcctaaatctgtaattgaagttcgtgatgggttgacatttctagatttaattgtgatccagattgagaatctcaattccaaatatggaagcaatgttcctttgcttttgatgaattcattcaacactcatgatgacactcaaaagattgttgaaaaataccaaaactccaatattgagattcatacttttaaccagagccagtatcctcgattggttgctgaggactttttgccattgccttccaaagggcatactgacaaggatggatggtaccctcctggccatggagatgtctttccatcattattgaacagtggcaaacttgatgcactattgtcacagggtaaagagtatgtatttgttgccaattcagataacttgggagctatagttgacttgaaaatcttaaatcatttgatccagaacaagaatgaatactgtatggaggtgactcccaaaaacattggctgatgtaaagggtggcactttgatttcttacgaaggaagggttcagcttttggaaattgcacaagtcccagatgaacatgtcaatgagttcaagtcaatagagaagttcaaaattttcaacacaaataatttgtgggtgaacttaaatgcagttaaaaggcttgttgaagctgatgctcttaagatggaaattattcccaatccaaaggaagttgatggaataaaagttcttcagctggaaactgcagctggtgctgcaataaggttctttgacaaggctattgggattaatgttcctcgatcacgattccttcctgtgaaggcaacttcagatttgcttcttgtccagtctgacctctacactttggaagatggatttgtcattcggaacaaagctagggcaaatcctgaaaacccttctattgaacttgggccagaatttaagaaggttagcaacttcttgggccgcttcaagtcaattcccagtattgttgagcttgacagtctaaaagtggctggcaatgtatggtttggagctggtgttatcctcaagggaaaaatcagtatcgtggccaatcctggtgttaagctggaagttcccgatggtgctgtcatttcggataaggaaattaatggcccagaggacctcctgtgaggaagcccgctgagtttagaagtatcagactgtatactatctttatggtctcatgttttttccaattattactactcccaagtttgatgggcaaagaaaataagtccctttttgtttgtcttctgattcgatttagaacaagagagacagagacatgagttcttccccattatgtcattttgtataatcacattttttttcatt

SEQ ID NO: 10563 - DNA, 1151 bp, Glycine max
  Clone ID: 700944410_FLI
tgtttctctctcaactctcacaacccatctttcatatccaaattccaatgcttcttcttccttcttatttcaatttcaatcactactattattactctttcacgcttttgcttctcgatttttaaaccctaaatctatctatctgtctaatagataagatagggcaaaaacaaaacaaaacaaaataaaaccctagccaaagaaagaccttgttgagcagcagcagcagagagagagaggcttatggaaggagtaccgcacccaatacccagaactgtcgaagaggttttcaccgattttaagggcagacgcgctggtttgattaaggccctcactactgacgttgaaaagttttaccagcagtgcgatcccgagaaggagaatttgtgtctatatgggtttccaaatgaaacatgggaagtgaatttgcctgttgaggaagtgcctcctgaacttcctgagccagcattaggtataaactttgccagggacggcatgcaagagaaggactggctatcactggttgcagttcacagtgactcatggctgcttgctgttgctttctattttggtgcccgctttggatttggtaagaatgaaaggaaaaggctttttcagatgataaatgatctgccaacaatcttcgaacttgtgacaggaagtgctaagcaatcaaaggatcaaccagctgctcacaacaatggtagcaaatgcaaatcaagtggaaagtcccatcagtctgagtctcaggccaaggggatgaagatgtctgcaccacccaaagaagaggatgagagtggagaagaagaagaagaagatgatgaacagggtgcaacatgtggtgcttgcggtgataattatggcactgatgaattctggatctgttgtgatatgtgtgaaagatggttccatggtaaatgtgttaaaattactcctgctaaggctgagcacatcaagcaatacaagtgccctagctgcagtaacaagagggttagagtttgaaagctctaaacctttggatcaatcaccaattaaacagacaagatttagaatgtttgataacatttttacaagtgaaaattgcttcctgttctagtgaatggttcactttaatgactatgcagatggaatttcaagttttgctactgttc

SEQ ID NO: 10564 - DNA, 973 bp, Glycine max
  Clone ID: 700944436_FLI
caatcaatttaatatattcatatccttccacctgagttcttagtcctgaatgtccttgtctgtctcagtgtctctcttcacaacctcaccgatctgccatttcacactcataacaactttgtacaatttgactcgatatgttgaagtttctctgcagctaaattgaccaatagtttggtgcacttagatctaaaagctagaaagatgtcttttattggcactcaacaaaagtgcgaggcttgtgacaaaacagtgtaccccgttgatcagctttctgctgatggcactgcttatcacaaagcatgcttcaagtgctctcattgcaaaggaaccttgaagctcagcaactattcctccatggaaggtgttctatactgtaagcctcattatgagcaactcttcaaggagacaggatctttcaagaagaacttccagtcacctgctaagcaagctgtcaaaacaactcctgagctgacaaggtctcctagtaaagctgctagcatgttttctgggacccaagaaaagtgtgctacatgtggcaaaactgcttatcctttggagaaggtaacagtggaaggtcaggcctatcacaaatcttgtttcaaatgttcacatggcagctgtcccataactccatccaactatgcagccctggagggcgttttgtattgcaagcaccatttttcccagctttttaaggagaaagggagctataatcatcttattaaatctgcatcaatcaaacgggaagcaaactctgttccacaagcttgagtcatggtgttgtcttttgttgttattatcatctttggaataagtgtttgtgtttttttcattttgattctacttaccatgacaagtttccttcttgttcactttatatgtgggtgtcgctagtgtgcaatttacagtgtgtgatgtatttgaccaatgcacattcagtaataatagtgtgatttgcaagatgtcgcgt

SEQ ID NO: 10565 - DNA, 1394 bp, Glycine max
  Clone ID: 700944513_FLI
cccgtgttctggtcgacttttctcccttctccccatttgctcattctcctccccattctgctcagacaccgcacagcgaacaaatccaccattcattttcctttttcgcaacagcgcaatggctcgaagatccctcccgctcctgaagcacctcctctcgcggcggatcccggcccgatccggtgacactgatcccgggcgacgggatcgggccgatggtgactggcgcggtggagcaggtcatggaggccatgcacgcgcccgtctacttcgagaagttcgaggtccacggcaacatgaaggccgtgccgccggaggtcctcgattcgattcggaagaacaaggtctgtctcaagggaggactcgttacccccatgggcggtggcgtcagctccctcaatgttcagctccggaaagagcttgatctctatgcttctcttgttaattgtttcaatctccctggccttcccacgcgccatgataatgtggatatcgttgtcatcagggagaacaccgaaggcgaatactctggcctcgaacacgaggtcgttcccggcgttgttgaaagccttaaggtaataacgaagttctgttcagagcgaattgctaaatatgcattcgagtatgcttacctgaataacagaaagaaggtgactgccgtgcacaaagcaaatattatgaagcttgcagatggtttattcttggaatcttgtcgagaggttgctacaaagtaccctggaataaagtataacgaaattattgtggataactgctgtatgcagcttgtttcaaagcctgaacagtttgatgtcatggttaccccaaatctttatggaaatctagttgcaaatactgcagcaggcattgctggaggcactggagtcatgccaggaggtaacgttggggctgagcacgctgtgtttgagcaaggtgcgtcagcaggaaatgttggtagtgataaaataagggaacaaaagaaagccaatccagtggcccttcttctctcgtcagctatgatgcttaggcatctccagtttcctgcatttgctgaccgtttggaaactgctgtggaaaaagtcattttggagggcaaatgccgaacaaaggatcttggagggacaagcaccacccaagaggttgtggatgcagtgatagatgctttagattgagtcattttattagttgctgatttcccaaatgaagtcagtctcgtatattcttttctaaccagttttaccaattgttttgcacacaccaaatgcaaaatagcaatttttggaataaagtttatgcaacacagaaaacgatgtatcttttattttgtgtgaagaatttgtagagaatgtgataattgtttctctcctatttaaaagccgtgatttggcgttattact

SEQ ID NO: 10566 - DNA, 2298 bp, Glycine max
  Clone ID: 700944554_FLI
ggctccggccatgccgcgagcttcccgatcaactaggaggagggctaaatttcgaagagcagaagacaatcaaaagtgtgcatttgacttattggccaccgtagctggtaaactattgcaagagagagagaatccaaccatgtctagtgatacatcattagaaaaggatcagtgtggatttgtcaaagagtgccaagatgcaaataaaccatccaaatctgagatttctgatgaaggaagttgtgacaacagtggtttctctcgtctttcttcacaaacaaacaaaaaaaattgcggtttgaaagaattcacacatcttgcaattgatggtgatgtagggattgcttctatagtgacaagttctagttgcttagagaggttcattgcagagaaaatggtggatagcaatagccatttcaaagtggaaaatgttactagcaaagttaatttagatttttctgattatccaaaggatagtgatttcaagttagatggcgataccagtaaaggaaaggatgagttgcataaatttgagaaggtgccaattggtagtgggattgacatgtgtaattttgaggaccctttggatgtaaatcctcctgcattgatcagtttaggtggcaatgccaaattgtctgggtataatgataggattccctgtagcttgttgtccaaaagtcgtgacaatgtaccagtagttagtagagatgatgatgaaaactcttctgggtgtactcaccctataaatactgaaaccaagtcctttaggccaaagacttgtataggtaaaagaatggcttctaactttcagaaagttgctgaaaaaacaaagaattatgcactttctaacaatgatggagattggaagcgaacttacctcagcaagaggaactgcaataaacaccaaagttctcagatgaatattcctttcaaaaagaggaagctttttaattatcgctctgttgcaaactctaatggattgatcaggagaggtggcatttattattcacctgagaattgtatgaatcaggatggatgtgattcaccacctgggatgcacaaagaccctggaatgtcatctttggaagcatgccaacatcagacgttacgaagcataggttctcatgtgaatcttaggatcaagtcatttagagtgccagagctttttatagaggttccagaaactgcaacaattgggtccttgaagaggacagtgatggatgcagtgactgctgtgcttggaggtgaattgcacattggtgtttttctccagggaaaacaagttaaggatgacagtaaaactctacttcaaactggaatttctcatcataacgagttggatgctttgggtttcaccctggagcctaattcttcacaaagcctaccgattgtatgtgcttcacattctcctcgtcctaaagctgacataactgagcctgtaataaggtatccctccagtccagctgtaattcatcagaggattcaaggcaactctgacatgttacctgagcatcaagtaaccagtttaggtagacattttgaaagtgaccatgattcagcaccttctcctgtcaatgcgtctgttgacaaaaatatgaaagattccaaagaactggttactgttcctgaaatggatgaggaactagctatggtacctgtacaccagaagccaaagcgatctgagatcgtccagcgtcgaatacgcaggcctttttctgtagatgaagtagaagcactggttcaagcagttgaaaaactaggaactggaaggtggcgtgatgttaagctttgtgcttttgataatgcaaagcatcggacatatgtggatttgaaggataaatggaaaacactggtgcacacggcaagaatatcccctcagcaaaggaggggtgaacctgttccccaagaacttttggacagggttctagtggcccacgcatactggtcccagcaacagactaagtcacagcacaagcaccatccagaaactgaaactgtcttctccttttaataataataagggccagggtcaggggttgtcagcagcaagtggccatgtggatgatgagggtgccttggtttctgacttttgttattaatgtcttttccttttttgctttcaataaaacatttatgaagcctctctgtttatcaaccatgtaaaaagtgatgatgacatggaaaatgtaaaaattatctttgctcatgatgtggatgcttccctgtgtggagaggctgctgcttcttgtaaattgattgatgtaataaagtgctcgctaacacaattcttttgcttgt

SEQ ID NO: 10567 - DNA, 1134 bp, Glycine max
  Clone ID: 700944591_FLI
ctcacatgtgccatcgttgccttagctagtctagtagtcccttatttaaacacatagcttctgtactttggaaatgacaataattgcaaaaacaaattctagtcatatcatatatccttcaacctctcatcattaggcattcagcaagcaagaaaaaaaaatgggcaaaatcatgcttgttttgggtagcctcattggattatgctgtttcacaatcactacctatgccttctcaccttctggatggaccaatgcccatgccactttttatgggggtagtgatgcttcaggaactatggggggagcttgtgggtatgggaatctgtatgcaactgggtatggaactagaactgcagctttaagcactgccttatttaatgatggagcttcctgtggtcagtgctacaaaattatatgtgattacaaatcagactctagatggtgcatcaaaggaagatctgtaaccgtaactgccacaaacttttgccctcccaatttcgcccttcctaacaacaatggaggctggtgcaacccaccactcaagcattttgatatggcccaacccgcttgggaaaagattggtatttacagaggagggatcgtccccgtgctatttcaaagggttccatgcaaaaagcatggaggggttaggttcagtgtgaatgggagggactactttgagctagtattgatcagcaatgtggggggtgctggatccatccaatcagtgttcattaaaggctcaaaaactggatggatggcaatgtcaagaaattggggttctaattggcaatccaatgcgtatttgaatggtcaatctttgtccttcagggtcaccaccactgatggagagaccagagttttccaagatattgttccagcaagttggacattcggccaaactttctctagcccagttcagttctaagctgattacagataaaccaaccaacggctgaggcgtgcttttttattttattactggagctgcccgccacccttcttctggttttgattattcccatcaactccaagccctctatcaaggcataaattgttatcaataataacaatcaatcaccatcatatcatcataagcttgtatatcaaataaacatctttcaagtttaaatt

SEQ ID NO: 10568 - DNA, 1218 bp, Glycine max
  Clone ID: 700944605_FLI
taacgaacgaaagacctcgacaattcttctgatccgtttcgttcagatcaaaacttgcctctttgcaacgctgcttctgacaaaaaacgttgtaccatccgaaatgtcggacacagtggaacatacagatcaaagagctgaagctattccccaatccacagctacaccaaattggactattcatgtgtcagacataagaacagttaaggttagcaacatatcattggttacttccaagaaggacattgaagaattcttttcattctcaggtgatattcgatatatcgagatgcaaagggaaagtggtcacactcaggttgcttatgttacatttaaggatacacagggagcagacacagcagttctcttaacgggttccaagataggtgatctatatgtcaccatcacaccagtggagaagtatcagctgccccctgaagcacttccttcaagtccaacaaaccaaagccctgatgcagttaagaaagctgaagatgtaatgagcaccatgcttgctaagggtttcattttaggaaaggatgctatcaacaaggcaaaagcctttgatgaacgtcatcagttgacctcaaatgcttcttccacagttgcttccattgatcgtagaataggtttaagtgataaactaagtatcggaacaactattgtcaatggaaaggtgagagagatggatgaaaggtatcagctttctgaaatgacaaagtctgctatggctgctgcagagcaaaaggcaaatagtgctggatctgccatcatgaacaattcttacgtaataagtggagcttcatggttttctagtgcctttaccgctatagcaaaggcagccggggatgtcagcacgatgaccaaggagaaggttgaacaggcagcggtggaaaggaatgagatcatttatagtgaaaggaaagggactgttgatgaatttgcaaagacgcacttagaggaggcttcagacattggccctgcagtagttcctgttaattcagatgatgaccgaaatctggcaacaattttataactcaagttaattcagaatcccttattcccacatacacagttggatttatttagttaacatagttattgtcagacttcagttcctgcaagtttgttgtacattgataagtcttgttgattgttatagtgatgtaaaggtttgtctgacagatgtggttcctaaatatggtcaacattcatttc

SEQ ID NO: 10569 - DNA, 1801 bp, Glycine max
  Clone ID: 700944627_FLI
caaaagttgtccttggttcaatagcctttgcaatcttctgggtactagcggttttcccagctgtgccttttctacccattgggagaactgcagggtccctgctaggtgcaatgcttatggtaatattcaaagttcttagtccagaccaagcttatgctgcaattgatcttccaattcttggtcttctttttgggactatggctgtcactacttttcttgaaagagcaaacatgttcaagtacttggggaaattgctttcttggaaaagtaaaggaccaaaggacttactttgtagaatttgcctcatttctgctatctcaagtgcttttttcaccaatgacacatcttgcattgtgttgactgaatttgtgttgaaaattgcaaggcaacataacctcccaccataccctttccttcttgcacttgctacaagtgctaatattggatcctcagcaaccccaattgggaacccccagaatttggttatagctattcaaggtaaaatatcatttgggaggtttctgatgggtattcttccagctatgcttgtaggagttgtggtgaatgttgtatttcttatagccatgtattggaaggtgttatcttgtcctaaggatgaagaggatccaatctcagaaattgtagtagaagaggaggttgtttctcatcagttttctccagccagaatgtctcattttacatcctttaattctcaagaatgtaatggcagtgtagaccaatcaactccaagtgaaagcgaagttcagatgattcataggagcacaaaggattccacaaaaaactcaaatgcatccaaggaggggacaaatgacacaaaggaggaaattaataatccttcaaaaaatgttgcaatagtagtagataaacctattgaagcacatgttatactctcttcagaagaaaaggactacatgaacaacaaatggaagagggtactgtggaaatcttgtgtttatgcaatcacattagtgatgttgatcgcaatgcttataggtttgaatatggcatggacagcaattgcagctgcaataactttggtggttcttgatttcaaagatgcagggccaagcttagagaaggtctcatatgcacttttggtattcttctgtggaatgtttatcacagtagatggatttaagtcaactggaattccaagtgctatgtgggacttaatggagccctattctcgaatagatcatgctagtggaacagctatacttgccgtggttatacttgtcctatcaaatttggcttcaaatgtaccaactgttctattgcttggagcaagagttgcagcctcagcggctgcaatttccaaaggagatgaggagaaggcatggctaatcttagcttgggttagcaccatagcagggaacctttcactattaggatcagctgccaacttgatagtttgtgaacaagctcgtcgagctccaaaccttggatacacattaactttttggacccatctaaaaattggccttccttctactcttatagtcactgctattgggttgacactaataaaatgacaagagtttacttgagtcctaattgaagaatcttatcgtagatgtttacacaagcaaattaaagtcagtttttattgtaatgtattttaaggttgttagaaaatatagttagatgaacagggaattttctctgtttttgttgttaatgtcatcaaataagtatatgattgtgattgtcctagctaaaagtttgattggaatgctttgaaatttcaacttgtaatgaattttagtttgggagttatgtg

SEQ ID NO: 10570 - DNA, 744 bp, Glycine max
  Clone ID: 700944661_FLI
ggggaaatcaacctcgatgatgttgaagctgtctttaaagactctgaagagcaccatgtgacagagaaaaaagaagagcagcctacagccatgaatgcatttgagttaatctccatgtccaaaggactgaaccttgaaaacttgtttgatactgagcagggatttaaaagggaaacaagattcacctcaaaatcccctgcggatgagataatcaacaagattgaggaagccgcaaaacctcttggctttgatgtgcagaagaaaaattacaagatgaggcttgcaaatgtgaaagctggaaggaagggaaaccttaatgttgccacagagatatttcaagtggcaccttctcttcacatggtagaggtacggaaggcaaaaggagatacattggagttccataagttctacaagaaactttcaacaagcctggatgatgttgtttggaaaacagaagatgatatgcaaatgcgagaaacaaagtgatgtggatattattatcattgtctattaagtgtaattttcttcgtgtctgaggttttactattttccaatttcttcattcgttatattcctcccccgtaggtttgtttggacattaattacatagtactcatttattgcataccatgctattattttttgaaagcatgcagagttcatgtaagaattttactcatccaacagtcgcggttatgttcatgaaacaaaaaattgtaagaaatttgtatattgtatatatct

SEQ ID NO: 10571 - DNA, 1205 bp, Glycine max
  Clone ID: 700944676_FLI
gtgaatatgaaagccctagagtgtagagtagataagcgtatccagcaaaacagaaatggaagcaacgaacatagaattacaaattaaacggctccaattcctttctctctgcctctgaacaaatttcatttttcatttctcttacttacactacacagagacagggatacgcaatgataggatcttttattaccagggcacttgtgatggtttttggttatgccttcccagcctatgaatgctataaagcagttgaaaagaataggccagaaattgaacaacttcgcttttggtgccagtactggattttggtagctgttttgtcagtatgtgagcggattgctgatgctttcatatcatgggtcccaatgtatagtgaagctaagttggcatttgtcatatacttgtggtacccaaaaacaaagggaacaacatatgtgtatgattccttctttagaccatatgttgcaaaacatgagacagaaattgatcgcaacttgttggaactaaggacaagagcaggagatattgcagttttgtattggcaaaaagctgctagttatggccagactagaatatttgaaattttgcagtacgttgctgcacaatcaacaccttcaccacgccctgctcagcaacaaccagctgtgagggtgcgtcaacccgcatctagtaatagccaaccagcagctgcaacagaaccacaagctgagaatccatcttctcctacttctagctcatccagtcagcaccagaaggaagtagcagagaagttgggttcttcacaggtgcctaaagcaccctacactgttgcaggtttaagtagccagaagtctaatcctatacctgcagaggatgagccaatgcagattgaagcagcaccaccttcatcctcttctgcaaatgaaaatgagaatcctcccttggaagatacaataatggaagaaagcattagagttacgcgaggtagactaagaaaaaatcgatcagctggaatccgttagacatcaatgttttcaagttttagcctggaaaacatgggtaggtggacaatagtgggtgtggaatagtaaaattgtgtatatttttgcctatgtttcattccatttattttttttttttcatatgaataattgttttttttacaacaccttatcaatccccttattaaatgaaaatgtatgaaatgcttattttatgcttct

SEQ ID NO: 10572 - DNA, 1445 bp, Glycine max
  Clone ID: 700944751_FLI
ggtttttcaattttggactagttctgatttgcatacttatatagaggcaaaaggggtatcctctttttcattatcctctattcatacatatccaaagacaacaacatttcctttcagtacccctattagttgaatcagcatggcttcatttccttcaaattctgcattggaacatagcatggccagtgcacaacaaaacagtaaccctcatgcttcctcaccttctttcatgactagagtggccatgagaatatctagatcaagatggttcactttcttgagaagagtattccattaccaaaacggaccaagatccaatctcggctccaaccctttcaattccagcacttggatgatgctggagttgattgctttgttggtccaaatagcaagcacaacattcactttggccatttcgaagagtgagaagccaatttggcctatgagagtgtggatagcaggttatgatattggttgtgtccttaatcttctgctactttgtggccgctaccatcaacttcatgtgactcaagggaataatgctcttagcctctctgaattggagcagcagagaaacaatgaagaatcaagtgtgtacaggacttcacatttgatagacaaatgccgtagttcactagagcttttctttgccatatggttcgtgatgggcaatgtatgggcctttgactcacgttttggatccttcccacaagccccaaaactccaagtgctctgcatcatcttgctttcttggaatgcaatatgctactctttccctttcctattgtttttgcttttgtgttgttgtgtgccactaatgagcaccctccttggatacaacatgagcatggggtcctctgctagaggggcatctgatgatcaaatctcacaactcccaagttggagatataaagggcttcattccaacttggacattgccaatgactctcaaagcagtgaaagattgatcaaccaagatccagaatgttgcatttgcttggccaaatacaaagacaaagaagaagttaggcaattaccctgttcccatttgttccacctaaaatgtgtggatcaatggctaagaattatatcatgctgccctctttgcaaacaaggattacaaaggtagcaataggacgaggcagaaaatacacaagaacattcataatcttatacattcccaattattttgttttatctcctttggttacacgagtgagtttgtacatgtacagaagaggtcaccagtaaccaaaactacattgaatacttggttcttaggagtgaatcaatccctttatttttcaaattagtttgtttgtacaagtttttcctcccttatcctgccatctaaatattgcaaggtgagcatatagttgtactgaataatgaagtaaatatttacatttgctccttaaattttatataataaaattattgggact

SEQ ID NO: 10573 - DNA, 745 bp, Glycine max
  Clone ID: 700944807_FLI
tgatgtgcagcatcagtgagaaagccaaaaggaagcgccaatctgcattccgcggagtgcgcaaacgcagctggggacgctacgtctctgagataaggctcccgggccagaaaacacgcatatggctcggctccttcggctcgcctgagatggcggctcgcgcttatgactccgctgctttcttcctcaaaggaacatctgccactcttaatttccccgacctcgtacactccctgcctcgacctctctcatcttcccggagggacatacagtccgccgcagctgaagccgctctccactctccgcctcccaaagaagaacaagaatctattttcacttccaccaccacctcgtcctttcacgatgtcatggaagctcctcttatgagtccccttagggtggactccactttcggagatttctcatgggaccaactcttcgatttcaacgatgacattctcatcgtgggatcaacttctgccactcttgtcccttaacgctgcttttgcaattcgccacccactgcttctagaaactagctggattttctttcactttctgttaataactcttctctgcttttctaagacttgcttctgaactcttgtacaaaggagctctccaagacaaatatatatatatatatatatatatatatatatatatatatatatatatatatatatatatgtttactgagagactgatttcactaagcaccttaattaaataagtgtttctgaat

SEQ ID NO: 10574 - DNA, 1333 bp, Glycine max
  Clone ID: 700944981_FLI
ggccattgctaattgattgcgtcactctttcactgacgaacacaagaatcacaagtgtgaatccctttcccatatagaccccttcattctccccaagaggcgactgtcatgacatctctgccacttattcaacctgaaagtatggaggcagaaccatcgattccctcagattcactccgggcccagatttccaaattttctaccatgctcactgaagcacacaaaagaaagccaatccattattggattcttcttgttctcagcatcttggcaatgcttgtggcatttcctgcttccagcattctgtctcgtgtttattatgataacggtggccagagtaagtggatcatatcttgggtagcagttgctggatggcccctaactgccttaatactgtttcctgtatactttatcagtaaaacctttcctactcctctgaacttaaaactgagtctgtcttatatcgttttgggtttcctaagtgctgctgataacctcatgtatgcttatgcctatgcttacctccctgcatccactgcctcacttgtggcatcatcatcccttgtgttttcggcgctctttggatactttcttgtgaagaacaaagtgaatgcttcaatagtgaattccgttttcgtcataaccgctgcattgaccatcattgccctggactcgagttcagacagatatcccagcattagtgacagtgaatacatcatgggatttgtatgggatgttttaggatctgctttccatgggcttattttcgctctctcagagctcgtctttgtgaagttgctcggaagaagatcctttatcgttgttctggagcagcaagtcatggtttctctatttgcatttctgtttaccactgtagggatgattgtgagtggtgattttcaagggatggcacatgaggctaccactttcgaaggtggtagaagtgcttattatcttgttatcatttggggtgcaatcacttttcagctgggggttctggggggcactgctataattttcttgggctctactgtgctagcaggtgtgcttaatgcagtaagaacacccataacaagcattgcagctgttatactgctaaaggaccctatgagtggtttcaagatcctctccctagtgatcaccttttggggatttggctcatatatttatggcagttctatgggtgaaaaatcatcataaggaaatgtggccacagattccagttcttaagaggtgattgttgtaaggtatatgattaaatctccgtacataaaatattgggaatgttgttgggtaaatcacaaatatgattctttatattaatgctttaaag

SEQ ID NO: 10575 - DNA, 1080 bp, Glycine max
  Clone ID: 700945029_FLI
acttttttcatctaataatggctgcaacaacacgttcacgtgcatccatctacgatgtgttcctcaacttcagaggggaagacacacgctatggtttcaccggcaatctctacagggctctttctgacaagggaattcgtaccttctttgacgaagagaagcttcacagcggagaggaaataacacctgcacttttgaaggcaattaaagattccagaattgccatcactgtgctctctgaagactttgcttcttcctcattttgcttagatgaacttacatccattgttcactgcgcccagtataatgggatgatgattataccagtgttttataaggtgtatccttctgatgtcagacaccagaagggtacttatggagaagcattggctaagcataagataagatttccagaaaagttccagaattgggagatggctctgcgtcaagttgctgacttgtctggctttcatttcaaatacagagatgaatatgagtacaagtttattgagagaattgttgcgtcggtctctgagaagattaatcctgctagaatacatgttgccgatctgcctgttgaacaagagtccaaagtgcaagatacccatcaagagcaagaatacagagaggctttcaaggtgtttgacaaggatcaaaatggctacatttcagcaagtgagttgaggcaagttctgatcaaactgggtcaaaacacaactgttggagaggtggaggagatgattgcaactgcagatttcgatggtgatggtcaaattagctatgatgaatttgttaagactatgaaaatttaaaccaacaaattaataagtcttccaattaatgtttgttgtattttacttttatcacatgcattgatgtgaatgatctcagccgcccatttcatttgttcaaacttcaacccgtaattattctttcagttttagtttagtattcttcatgtttcaaaattaattggagtaaatttattcaagaactgtggaaattagactctatctttaatttcttgaaacattaatgtatgctacaattttatgatgccaataagttgagttccaaggt

SEQ ID NO: 10576 - DNA, 811 bp, Glycine max
  Clone ID: 700945078_FLI
gtgaatgaacagtggattcaagttcagcatcttgagcaggctcttcacattaccaaaatgaggactctaaaggctcaaaggctaacaagtgtaacaagatgcacattcatgaagtttatcaacgtccttcttgatgatcttcgggcacttcattcatatgtatttggtgaaaggactatagtcagttcactcatctcacagactttggatcagttgaagagatgctcttcattgaccaaaaaatatcaccatcagcttcaaggttttatcaaagatctgatggagagaaatgaattgactgcgtctattgcaaatgatgaattagtcttcttcctggcttctgctctaatcacctttccattaatgagtgcctggatgttgctctcttcataatgacctggcaggcaagtttgttttttttttttttaaaactgaacagaaaattgtccccgtacttctttctacagctacaaactgctgacaactttcttcgaacatttctgcttcaagaatgtttttcagtgatggtggactactgtagttttgatcttgtatcagtgtatggttgcaagtagccgagaatactgagcattttatataactattttgcctgtacatatccatctggatagtaaatccctgtgtttcgaaatacattgagtagggaaagaatcttgtcaaatcaacaaatgatgcaagagttacaattagtagcttcaatttagacatggaaaattacatcccagatgtgaatcagatattcaatatctttttagtttgtataatctgagtatttgtttttagtctccat

SEQ ID NO: 10577 - DNA, 619 bp, Glycine max
  Clone ID: 700945089_FLI
gaactgcaacatactatcgtcatgttagagatccttcctctgatggttttgctgagataatgatgcttcaagggagtctactaatgggtggacaactaaattcacatgatcatttcaaagactggagacttgatgttgataacatgtcctatgagcaattgctagagcttggtgagagaattggtcatgtgaacactgggcttaaggaagatgagatgggacggaacataaggaagactaggcttcaattttgggatgatacatcaaagcaccaagtagataaagagtgcagcatttgtcaggaggagtatgaagcaggaaatgagttggggaggctaaattgtgaacacatctatcactttcagtgtataaaacaatgggctgcacaaaaaaatttctgcccagtatgtaagcaacaagttgcggctcgacactgagtgacacaaccctactactgtttagcttccattctcatccataaatttgtgtatagttttccatatccaatacaagcaagaattttcattctctgctgtcaatcatcatttcatgtttcaaaattcctgcatcctctgcgagaagtcggcaattatatgttattgagtaaaggttttttatt

SEQ ID NO: 10578 - DNA, 971 bp, Glycine max
  Clone ID: 700945149_FLI
ccgtctcttggcagcttacgtcaattgtcagaaggttggggccccgcctgaagtggtggcaaggttagaagaagcatgtgcttctgcagcgacaatggctggtggtgatgcagcagctggatcaagctgcataggtgaagatccagctttggatcagttcatggaggcttactgtgagatgctcacaaagtatgagcaagaactctccaaacccttaaaggaagccatgctcttccttcaaaggatcgagtgccagttcaaaaatcttacaatttcttcctccgactttgctagcaatgagggtggtgataggaatggatcgtctgaagaggatgttgatctacacaacatgatagatccccaggcagaggacagggatttaaagggtcagcttttgcgcaagtatagcggatacttgggcagtctgaagcaagaattcatgaagaagaggaagaaaggaaagctacctaaagaagcaaggcaacaattacttgaatggtggaacagacattacaaatggccttacccatccgaatcccagaagctggctcttgcagagtcgacaggtctggatcagaagcaaatcaacaactggtttattaatcaaaggaaacggcactggaagccttcagaggacatgcagtttgtggtgatggatccaagccatccacactattacatggataatgttctaggcaatccatttcccatggatctttcccatcccatgctctagaaaattatccctcgtttgtgggctgctgataatagattcataaactcgtgctgtcacttattaaaaccttacaattattaatattaattaatatgcattctaagaaatcctagattgctatactataatatagtacgcaggtgtatcccttgctagctttttagacggtcctttgtgtggatcatctagttgaaggagttatgaataaataaaattccataaatttaaagttttt

SEQ ID NO: 10579 - DNA, 451 bp, Glycine max
  Clone ID: 700945176_FLI
cttggtgagaagaacatcaccttaacaagttggagagaaggagcttcaatgatacgacataggctccgacaaaagaaggttctcttgattttagacgatgttgacaagcacaaacaattaagggctatggttggaagatctggttggtttggtgccggtagcagagtcatcattaccactcgggacaaacatctactaaaatatcatggcgttgaaagaacttatgaggtggaggttttgaatcacaataccgctcttcaattgcttacttggaatgcttttaaaagagaaaaaattgatccaagttatgaggacgtggaatctgctcttgaacattataagagaagtcccggtaatgaaatcatcctagagattctaaaagtaagctttgatgctttgggggaagaacaaaagaatgctttgaaacgtaagattagaaattttgaactcc

SEQ ID NO: 10580 - DNA, 2212 bp, Glycine max
  Clone ID: 700945181_FLI
aacttgctgaatttattgatagtttcttcctttgctgaattgattttctcctatctgttgtatgttactgggcagcgcgtgctgtatgttgacattgatgttcaccatggtgatggtgttgaggaggccttttacaccactgatagagtgatgacagtgtctttccataagtttggggactttttccctggcacaggacacgtcaaggacattggggtgggatcaggaaagaattatgcagtcaatgtcccattaaatgacggaatggatgatgagagtttccgtagtctgtttcgaaccatcattcaaaaagtcatggaggtctatcaaccagaggcagttgttctacaatgtggagctgattcattgtctggggacaggttgggttgcttcaacttgtctgtgagaggtcatgcagattgccttcgttttcttagatcgttcaatgttcctttaatggtcttgggtgggggtggatatacaattcggaatgttgcccgttgttggtgttatgaggtctgcttctttctcttttagtctggattataatgtgacttggtacttgtttaatttacttatttggttacatgctttttctttgttttagacagcagtggcagtaggagtggagcctgagaataagttgccttataatgaatattatgaatattttggcccagattatactctctatgtcgatccaagcaacatggcgtaacctaaacacacccaagggtatggaaaaaataaggtgtttatactattaatttcatctggttgagttaaatcgatgattctcatttcaattttattatttctcttaattatatggaaaaataatggtcataaattgttaagacagtaattccttaaatgcattacattttgctgcatccatgtcacatcctttctacaaatgatgacgttttcagaaacttactagtagttgcatagacaagctatatttcataataactgaattgttattttcatattggttgtgaagacatattgtattgtctagatataaaatatttcctatgggtttctggaaattgtacctctgtctgtggcagaagccaggaggcccaggactgaaccttagtcagaatttatatttcccttgtctcatgtgtaaaatattcagagatttcctatcatttctctggattaagcagtgacttacatgggttttccccccattaaatttcaaggaacacactactagaacagatttctcaacttcccccatgctcccggtgtaccttttcagacaacacccacctaccttacaacttccggaagaggtcagtacttaataacagttgcagttattgttcctttgcaattctcttctttttgttgattttattatgtattcaggcagaagaggacatggatagaagacctaaacttcgcaaatgggatggtgaagattatgattctgatcctgatgaaggtggaaaggctaattccaagtttccaaacgtcactgcccatatgaggtaatgattatatattgttttgaagctgaatataaacccatttggtttgtaagttcctttttcagtggataaacgtgggttgttccttgagaccgatacctatgtgacacctgctagcttgatagatattcctagagtcagtttgaatggaagttttttctggtaatggagctcactatgctataacacaagtttcttcttagccgtttgaagtgaatttaataatcatttggctcctttttttaaagcagaaatgttctctttttgctgcaggggcatttcagatgaaatggaagaagagaaaccagaagtgcatccatcatcttgttgttgatagaacagagcaagttcttgcacagcatgtttgtattgttatctttattccgtttatgggggagatcattactaaacagtaccacatgcagctgttgagaatgcaaatataatcaatacattgtgcaaatgtaatatagtgtaaaacattgttttggtctctctcgtaaactatttttgtttaagtcattttcttttatttggtccctggcttacacttagtttcgttttagtctgtcatggtcaatttagttgattttgaatattctcatttgtgcatactttcatttggtcaaatggatacatccctttaatttggttcttgtaacttttccctgtatgatgaggatattaaagaaagtgaggaaggttcc

SEQ ID NO: 10581 - DNA, 669 bp, Glycine max
  Clone ID: 700945323_FLI
ctccgatccgagacactcaactctcaagtctgaagatactcgctactcagagttgaattgttgacgagcattctccgatccagaatcgatggatttggaaatggaggttgaagttggaagggaaatttggagcaaaagcttcaagtgtgcaaggaaatgcattaaagatagttgctaagcctgaatttcaggctaagctaaaattcagacagagagcaaaagattcaagcctggctaagcaagaactggtggctgaggaagagttctgttgtgttcatttgagatctgtgtactttggctaagccaaagtttatggctaaccactgattaaaaaaaaaattatggctaagcgaagattattgccaaaaatggaaaattttctgatatatttaaagtggatgtctatttagtatacattatctctccatatttttctcttgtacggaggcatgaagttcccactattcctttggagagaagtttttcccttggctcctcctctccatttctcttccacctttcatgtattttggagttactcatggctatgagtagctaagttcctccattgttggggttagatgtaaccttactcaaactctcttgtaccccttggtatatatatattcagttgtttgtgtttaatgttagtattttgtttctttgttt

SEQ ID NO: 10582 - DNA, 1326 bp, Glycine max
  Clone ID: 700945325_FLI
agaaaatactctgcaaaggacaatgatgatctatgcattgtttgttgggatggtggtaatctattgctttgtgatggatgcccaagagcatttcataaagaatgtgcagctctatcaagtattccacgtggtgactggtactgccaattttgccaaaacatgttccagagagaaaagtttgtggcgcacaacgccaatgctgtggcagctggaagggttgaaggagttgatcctattgaacagattgccaatagatgcattcgcatagtcaaagacattgaagctgatcttagtagctgtgctttatgcaggggtgttgatttcagcagatctgggtttggtccacgcacaataatactctgcgatcagtgtgaaaaggaatatcatgttggttgtttgagggatcacaagatggcatatttaaaggaactgccagaaggtaattggctttgttgcaatgattgcacaagaatacactctactttggagaatcttttggttaagggggctgagagactccctgaatctctcttgggtgttataaagaagaagcaagaggaaaaaggattagaacccatcattgatgtaagatggaggcttcttaatggcaaaattgcttctcctgaaactagaccattgcttttggaggctgtttcaatctttcatgaatgctttaatcctatagttgatgcagctagtggacgtgaccttattccagccatggtttatgggaggaatgtgcgaggtcaggagtttggaggaatgtattgtgcattactaatagtcaattcatctgtggtatctgcgggcatgcttagaatttttggctcagatgttgctgaactcccttagttgcaacgagtaatgggaaccatggaaagggctacttccaaacactcttctcctgcatcgagaggctgctggctttcttgaatgtgaagaatcttgtactgccagctgcagaagaagcagaatcaatatggactgataaatttgggtttagcaagatgaatccagatgagctcaccaactatagaaagaactgccatcagatggtaagtttcaaagggaccaatatgctgcataaaatggtaccttcgtgtcgggtcatcaataatcaatcatgacattttttttatagaaacgaaatcaatcgtgaaaggggaaaacccctagctttctcgcttcctttttccctttcttctggttttgtatatattaaacttttggctatttgaagccattgttgaagcgttcctgccatttgtttaaacatttataatgccatgtattctatttttattttaattttaattttagtaatat

SEQ ID NO: 10583 - DNA, 531 bp, Glycine max
  Clone ID: 700945368_FLI
gaaagggaaacttcccaaagatgctaggcaaaagctacttaactggtgggaattacattacaaatggccatatccttcggaatcagagaaggtggcattggctgaatcaactggtttggaccaaaagcaaataaataactggttcataaaccagaggaagaggcattggaaaccatctgaagacatgcaatttatggtgatggatggcctgcatccgcagagtgcaactctctatatggatggtcactacatggcagatggtcactaccgtctaggaccatgacaaaagacaaggccaccttataaattattattatatatatttttaattgtaatttaaatgcaaggtatgtgtttcttattaacaaagagattgtgcccaaactggataacagtcaacgctctagctactagtttcaatattatcaagcatataccgtgaacattaattggttgtgcttgtgcagtgtgagtacttgagtagtttgccacagtgatgttgtacgttttattaaacaatgacggttgctt

SEQ ID NO: 10584 - DNA, 1040 bp, Glycine max
  Clone ID: 700945449_FLI
ctcatttaggcatattcacaagattagttctaatggctgggattgtggtgatttttgacttcgactcgacaatcatcgagtgtgatagtgataattgggttcttgacgagtttggtttaacagaaaagttctatcagcttcttcctaacatgctttggaaccctctgatggataagatgatgaatgaacttcattcacaaggaaaaaccattgaagacattgtacaagttctgaacaggactccaatgcatcctcgcattgtcccagccattaaggcagcatattcccttgggtgtgagctgaagattgtgagcgacgcaaatattttcttcattgaaacaattttgaagcatcatggggtgtggaattgtttctcggaggtcactgcaaaccccagttatgttaacgaagaagggaggctcagaatttccccctaccatgattatctaaaatgttctcatggatgcaatctctgtccaccaaacatgtgcaagggaatgatcacagagagaatccaaaattcggttgatgctgcaggaaagaagttcatctatcttggagatggaagtggagacttttgcccaagtttgaagctcaaagatagggattatttgatgccaagaaagaatttcccattgtgtgatttagtatctgagaactctaagcacataaaggcagaggtgcatgcttggagggatggggaagagctttatgatgttctgctccattttatcgacaaagctattggtgaaggaaacaagaatatcattagttctactccaatagtatcagttgattgcaagttggggtcaatttcaattgaggctcataaacctttacctaaagcaatcccagttcctcaataaaactaaaattgcagaggatgaaggatcgatcgatttcaaagtgattacatttcttgtggcttgtcttctatgtattgctactttgtttttgctgttgttgcttttgcagaaagtgtatgagtatgaggctttggcctggttattattattgatagtaataataaaaatataatg

SEQ ID NO: 10585 - DNA, 1433 bp, Glycine max
  Clone ID: 700945481_FLI
aaatctcttcgttccttcgattcgttccatttcttccaaaatggccaaagacccagttcgcgttctcgtcactggagctgcagggcaaattgggtatgctcttgtccctatgattgctaggggagtgatgttgggtcctgaccagcccgtgatcctccacatgcttgacattcctccggcagcagagtcattgaatggggttaaaatggaattggtggatgctgcattccctcttcttaaaggtgttgttgccacaactgatgtggttgaggcatgcactggggtcaatattgccgtgatggttggtggattcccaagaaaagaaggtatggagaggaaggatgtgatgactaagaacgtctccatttacaagtcccaggcttctgcccttgaaaagcatgctgctgccaactgcaaggttcttgttgttgctaacccagcaaacaccaatgcattgatcttgaaggaatttgctccatctattcccgagaagaacatttcttgtttgactagattggatcacaacagggcattgggccaaatctctgaaagactgaccgttcaggtttctgatgtaaagaatgtcattatctggggcaatcactcatcaacccagtatcctgatgttaatcatgcaactgttgcaacctcagctggggagaagcccgtccgtgagcttatagctgatgatgcctggttgaatggggaattcattactactgttcaacaacgtggcgctgcaattatcaaagctagaaagctttcaagtgcactatcagctgctagtgctgcttgtgaccatattagagactgggttcttggaactcctcagggcacttgggtatcaatgggagtatattctgatggttcctacaatgttccagctggacttatatattcattccccgtcacttgtgccaatggggaatgggcaatagttcaaggactttccattgatgagttctcaaggaagaagttggacttgactgcagaagagctttctgaggagaaggcattggcttactcatgcctaaattagacaccattgctttttgtctactgtccttgttagtaggttcccatgttttgcctatagaagtgtagcttcaattttgaataatgctccttctaagatacaaaggaactatcactggagaagagtctgtttttcattggaattacttgtatttcaacatctaatccttttaggaggaggatatttgagcccatgggccgcatattgaattttggattagtcctaattttatgtgcgttagtgcccccggttgaactttttggtgtgtttgtggtggctgtacaagatttttgatgtatgtgggatgcacaaagcgtgcaaacatatacttctaggccttgtggtcgagtattatgcactagtattacgcaataaggtcatcatggatatgcttttt

SEQ ID NO: 10586 - DNA, 800 bp, Glycine max
  Clone ID: 700945486_FLI
cgccctattgaaagaaaagaaagagtttggcactgataatggcgggaaaggaaatctaactataaaaccctaaccctaaacccattcgaatcggaatcggaagaagataatgtcggaggcggaggagctaccccggtctattgtgcgccgcgtagtgaaggataagctgtcccgttgctccgaagacggagaaatttccgtcagcaaagacgctcttctcgcattctccgaaagcggtaggatcttcatccactacctttccgcaacggctaatgatatatgtaaggagtctaagaggcagattatcaatgttgaggatgttttcaaagctcttgaggaaactgagttccctgagtttcttcgtcctctgaaagcttcccttgaagagtttaggaagaagaatgctggaaagaaagctgcagtgtcaaagggaaaggatgatgagccgagaaagaaaaggaagttggaaggtgagtcacctgataagggtgagggttctgataaagctgagttatcggataaaggagaggatcctgataaaggtgagagtgataaaggtgagagtggtgacgagaccaatgatttaaaggaatgaaggcagttgtatttgttatgactgagccagcgcgtttatgttttgtgttatgttgggaatgtgcatgactccttgtttattggatgcagcttggtattaatgtcaaaaagggagctttttgattgtttctcagtaaaacacatcccctaccctaccccctgatgtatggagcatttcaggaaataaatgatattccatcttatat

SEQ ID NO: 10587 - DNA, 1755 bp, Glycine max
  Clone ID: 700945512_FLI
atgctcactacttcttctcaacttcataggcctttcttattcttccttctaagaaaccacttcaaatcatcaacttccctagacttacacaccctttgggctgtaacaagcaatctgatcctcttgttatcattcagattgatttctcttctagcacctcgatcaaagggctaaaaaatttgctacttattgcacttttcttttcatggtttgatacatcttattgattttagtgctatttcaaggggtgaatttgagacatgggtttgagttctaagcaggtttctagcagtggacttgattggaaacaaaccttgttggaggctcagaatttggaacttccaaagcctaatctgatgaggaaacaacagcagcagcagcagcaacaacaacaacaaactcagccgaattcagagtctttgaaatgtccaagatgtgactctaccaacaccaaattttgttactacaacaactacaacaagtctcagcctcgccatttctgcagggcttgcaagaggcactggactaaaggtggaactctacgcaatgttccagttggtggtggaaggaagaacaagagggtcaaaaaatcaatcactccaattacaacatcttccaccaccaccacaccaatcacaaccgccacttcaacttgcactgccacagtcacaacctcaattggcaacaacatggatgctatgttgggttgttatagccacatgacaatccaaactcctcttgcggatgatcagaaaaacatgtcttcctctctctaccaagctctaattcgtccaccacctttgctgctacaacagaatctgctcaacacaagagaattagaaggcaaagattttggtattggtatcggtaataatggtatctttcctagttcaactttggctcttcctactcatcaaagccaaagcctactcttccctttctcagcctcaagcagatcttttgacaccaacccttgttcagtagtgtcaacctctcttagatcctccaatgtttataactatggggaggatcagtttaaagcaatagaggaaccaaccatcaatagtactactgctactatagtgcctagcacaggtggcaccaacaacacacatcatccatgggagatagcagcagcaacaagtggtgttggcttgggaacttcttcaaattcaaactattggaattgggaggattttgattcattggtttcaactgatctaaaagatccctgggatgattcagatatcaaaccctgagaaccaaacaataagcaacaacacatcatggtagtgtccatagattagttatttaattcaattggggtgttatttgtgtttcatacaggttagtaaatgatcttgttttttttccagatggggcatgagaagtatttagagctgtcatgttttagtttcagcttcagcttcaagcaaaagggtcccaaaattcctcacaattagttgcaacccactctgtttgcctctttgttcatctctcttatcatttcctctaatctctaataataaaatggtgtattaatgtatgcaaacattgcaaagtagtgtctagcattatttatcaatataggattttgttttttttattttttattttattttttggggagttttgtgagtgctttgtgatgggagtgatatagatatggggtctgctccagcactgctgaactgacagaatgtgattggaagattctttggacatgtatatatcttggaatgatattttatcata

SEQ ID NO: 10588 - DNA, 584 bp, Glycine max
  Clone ID: 700945750_FLI
gaaatggaaatatatcctgtgctggatgaactagcctcatctatcagtactctaaatctggaacgtgttcgaagatttaaaggtcacttgcttgctttgactcaacgagttcagaaggttcgtgatgaaatagaacatctcatggatgatgatggtgacatggctgagatgtgcctaactgagaaaaagagaagatcggatacttgcacttttaatgattgttttcaaactcgtgcatcaggtagactaatttcaaagtcggctcctgcttcaccagagcgaacaattagtggagtccagatgttgcaaagggctttcagcagcattggaaattctagtaaacatggtagttcaatgggttcgtctgataatggggaaaggattgagccactggaaatgttgcttgaagcatattttattgtcattgataatactcttaacacgatattgtcggtatgagaaatttgacttactcagctgtagcattagaatctacccatgttgcttataacatataacagagtatttgtatgttggatatcatagtttttgctaatataactaaggtgtacatatataacatt

SEQ ID NO: 10589 - DNA, 1108 bp, Glycine max
  Clone ID: 700945759_FLI
gttctgatgggaaaaccttctactgtctagagatggcaaaatatttcaaccctggtgaagctgaagccatgaatcagagtgtagcttacctactgtcaaagttgagttacattccatccacactcttcctatcagaagtttcttacgtggaattcttagacagagtgcatgtttctgagaaaaagctaagagcacaaggcttgtgggaagttccccatccttggctgaaccttctgatcccaaggagtgagattcataactttgctgaagaagtatttggcaatattcttaaagacacaaacaatggacccatactcatttaccccgtcaaccaaacacggtggaacagcaaaacatcattgattaccccagaggaagatattttttacctagtagcattcctatccttagctctcccaaattctaccggtgcagacagtttagaacacattctagcccaaaacaaaagagtcatagatttctacactggtgccaaaatgagagtgaagcaataccttcccattacagcacacaggaagaatggcaagtccattttgggtcacgatgggagacattcgtggaaagaaaaagggcctatgaccactagcactgctagccctggccacaaaatctttcaaaggctgtctcctcttcgtgttagttttctagtgtgttgtaaggttgtgaactaatgataaattacgtaagagtgttgcttcctgcacctctctggcatcccattacattacggaatgtccaatctgtaatgtaatttaatcattctgtaatgtaatggggcatgaagcaaaatttgaaggtgcacgaagtttcacttgttaattaatcatgtatgtttctttcttccctctggccttgctctcaataattgtgagcgtggccaatgtattttctattcaaacggagccttgctttttaggtcatggttagaagattgaagattgggtcaagagaacactaagttgatggtgatgttttaagctctttgcaggaaattaagtttaaattttagggccacccttgtaagagaaaaatatcagcaaagaaaaatgtaaagcaaaggttaaataaatagaaatttgttattacc

SEQ ID NO: 10590 - DNA, 374 bp, Glycine max
  Clone ID: 700945853_FLI
ggaaaccaagatctgcacctttcatgtcgtgcctgagcaaagttttctcgtcttgttccaccggttgaaactacccgagtgagccatggttgatggtaccctaatcctgtctaatttacttatcatctgatgcgaggaagaacatgaaggattctgatactagcgtgttgagattactgttacctttttttttgagtggtagttttacccaacaggcaggcacttgatattttattagcccttctatgagttcattttttgttgttccttttaccaatctctttgctatctgtcatcttgtgtatataaatttggctgaccaacaaaatagtgtgataggaactctgaaagtaccataagggatcttttttgtg

SEQ ID NO: 10591 - DNA, 952 bp, Glycine max
  Clone ID: 700945957_FLI
caagatttcaagactggttacctgaccctctcatcggcaaagtccatgtttgtgagccaattgattggaacagccatgggttgtgtaatcgctcctctcacattctggatgttttggactgcctttgatgttggctcacctgatggcccttacaaagcaccatatgccgttatattcagggaaatggccatactcggtgttcagggattctcagagcttccaaagtactgccttgaaatgtgcggtggtttctttgcggctgccctggctatcaaccttctaagggatgtgactcctaagaaattctcacagtacatacctatcccaatggcaatggcagttccattttacattggtgcttactttgcagttgatatgtttgttggaactgtgatattgtttgtatgggagaggttgaacagaaaggatgcagaagactatgctggagcagttgcttctggactgatatgcggtgacgggatatggacaattccttctgcaatcctttctattatgaggattgatccccccatctgtatgtactttggcccttccacaagtagctgaaaccagcaactttaagttgtctttaaaactgcaatgtttatttatttgccttgtgtctgtaaatatatgggatgtaagcatcacaggcaatatctggcatttcatttcctctgtttctctttgcatgtgtccctaaatatttagggatatcgttcagttccttaactgtctcaggggaacccgaaaacagaagaaaagcaccaagagggaagggggtaccttgatcccattttccttttggtgcattaatgtattccacattcttttcttaaagttgtctcagttcaaaaccaaagtaatgtatgtttaagaagttaaattagaatgcattgactgtgtaaaaattatttgtattcatcaaataatgagttatattatgtagggt

SEQ ID NO: 10592 - DNA, 1361 bp, Glycine max
  Clone ID: 700946009_FLI
tgactatttaaatatgatctaatggtccgtattcaccgttcttatttattataataatatccatgagttcttacctgatactatgtatgtcacgtcacgcgtgagtactccagtcttagatgttttgttttaaatggatgttttgttgttcagatcactttgagcaatggtgaaggctgtggcagttcttggcagcagcgagggtgtcactggaactattttcttcactcaggagggaaatggtccaaccaccgtaactggatctcttgctggtcttaagcctggtctccatggcttccatgtccatgccttgggggacactaccaatggttgcctgtcaactggagcgcatttcaatcctaataacaacgagcacggtgcccctgaggacgagaatcgtcatgctggtgatcttgggaatgttaatgtcggtgatgatggtacgtctgatctattattttttcttctgtttcatctatttgatttgttaatgtcggtgatgatggtacgtctgatctattattttttcttctgtttcatctatttgattagtgattgattccaactaatctgaaaagatcaaaaagcaacatatttatctgattccaaatttcaaatttctgattatttttacaatcccagtgtgaaaagtaatatatattttttgaataagcaataaaagtaatctttttagcattacaaagaagtaattgatagatgacagataatctggaggttctacaagaaacttttccatattttgaaatgatgtttggtaattgagattacttgcgttctattttggtgatagttcatctttgaaagaacttgtctattttgcctatcataccacatgcttgtttggtctttattttaaaatggttttatctcattgtgtaactcaaggtaccgttagcttcagtattaccgacagtcaggtatgttactcatttccaaatcaaatctctgttgaattcttctaggttgacaccaagacttgggaagtttcaatttttaactagtaaatttgtacagattcctctcactgggccaaactccatcataggaagggctgttgttgtccatgctgattctgatgaccttggaaaaggtggtcatgagcttagcaaaactactggaaatgctggtggcagagtagcttgtggtatcattggtctgcaaggataaactaatcacatgaggttggaaccgtgctttagaattgtggaataaagtagcacccatttaaacccgtttggttaggtccggtctgtgtacggctgaattctgtgttttgcttgtatcgtatctgggggttatatgtagacacttgatgcttaatcaaattgttactttgcctg

SEQ ID NO: 10593 - DNA, 1326 bp, Glycine max
  Clone ID: 700946025_FLI
attctatcaagtttatgtaaatatatgctttgtcttattttgtttgcagattcgtgtatgttgaacttctggaaattcgtaaagatgtccaatgcccaatttgccttggcattattaagaagacaagaactgttatggaatgcttgcaccgtttttgcagggaatgcattgataaatcaatgcgactagggaacaatgaatgccctgcttgtcgcacacattgtgccagtcgtcgttccttgagagacgatccaaattatgatgccctcattgccgctttatatccagatattgagaagtacgaacaagaggagcttgaatttcgtgaagaggagaagaaccgcaataagcagattcaagcttcaatagcaaaagtagttcaacggcaatctgaagcattggttaagagacgtaaagacacaccaggtgcatttgtaactagaccgcagcgtaatcagcgaaacattcattctaggagacaaactcaagcaattgaaggatctgaagataatgaggaggaaaatgacaataatgaaaaggactcatcttcagctgatgaacgaagtacagaacaccggcagagaaggagaaagagatgggctagagttcgcccctctcaaccctcatcatccatggcaagtcctgatggtggatgcaatgatagtgatatggatataagtaaagaaaatcgtggaatttcaaggcaggtgtcgaaacatggaaagcttacatggggaaggggtggttttagaagtaacactcggcatggcagtggtggtggtagcaataacaaaagttctcgcagtagtcgattgtctaagtttgttgaccatctccgcaacttggatgaaaacactgatgagtttgatgtccatctcatgcttgtttctcttgaccaactaagtacaccaagtttgcagcaaccttacctttgctgtcgaccaactttgtctgtcaagcacctttatgaacacgttgctcgtcagacacctttgccggttgaaggaattgagatagtggcagtcaaaggatgctgcagtacgaactgtgacaagtcagctgatgagaattcggcccttgcatatgatgagctatcaaagctggttatagatccacacaaagatgaactggaaattttgcaaggacatgagactctggcagggcttagatccaaatgcatatccaagatggggcatttgattattgcatacaagcagaaggaggtatcatagtcttggtttcattggcgatcttgacattggctatgccataaatttctttgttatgtacataaaaagaacaattgccttttgcatcctcaacccc

SEQ ID NO: 10594 - DNA, 668 bp, Glycine max
  Clone ID: 700946086_FLI
ctggaagtgaagcaaatatggcatactctcaacttcaaaaggtggaagctaatgtgcacatcaaggcttctgctgatcagttccataatgttttatgcaacaggacacaccatattgccaacattttccctggaaaagtacagtctgttgaaattcataaaggtgaatggggcactgagggatccgtcatctcctggaattatttacatgagggcaaagtttgtgtggctaaggagatggttgaaggcatagacatgaaaaacaataaaatgacctttaaggtcatagagggagacctgctgggacattacaaaagcttcaagtttttattgcaagttactccaaaggaaaagggaagcgttgtgaattgggtcctggaatatgagaaacaaaatgacaatactcctgacccttataccttattggaattgacagttgagatgagcaaagaaattggtgcctaccttagtcaagaccataactaaatttaatggcaaaataaacgtactgtgttttacgctattgctatcagagaattaaaaattgatgtcttatggggcttatctaccccttaattaatgtcatcaattatatgtatgttaaaaaattaaataaattagggtgaaatatgtttttcattctcataaatataaaaatgtttaaaattt

SEQ ID NO: 10595 - DNA, 1112 bp, Glycine max
  Clone ID: 700946095_FLI
ggtaaagcacttccccagttttgatcttgtaacactttttcgggtttgttgaatctgcttctttttatttcaatttgggattgactcatatgacaagtatgtatagtggtggttacactgctctagttacaaacttatccccaagagcaacagaggatgatgtgcgcaattttttcacatactgtggtttgattgagcatattgaaatattaagatctggtgaaaatgcgcctactgcatatgtgacttaccgggatgcttatgccctggaaactgcattattgctaaatggatcaatgatattggaccaatgtatattcatttcacgctatgaagcttatgtaaatgactatgataattggagcaatcatgcatcaaatcctgaatacagtattacaacctcacaggatgttcacatggataagtttgttgcttcccctggagaagcactaactatggctcaggtggttgtcaaaacaatggtggctaagggatatgtattgggcaaagatgcatttgtcatggcaaaagctttcgatgaatctcatagtgtatcatctacagcagcaaccaaggttgctgaactcagcaataaaattgggttgactgataccattaattcagggattgaaacttttaagtctgtggatgagaaatatcatgtcacagatttcaccaaatcagctgcaacagtgacaggaacaacagctatagtcgttgcatcagttaccggaaaagctgctgtggcggctggaactgctatagccaacagtagctactttgccaaaggtgctctttgggtttcggatgtgttgacacgtgcagcgaaagcggctgccgatttgggtcagaatgaaaagaaatgaaactccaaacataaactgctgtctaatatgttaacttgttgaacacaaacaaataccagcatttgtttgttgctattgtattataagacacgaacttgctttacatgtgtggctactcatctggtgcaaatgttcatatcagtagttttggagaatccatggtaagcagccacttatttgtgtacccttttagaaaatatagcatatggtacaatgtaagtaccaaggttcttcttgtctactttc

SEQ ID NO: 10596 - DNA, 1601 bp, Glycine max
  Clone ID: 700946118_FLI
ggaacactgccccaaggtcaaacggatatgcatccacaagtctcaacattgaagcaccccctcatcaaacagatgtatcaggcacttctcatgatcattttctgccttcatcaagtgctggaatgttttatgcagtgcctgaaaattatgtacaccagccttctaattctaattatgacagacaagcattttctgctgctgatgggggttttattgatcttacaatgggaaatggacgagggcctcacaagcgaaagagccctggaattcctccagtctgtgaaagaggcagtacaagcagatattccaatgctacaaatgcagctgatcgtcctacatcttcagaattgcagccagagaagcccaatatggattctctatatatgccttgggaccatgttaatatgacacccacatttagaggtagaggcctatctataaggggtgagggtcctttaaggaatgtgaggagccgttctgcacttgatttggaatccaacctggctaggacccatttatcaaatactcatccacacaactcatactctactggtctaccaattgaccattctaacatggtcgatctttcaactcaaacttctggcactttgaccagggattggagcccaatgagtatatgtcctcctcatggaagggtgtcatcatcagatgcaaatgcttttaatcacgaggcaagtcatttccttattggaagcagttctagtaatgctcctgtagatgttggaggttttcataatgaatttggaactagtagaaatcctactgctcctcaaagttttcataataatctgactcaaactgcaagaggagttcacagtaactactctcaaagatccactccaacttttagggcttcttctagcttacgtttgggacgtgtggcaccttctgatgatggattgcatatggtgtccgaaagttactcttctagacagccaaggccattgaccaccgttggctggcagaacaataatagaaatggaagatcaagaatacctagtgacagatatcggtcattggatgatgagggtttcatgattgttgatcgcacttcactgtatggacctaggaatatgcttgatcgacatagagacatgaggatggacatagacaacatgagttatgaggaactacttgcacttggagagagaataggccatgtgagcacaggattgtctgaggatttgatttccaagtatttgacagaaacaatatactgttcatctgagcaaagtcaagaagaagcttgtgcaatctgcctggaagaatacaagaacatggacgatgtcgggacgctgaaagcttgtggacatgattaccatgtgggttgcattaggaagtggttgtctatgaagaaagtatgtcctatatgcaaagcttctgctttgcctgaggataagaagggcaaataaacaatttattcattatactttagtttaacgtatatcatcattctgtacatatatttggatattccttgaagtggagaaaacagacttccatttggatatgttgttgtaatagctaatgctatactctatctatatgtctatgaattcgttctctttggcttcactctt

SEQ ID NO: 10597 - DNA, 1442 bp, Glycine max
  Clone ID: 700946119_FLI
attgtattaataggttgaaggattttgggtctgctactgccatcttgctcgtcctgcttctttacctagtccaacagatttgcaccttttcaaggaaggaatccgtcctctatgggaggactctgctaactgcaatggtggtaaatggattatacgattcaaaaaggttgtctctggccgtttttgggaggacctggtaatgcaaatattttcatctgtaacattttttatcttccttgataaaatgtatggctatggcatgattatggaaaatgttaacactttaatttattgagtgattatttaaatctgtacttgcaccaactagttttactgaaaatctgattttatcccaatggtctgttttgatacatatagtttatctgatcccactcagtagcataagtcttggttgttgtcgttaatatctaaatttttcattaaaattagatgaatgttagcaacatactctaatacactcattttaacacactctactattggttccaatttttttaaaactacaaaattatgagagagacttgttgaataagaagtaagacccgcaaaaaaaaatgtgatttcaaataaatttcagccagtagtggagagtgtgttcaaaagagtgttagaatgtgttactaacatttctcctaaaattatgcaattttatgggcctcaaatgttttgttgttgattttcacaactgaaactgaagacagaaacctacatttctgaagttaattgaccagctaaagtactgtttggaatctctcttgtttggttattttgatttcatgacctgtaccatcaattgctattatatttctgtcttctattgttggagacttgaatgtttcataatactaagtgcaggttcttgccttggtgggtgaccaattggattatggggataacatatgtggtgcagtactaagcattcgtttcaacgaggatatattgagtgtctggaatcgcaatgcttcagaccatcaggctgtaatggctctgagagattcaatcaaacgtcacttaaagcttcctcacagctatgttatggagtacaagccccatgatgcctctctgcgagacaattcatcttacaggaacacttggttgagaggctagagatccaattgtgttcttgccaaagtccctgccgtggaagctatattgcatactggtgcagctttcactcagccaggactggtttcactcagccattggcttcggtctagtgatggggctgggtgttcctggactggtttctgtcttttgaattcaatgtacgacagctacattgctactgctttaaatagtttcatttggttacttggggttcactctaattttgtgtagtgtgtcgtagtttttgtaaataaacttgttcgtcttgttgcttttcacctcgcttatggagagaatcatggcttttcattccc

SEQ ID NO: 10598 - DNA, 825 bp, Glycine max
  Clone ID: 700946213_FLI
accttccacacttaataggaaaagaaaaaaaaaaaaaaaaagtaagcccagctttgttctgcttcaattctctaacaatggcgatggctttcaaaatggcgactactgggatgtgggttacggatgagtgcaagaactcattcatggaaatgaagtggaagaaggtgcacagatacatagtcttcaagatcgatgagaagtcaaggcttgtcaccgttgataaggtcggtggtcccggcgagagctatggtgatctcgctgcctccttgcccgacgatgattgcagatatgctgttttcgactttgattttgtcaccgttgataactgccgcaagagcaagatcttcttcattgcatggtctccaacagcatcaaggataagagcaaagatgctctacgcaacatcgaaggatgggctgagaagagctctggatggaataagctatgaagttcaggccactgatccaaccgagatgggattcgatgtaattcaagacagagccaaatagatggatgccccctttttttaaagtgggaatccaactccttatttatgtgctgagctaatcaattaatctgtcaatcttactctctctctctctttatttgctatatataaattaagtaaccatatatagtccaatgactgtatgacatgtgctatctcttcttctttcttgtttttatgctagtttaattgtgtttgatgtaagtggggcatctaatcttcaatccttactcataataataagttatgtgtaatatatgactgtcggctgtatgataagttaagggcaacaaactttggttgcaatctctttaaag

SEQ ID NO: 10599 - DNA, 369 bp, Glycine max
  Clone ID: 700946288_FLI
gcaatgtatggtttggagctggtgttatcctcaagggaaaaatcagtatcgtggccaatcctggtgttaagctggaagttcccgatggtgctgtcatttcggataaggaaattaatggcccagaggacctcctgtgaggaagcccgctgagtttagaagtatcagactgtatactatctttatggtctcatgttttttccaattattactactcccaagtttgatgggcaaagaaaataagtccctttttgtttgtcttctgattcgatttagaacaagagagacagagacatgagttcttccccattatgtcattttgtataatcacattttttttcattaccacaagtactaagaagtgatataatt

SEQ ID NO: 10600 - DNA, 1636 bp, Glycine max
  Clone ID: 700946334_FLI
gaaggatggtaaaactcattagtttccttccatcaaggtcatggagtatataaagcactcacatgcattggtactatttgcaatacaagctcatctcttgggaagaaattagtttaagccttagctagaaaaaggagagtgagttagtgagttgagaggcagaagaaaagaagaagaaaggtggagtgagtgagtgaatagaaaaaaaaaacccaccatggggaggcctccttgctgtgacaaagttggcatcaagaaaggtccatggacacctgaggaggatattatccttgtctcttacatccaagaacatggtccaggaaattggagatcagtgcctactaatactgggttatcaaggtgcagcaaaagttgcaggcttagatggacaaattacctaaggccaggaatcaagagagggaacttcaccccccatgaggaagggatgataattcatttgcaagctctactgggtaacaaatgggcagccatagcttcctatcttccacaaagaacagacaatgacataaagaattattggaacacacatctaaagaagaagctgaagaaatttcaagcagctttggatcctcactcagcatcagactcaacagccagtggtcaatttctaccaaagagctttagtgacagaagaagtactttagacatcagcagcaacaacaacaataatcatggctcgtccattaggcttagtcatcatcaatctcagtcctcttccacaacaacatatgcctcaagcactgagaatatctcaagactcttggaaggttggatgagatcttccccaaagcaactcaacaagggatcaataatatcccaatatgatgaagatcatcagctccaaggcatcaatgatgatgatgataataacaacaacaactttgtaagcactactaagctagtgaaccttcatcatcttcatcagcacaaaattagaaacaaagatcatgagcaagagggtggtggagtagataataacatggtttctcatcatgaagagttcgattctattttgtcctttgagaaccaaaacaatgctgcttgggacaagtccacttgtgattccatgccagaaaagagttctgaagcttctgctgctgctgatcatcatcatcatcatcatcatgatatagctgctgctcatgagaggaacaatgtcaggcaaaaatctgagaatagtagtggtgctcctccattgtcatttcttgagaagtggctcttggatgaaaacgttggtcatcaagtggaggagatgatggagttgtctccgatgttctaaattaacatggaattgggtcaccaatttaatccctttaagtttgggatgtgacattcaaatgatcatatgatattagtcagatgaaagaagagatcaaaggaatgaaattcttttgaaatctgactagggtttaatccattacaatggtggagagattcacagaagctataagggatctctttcaacttgtaacttggaagtctatgaagaatggtttaattatttcaagtaatactatatgcttagtgcatgttgctctctttgtcttgtagaaaaattacaaattaatgttaacttcagctcaaataataatactacaataacagttatattttc

SEQ ID NO: 10601 - DNA, 1701 bp, Glycine max
  Clone ID: 700946369_FLI
gaagtttcaaggaaattggcagagcttggatatcaaaggagtgcaaagaagtgcaaggaaaaatttgagaacgtgtacaagtacaacaagagaaccaaagagaacaaaagtggcaaatcacatggaaaagcctataaattctttgatcaattacaagccctcgagaaccaattcacagtctcttacccgccaaaaccacaacctacttctactttgactacaacaaacacattgacaagtgatcatggtaacaaagttatctcttatgtcacaccttttccttccacaaaccctactctcattccaccttctccacaaaccaacaccaacaccactaccaccacaacaacaacatccactaccgaccctagagactcatcaccaccacaaaccaacaacaacaacaatagtgtcccacattctttgccaaacatgaacgctcctttcttaaccaccaccacctccacctcttcctccacagcatcagatgaagacttggaagagaggtataggaggaagagaaagtggaaggactacttcaggaggctcactaggaaggtcttgttgaagcaagaggagatgcaaaagaagttcttggaagccatggaccaaagggagagggaaagggtggcacaacaagacaattggaggatgcaagaaatggcaaggatcaatagggaacatgagattcttgttcaagagagatcaacagcatcagccaaagatgctgcagtcattgcattattgcaaaagatgtacggccagcaaaaccccacacaacatgttgaagtagagccaccacagcaacagaagcaaacaatgccacaatcacagcctccaatattaatgccaaacaataattttgaggtcaagaaaatgaataatggtcacagtgctacaagtactactactactactacttctccggtgagttcttcttcttcttctcggtggccaaaggccgaagttcatgatttgataaggttaaggacaagtcttgaaatcaagtatcaagagaatggaccaaaggctccattgtgggaagatatatcaattgcaatgcaaaggcttgggtacaaccggagtgcaaagagatgcaaggaaaaatgggagaacatcaacaagtacttcaagaaagttagggagagtagcaaagaaaggcgtgaagatagcaagacatgtccctatttccacgagcttgaagctctatacaaagaaaagggaaaatctcagaacccctttggcatgtttcagaatatgacgccaaatgagacgatgatgatggagccattgatggtgcaaccggagcaacaatggaggcctccacctcaatcattggaagagggtatagggaaggataatgcaagtgaagaatataatcaagaaaaagaagaagaagtagaagaaaatggtggtgatgatgatgataatattgaagaagatggagatagtgtggaagatgcaggaccaaacccgtgtgagattgcgacaaataattaaacgtgcttcagtggacaccgttgaagtagacaagataaggaattttctgaatggagaaaaatttacgtgtgtgcttaatttacttttacttatttcggaaaaaaatagtcctttattttttttatcattttattaaacttcaaaatgtgattatttcttaaggaaaacaattgttgggtatagtatagtcattcaattttt

SEQ ID NO: 10602 - DNA, 399 bp, Glycine max
  Clone ID: 700946373_FLI
cttgtagagcacccagattactcctgcttttttgatgatatcagggcagaaggcggctcatttggcgttgaaggctttgggtaggaacaatgcaattgatggaacgtgtggagttggaagggaagaaccccagcttattttggcttctgcggacactgaggaaattgttgatgcttaaattaagtttcaaattatataccttttcttttctgttttgtctctgcttatgatttgaattttagaataaatttttaaaaatgtgaatgatgaaggagacaatacctgttgttacttctttgaatttggactcacctatagcagatgaaaccaaattatcaaggatgggagagatagacgccacttaatacatttttaatacttactgtatgaattaaattc

SEQ ID NO: 10603 - DNA, 1102 bp, Glycine max
  Clone ID: 700951736_FLI
caattaacaaactctaacaacatcatggtgcaatcaaagaagttcagaggtgtcaggcaacgccattggggttcatgggtatccgaaattcgccacccgcttctgaagagaagggtgtggctagggacatttgaaacagcagaagaagctgctagagcctatgatcaagctgcgattctgatgagtgggagaaatgccaagaccaatttcccaataactcaaactccagaaggtgatccaaagagcactaccagtgaggacactccctccaccacctcgaaggatctggaggaaatcttacatgcaaagcttcgaaaatgtgggaaggtaccttcaccttctatgacttgtttgaggcttgacccggagaactcccacatcggagtgtggcaaaaacgtgctgggaggcgttctgattcaaattgggtcatgacggttcaactgggaaagaagagtgttaatgttaataataatgacactcatcatcaagctgatagtagcagtagtagttctctttcttcttctctaccttcttctgaacatcaccacattgagtctccatcactggctgtgacaggtaatcttcatcatcaagaagttgtgagaggagagattgacgaagaggagagaattgcccttcagatgattgaggaactcctcaacgacagaaactgccctagcccatcatttaacaacaacattcaagaaagggatggtgctgatcatgaccacttttttctttaagcttcttttttccacacagcgttatggtattcacatgcatgtttaatcttcatcttcaacaagggttgtcattatttgggaaaaaaagggaagtggtagttataggctaattatatataaccacatcatatctatcatatcatatctgttttcatgtatgtcatatttattataagtgtagataatatatatatacacatacatattacatgcatgcataggaaaatatacataagaaaataagagagatgtatacagaatattattttcagagttcatatgtaaaggccctatcgtctgctgcttgtttgaaacgttcatggtttatttatcataaataataaatatattttcagtt

SEQ ID NO: 10604 - DNA, 1566 bp, Glycine max
  Clone ID: 700951746_FLI
cttattgtcttgtctcaaaatggtggatcaaatagaggaggtttcaatatagtatcttcaagtgccaaaagcagcattcatctggatggactattcaacattatctcatacgatttggtgccaaagctacagaatatgcttatgacatgtaactttaaggttgtgattgctgatgagtcacattttctgaaaaatgctcaggcaaagaggacaactgcttctcttccagtcataaagaaagctcaatatgcattattgcttagtggaacacctgctttatcacgaccaattgaactattcaagcagctggaagctttgtatcctgatgtatataggaacgttcatgaatatggtaaccggtactgcaagggtggattttttggagtttatcaaggtgcaagtaaccatgaagagttgcacaacttgatcaaggcaacagtgatgattcgcaggcttaaaaaggacgttctttctcaacttcctgtaaagcgcaggcaacaagtcttcctagacttggctggcaaggacatgaagcaaattaatgctttatttcgagagttggagatggttaaagccaaaattaaggcagctaaatcacaagaggaggctgaatctctcaagtttgctcaaaagaatcttattaacaagatatatactgattctgcagaagccaagattccatctgttcttgattatgttggaactgtcattgaggcaggatgcaagtttcttatatttgcacaccatcagccaatgatcgattcaatacacgagtttcttcttaagaaaaaagtgggttgcatacgaattgatggaagtacacctgctgcatccaggcaacaattggttactgactttcaggaaaaagattctatcaaggcagcagtgctatctattaaagctggaggcgttgggttaactttaactgctgccagcacagtaatcttttcagaattgtcttggactcctggtgacctaattcaggccgaagaccgtgctcatagaattggccaggtgtcttcagtgaatatatactacttgctagcaaatgacacggttgatgacatcatatgggacgtagtgcaaaacaaactggaaaatttggggcagatgttagacggccatgagaacgccttggaggtctcagctagtctgccggtgaatagcccttcaaagcagaaaactctagaccagtttgttagaagatgtgataacacggatgggttggaatatgagcccaaccccaaacgtccccgaaactgagccttgaaacggtgctcaaagtggagaaagaataatcgcaatattggcactcttgctcgtcccattagaagagggtgtagcttgtcagcacagtttacaactctaaactatgcagctgatgccgaaggagcttaacggttttgaggaatatgtatgggatgaaaatggtgatcaagtttcctaacagattttaggcttaagatttcctgtcccctaaagttgttagtggaaattgtacagagtacatgatcatatgaatgtaacttgtaaattgctttactcaatataatttcgttgccatgt

SEQ ID NO: 10605 - DNA, 425 bp, Glycine max
  Clone ID: 700951826_FLI
ccaagcggttacacctcacctatgattagaacaagtggttcaatagacaacacatttggaatctttggagagatgatatatgcaagggtatttggtaaccacgtgtcaaacctccatacatatgccaatctttcggggaccagtaacccaagaatgagaagacatttaatgcaagttgataaatcactcagcagaataagttgtttcctcctttgctgcctagttttgtgtctgctcttattctgattgctatttcgttttcatccttagttatagtacatccgtacttagaatacgttcattcatgatccagatgtattctatgttagagtagctgcaaattaatgctgagttatgtgtaaattaccaatctctctacgagctatatgaaatgaataatgatattcttataccatttttagaac

SEQ ID NO: 10606 - DNA, 740 bp, Glycine max
  Clone ID: 700952013_FLI
accgaatctaagagagccgatgccaaacttgctgtgaataagaagggcgccgccaccaagactaggaaacccgccggaaaggggaaggcagcgaaagatcctaacaagccaaagaggcctccaagtgctttcttcgttttcatggaggaattcaggaaggtgttcaacaaggaacatcccgacaacaaagcagtgtctgctgtgggcaaagctgctggagcaaaatggaagacgatgtctgatgctgaaaaagcaccttatgtggcaaagtctgagaaaaggaaagtggagtacgagaagaacatgagagcttataacaagaaacaggcggaaggtcctactggtggggatgaagaagaatctgaggagtctgtatctgaggtgaatgatgaggatgatgacgaggaaggcagtggcgaggaggaggatgacgattagagaatggactgatgataatagcatttatgtaggttctgatgattttgatcatccgtgtaggtggtctggtcatttccttataaacatatttctctttccaaaaaatatttccctgctcctccttccgtaaattgctcgtctttccaaaacgtgaatagtttaaagaagggagttctctttatttgtatttctaaatccaactgtttagttaagggatggttatctcttgtagagcttttagtttgatttagagttttcttgttgaaatctggttaagtttgtatcaatataattgacttatc

SEQ ID NO: 10607 - DNA, 1905 bp, Glycine max
  Clone ID: 700952246_FLI
ttctctctcacataacactgtttatcgatgatgctctgaactctttatctatatatgcctctctgatgccgatgggtgcctccagttttccggcaagcttcaaacttcccttcgccggccccgattttgatcacttttccggtatgaatcgtttgcgacaccccctttgttgatttagaaatgctagatctattcgtcgcatcacacgttcgatccaaaacctggttccacaagaggaaaaaaaaccaccgacttcgttcccataaaccctagtgctatttccctcccaatttcgtaacactgattgtaatttgcaaattgtacagctagaattttgtttcttttctttgtttaattttttgtttttttttttgtatttcctttattttacaattctctttgctgggtttgcaaagtttgtacagttagggttgtagatggtgaggatcggagggtgtttttgaaggaattatcagattttgattctgggtttttgttggggtggtagagaacaaggatttgaaaaacaggatttttgttttttggagtgcctatgactgattgacggtaattgcgaccgcactcggtcacatttgtctgcaattttccttaatatcaaggaataggataaaactgtgatcgcaatttaaaactttgttggagaaagtgggggaaatgagcatgagtgtggcagaagatgaatctagtgaagaggttcatgttccaggtgagattgattggcaaatgcttgataaatccaagtttttcttccttggtgctgctcttttctctggggtttctgcagctctttacccggttgttgtgttgaagactaggcagcaagtggctcagtccaaagtttcttgcatcaacactgcattttcattgattaggggtgagggttttagagcattgtaccgcgggtttgggacttctttgatgggcacaatccctgctagggctctttacatggctgcattagaggttacgaagagcaatgtgggcactgccactgttaggtttggtcttgctgaaccaactgctgctgcagttgccaatgcagctgctggcttgagtgcagccatggcagctcagcttgtgtggacccctgttgatgttgtgagccagaggttgatggttcaaggtgtttctgattccggaaatcccaaggcttcggctcttcggtacatcaacgggattgatgccttcaggaagatcttgagcagtgatggccttaggggcttgtataggggttttgggatctcaattttgacctatgccccttctaatgcagtttggtgggcttcatattctgttgcacaaaggatggtttggggtggagttgggtactacttgtgcaagggaaatgatagtgcagctaatagtgcattgaagcctgatacaaagactgtgatggcagttcagggagtcagtgcagcagtggctggtggcatgtctgctttgatcaccatgccactggataccatcaagacaagactgcaagtcctggatggcaatgagaacggccgtcgcggaccgacagccatgcagacagtaaggagtctggttagggaaggtggctggatggcttgttatagaggattgggacctagatgggcttcaatgtcaatgtctgcaacaacaatgatcacaacttatgagttcctcaaacggctctccgcgaagaatcaagaggttttgacatgatgaagggacaggtttatgacagcaaaagaaaaaaaggataaacaaagagaagagaggaggttcttctttgcctgtttttctgttcttatcttttctccacttgtcaatgttgtttcttcacttttggcttgccacaatgactgtttgatcaatgtaagtcattgcaggttattacataaataaaaatttacttctaac

SEQ ID NO: 10608 - DNA, 2050 bp, Glycine max
  Clone ID: 700952272_FLI
atgggcaattgttgaacttctctggctgtggaaatacattgaattgtaaccatcctgtggtcatggaactaattcttgacagcctaagacactgggtcaccgaatatcatgtggatggatttcgatttgatcttgcaagtgtcctttgtcgaggaattgatggctcccccattaatgcccccccgcttattagggcaattgctaaagatgcagtattatcaagatgtaaaattattgcagagccttgggactgtggaggtctctatcttgttgggagttttccaaattgggatcggtgggctgaatggaatgggaaatatcgtgatgatgtacggaaatttattaaggtaattctaagagactaagagtaaaaaaatacttaatttaaattgatcatttgatcctgattgtctgacctctcttgtggtttgttaagtagtataatttgcataaggttgccggcatgctagtaaaaggaaatagaaatctttaatcaactgtctcctatcaatatcatgtttggagtaagaaattaaggtggaaaaactgacgggttttgtaatatgctatgatctgattgtgacttattttgatttttcccttcttttgttgtttgcttttaaaaaggtagctggcacgctagtaaaatgaaatggtattaaactgtctcctgtcaaaattatgttgtttggggagtaagaaattcagatggaaaaactgacgggctttgtgatatgctatgatttgatttgtgacttatttgattttttccttctgtgttgtttcattttgaaaacatgtcctagggtgattctggtgtgaaggggagctttgcaactcgtgttgctgggtcttctgatctttacagagtgaacaaccgtaggccatatcatagtattaactttgttattgcacatgacggatttaccttgcgtgatcttgtttcatacaatttcaaggtacctcttcttaattcgtttcttcaatttgttattgctcatcaaaacctagtatctttgttggttcttggttttgtagcacaataaagccaatggggaaggtggaaaagacggaagcaatgataatttcagttggaattgtggtttcgaaggggaaactgatgatgctagtataagagctttgcgatcacggcaaatgaaaaacttccatttggcattaatgatatctcagggtacaccaatgatgctaatgggggatgaatatggccatactcgctatggaaataacaatagttatgggcatgatactgccattaataattttttgtgggatcagttggatgcacggaagagcgatcacttcaggtttttctcaaaggtgataaagtaccggcatgcacatgaagtattcagtcgtgaaaattttctcaacacgaacgacataacatggcatgaggacaattgggagaatcctgacagcaaatttcttgcattcacgcttcatgacaggagcgggggagatatctatgtggcatttaattctcacgattactttgtcaaagttctgctgcccacacctccaaaaaagagaaactggttccgtgtggcggacactaatctcaaatcaccggatgactttgtccttgatggtgtccctagcgtaggaaacacgtacaatatagctccatactcctccattcttcttgaggcgaagttttgattgcagaagctgttgtataaaaacgtaaaagagaaaatactagaagacgcatacgcatatatacaaaacaaaagataactgcatctgcatgggaagtgtatttcagctacaggtcaaagggaacaaaagcggaagaggaaaaatctgaaatcttgttatttccagaatggagcatggcatggagttgggttacaagctactagaggccggtcttatgaatttggataatcatcaccactttatctatacatatatttgtaaatttgatttgagtgtaataaatgcattatctatctatattttatatattgtttacattgtaaatttggcttgaatggaatatatgttattaatttatattgaatcgtct

SEQ ID NO: 10609 - DNA, 1485 bp, Glycine max
  Clone ID: 700952301_FLI
atcggaagaagaagacagtgaaagaggtggaagcagaacattggacaagaaaaccaacaaaatattcggctttgcggtagcccatgatgacagtgaccacccacccgtgacccatcagttttttcctgttgaggactccgaactgcctgtctccgccgccgccgcaggcagtggaggcggtggcggcggaagctccttcccacgtgctcactgggtaggtgtcaaattttgtcaatcggaaacacccggcgccggaaaagcagtgaaagtgtcggagccgatgaagaaaagtcgccgaggaccacgctcgcgtagctcacagtatcgaggagttactttctacagaagaactggtagatgggaatctcatatatgggattgtggaaagcaagtgtatttgggtggatttgacacagcacatgcagctgctcgtgcgtatgatagagcagctattaaattccggggagtggaggcagacatcaacttcaacatcgaagactatgaggaagacttgaagcagatgaccaatttaaccaaggaagagtttgtccacgtacttcgccgacaaagcactggatttcccagaggaagctccaaatatagaggtgtaactttgcacaagtgtggaagatgggaggctcgaatgggccaatttttgggcaaaaagtatgtttatctgggtctgtttgacaccgaaattgaagctgcaagggcatatgataaagcagcaataaaatgtaatggcaaggaggctgtcaccaattttgatcctagcatctatgatagtgagcttaattctgaatcctcaggaggtgtagctgcagatcacaatttggatttgagtttgggcaattccagctctaaacataacaatagtcaaacatcggggaatcacttcgcaaattctgcaaccgatcagcatatgccacctgaatctaattggcggaatgggggaagcaagcctaagctggtaaatatacttccaaaaccatgtggtagaagcaacatagaagcctatgggcacggtgagagtgaaaccttgaggttgtaagccaaactcaccttcaatcccctaccaataaagaaatgcacagatatggtccgtataggtcgccagcagagccacaaaagcctcacaattttgcacatcatcttcaccaaccaagttttcatgttcctagcagcagcagcaatggaggccgtattggaagcgatctttcgttatcaatgtccgatcaacaacaatggcaagccgggcctccacatttgttagcaactgctgcagcatcatcaggattcccacagcaaattagaccctcccaaggttggctgcagaaaaatgggttccactctctcatgagaccctcatgaccatcctcaagattttttctaccatgccattttgcattttgaaaaataatctccccctactatttgttttgtgaacatgtacaagtgaaagtgaatgcagtttagattattatt

SEQ ID NO: 10610 - DNA, 1371 bp, Glycine max
  Clone ID: 700952325_FLI
tgtccattgatgatgctcgtctttgcaaaccgggaacacttgatcctaccaaagtaaagggaaaaatactagtctgccttcgaggtaataaattaacttcagccagtgagggtgaacagggtaaacttgctggcgctgtggcagttctagtgcaaaatgatgacccaagtgataatttacttctggccgagaatcatgtattacccgctgcaagtataagtggaacgggaagtcataatattaaaaacggtacaggcaacaatggcaataacaaggagattttagcttacttgagtgctgcagaaacatatataggagtaaaaccagctccaatcatagcaggattctcatccaggggtcccagttccgtgcaaccattgatactaaagccagacataactgctcctggtgtgaacgtaattgctgcttttacacaaggagctggtccgtctaatcttccatcggatagacgccgatctcttttcaatgtgcaacagggaacttctatgtcttgccctcatgtcgctggcattgcaggtcttctcaaaacatatcatcctacttggagtccagcagctatcaaatcagctattatgaccacagctacaacactagataacaccaatcaaccgattcgcaatgcatttcataaggtagcaactccattcgaatatggtgccggacacattcagcctaaccttgcaattgaccctggactcgtttacgatttacgcaccaccgattacttgaacttcttatgtgcttctggttacaaccaagctttactcaacttatttgccaaattgaaattcccatacacttgtcccaagtcttacagaattgaagatttcaactatccttcaattacggtgcgtcatcctgggtcaaagaccataagtgttactcgtacagttacaaatgttgggcctccaagcacgtatgttgtgaatactcacgggccgaaggggattaaggttcttgttcaaccaagttcgttgacttttaagagaaccggagaaaagaagaagtttcaggttatactgcagccaattggtgcccgtcgtgggttatttgggaatttgtcttggacagatggcaagcacagagtaaccagtcctatcacaattctgccttagaaattactctcgatcagcattcttatgttatcattgtcgtcttttgagtgtgtttgcatttgctgttttttaggctgtaatatgagcgtgtttcctactcctattgcattaagctcttttttttttttttatgtaaagctttgtcataaataaggtattcttagaatgctgatggaattggagctatcatcaaagaactagtaatgatcggaggaaaatcaagcaaatttaaacc

SEQ ID NO: 10611 - DNA, 2023 bp, Glycine max
  Clone ID: 700952447_FLI
ttcaagttcaagttcaattcccacaccaaggaaactctctcatctctcaaacccaacaaaaaaaaaccattactttacttcactttacatgtcgaactccgacgccaccactaacggcgtcagtaacggcgccatcattgatgcgcagagacagcaggccttagccgttaagaagccgccgtctaaggaccgtcacagcaaggtggacggccgagggcgccgcataaggatgccaatcatatgcgccgcacgtgtgttccagctcacgcgcgagcttggccacaagtccgacggtcaaaccatcgagtggctcctccgccaggccgagccctccatcatcgccgccaccggctccggaaccacccccgccagcttctcctccgtctccctctccgtccgcgccgccgccaactccctctcctccccttcctccacctccgaccacaagccccagttactctctcccactcccttcatcctcggcaagcgcatacgcaccgacgaagactcttccaaagacgaagctgtctccgtggggccctctcttgtgggcccttctactcctcccggactgtgggccctcccggcccggcccgatttcggacaaatttggagcttcgccgccgccgctgctcccgaaatggtgtcggtgtcgcagcagcagcaggcttcattgttcgctcatcaccaccgtcagcagcagcagcaagccatcggagaagcttcggcggcgagggtgggaaattaccttcctggacatctgaatttgctcgcctcattgtctggtggacctgggaattctggtcggagagacgatgagcctcgttgattgtcacatcttcaacggtggtggtgatggtggtggtcggtggtgttggtgtttttttccgtatatatgcatattctcgtgttgtggttgctgtttttgttgtgtgtggcaagcaggagattcttagggttaggttttttcttagatttgagtggagaagtccatcgattaagaaattattcaattagggtttttgttttacttcctgctggtttggagaacttaactaggtttttagatgttggataattgttttagattccggggctttgttggaggagaggaggggaaaaaaaggggagaatgtaatgaactgatgatttaatttgtgaaattgtcatggtgagaaatttgtaccgattgaggctggaattgggtttcagaagcttggtccgtgtgcgagtgcagttgaatttgtaatgtaatgttgttgtactcaaagagagttcttctaagttgaagagcatggattggattgcattgttgcttctgtttcactttcatagtgggttattttgggctttgacttactgggtctacaagtatggtgtggttgaagtggttgcagttgaggtaattagtgcttgcaagcttgtttctgaagccagtgaattgtgtttccaaagttcaattgtcagtcccagaatgttggagtaccctactttccaacatgggttgagaattcatgtctcttggatgttgttggggcatgttttgagggattgaggttcatgtaaggtggttatgttgtgaatttggtgcagctctctgactctctcctccactttcacgctccttgatggtgttttattcgttttcagaggtgactggtgtgtgaaagatgaaaaaaaaaaagaagaaagctctggttgtactctgtatgacttctgctttgagatttttatcttcaattcttagccatttcttagattgatcagcgtgagaataatgttttcttgtatgtaagtggattgtttcgggtgccagaataaaaacccgtctgtttctttctttacctcttttcttcacttgtcactttctttgtttctatgtacacgggaacttgttttgctgcttgatgacgattcaattatttcagtgtgctttctgttcttaaattattgtagccaaattgacccttttcttttctgaatgtgttgtggcctagcaatataatattataggagtaaattc

SEQ ID NO: 10612 - DNA, 1233 bp, Glycine max
  Clone ID: 700952549_FLI
aagtaatctataagtttctaaaatcattggaaaattatgggttaatagtgtgaagcattggatcccagagaaagatctccaaaatgcgcgaggcagcatatatggacttgatggattagtatcaggtagggtgacctcctgtgaagctccatcaaggatgcctcggtcacgctctgttcaaaattgagaggccatttgtgtgtgctgtcgatgattgtcaggcaagttacagaagaaaggaccacctgactcggcaccttctacagcatgaagggaagatttttaagtgccctgttgagaattgcaacagtgagttctctttgcaaagcaatatgaaaagacatactgaggagattcatgatgacagttctaccactaccagtagtgacaaaagtcacaaacagcatatgtgtccagagattggctgtggaaaggtttttagatatgcatcacagctacaaaaacatgaagattctcatgttaatttggaatcagtagatatggtgtgcttagagcctggttgcttgaaacatttcactaatgtccagtgccttcaagcccatgtgaagtcctcccatcagtatatgacctgtgacatttgcgggacaaagcaactgaagaagaatattaagcgtcatcttcgatcacatgaagctgaaggcagttcatcagagacctttcaatgcgagtttaagggttgcagctgcacattctcaagaaaatctaatctagacaagcataagaaggctgtgcacttaaatgtaaagccttttgcttgtgggtttcctgattgtggcatgagatttgcttacaaacatgtgcgagataatcatgaaaaaactgctaaacatgtttttacccttggggattttgaagaagctgatgaagagttcaggtcaaggccaaggggaggaaggaagagaacatgtcccactgttgaagtgttaattaggaagagggttaccccacctagtcaattggagcattggttatttatgcaggatagtgagtagagtgcatttagcactctgtgctcctattacaagtaggcaaaatgtaaatttaacatgttgacaggagtatataacattttggattattgttaacagatatatagaatttaggacaacgtgtaataatgattgatgcttatgagttatgacagattccatagtgtagcgaatctattaacctttgtaccaatttgcaatttaaacaactgcttttgtttac

SEQ ID NO: 10613 - DNA, 2702 bp, Glycine max
  Clone ID: 700952682_FLI
atttttctttcacttctgcaatatatacgtacgcttcggcaacacccttctctctctctcatttcttctttttcttccccttctcgggcttttgataactactactgtagttacaatactctttctcgccgttaagaatttggaaatatcttcatttaccatggattggtgtcaaaatcaaaacggaagttttaaaagtacagatgcactatgtattgcggcagaagctgatgaggaggaacttgatttcacaaaggtagacaagccaaggcctatagaaagatgcaaatcatgcgaagtaagatcactaagtgaactgtccaaagtttctgagaactcttcttactcaatagaccatcttgataaggcagcttctcttcagccaaaatcgggtatgaataccccaggatcattggtattggatccacaatcacatccaatagtatctgaaggctgggaagctctgatgcgttccttggtgtattttcgtggtcagcgtgttggtacaattgctgctatggatagttctgatgagaaaatcaattacgaccaggtgtttgtaagagactttgtccctagtgctttggcttttctgatgaagggggaacctgaaattgttagaaattttatcttgaagacccttcgccttcaatcatgggagaaaatgattgataagtttcacctagcagaaggagtaatgccagcaagttttaaagtacttcatgatccagtcagaaaccatgagaccttgatagcagactttggtgaaagtgcaataggccgggttgctcctattgattcgggattttggtggattatattacttcgtgcatacacaaagtctacaggagacaattccttggctgaactgcctgaatgtcagaagggcatgcgcttgattttgaatttatgcctttcagagggatttgacaccttccccactctactatgtgcggatggatgctgcatgatagatcgtagaatggtgagtttgttggactctatgataactgcaacatcatattttacatcgcctagagaataaaataaggaattggctgtaagaaaacatttttgttctagttctaggtttctctggtttcgcagattaatattgtgaacagttcaatcctatttagtcaagaacaatccaattttgtgcctccattaatgaaaacacatccacagtttcagtatttcttcttactcacatgtttttgacatatcagggtgtttatggttatccaattgagattcaagcacttttcttcatggctttaaggtgtgccttgatattgctaaaggaagatgctgaaggcgaggagttcagagaaagaattaccaaacgattgcatgccttaagctatcacctgagaagctatttttggttggatttgaagcaacttaacaatgtatatcgcttcaaaacagaagaatactcacatactgcagtcaacaagtttaatgtcattcctgattctctacctgattggatttttgatttcatgccacttaaaggtggttactttattgggaatgtcagtcctgctaggatggatttccgttggttttgccttggtaattgcatagctattttgtccagcttggctactcctgagcaatccattgcaatcatggatctcattgaatctcggtggcaggaactgattggggagatgccactaaaagtttgttatccagcccttgaaaaccatgagtggcgaatcataactggatgtgacccaaaaaacactagatggagttaccacaatggaggatcttggccaggtatccgttcttctgcccttaggccagattttcattgaactatgttacaactttgaattttcagtaactattgcacacaatacttttatttgaaaagattaatgattctattatttagattagagcagtgaatgctactgataacactacaacatgttatttaattaggtactcaattgagatatactttagagtcttttatctagtgtaaacatgaggtcctttgaggcaaggtggcatttagcatatcgttgaagaaattctgagatacatttttggatattgtggtggatgcagttctattatggcttcttgctgctgcctctatcaagacaggacgaccccaaattgcaaaacgtgcccttgaaattgttgaaactaggttgttcaaggacaactggcccgaatattatgatggaaagcttggtcgttatattgggaagcaagcccgcaaatgccaaacttggtccattgctggttacttggtggctaagatgttgttggacgatccatcacatttaggtatggtggcactagaggaagacaaacaccaaaaacctgtgctcagaagatcaaattcattgtgagttgattttgacttgcaatggcaaaaaaggaattaagaagggcaaggtgggcggcaacactgaaaagaagctcaagattttgtttcgtacttttaggttctatgtactatttttctgagatgcattatgttaagcatctctagctaattgcattgtgctagagttaagtgcttagagaaacacaagttcgttcttaggaattgcatgaattttttagcggatgatatgtaaaactagatcgagatcactaaacaccagacattgaatgtatttagctgatatatagtttgcgtcatcacaaacaaaatgcgagatacaattcatatc

SEQ ID NO: 10614 - DNA, 2402 bp, Glycine max
  Clone ID: 700952775_FLI
ctttcttttccctctctcaattccaagtgggttttatcttcttctttttttctttctccaaaagtgttaaaattttaactttgttttgccttaatttgattgttttatgcagagtagacagtagatttagacacccttttggaaaaggaagtgttttttgagggaaaggagggaattttttgtgtgggagggtggaacccggaattcggtttggttggggtagagaggatgaagattcagtgtaacgtgtgtgaggctgcggaggccaaggttctttgttgtgctgatgaggctgggctgtgttgggagtgtgatgagaaggttcatgcggctaacaagcttgccagcaagcaccagagagtgcctctttctacctcttcctctcatatgcctaaatgtgacatttgtcaggaagcattaggctattttttctgtctagaagatcgggctctgctctgcagaaaatgtgatgtggcaatacacactgcaaatgcttatgtctctggtcatcagaggtttcttctaactggtgtaagagtaggccttgaagctacagaccctggtgcttcctcaacttctttgaagtcagattctggggagaaagtttcagattcttctgtctctagaaaggtttccacagcgccccagccatcaaattataatgaagtgttacccgctgaagttggaggagttggggagtttccatcagccaaggtgtcctttggtggtggttccacagctggaaatatctcacagtggactattgatgaatttattggcttaaacgagttcagtcagaattatgattacatggaaggatcatcaagggtatgttcatagttgttgaaatataccctcttagcctagtatcccctgatcattggttttgtagagtttctatcatttaatgctttgtttttttgactgggttagtattgcagagttcagattcatcttttgtcatagattgtgtatactagtgccccttcagacacactaacacacgcgcgcgcgtgcagggagtaaaaggacagggatggggctgatccggtcttctgagggaatatgccctgttaacatggtcacatgactaaacaactggccaatgtagtataagttttataaatatgttgaatatttgtggtcagaaaaggtgtgagtagacttcaaacagtggaatctgacagattggttggttgaagtgcttgtgcttggtttcattctttcccttatttgtaagcccgttttaaatttggaaaacttgaccttttagaagtgcaatactcagttggctttcacctgaaactaattgctttctgaattaaatattgccaatcgtgaagataaaaaattataatcttaatgatgatgagccgggaatgatcatcctcaatggtgatccataatctagataccctagtcctcttgcatttgagtgcttaaaaacatgatattatttggatgagaatgtggattggaattattgtgcataatttactgatagacacatgtaagacaaattttcgacattcaaattacttcaatcaaacaaagatttgaattatatctatattcgtattttgagaaaatcaagagaatcaaatagaataggaaattgattaatgactttttttttcctttgtgactattctcattcaattgattattttcacatttattgtgtatttgtgtgcttaccatgtacagatagttaggcaaaataccatagatgtcttgtctgtatggttgtatggttctgtaactttttttttcacccttcctttcctgatgagtctgtgcaggctgacggtggtaagcttggggattctgattctcctgttttaagatctggtgaagaggaaatggaggaggaggatgactatttggaacgcgttccagattcgtcgtggacagtcccgcagatcccttccccacctacttcttctgggttatgctggccaaaagaccatactaatctgtatggttcatctgatagtgttctgtttgttcctgacataagcttctctcacctgcaacaatctcagattagtatttttttgagacgccggaggcagctttaatttgtttactctttgctaataacttgaggcattgatttcttttatttctgttatgattctaagttctctcatgttgcagtgaagtgtcatttcattagttacatatttctattcttggctgtctcagccttctagggagtaatctaactctctacatgtcattggaaatttgcatagcaaagcagcaacaaataatgggagtttagaaggcttttactagtaagttgggtcttgtaacattatcaactcctctctagatcctatgtagatgcatctattggattataatagagatctgattcatattggtttgtttgtgtc

SEQ ID NO: 10615 - DNA, 1410 bp, Glycine max
  Clone ID: 700952818_FLI
ctagcacacaaaacttgctatagcagtaagctataactcatttgaggctctgtgagaattgagaaatggctaaagatgttgaggttcaagagcaaggaggagagtactctgccaaagactaccatgaccctcctccagcacctttgttcgacccagaggagctcacacagtggtccttctatagagccctcatcgctgagttcatagcaacccttctcttcctttatgtcactgtgctcaccattattggctacaaaaggcagactgatacaacggtaggtggcaccgactgtgatggggttggcattttgggcatcgcttgggcctttggtggcatgatcttcatccttgtttactgcaccgccggtatttcaggaggacacataaacccggcggtgacattcgggttgttcctaggacgcaaggtgtcgttgataagggcgttgttgtacatggtggcacagtgtgccggtgctatctgtggtactggattggccaaggggttccaaaaagcatactacaacaggtatggaggtggtgccaactctgttgctgatggctacaacaatggtactgctttgggtgctgagattattggtaccttcgttcttgtctacactgtcttctctgccactgaccctaagaggaacgctagggattcccatgttcctgtactggcgccacttcctattggatttgccgtgttcatggttcacttggctacaatcccaattactggtactggcattaacccagcaaggagtttcggagcagctgtaatctacaacgaagacaaaatctgggatgatcagtggatattctgggttggaccaattgttggagcagcagtggctgcattttaccaccaatacatccttagagcagcagctatcaaggctcttggatccttcaggagcaacgcttaattaattaatcaattaagctagctaccttgattaatttgccaacaagggctatgcatggtgtttcccccgaagaataataatttctatgttgaggagtgctagtgatctgtctatgcagttccctaatttaggctttttcgtcttttcctctcatcagctacagttgttgggggtgtttggaagagaaggccaaaaccatgggggcatgcatcaaattgtagataagcatgcttgtgtccaagggtgtattttgtatcccttttgtgtcttttctttttctttttcttttttttaatttccatgtatgtattccttgagtgttccttttctgtcttgtgcatccttagtcatttctcattttactcttcataattaagtactcatcttctcttgtttattaaagctttattaatcatcatctatgaatgtaatgtaccttgacttgagtaatatttatatatattatgttgcaggttttttattc

SEQ ID NO: 10616 - DNA, 1080 bp, Glycine max
  Clone ID: 700952839_FLI
ctgttctctatatgtctctatttcttttctctctctataaataagcagccttacaactcttcttaatcccatcaaatcgaaccctttttaaacgctcaaatacaaatttctggcaccaaatccttcccactctcctcaattccattcatttcaactcaacaatctctcagatccgtcaaacaaaatataaaagatagaaaaccctagttctgtaaatatataaaggaaaaaagctttttgctggttttgaggcatagcattaaattggattttgattattcatggctgaacaagcattggaaggtagccaacctgtggatttaacaaagcacccttctgggattgtgcctacccttcaaaatattgtgtcaacggtcaatttggactgtaagttggagcttaaatcaattgcacttcaagctcgaaatgcagaatacaatcccaagcgttttgctgctgttattatgaggatcagggaaccaaaaactactgcactcatttttgcatctggcaagatggtctgtactggagccaagagtgagcaacagtctaaattggcggcaaggaagtatgctagaattattcaaaagcttggtttcccagctaaatttaaggattttaagattcagaacattgttggctcttgtgatgtcaagttccccattcgacttgagggtcttgcctattcccatggtgctttctcaagttatgaaccagagctgtttccaggactaatctatcgcatgaagcaacccaagatagtcttgcttatatttgtctctggaaaaattgttctgacaggagccaaggttagagatgagacttacacagcttttgagaacatatatccagtgcttactgagttcaggaaaaaccaacaatgattactactgtcaagagagcaggagcaaggcttgattgaactgtaaatatgaagaccagagatagaaatatctgtaatctggattgagttttaataagacacctgtgtttgttctgtctttttctctcttttaagaaaagggatcctgctttagtaaagtggaagaaaaaaaaaaaccgtgtattgaatttgactgt

SEQ ID NO: 10617 - DNA, 2008 bp, Glycine max
  Clone ID: 700952901_FLI
agtttgggtctatatcacctgaccttgggaagctagagaatctgagggttcttgctcttcataacaacaacttctatgggtcaattccaccagagttgggaaattgcactgaattggagggaatatttttacagggtaattaccttagtggagcgattccaagtgaaataggaaacctttcacagcttcaaaatttggatatatcaagcaattccctcagtgggaatattcctgcatcacttgggaagttgtataatctcaaaaatttcaatgtatcaaccaattttctggtcggacctataccttctgatggtgtccttgccaactttactggaagctcctttgttgggaatcgtggtttgtgtggagtgaaaataaattcaacatgtagagatgatggtttgccggataccaatggtcaatctactaactcagaccaaaatcaaataggaaagaagaaatattctggccggctgctcatcagtgcatcagcaactgtgggagctctacttttggtggcacttatgtgcttctggggttgttttctttataaaaagtttggcaaaaacgacagaataagtctggcaatggatgttggtgcaggtgcatcaattgtgatgtttcatggagacttaccatattcttcaaaagacatcatcaagaaactagagactttgaatgaggaacatataatagggataggggggtttggaactgtttacaagctagcaatggatgatgggaatgtgtttgctttgaaaaggattgtaaagttgaatgaggggtttgatcgtttttttgagagggagcttgaaattcttggtagcatcaaacaccgttatctagtgaacttacgaggatattgcaattcacccacgtcaaagttgttaatatatgattacctaccaggtggtagtcttgacgaagcacttcatgaaagagctgagcaactagactgggattcacgcttgaatataatcatgggagctgcaaaagggcttgcctacttgcaccatgattgttcccccaggatcatacaccgagacataaaatctagcaacattttacttgacggaaacttggatgctcgggtctctgattttggacttgccaaacttctggaggatgaagaatctcacatcaccactattgttgctggaacgtttggttatctagctccagagtatatgcaaagtggcagagcaactgagaagtctgatgtgtatagctttggtgtgttgacacttgaagtgctgagtggaaagcggccaacagacgcagcattcattgaaaagggtctcaatattgttggttggttgaattttctaattacagaaaataggccgagggaaattgttgaccctctatgtgaaggggtgcaaatggagagccttgatgccttgctctctgtggctattcagtgcgtttcctcaagtccagaggatcgacccaccatgcaccgagtggtgcaattgcttgaatccgaggtcgtaactccatgccctagtgacttctatgactccaactccgattagaaagcttgcaaaggcaaactaaaagtatgttgttgtgtttgcacccatgtcactgcaaattccttgcaagtcagaagcgattatagagggtcagaatctgcagtgttaattttcatctcagttgcattcattcttaactggaattataatgaaagaggttcttcactacactacatggtagtagttgttgtggttctccgtcacatgtcatcattggacatgttcatacatttcttcgtctttgtgaatggagttgtatgtgttactcgatcaatcgctggttccagtcttcctcgtgttttttttttccctctattttttctctctttctctttgctagcattgtaatctttgttacatttcttcactccaatttaagtgtatatgaatgtgtacaagttcagatggcccactcttgcgagtgattcttgttatttatttttgtaatatatgtcccataaaagaattcatct

SEQ ID NO: 10618 - DNA, 1314 bp, Glycine max
  Clone ID: 700953009_FLI
ctctctctcaaaacaagttatggtagtatttgtcattcatttcacaaaaccggttcacctttggacccatggcttctaaaacccctaccttattccactctcgtttcttcctcttcggcttctattgctgggactgggaatttctcaccgctctcctcctctttagttcttcttcctaattaattaaattacatacaccttttctttttttttttttacctaaatttctcattactacaacatcaacaaaagaggcataggtttttttttttcttttcttcttttattaaaataataatagtttctgtgaggtaggtggagggtagatcgggaagaaaaaaaaatgtcacagcagcagcgttcgacgccggcgccgttcttgacgaagacgtatctgctggtggatgaccccgccaccgacgacgtcgtttcgtggagcgaaggtggcaataccttcgtcgtttggaaacacgccgatttcgctaaggacttgcttccgaagtacttcaagcataataatttctccagcttcgttcgccaactcaacacctatggattccgaaaaactgttcccgacaaatgggaatttgccaatgagtatttcaagcgaggacagacggatcttctcgccgagatcaggcggcggaaggtggtgtctccggtgaccggaaaatctaccggcggtggcgttaacatctcggcgtcccactccggcggcgacgacatggggtcgacatcgacgggatcgatggaggcggcaacggcggcgggcgctgatatatcgggcgagaacgagaaattgaagaaggacaacgagaaattgagcggcgagttagcgctggcgaagaaacaatgcgaggagttggtggcgtttcttagagactcgctgaacgtgagccccgatgtgatagagcgcatcattcggcaaggaacgtgtgtgtccagcaacaatgatgcggtgcgttttgatgctattattaataatgatcttgatgacgacgaaaatgcggtaggtgagtgtgaaccacaacaaccaccacccaaaggtgacaatggagaaagtttgaaactatttggggtttggttgaagggtcaaaatgggaaagagaattcaattggtaaatgccgcaagagagggcgccaagactaccctattgctgccactgccaaggaattgaagaccctagtctagtacaacatatcatattcttgttaattaattaccttttaagaaacaactattgtagccagatctagaacacaaagaaaaatactctcttagtcatcatggaaaatgtatggctctttcatggt

SEQ ID NO: 10619 - DNA, 1344 bp, Glycine max
  Clone ID: 700953068_FLI
gctcctctcatggagattgtaaatattcttttgatgccagtggattgacatcatacagcttctgctcttgtgatcgaaaccatggtggctttgactgtagcattgaaattgtatcacataaagggcatatactacaatcaatttttctcattggatcaaatgctgcagccatacttcctgcctattggtcccttcggcagaaggcatttgcagaatgggttttgttcacatccagtggcattgctagtgcactatatcatgcatgtgacgttggcacctggtgtgcattgaactttaatgttttacagttcatggacttctggctctctttcatggctgtggttagcacttttgtatacctagctacaattgacgaagtatataagagggcaatccacacagctgttgctatcctcactgcccttttggctgcaaccaaggcaactaggtcttccaatgttgttcttgtcattgtgattggggctcttggtcttcttattgcatggttgatagagatctcaaaaaagtataggtccatctccttttcatttggattatcgctaagtttccttcaaagcttgcaaactataaagcaatggttctgtaatctggtcaagacacttttgagacggtttcgctggggatttttattggttggtttcattacattggccatggcaggactaagctggacgctcgaaaccagtgcaaactactggttttggcatagcttttggcatgttacaatatatacatcttcattcttcttcctttgctcaaaagcaaacattgttgatgctgaagattcatcatcaccctcaagtggaaactatgcactgactcatcaggattcatttccaagaggtaattagaagaacatacatgggattggtgggtgcaaaaaggaaagagatggatcttttgtggatttaattttgcactaatgtgacacaattggtaggtaaaaagatatggctactgagtagaactagaaatcaacataagagtgaattgtgaggcctaagatgttaacagggatcaacaaagcagtctcttgtaaattcttttcctcacaaggtttgcttattttacatttattatagggtatatatattttccataaatatctttttttatgccgataggagaaagaaatcaaacaagggatacatttagtcgtaggataaagggttaaagggtctaaactttggttatgtaactataaattagaatattaatattgatatcctgggaattgtatatattatatggagaattctgtaatagatcaacatttgtggggagagagttaccccttaattgatacttacttttttaagaatt

SEQ ID NO: 10620 - DNA, 1512 bp, Glycine max
  Clone ID: 700953214_FLI
caaaaggccttctttcctcatttcggacgcacgctccccatccatgtctacttgtgtaaaatcccgaggtgtgaaaataatggaccacctttggtgaagtggacacatatataattgataagaatacttaatctctctctctatgtgttttttgggtacagatgtttgtattgttggtgttgcacggacgccaataggtggtttacttggcaccctatcatctctttctgccacagagttaggctcaattgctattaagactgctctcaagagagcaaatgttgatccatcactcgtgcaagaggtgttttttgggaatgttcttagtgccaatttagggcaggctcctgccagacaggctgcattaggtgcaggaattcctacatctgtaatctgcactactattaacaaggtctgtgcatcagggatgaaagctaccatgcttgcagcactcaccatacaattcggtctcaatgatgttgttgtggctggtggtatggaaagcatgtcaaatgcacctaagtacattgcggaggccaggaaagggtctcggtatggacatgataccatcattgatggtatggtcaaagatggcctttgggatgtctataataacttcggcatgggagtatgtgccgaactatgtgcagatcagcatgtcataacaagagatgagcaggactcttatgccattcgaagctttgagagaggaatatctgcccaaaatgctggtcattttgcttgggagatagttccggttgaagtttccactggaagagggagggcttccaaaattgttgataaagatgaaggcctggggaagtttgatgctgcaaagttaaggaagcttagaccaagctttaaagaggtcgggggttctgtgactgctggcaatgcttctagcataagtgatggtgctgctgcattagtgctagtgagcgaagagaaggcacgtgagcttggattgcatgtaattgcaaagataaaaggatatggggatgcagctaaggcgcctgaattatttacaactgctccttcccttgcaataccaaaagctatatcaaatgctggtcttgatgcttctcaaatagattattatgaaataaatgaagctttttcggttgtagctcttgcaaatcagaagcttcttggtcttgatcctgaaaaagttaacgcgcacgggggagctgtgtcattggggcatcccttgggttgcagtggagctcgcatcttagttacattattaggggtattgaggcagaagagagggaagtatggtgttgccgccatctgcaatgggggaggaggagcatctgctcttgttcttgagctcatgccggttgctgtgggacgttctttattatgacaaagatctccttacatcatactactttgcaacacttatactttttatttaaaataacaaaacatgtaataagtttagtcatcaacaaagtttgaatggtactggattcggtctctttaagcaaagtctcggtaagtcttgtggat

SEQ ID NO: 10621 - DNA, 622 bp, Glycine max
  Clone ID: 700953259_FLI
aaataatcaggtgggacaataggatgtcagcatcaatacccgacgaggatatcttctacacagttggatttttgcattcaagtgggtttgataattggaaggcctatgatgctcaaaataaagaaattctacaattttgtaacgattctgggatcaaggttaagcaatatcttccccactaccgcacacaagaagattggacaaaccattttggccctaaatggaggacttttgtagaaagaaaacaccagtttgatccaaaaatgattctatcacctggacaaagaatctttaacaattaaactagctttaaaaaaaatatataatatggtgggactacccaagttagctagctggctgatctcaagtgtacacataggacccagaattcagatgatagcctttgtacttgtttttgttaagagggtggggttaaaagctgcatgactttggcatatatgtagatcaggttacacatactttagatacgttaggttgacaaaatcatgtgtgaaagatgcacacagctagctgtgtacctttctttctctctctctctttctttctctctgtccctcaatttgtctatcactaaaaagattactatagtttagaacctagt

SEQ ID NO: 10622 - DNA, 912 bp, Glycine max
  Clone ID: 700953279_FLI
cctgatttacattcttgccattcgtgttgaactgaaaaccaaattgaaagaaagaagcctacggtctgaaaaatccacttgtcctgatgagttatgtaagtccagtaatggcagcagcaactgcccttctttctcttgcattagatccatgggatgaattccgagaaaacaagtactttgataattcattgcatattactcgaagttgcttgctgatgcttcttggtggcacacttgccttttttatggtactaacagaatatgttctggtctcagtaactagtgctgtcacagttacaatagctggggttgttaaggaggctgtcaccatattggttgcggtattgtactttcatgatcaattcacttggttgaaaggatttggcctattaactattatggttggtgtcagcttgtttaattggtacaaataccttaagcttcagaagggccatgctgatggcagtgatgtggcagagcattcaagagattctgcagccaaatatgttattcttgaggagatggaggaacaagaagatggcatctgaaaccattatgccccaaataataattcaaagccaaatgaagccatgatctctaaagacctatgggcacaaaataatcttccagcaatatgccagttggcctgcaccatctcatcttttcgagagccctgttggaattgtggtgtcaaagttctttttaagtttctttgagtgaacaattttttaagatataatgccctcctgcgatcaacatcacttatattctgtaaaaatatgcactcaaacagttaatagattttgtcatttttttagagttgacaaggtatatgttgcagatcacaacaggttgtaatagataattttttctcatttttgcattctagtatggaattgtattttttttgtc

SEQ ID NO: 10623 - DNA, 508 bp, Glycine max
  Clone ID: 700953304_FLI
gatcaaggtcagtgatgcggagcttgagttcctcacaggaagtgacaagattgatgatgaatctgctttgtcattgtggcaccccaatttgaagttgctccttgtcactcttggggaacatggttccagatactacaccaagagtttcaaaggatcggtagatgctttccatgtcaatacagttgatacaactggtgccggtgattcctttgttggtgctttattggccaagattgtcgatgatcagtccatacttgaagatgaaccaaggttaagagaagtactaaagtttgcaaatgcatgtggagctattacaactacccaaaagggagcaattccggcccttcccaaagaggaggctgcactgaaactgatcaaaggggggtcatagaatcttttggcaaaatgcaaaagtgctagcatgatttcgttttcttcccctaatgtttaaattttccgttggatttgcttgctataagtttaggagggaacttttgttttttctcct

SEQ ID NO: 10624 - DNA, 842 bp, Glycine max
  Clone ID: 700953423_FLI
cagagagtgatttcagtgagtgatcggtgttcacttgatctcatcataatcgtcagcgtcaattgaagaagatgccgatcagaaacatcgccgtcggaaggcctgaagaggcgactcaccccgacacgttgaaggcggctttggctgagttcatctcaaccttcatcttcgtgttcgccggctcaggctccggcatcgcctacaacaagctcaccgacaacggcgctgccacccctgccggcctcatctccgcctccatcgcccatgcattcgccctcttcgtcgccgtctccgtcggcgccaacatctccggcggccacgtcaaccccgccgtcaccttcggcgccttcgtcggcggcaacatcaccttcctccgcggcatcgtctacgtcatcgcccagctcctcggctccatcgtcgcctccctcctcctggccttcgtcaccgcctccactgttccagcattcggactctccgctggagttggagttggcaacgccttggtgttggagatcgtgatgaccttcggtctggtgtacacggtctacgcaactgccattgaccccaagaagggtaatttgggaattattgctcccatcgccattggtttcattgtcggcgctaacattttgttgggtggggccttctctggagcggccatgaaccccgctgtgacatttgggcctgctgtcgtgagctggacctggaccaaccactggatctactgggccgggcctctcatcggtggtggaatcgctggccttgtttacgaggttgtctttatcagccacacccacgagcagcttcccaccactgactactagagggggggaaatgaaaat

SEQ ID NO: 10625 - DNA, 1934 bp, Glycine max
  Clone ID: 700953440_FLI
aaaccctcccccttctccatgggacagtcaccgtccaccaccgccgcgcctccgccagacctcaaccgccaccaaattcctcagatacatccaaacaccgattccgatttcaccgattacaccctccgtctctccgacgattgcctggccgcaatctttcatttcctgagcaccgccgatcggaaacgttgctctctggtctgccgccggtggctccgcgtcgacggccagaggcggcaccgtctctccctcaacgcacagccggaattactagacttcgtcccttccctattcaaccgcttcgactcggtgacgaaactcgctctacgatgcgaccgaaagtgcgcgagcataaacgacgacgctttggttctgatctctctgcggtgcaggaatctcacgcgcctgaagctgcgcggctgccgcgacataactgaactcggaatggccggcgtaggcgaaaactgcaaggccttgaagaagctatcgtgcgcgtcgtgcatgttcggagcgaagggaatcgcggcggtgctcgatcgatgcgttactttggaggatctcacgctgaagcggctccgtggggtccaccacatcaccgacgtggaggttggtgccgcggcttcgttgaaatctatatgccttaaggaactcgtcaacggtcaaagcttcgcgccgcttgtgattgattcgaagaagcttcgaacgttgaagattattgggtgcacgggggattgggatgagactctggttagggttgggtgtttcaacaatgggttggttgaggttcacttggagaagcttcaggttaccgatgtgggacttgttgccgtgtctaaatgttttggtttggacactttgcacgttgtgaaaaccgctgagtgctccgatgtggggctttgtgcggttgctgataggtgtaggttgttgaggaaggttcacattgatgggtggaggactaataggattggtgatgatgggttgcatgcgattgccaaacactgtcttaatttgcaggagctcgtgttgattggtgtttatcccactttttcgagcctagcggcgattgcgtccaattgcaggaatttggagaggttggctctttgtgggattggaaccgttggggatgcggagattgagtgcattgctgataagtgtgttgcactcaggaagctttgcattaaagggtgccctgtgtctaatgctgggattggagctctggcttctgggtgtcccaatttggttaaggttaaggtgaagaagtgcaaaaggattactggtaaaggggtggagtgggtgcgagaacagagggtttctttggcgtttaattatgatgatagtgaagttgaagctttggatgggagtgcaagtgatgggattggcggagctcgggataatactgtagagtttctaccaaccattaaccaaacaaccgtggctgtggctgaggctgatgctgaagcttcttcaagtaataataacaaccgattgacaatgttaagatcaaggtttgggtttttggctggtagaaatttagtaccgggtgccttcagaagatggtctaacggtgataatgtctccagtagcagcagttttggatgatgttagtaaaaaagcagcaagccagcaaccacattcttgccaagtttgcattcctccatatctataatagtagttctcatgtcgattgcctgttctttgcagtgttgctatgtgattttttgtttttcatgttagttgctgatagcagcagcatttcttttgttgactagatttgtcagttaccctcattgattgtccctttcctatttgttctggttatacacctttgtaaaaggtctgttttatttcctatcagtgcagttttttttttttgataaaaactgcagagttgacaaaaaagaagataaaaactgcagaaaatctcgttccctctt

SEQ ID NO: 10626 - DNA, 1294 bp, Glycine max
  Clone ID: 700953529_FLI
tttgtcataaaaatgttgtttttaacaacatagactagtattaataatgtgactgaagttgtgtttctgggtcaactaaggcatccacatctcgtgaagctgattggatattgctgtgaagaagaacacaggcttctggtatatgagtatttaccacgaggcagcttagagaatcaactatttagaagatatacggcatcgttaccatggtcaacaagaatgaaaattgcagctggagctgcaaagggtctagcctttctacatgaagcaaagaaaccagtcatctatagagattttaaagcttcaaacatcttgttagactcggattataatgcaaaactttccgattttggcttggccaaagatggtcctgaaggagatgacacacacgtttcaactagagtcatgggcacacaaggctatgcggccccagaatacatcatgacaggacacttgacagcaatgagtgatgtgtacagttttggagtcgtgctcttggagcttctaacaggacgaaggtcagtggacaaagggcgcccacaaagagaacagaacctcgtggaatgggccaggtctgctttgaatgattcccggaaacttagcagaataatggatccaaggcttgagggtcagtattctgaggttggggcaagaaaagcagctgcattggcttaccaatgccttagccacaggccaaggagtagacccttgatgagcactgtggttaatgttctcgagccacttcaggactttgatgatgttccaattggaccctttgtttacactgttccagctgaacaacaacaatacaatgaagtcgcaaaagagagtgaaacacctaaggagaggaagagggaaaatggtcatcatcataaccgacgtcatcatcatcatcgccacaatggtcataggcatcatccacttaaatctcctaagacaccaatgccatcagatcagtcacagaatgatgaacaccgaaatggtagaaaaagtgggtctaattcacctgatacattcaatgcatcagaagctcaacgaagcatgggttagtagacacatatagatctttactgtacataggtgaattattagagttacatagtgtgccacgtactagtactaagtgcaacgagccttcaaggcaataagaaacaggaaaaagatgaaaaggaaaaggaaaagaaaaagagagtgccatatgtaatggtccttgcatggaaaacatgattgagttctatttttttttttaatttgtttatttgttccagaggaagttaattattttgaattgtgt

SEQ ID NO: 10627 - DNA, 520 bp, Glycine max
  Clone ID: 700953583_FLI
gaaatcttaagacttccttttgcgctgatcaatcaaggtcttctcaggcaaatgatgttcgcaagcaaatcgttggcagcgctgttccagtacttaaagatgaaaagttttccttgcggatactggtggaccattctattgttgaaagctttgctcaaggtggaaggacggttgtgacatctcgggtttatccaacaaaggcaatctatggagctgctaggttgttcttgttcaacaatgctactgaggccactgtgacagcctcactcaatgtttggcaaatgaattctgcatttatacgcccattccaccctgatcagaagaattaaaataaataattaaattggatataaaagacttgtagtcacaaaggatcggaaaacatcttggggtggcaatttgtactcatcaattgtttaccttcccataaacacacataaagttatgggttcttgctcaaagcccattccttcattttttgctcatttatgtttatgagaatgtttattataattttatc

SEQ ID NO: 10628 - DNA, 1406 bp, Glycine max
  Clone ID: 700953611_FLI
cacaaaacttgctatagcagtaagctataactcatttgaggctctgtgagaattgagaaatggctaaagatgttgaggttcaagagcaaggaggagagtactctgccaaagactaccatgaccctcctccagcacctttgttcgacccagaggagctcacacagtggtccttctatagagccctcatcgctgagttcatagcaacccttctcttcctttatgtcactgtgctcaccattattggctacaaaaggcagactgatacaacggtaggtggcaccgactgtgatggggttggcattttgggcatcgcttgggcctttggtggcatgatcttcatccttgtttactgcaccgccggtatttcaggaggacacataaacccggcggtgacattcgggttgttcctaggacgcaaggtgtcgttgataagggcgttgttgtacatggtggcacagtgtgccggtgctatctgtggtactggattggccaaggggttccaaaaagcatactacaacaggtatggaggtggtgccaactctgttgctgatggctacaacaatggtactgctttgggtgctgagattattggtaccttcgttcttgtctacactgtcttctctgccactgaccctaagaggaacgctagggattcccatgttcctgtactggcgccacttcctattggatttgccgtgttcatggttcacttggctacaatcccaattactggtactggcattaacccagcaaggagtttcggagcagctgtaatctacaacgaagacaaaatctgggatgatcagtggatattctgggttggaccaattgttggagcagcagtggctgcattttaccaccaatacatccttagagcagcagctatcaaggctcttggatccttcaggagcaacgcttaattaattaatcaattaagctagctaccttgattaatttgccaacaagggctatgcatggtgtttcccccgaagaataataatttctatgttgaggagtgctagtgatctgtctatgcagttccctaatttaggctttttcgtcttttcctctcatcagctacagttgttgggggtgtttggaagagaaggccaaaaccatgggggcatgcatcaaattgtagataagcatgcttgtgtccaagggtgtattttgtatcccttttgtgtcttttctttttctttttcttttttttaatttccatgtatgtattccttgagtgttccttttctgtcttgtgcatccttagtcatttctcattttactcttcataattaagtactcatcttctcttgtttattaaagctttattaatcatcatctatgaatgtaatgtaccttgacttgagtaatatttatatatattatgttgcaggttttttattcac

SEQ ID NO: 10629 - DNA, 1476 bp, Glycine max
  Clone ID: 700953664_FLI
atcctcgtccttcgcggcaccatcggcgtcaacctcggctcctccgacaacgacgccgtcaaccagaacctcatcgaagaaaccaaccgcatcctcgccgagatccgatccgacgccgacccctccgatcccgacgaccagcaattcttcaaccctaacgacaccttcaccctcggccccaagatcgataattgggacactgagcgcaagaattggcttcaccaaaaccccgaataccctaatgtcatcggaggtaaacctcgcatcttgctccttactggttctcctcccaagccttgtgataaccctattggagatcattaccttttgaagtcgattaagaataagattgattactgtagattacacgggattgaaattgtgtataatttggctcatttggatgtggaacttgctgggtattgggctaagttgcctatgattaggaggttgatgttgtcgcaccctgaggtggagtggatttggtggatggatagtgatgctttttttactgatatggtgtttgagcttcctatgtctaagtatgatgagtataatctggtgcttcatggttaccctgatttgttgtttgagcagaaatcttggattgcggtgaatactgggagttttctgtttaggaactgtcagtggtctttggatttgcttgatgcttgggctcccatgggccccaaggggccggttcgcgaggaggccgggaagatcttgacggccaatctcaaggggaggccggcgtttgaggccgacgatcagtccgccttgatatacttgctgctgtccaagaaggagaagtggatggacaggacgtttcttgagaattcgttctacttgcacggttattgggccgggttggttgatcggtatgaggagatgattgagaagtatcacccagggttgggggatgagaggtggccgtttgtgacacattttgtcgggtgtaaaccgtgtgggagttacggagattatcctgtggagaggtgcctcagtagcatggagagggctttcaattttgctgataatcaggtgctcaagctctatgggttcaggcaccgtggtctcttgagtcctaagatcaagaggatcagaaatgagacagttagtcctttggagtttgtagaccagtttgatattcgaagacattctacagaaaacacggaatcaaagagctagtgagaaagttgttgttcaatgggtggtattatagagagtaattatttagaagtggagtttcatttggggacagttcacatgtaacttttgcttcttctgtcgtcttggtacttctgtgagaattttaggatagaattctttcgtaagttcttctttcttccagatttgagcaatcagcaaacaaattttatttactcatctactgtatactgagcttcctttgtatttgggcttttgtgacatgaaatgaattcagaaacttaattaatacacattcctgtcctcttg

SEQ ID NO: 10630 - DNA, 1236 bp, Glycine max
  Clone ID: 700953734_FLI
ggtttggttgggggtaaagagaatgaagattcagtgtaacgtgtgtgaggctgcggaggccaaggttctgtgttgtgctgacgaggctgcgctgtgttgggagtgtgatgagaaggttcatgcggctaacaagcttgccagcaagcaccagagagtgcctctttctacctcttcctctcatatgcccaaatgtgacatttgtcaggaagcattaggctattttttctgtctagaagatcgggctctgctctgcagaaaatgtgatgtggcaatacacactgcaaatgcttatgtctctggtcatcagaggtttcttctcactggtgtaagagtaggccttgaagctatagaccctggtgcttccttaacttctttgaagtcagattctggggagaaagtttcagatacaaagtcttcttctgtctctagaaaggtttccacagtgccccagccatcaaattacaatgaagtgctacccattgaagttggaggagttggggagtttccaccagccaaggtgtcttttggtggtggttctacagatggaaatatctcacagtggactattgatgaatttattggcttaaacgagttcagtcagcattatgattacatggaaggatcatcaagggccgatggtggtaagcttggggattctgattctcctgttttaaagtctggtgaagaggatatggaggaggaggatgactatttggaacgtgttccagattcgtcgtggacagttcctcagatcccttccccacctactgcttctgggttatgctggccaaaagaccctcaatattcatctgatagtgttctgtttgttcctgacataagcttctctctcattcaacaatctcagattagtagtatttgtttgagacgctggaggcagctttaatttgtttactctttgctaataacttagaggcattgattattccttttatttttggtatgattataagttctctcatgttgcagtggaagtttcatttgattagttacattttctattcttggctgtctcagtttcttctagggagtaatcaaactctctacatgtcattggaaattttcctagcaaagcagcaacaaataatgggagtttagaaggcttttactattaagtttggttttgtaacattatcatttccgctctaggatcctatgtagatgcatcatctattggattataatagtgatatgattcaatattggattgtttgtgtc

SEQ ID NO: 10631 - DNA, 2358 bp, Glycine max
  Clone ID: 700953783_FLI
gtaaaatctcgccgccttcacataaaaataatctttaatgaaagaatttcatatcaggtgaaattaatttatgatctttgaggtagacccgtattatctgacctatgaaaaaatccctgcttatccacgcacgatttggaacttctgaaaacacgctgaaatagatttttttttttgggtataatattgattgtagtagtatttattttatcttctgatattatatttccaattttgctgtcaaaacattattagcgatcaatttgaaattgatacagagctgagagcatcaaggaatcgaagaatagaagattcatttttttttctttttgatatggaagctgatgtttctattatttttgttgcgttttcaaaaccctaaattggagaaatcccaatttctccttctgtctttctgctttggatgtttttcaaccaaaaaattgtgcttttcaaatcttttgctctgatgggtacttcaaatcttctcttgtttttctctctgatgagcctgtgtgctatggcggcttccaaggtggtgcttattgggaataatatcactctctcctttgatgatattgaagctaattttgccccagcagtcaaaggttctggaaaatatggggtcttatatttggcagaaccactggatgcgtgtgcagaattgacaaataaagttgaacaacttcccaatgcgagttcaccttttgctttggtggttagagggggatgtagctttgaggaaaaagtcagaatagcacaaaaggctggcttcaaagctgtaattgtctatgacaatgaagagggtggcatcttggttgcgatggcaggaaattctgctggtataagaatacacgctgtatttgtatctaaagcttcgggtgaaatactaaagaaatatgctgggttgactaatgtggaaatatggctcattccaacttttgaaaactcagcatggtctatcatggcaatttcatttatttccctgctagctatgtctgctgtcctggccacttgtttcttcgtccgcaagcatcgcataagaagagaaaggcctcgagcttctcttgttcgtgaatttcatggtatgagtagtcgcctagtgaaagcaatgccgagtttggtatttacttctgttttggaagataactgtacatcaagaacatgtgctatatgccttgaagactattgtgttggtgagaagctcaggattctgccctgctgtcacaagtttcatgctgcctgtgtggattcgtggcttacttcatggagaaccttttgtccagtttgcaagcgtgatgctagaaccggcttaactgatccaccaccttcagagtccacacccttgctctcatcaaccccagcatctatggcatcctctgtcttatcttctgcaagatcatcactagcttcatcttcagcaatacaaattgcccggacagcatctatggcatcctctgccttaccttctgcgagatcatctctagcttcatcttcagcaatacaaattgcccggacagcatctatggcatcctctgccttacattctgcgagatcatcactagcttcatcttcagcaatacaaatttcccgggcagcttcacagaccccatctgtttcccgtaaccactccatagccagtacaccttatgttcagccatctcttaggtcctcctaccatcaatccccctccctaagcatcagccgaagctccgtagatcttaggaatgcatcccaaagatctctagcttctcacttgaattcaccatgttccatgggatacccatctttgtcatctcttaactcaaggtacatgtctccacacattccaagtccaagcaatgcttcagtaagctatatgggttcatccagtcatcaacaacatcctctccgttatagtgagtcggctgcaagcttctccccatttgcatcgacacactcccttccagaatgttaaattgttcaattgattatatcatatgattgagacgtccacgcagttgaactagtaattgccaagtcttgaactaaaaggtggccatgtgatgaccggtggtctagttgaatagtcctatgtgatgcttggggcattccctacctctgtcatttgacttccgtcttggcacctggtgtacattgtagcttctctctggtgttagtttcgtttacatgtgctggttgaggttcttacatttataggttggagagcttgcatacagtaacttgtgcgtattgtttgtactttgaatgttgacgttttcatggccttgatgtccaagtatagtcaactgctaacaagagaaatgttgggctgtattgacactagacacattgaagtaagaagagttctttatgctc

SEQ ID NO: 10632 - DNA, 1295 bp, Glycine max
  Clone ID: 700953859_FLI
ggtgtttctccgagttgcttcaattgaatggctcttcagcttccaccacttcctggccgtgccatgcgcttcaactcaagcgtgtgctcccttcctgcacgaaaatctagcacctttgccactctgtcacaaccccgaagcgactgggttgaagccactaacagtttcttcgaccaagacaaacgacccatcatgttatttgacggagtatgcaacttgtgcaacgggggtgtgaagttcgttcgtgataacgatcgaaataagacaattagatatgaacctcttcagagtgaaacgggtaaaatcttactcaggagatcaggaagagctcctgatgatatctcaagtgttgtacttgttgaaaaggaaagatcctatattaagtcagaagccgtgctgaagataatggaatatatagacttaccctttccacagctagcaattcttcttcaatttgtgcctctgtttatcagagattttgtttatgacaatgttgcaaacaatcgttacctgatttttggtcgttcggaatcatgtgaaatatagcatcatcctggcatgagtactggaggtaacagtaatgtgctaagttcaaaaactgggcttctttatagtccaagtcatatcctgttctcaaatattttgaagattctgtgtactactgtatagaagctttacttgtcgttttatttgataagctcatagaagcagaggacatcatcaattcgtaataatattttctgtcccaaatgattttgcaatttcatttctttcagtaaacactcctaatttcttaacttcatcagggaattattaaataagttgtttatctgtatttaacttttaactgttctggtttaacagtttctctgtaaactgaattctgttaaccttgactcagatattttttggatttggatcatttcctattgtcgagcaatagaatatggtcatgttggagagagaaggacacaatttttatgaattttaattagtcaatcctacaaccaatcctggtgggtctttgtttggtaaaaattgtatctttgtttgacaagttttagtttttctgcttcaacaaagaaataaattaaaccaaagcctcagctctccttcctagtagaagcagaactagtcattggtgatggatctagttgtaatgagatcctcaaatcttcacaaatacgttctttatgtaaaagcatgtaaaatgtggattgttacatcatgatgacatacttctgttggaattctgtcatctttcttgtcaagatactagctacattttcctcttg

SEQ ID NO: 10633 - DNA, 1023 bp, Glycine max
  Clone ID: 700954134_FLI
gaaactctttatatatttattattgttactgacccaaacaaactcaacaaaaccatgatcccaaacgttgaaatccctcactgggacgccgacggaggaggaccactctctccgttcatctcttcttcttccaatgctgacaagtgctcattattattctcctccgaccatttccgaatgttccagttcaaggtccggatctgtccacgtggcaggtcccacgattggacggagtgtccctacgcccaccctgccgagaaggctcgccgccgtgacccccgcaagtaccactactccggcaccgcctgccccgattaccagaaggggaactgcaagaggggcgacacttgtcagttctcgcacggcgtcttcgaatgctggctccatccttctcgctaccggacccacctctgcaaagacggaaccacttgccgccgcagagtctgcttcttcgctcacaccaccgaacaactccgcctcgtagtaacggattcatcatcgtcctcctttgtttcctctcccacttcggtcctcaactcttcgtccttctccgattcttcgccgtacagcttcgtgcgcgaaatagttaactcaacgcggaatgttaaaatcgaggattcgggtttgacccgttgcgtgtttgggtcgccacgtggcgggtttttaagtgtgaatgggtgcgaggaggagcctgctatggagagggtggaatctgggaaagacattagagcgagaatctatgccaagcttagtagggagaacacgattggagcctctgaccctgacattggatgggtttcggaactcgtcaaatgaccgcatgtttgtttctcccttgttagattattatgttcgagacaaagtcattttatcttttctaactctaaaccaaatatgcactgaatggattccgttgcttttcatttgggtctgtatgtatagttaagttgtataatgcaatttgaataaaataaaataaaactctatgtacatagttgagaccgtttgggtctctgtttttgt

SEQ ID NO: 10634 - DNA, 1424 bp, Glycine max
  Clone ID: 700954226_FLI
attgaatctcagaattctctaaaagagatctttttctgctctttgaagaaagaagggtctttgcttgattttggagatgtctctgctctcagatctcatcaaccttaacctctccgataccaccgagaaggtgatcgcagagtacatatggatcggtggatcaggaatggacctgaggagcaaagcaaggactctcccaggaccagttagcgacccttcagagcttcccaagtggaactatgatggttccagcacaggtcaagctcctggtgaagacagtgaagtgattttatacccacaagccattttcagggatccattcagaaggggtaacaatatcttggttatctgtgatgcctacactcctgctggagaacctattcccactaacaagaggcacgctgctgccaaggttttcagccatcctgatgttgttgctgaagtgccatggtacggtattgaacaagaatacaccttgttgcagaaagatatccaatggcctcttgggtggcctgttggtggtttccctggacctcagggtccatactactgtggtgttggcgctgacaaggcttttggccgtgacattgttgacgcacactacaaagcctgtatttatgctggcatcaacatcagtggaattaatggagaagtgatgcccggtcagtgggaattccaagttggaccttcagttggaatctcagctggtgatgagatttgggcagctcgttacatcttggagaggatcactgagattgctggtgtggtggtttcctttgaccccaagccaattaagggtgattggaatggtgctggtgctcacacaaactacagcaccaagtccatgagagaagatggtggctatgaagtgatcaaagcagcaattgacaagttggggaagaagcacaaggagcacattgctgcttatggagaaggcaacgaacgtcgtttgacaggacgccacgaaaccgctgacatcaacaccttcttatggggagttgcaaaccgtggagcttctgttagggttgggagagacacagagaaagcagggaagggatattttgaggacagaaggccagcttccaacatggacccatacgtggttacttccatgattgcagacacaaccattctgtggaagccatgagcaaaacctgcatgttttctccctttggatggaaaggaacagttatgcttttcttagtaggatttggtctctctctctttttaccttttgattggtactatggttggtgccttgttggttggtgcaactaactggcaagggttgttcattgttttcttctattcctttccctcgttttccgattgttacaatgacaataatttaatggttattatcagtcttgaacaaagaaatgctgattgtgaagtataataataatatatgaaattgtcatgtt

SEQ ID NO: 10635 - DNA, 1102 bp, Glycine max
  Clone ID: 700954246_FLI
ggacacaaagtgaaagagaagggagctatagccataaggagaaaaactttcaaagaggtgaaagcaaaagagttcttcttttccttttttatatatacttgggtgctaagctgtgtgagttcattgacaagcctgaaatggcaactatgctgacaaaggagcatggtctgaacctcaaggagaccgagctttgcctcggtttgcctggtgggggaggcggcggcggcggcggtggtgaggtggaaactccaagggccactgggaagagagggttctctgagactgttgatctgaaacttaatcttcattccaaggaagatctgaatgagaatctgaagaatgtctcaaaggagaagaccctccttaaggatcctgccaagccaccggctaaggctcaagtggttggttggccaccagtgaggtcatacaggaagaacatgatggcagtacaaaaggttagcactgaggatgtggcagagaagacaacaagcagcactgctaattctggggcatttgtcaaggtttccatggatggagcaccttacctgcgcaaggtggacctcacaatgtacaaaagctacaaagagttatctgatgccttggccaaaatgttcagctccttcaccatgggtaactatggggcccaaggaatgatagacttcatgaatgagagcaagttgatggatcttcttaacagctctgagtatgtgccaagctatgaagataaggatggtgactggatgctcgtgggtgatgtcccatgggagatgtttgttgagtcatgcaagcgtctgcgaataatgaagggatcagaagcgattgggcttgcgccaagagcaatggaaaaatgcaaaagcagaagctgaagcgggcctaatacaatgttcaatgaaatcccgtaccaaagtggacctatatatatatatatatatatgaagcacttcagcgagactatggagcggagtgttgttagcttgaatgtgtctggtgttttttgttttgttcgtatatagattcaacttttaattttaaggagccgatcgatggggcatttgtaatggacaagaagcaataaacttaacctatatagtctggcttgttt

SEQ ID NO: 10636 - DNA, 1479 bp, Glycine max
  Clone ID: 700954326_FLI
cggaatctgtctaaccaccctaaagatccggcggcgagccccaaaaccaaacccttcttaaaggagaatccaaaattcaattccaacacataaaatttcaagtccgaggttgcctataaaaaccactttggacccccttcgctcattgcagcctcaagaatccacacaaactcagggtagggcagagagagagagagagagagagagagagagagagaatgggagggtgggctatcgcggtgcatggtggcgctggtgtcgaccctaatctcccactcgagcgccaagaagaagcgaaacaacttctcacgcgctgtctcaatcttggaatctctgctctaaattctaatcttcccgccatagatgtcgtcgaacttgtggtgagggaattggaaacggatccgctgttcaattcgggccgtggatctgccctgacagaaaaaggaacggtggagatggaggctagcatcatggatggtccaaaacgacgatgcggcgccgtttcgggtcttaccaccgttaagaacccgatctcgcttgctcgtttggttatggacaaatccccgcattcctacctcgccttctccggcgccgaagaatttgctaggcaacagggtgtggaggttgtggacaacgagtactttatcacacctgacaacgttggcatgctcaagctggcaaaggaagcaaacacaatcctgtttgattaccgaatcccaacatcggggtacgagacgtgcggatccggtgtggagagtccactgcaaatgaatggactcccaataagcgtgtacgcgcccgaaaccgttgggtgcgtggtggttgaccgggagggccggtgcgcggcagcaacatccacgggagggctgatgaacaaaatgaccgggcgcatcggtgattcgccgctgataggcgccgggacctacgcgtgcgacgtgtgcggcgtatcgtgcacgggtgaaggcgaggccatcatacgtggcacgctggcgcgtgaggtggcagcggtgatggaatacaaaggcttgaagcttcaagaagccgtggattttgtgatcaagcaccgtctcgatgaagggatggctggtctcattgctgtgtccaacgctggggaagtggcttatggtttcaattgcaatggcatgtttaggggctgtgccactgaaaatggcttcatggaggtcggaatctgggaatagcttcattattttccttcatggttgtttcgatgcaacttttggatttctgtaccatgttccactgtagtgtagggtctttctgctggtgcccgatttagataaaaaatggtaaccttgtttctaagaattagaaaaaaatgtgaaataataatatggtaactttgttgtctttctcttaaataaagacttgtggtagaccctcaacaaacccgtgtacctttttactatcacttacttaacttccttctctttttcttcaattcttatattatttgcaagg

SEQ ID NO: 10637 - DNA, 1872 bp, Glycine max
  Clone ID: 700954473_FLI
gagcatgacctctttgaatctttcttccaacaatcttcagggcgcaattccaatagaactgtcgcggattggcaatttggatacattggatatttcaaacaataacttagttggttccatcccttcttcccttggtgacttggaacatcttctgaagttgaatctaagcagaaacaatttaacaggaattattccagcagaatttggaaatcttagaagtgttatggaaattgatctttcaaataatcaactctctggcttgattcctgatgaacttagtcagcttcaaaacatgatatccttgagacttgaaaataacaaattgactggcgatgtggcatcactttcaaattgcattagtctctctctacttaatgtgtcctataacaaactatttggtgttatcccaacgagtaacaactttaccaggtttccccctgacagtttcattggaaaccctggtctttgtggtaattggctgaatttgccgtgtcatggtgctcgcccttcagagcgagttacattatctaaggctgccattcttggaattactcttggtgcccttgtgattcttcttatggtattgctggcagcttgccgaccacatagtccctctccttttcctgatggatcatttgacaaaccagttaatttctcccccccaaagctagtgattcttcatatgaatatggcactacatgtgtatgaagatatcatgaggatgactgaaaacctgagtgagaagtatataattggatatggagcatcaagtacagtttataaatgtgttcttaagaattgcaagccggtggctatcaagaggatctattctcactatccccaatgtattaaagaatttgaaactgaacttgagacggttggcagcatcaagcaccggaatctggtcagtctccaaggttattccttgtccccatatgggcatctcctgttttatgactacatggaaaatggcagtctatgggatcttcttcatggacctaccaagaagaaaaagcttgactgggagctgcgtctaaaaatagcacttggagcagcacaagggcttgcttatctacaccatgattgctgtcctagaatcatccacagagatgtgaaatcatctaacattctattggatgcagactttgagcctcatctcactgattttggcattgccaaaagtctctgcccctcaaagtcccatacttctacttacataatgggcacaattggctatatagaccctgagtatgctagaacttcacgtctcactgagaagtctgatgtgtacagttacggtattgttttacttgagttgctaactggaaggaaagctgttgacaatgaatccaacctccaccatctgattttgtccaaggcagcaaccaatgcagtgatggaaacagttgatccagacattactgccacatgcaaggacctaggagctgtaaaaaaggtttatcagcttgctctattatgcacaaagaggcagccagctgataggccgacaatgcacgaagtgacacgtgtactcggaagccttgtgctgtcaaacaccccaccaaagcaactagctgcactaccacctgcttcaaatccatctgccaaagtgccatgctacgtggatgagtatgcaaacctcaagactccacacttggtgaactgcccctcaatgagcacctcagatgctcaactcttcctcaagtttggagaagtaatctctcaaaacagtgagtgaaagagtgagcggggattttgaaatgaaaatcaagtccaagaatcatgtatattatttaaaaaccaaaaaagagaagcgaaaaaatggatgaggggtaatagttaatgaaaatgtttataaaaagttttagtact

SEQ ID NO: 10638 - DNA, 1181 bp, Glycine max
  Clone ID: 700954523_FLI
gcttcatccccagaataaatcacaccccccattgcaatgacccccagcaacaactcttctgcatcttcaaactcccttttggcttttctaagtgctgtgattctttctttcatctttttcttcaggtcctaaagcatacttgtgatttcctccattatttcctttgagatttggacagtagttggtcatacacccaattctaaattagagttgggatgtctggaggagtagtttgatacagtgatgcatctccacagatacttgagtaaagctatatgctgtggtgtagatttttactatggagttaaatgcaagttatgacgtcgagcattcacattctacacaaagaatacagcatgagctgtggcctctagatccaattgatccaaagaaggcaaagtttccatgttgtttggtttggaatccacttcctgtggtctcatggttggctcccttcattggtcatgttggcatttgcagggaggatggagttgttttagatttttcaggatcatatcttgtgaatgttgatgattttgcatttggtccagtggcaagatacttgcaacttgatcgtagacagtgttgcttcccccctaacctatctgcacatacatgcaagcacggttacctgcatgccgagtatggtactgcaatcgcatgggacgatgcgttacagacaagtttgcggtattttgagaacaaaactcacaaccttttcacttgcaactgccactcgtttgttgccaactgtctgaatcggctgtgttatggtggatcaatgaattggaacatggtgaatgtaggagctttggtaatatttaaggggcactgggttgatttcaggtcaattgtaaggtcttttctgccttttgttgtggttgtttgcttaggtgtttttatggttggatggcccttcttacttgggttactatccttctctctactcttaatagggtggtttctattgggtacttgcctatttagaaacctattagagtgctagatggtctcttgaattgaaagatggtcatgatttgtgttccctcttctccaaataacaggtttaaatgttgatattggaacaagaaatagttatctcttatggaaagttaatggaatagcttttgaaagtgtacttgatgcttcgttagaccgtgaattatgcaattgtattgact

SEQ ID NO: 10639 - DNA, 1506 bp, Glycine max
  Clone ID: 700954640_FLI
cttgggtgatgttaaacctagaataagtgaagaatctaatgacaagtcaaagatatggaagctcactgaaatcaacgaacaatctcaatgtagatccttgaagctaccggagaatgtaagagtaaccaagatatcaaggttgatatatacaaattcaggtaatgctattctggcattagcatcaaatgccattcacctactctggaaatggcagcgaaatgagcgtaactcatctggcaaggccactgctaccttgcagcctcagttgtggcaaccatcgagtggcatcctgatgacaaatgacattgctgatagcaatcctgaggatgctgtaccctgctttgcgttgtccaaaaatgactcatatgtaatgtctgcatcaggagggaagatatctctgtttaatatgatgacttttaagactatgacaactttcatgcctccaccacctgcggcaacctttcttgctttccatcctcaggataacaatattattgctataggcatggatgattcctctattcaaatatataatgtccgtgttgatgaggttaaaagtaaactcaaaggccataataaaagaattactggtcttgctttctctcatgtattgaatgtattagtttcatctggagcagatgctcagatttgtgtctggaatactgatggatgggaaaagcagaagtctagattcttgcagcttccttctgggagaacaccaccggcacagtcagatacccgtgtacagtttcatcaagatcaaatacagttcttggttgtacatgaaactcagctcgccatttatgaagcaacaaaactagaaggtctaaagcagtggttcccgcgagactcatctgcaccaatatcctatgcaactttctcatgtgatagccagctggtatatgccagctttttagacgcaacaatctgtgtatttagtgcttcaaacctcagattacgttgtcggatcaatccttcttcatatcttcctgcaagtgtcagttccaacacacaaccacttgtaatcgctgcacaccctcaagaaccaaatcagtttgctgtcggactgtctgatggtggagttcatgtttttgaaccccttgaatctgaaggcaagtggggtgtgcctcccccgattgagaatgggtcagcaagcaatgtggcagctgcttcagttggaccttctccagatcaagctcaaagatgatccatgtcagccgaagacaagtttcttttacatacttggcttgctggccattttaagaactaaatttgtacttaagttaatgcagggcactctccaattcagttgatccagctaagttaaatccatcaatcgtacatgccaaaagtttggagcaacttctttggttgaagaccaaaatcacattgtaatttgccaatagatgtgaaaaattcttttaaagtttaatgctaagatgatgtacaagtccttttgagtactttcaagttgtttttggctatctaattagattggttgatcct

SEQ ID NO: 10640 - DNA, 1819 bp, Glycine max
  Clone ID: 700954648_FLI
gtgccacactagttttttttctacacatacatatatcccaagaaaaattaagcaacgattcaagaagaaaatgggttctgaacttgaagctcccattcacgtcctcatggtgtcctatccagcacaaggacacataaaccctttgctcagactaggtaagtgccttgctgcaaagggcttatttgtaaccttcaccacctcagagaccgctggtaaaaacatgcgaaccgccaataacatcactgacaaatcagtgattcctgtcggcgatggttttctcaagttcgatttctttgaagatggcatggcagatgatgatgatggtcccaagaagataaatctcggtgatttcagtgcacagcttgagcttttcgggaagcaatacgtttcccaaatggtcaagaagcatgctgaagaaaaccacccattttcttgcatcataaacaacccttttgttccatgggtttgtgacgtagctgctgaacatggtattccttctgccatgttatggattcaatccagtgctgtcttcaccgcttactacagctacttccacaaactggtaagttttccttcagattcagatccttatgttgatgttcaattgccttccgtagtccttaaacacaacgaagttccagattttctgcatccttttagtccatatccatttctggggacactcatattggaacagtttaagaatttgtccaagcctttctgtgtgttggtggatagttttgaggaactagagcatgattacataaactatcttacaaagtttgtgcccataaggcccatcggtcctttgttcaagaccccaatagcaacaggcacaagtgaaatccgaggtgattttatgaagagtgatgattgcatagagtggcttaactcgagggccccagcatctgtggtatatatatcttttgggagtattgtgtatctgcctcaagaacaggtaactgaaatagcgcatggactaacgaattcgcatgcctcgtttttgtgggtgttgaagccacctcctaagaatatcggggttccacctcatgttctgccagatgggttctttgaggagacaagagataaaggcaaagttgtgcagtggagtccacaagaggaagtgttggctcatccttcggtggcatgcttcttgacacattgtggttggaactcttcaatggaagcactcactttgggagtgccaatgttgacatttccagcatggggtgaccaagtcacgaatgcaaagtttttggtggatgtgtttggagtggggattaaactgggttatgggcaggctgaaaagaaagtggtgagcagagaagaggtaaaaaagtgcttattggaagctacagaagggccaaaagcagacgagttgaaacaaaacgcgctcaagtggaagaaggatgcagagaccgcggtggctgtaggtggctcatctgccagaaatctcgatgcatttgtgaaagaaattaaaaaacgtggagctgttggggtcagcgggagataagtctatacctttattaattattatgtcactcccttcatgaaaaaacaagagagtaaaaaagtggaatagatcgataacctttaatttgtactttgtagcgtggaatacataaattaaatgctgatatatagctccgtgttacattaacacatgcaaatgctaaataaaggtattaaaaaacgtggagctgttggggtcggcgagatataactaagtctacctttatgccccttcacgattcattattgcattgcatgtataaccttaataaaatttattcaggaggaactaccttctcttccaatt

SEQ ID NO: 10641 - DNA, 1627 bp, Glycine max
  Clone ID: 700954712_FLI
cacccagatctcaattttctgcaatttcactcagaccaggaaattaaccatggctcaacctgcaagcctcacaagaataggccttgctggcctggctgtgatgggccaaaaccttgctctcaacattgctgagaaaggctttcccatttctgtctacaaccggaccgcgtccaaggttgatgagacagttgaaagagcaaaacaagaaggaaaccttcctgtgtatggctaccataaccctaaattctttgtccaatccattcaaaagccaagggtcataataatgcttgtcaaggctggtgcacctgttgaccaaaccatcaagaccctctcagcacacttggaaaagggtgattgcatcattgatggtggcaatgagtggtatgagaacactgagagaagagagaaagcgatgtccgaattgggtcttctctaccttgggatgggagtttcaggtggtgaagaaggtgcaagacatggtccctctttgatgcctggtggttcattcgaggcctacaagtacatagaagacattctcctcaaggtggccgcacaagtccctgatagtggtccttgtgtgacctacatcggcaaaggtggatcaggaaattttgtgaaaatgatccacaatggaattgagtatggtgacatgcagctcattgctgaggcctatgatgtgctaaagtcggttggaaagttgtcaaatgaggagctgcaaagtgcgttttcggaatggaacaaaggggaactcctgagtttcctcatcgagatcaccgctgacatatttggaatcaaggatgacaaaggagaagggcatttggtagataaggttttggacaaaactggcatgaagggaactggcaaatggaccgtgcaacaagctgctgagttatcaattgctgctcccacaatagaggcctctttggatgcaaggttcctcagtggattgaaagaggagagagttgaagcttcaaaggtgtttaagtcaagtggctttgatgaaatcttgagtgaccaacatgttgacaaaaagcagctcattgatgatgttaggaaggctctttatgctgccaagatctgtagttatgcacaaggaatgaatctgatcagggcaaagagcattgagaaaggttgggacttgaagttgggggaacttgcaaggatttggaaagggggttgcatcataagagcaatatttttggacagaatcaagaaagcatacgacagaaatcctaaccttgcaaaccttcttgtggatccagaatttgcaaaggaaatagtggatagacaatctgcatggagaagagttgtgtgtcttgctatcaactatggcactagcacaccaggcatggctgctagtcttgcttattttgacacatatagaagggaacgggtgccagcaaatttggttcaggctcagagagactactttggtgctcacacatatgagaggattgacatggagggatccttccacactgagtggttcaagcttgcaaaacagtcaaggacttagattactactattcaaactctttatgattaattttcaataaatgtaatgctttctactcaggactatgctgagttcagcttaaataattgcattgtggtgaacttcaatttc

SEQ ID NO: 10642 - DNA, 1255 bp, Glycine max
  Clone ID: 700954721_FLI
gcaactccaccacagttgcagaacagcacaaacacaagacagtgccaaggaaaaatactcagattcagcgttagtgtgtgattgtgaggctgttgagtgttgagtagggaagaaaagtgaagacctcaaaacaacgagctaaatcaggctcttgaggacaaccaagagaagaagaagagtgaagaagatgactggaatgacgaagaatcaaccgtcacagtggtggtggcttgatagccacaccacttctaatcgatccccttggcttcaatccactctctctgagcttaatgagaagacaagggcaatgttaaagttaattgaagaggatgcagattcctttgccaaacgtgcagagatgtattacaagaagcgaccagagcttgtgagcatggttgaggatttctacaggacacatcgctccctagctgagcgctatgatcaagtcaaacctgatactactggaattggacacctcattactggggggtcaccttttgcttcagcaaagcatcagttggagaagttgatgactttttcagataatggatatgatacctattctgagcattgtgatgtgtacgagtctgaggaatctgaagttgatgatcctgaacaggaggaggatgaagaggggaccaagtttcttcataacagcataaaaaatgagcaagtttcgtttgtggcagcgagtgatgttgaagtgatgaagctgaggggtgaagttaagagactcaatgaagagaacaaggctcatagggatcaaatcaagcagaaggataccatttgtgatgaaatcatgatgctgagggaagaaattggaaggcttagagatgagaatgaggcacagaaggaacaactcaagcagaaggatgaagagaagattgaggtgataagacagctgagtttagcaatagatgtgctgaagcaggagaatgtgaagatgagaaacttcattgctaaggagtccaccaagaaatggaagaacccatttgagatcaacaaacttgtgggagcattttctgtgaagttgttcagtggtggtactccaaagaatcagcccggcgttgagctctctagatgtggttaaaaatttagcagattgagtcattatatacaaaaatatttacaaatatgtctatatttatgttaggaacttattacccaatagcctaggcttaaaatcttttatctattacattccaattgttacaaatttgcatttgtattccttataatttatgtgtccaattcc

SEQ ID NO: 10643 - DNA, 1286 bp, Glycine max
  Clone ID: 700954809_FLI
gggaattaccagccatggcatcgtttggggcggaagagtggtactttttcagcccgagagaaaggaagtacccgaatggcgcaaggccaaacagggctgcaacttcagggtattggaaggccacaggtacagataagcctatatgtagtggaactcaaaaggttggggtgaagaaatctttggttttctatggagggaagccaccaaaaggggtcaaaactgattggatcatgcatgagtaccgtgttgctgaaaacaagcctaacaataggcctcctgggtgtgacttgggccacaagaaaaactccctaaggctggatgattgggtgttatgccggatctacaagaagggtaacacacaaaggtcacatgagagggatgattccatggacgacatgattggagaagtacctccttccatcaacgtgggccacatgaatgcgaggtttcacctttcaaagatgtccacgagctacagtggtgcattgttggaaaatgacagaaacacgttagaaggtgtggttataggcaatggtaatgtcaatggaatcaacactaattcaataaatgccatatcatcatcatcatctcatcatcagtttgcctcctcaaactccaaggcagagcttcttccttttgccccttcaaacaacaacacttctaattcagcctccaaaagaacactctcatcactctattggaatgttgatgatgataatgatgatgatgatcacaaacacttcaatttggacagtaatgggaatgtgagtgttttgaggactgaagagaataataataatactaatggtacttctggctcctttgccactctgcttaaccaacttccacaaacaccttcattgccccaaatagatgggttacttcgaacaccatatcaaatacaagggaccaattggtatggttaactccattttgggggatacgtacgatatgatatgataatttcataattataatgcacaaggagatccaattgaactaaggtgtggcaaggaatatcttcaacttgtgctagatcgcaaagatttcaaaagggtcattgagattgtggtttaattgttaggagaatggaagcacgttagagtactctaatcaatgctttcctccaaccatttgcaggtagctcatggcaattaataccacatgaggtgagggtgtaaggccttggtacttttagtttaattttaatttatatagattgatatagaaacatagatatagatagatataaagggatatttaatttgcttgttttattagtgtgt

SEQ ID NO: 10644 - DNA, 1328 bp, Glycine max
  Clone ID: 700955317_FLI
gccaactccaatatgcatatccaagccgaacattcattgacacaggctcctgcagctgcttccaatacaactcaacagctgatgccacctctaacttctgactcttgggctgcaatgactgaatccattgatcattctcactcagaacaaagattgcaatcatcattgttgaatgttgataagcctgcagatgatggctacaactggaggaagtatgggcagaaacaggtcaagggtagtgagtttcctcgaagttattacaagtgcacgaatccaaactgtcctgtcaagaaaaaggtcgagcgctcgcttgagggtcatgtaactgcaattatttataaaggagaacacaaccatcaatgtcctcatcctaacaagtgctcaaaagacaccatgacttcaaatgaaaattcaaatatgcaagggaatgtagattcaacgtatcaagggacgagtacaaactcaatgtctaagatggatcccgagtcaagtcaggcaacagctgatcgtctatcaggaacaagtgacagcgaggaagtagctgatcatgaaactgaagtggatgagaaaaatgttgagcctgagcccaagaggagaaaagcagaagtctcgcagtcagatccaccttcttcacataggactgtcaccgagcctcgaatcattgtgcaaacaacaagtgaagttgatctcttagatgatgggtatagatggcgaaaatatgggcagaaagttgtcaaaggcaacccttatcctaggagctattacaaatgtacaacgcaaggttgcaatgtgcggaagcatgtggagagggcttcaacagaccctaaagctgtcataacgacatatgaaggaaaacacaatcatgatgtgccagcagctaagactaacagccacactatggccagcaatactgcatcacagttaaaatcacataacaccaatcccgagaagcataattttggcagcagaggtatgggaggaaatgaacaacagccggtcgcacggcttcagttgaaggaagagcagatcacctagtctttctggaagaaacatcttagtgaggaagaattttgtctcacctcacaagtcatctttatttagatgctcatatcgcattcttttttagtcttaggcctaagttttgataggggcctatccagtgcaaaccctaataaacaactagtttaacactgatgaaagaggtaagggcaaaaggtttaaacaacaagtttgaacaatgaacgcaggttttggatgatgatgtactattagtaccttttgtgtacattgaaagtgtaagttatgttgtctaatatagttgttcatca

SEQ ID NO: 10645 - DNA, 1431 bp, Glycine max
  Clone ID: 700955539_FLI
atctcagaattctctaaaagagatctttttctgctctttgaagaaagaagggtctttgcttgattttggagatgtctctgctctcagatctcatcaaccttaacctctccgataccaccgagaaggtgatcgcagagtacatatggatcggtggatcaggaatggacctgaggagcaaagcaaggactctcccaggaccagttagcgacccttcagagcttcccaagtggaactatgatggttccagcacaggtcaagctcctggtgaagacagtgaagtgattttatacccacaagccattttcagggatccattcagaaggggtaacaatatcttggttatctgtgatgcctacactcctgctggagaacctattcccactaacaagaggcacgctgctgccaaggttttcagccatcctgatgttgttgctgaagtgccatggtacggtattgaacaagaatacaccttgttgcagaaagatatccaatggcctcttgggtggcctgttggtggtttccctggacctcagggtccatactactgtggtgttggcgctgacaaggcttttggccgtgacattgttgacgcacactacaaagcctgtatttatgctggcatcaacatcagtggaattaatggagaagtgatgcccggtcagtgggaattccaagttggaccttcagttggaatctcagctggtgatgagatttgggcagctcgttacatcttggagaggatcactgagattgctggtgtggtggtttcctttgaccccaagccaattaagggtgattggaatggtgctggtgctcacacaaactacagcaccaagtccatgagagaagatggtggctatgaagtgatcaaagcagcaattgacaagttggggaagaagcacaaggagcacattgctgcttatggagaaggcaacgaacgtcgtttgacaggacgccacgaaaccgctgacatcaacaccttcttatggggagttgcaaaccgtggagcttctgttagggttgggagagacacagagaaagcagggaagggatattttgaggacagaaggccagcttccaacatggacccatacgtggttacttccatgattgcagacacaaccattctgtggaagccatgagcaaaacctgcatgttttctccctttggatggaaaggaacagttatgcttttcttagtaggatttggtctctctctctttttaccttttgattggtactatggttggtgccttgttggttggtgcaactaactggcaagggttgttcattgttttcttctattcctttccctcgttttccgattgttacaatgacaataatttaatggttattatcagtcttgaacaaagaaatgctgattgtgaagtataataataatatatgaaattgtcatgttcattggagtagg

SEQ ID NO: 10646 - DNA, 565 bp, Glycine max
  Clone ID: 700955747_FLI
atttgaatatgttgagggcccttctgtcaaagatgtgtttcttgaattcaggtcacatgttgtcaataaagagtggctggatgatattgcatcccaaattggtgatgcaattggaaagctacatgatggtggtcttattcatggtgatttaacaacatcaaatatgttactgaagagtgatacaaagcagttggttcttatcgattttggtttgagcttcacttcaactctaccagaagataaggctgttgatttgtatgttctggaaagagctcttatttcaatgcattcgtcatgtgggaatgtgatggatcagatacttgctgcatacaggaagtcatcaaagcaatggtcatccacattgaacaaacttgcacaagtgcgacaaagaggacggaagaggaccatggttggatgaatctttatcaaatttcatttcattattgagatataaaagagatggcaactatggatgttatgtaatttatttttacattgtctctttattgcatatttgtagtctgcttttctaactgtttataaaaatgcaatgacttttgaactt

SEQ ID NO: 10647 - DNA, 767 bp, Glycine max
  Clone ID: 700955792_FLI
ctaccgtcttctgcctcggattcacgactcgctgagtctccgcaactcggaacgattccaccgaacgccgattctcaccgcaattcggtttgttcggatccgatgggtagcatcgtggaagacgccgacacagacacggtgtatgtggcggtcggaaagaacgccgagaagacgcagcaactgttgcattggacggttaagaatttctccggcaaagaaatctgccttcttcatattcaccaacctcactctctcaattcattctctgacagaaatctctctgggtatgaaccaaaagaccatgcgatcaaagcattccaggagcatggaaatcaaaaagtgcatgaacttctagaccaatacattctcactctggtcccagcaggggtacgagcctacaaattgttgattgagatggatgatattgagaaaggaatcacaaaagctattgctcaacacaatattagatggcttgtaatgggagcagcagcagcagacggatataacttgggcaaactggctaagcaagagtcggagaaagctatttttgtacgtgaacaagcattgctatcctgtaatacgtggttcatttgcaagggtaacgtcatatgtaataggtaaaaatgtaaacgaaaatgacatttgcagtgcaatgacatcattgtgatgtcttatgtagattagttgaactgcacgagtgtcctttttaatatcttcagagaaatttatgatatggatggacaagccgttaaacagcatattcattc

SEQ ID NO: 10648 - DNA, 1331 bp, Glycine max
  Clone ID: 700955837_FLI
cgaactcatcatttctaattgttctgatccatatatatcatactttctttgtaataacttaaagaaccccacaaaaacaccaaccatgtccacaattgcaaagagagatttgagttctaatgaagaagagagtgagctgagaagaggtccttggactcttgaagaagacagcttactcatacactatattgctcgtcatggtgaaggccgttggaatatgttagccaaaagtgcaggattgaagaggactggaaaaagttgcagacttagatggctgaattatttgaaaccagacattaagagagggaacctcactccacaggagcaactcttgatccttgaactccattccaagtggggtaacaggtggtcaaaaattgctcagcatctgccaggaagaacagacaatgagatcaagaactattggagaacaaggatacagaaacaggcacgccaacttaacattgaatctggtagcaagagattcattgatgctgtcaagtgtttttggatgccaagattgctccaaaagatggaacagagcaattctccaagccctcatcactcttccatgacaaacatgatgaatttagggaattccggagaagcttctatgagttcaatgtcaagcagcttcaatattaatccttctatgtcttcttcctcatctcctccacaaagggaatttattatggatgatgcaaatcattttaatactatgtccaaccccatcaatccatccccagattccttccaattttcacagctacttgaaatttctgaacaccccaaaagtccttcaaatgtgtttgagaacaatgtttgcagttatccaatccaggacaattgctatgttgataccaataactatggcatggaaggcataaacatggatcccctttcagcaatggatacttacgacttcccacagtttgattttcagacagcaggaaatggatggatgctagacagcatgggggattctactttatggaacatggaggctatgtgacagtgttggcaagagaaggcatgcatctcaagctcttttcatcgtgggatgttatattatcgaaagaaaaaaaagtttgaagattcttatgctatactgattcttagtgtgagtatacattctcataggtagaaattagtactaagtgtaaggttatttgatatgaacctcttgaaatatagtattttaaatagaaaatgcaggagatggtattagagttcccctgtttcagatttattagaagttggaaaagttgtaatttgaccaagacagtgtatcttggctgttataagtggcattttgaacataattcgttttt

SEQ ID NO: 10649 - DNA, 994 bp, Glycine max
  Clone ID: 700955906_FLI
agaaaacactaagagactctgcagtggctgcaaagtcgtttgcaccatagcttgttttgcctgtgacaagtatgatttgactctttgtgcgaggtgttatgttcgtggcaattatcgagttggtgtgaactcttcggattttaggcgagtggagataagtgaggagacaaagacggattggaacgaaaaggagaccacgaatcttctggaagctattacgcattacagtgatgattggaagagggtttctcagcatgttcctggcagaactgagaaggagtgtgttgctcattttctgaagcttccttttgtggatcaattccagcattatcaacaacaccctgctgtcaatggcactgatgacagttgtaatccgttaaagagggtaactaatgctgatgcagaatctgaattggatactgttgcctctgctgaacccaataagagaatgcgtctcacgcctcttgcagatgcaagcaatccgattatggctcaggctgctttcctgtctgctttggctgggtcagaggttgcacaagctgctgctcaagctgcattgacaactctgtctgaggtttacaaagcaactaaaataaattatcggtcgtttccgaggaatacattgctgcaagatgctggtatcatgtctaacggtggtaatacttcagattcatttcaaggatctcgattgcatgcaaacatacagcttgagaaggaagagttagatgtggaaaaagcaatttctgagattatagaagttcagatgaaaaatatccaagataagcttgttcagtttgaagatttggacctgctgatggaaaaagaaggccaacagctggagcaaatgaaaaatatgtttttccttgatcagcttactcttttatttcataaatcatctgcaccaaaaactggagaatgccaagaaggcaataatgtaaagacgaaccatggctattgatcttaggcttagcgaatgtattcaattttccttttc

SEQ ID NO: 10650 - DNA, 1873 bp, Glycine max
  Clone ID: 700956128_FLI
cagtttcatcattttttctttttttctctcttttggtacattggaaagaaagaaaggaagcttcaatttcttccaataaagcgtgttttagaacgtgcttttaaggtatatatatatatacataactacatataccaaaaaactgatttgcagctgaaattgctttcgttcattagtatttagtttttcacaagctagggaagacatgggagaagtggctgatgaaggtcaatatttcagatcagaaatagctctattgaattactcggatgcaaccttcaaacccccactttcttctctgttgatacacattgatccactcataatacccaatggccacacttgttctgcatcagaatctgatccatcacccacttctcagcaccatcagcaggagcagcatcccaaagatgcctggcttccaatcactgaatcaagaaatggaaatgcctattatgcagcctttcatattcttaattccaacattggattccaggctctcatgcttcccgttgccttcgccactcttggttgggcatggggtacagtatgtttgtcactagcatttgtttggcaactctatgccatatttcttcttgttcagcttcacgaatccgtccccggaattcgtcacagcagatacctcttccttgccatggctgccttcggtaaaaagttagggaaggtggcagcattattcccggtaatgtacctttcaggaggcacatgcgtcatgataatcatcaccggtggtgggaccctgaaacaattattgaagacgctttgcgacaacgatgatcatgttcatgagcaaataacatgtaatgcccacgcgcttagcggggctgagtggttcttggtgtttacctgtgtcgccattctcattgcacagttgcccaacctcaactcaatggccatggtttctctcgtcggcgccgttacctccgttacttattgcaccctcttttgggttctctctgttaagaatggtaggcccaacaacgtatcctatagctcatccctgcagtcccaagaacacacaccagtggctaagatcaatggcgttctcaatgccattggaatcattgtgctagccttcagaggacacaatgttttgcccgaaatacaggggacgctgccttcaaatttcgaacaaacatccaaaagaccaatgcgaagaggagttagcatatcatatgtactcatttccatgtgcatgtttcccctcgcaattgccggattttgggcctatggaaaccagataaatgacgggggattgttaacttcgttcccacaattccacaagaggcaaatcacaaaattctctatgggtgcaatatatgttctagtaataatacattgtttaaccagctttcaaatatatgcgatgcctgtttttgacaacctggagataagatacacgagcataaagaatcagagatgtccacgattggtgagaacatgcataagactattctttggggggttgacattttttatttcggtcacgttcccattccttccacgcctatcagcactactcggaagcatgacccttgtgcccattacatatgcatacccttgtttcatgtggctatccctcaagaagcctcgtccaagaggttttgtttggtgcttcaacgttgcactcggttgtgtagggatgcttctcagtgctcttttggtagctgcagctatacggactctagctctcaatggcctagatgctaacttcttcaaaccataacaattaatattatgccatccaacagcaactagtatattgccaacaatttattttaatctactgttagtgatatacagaaaatcatttttgaacatgatactccagtaatacaaacgttaagttttg

SEQ ID NO: 10651 - DNA, 2035 bp, Glycine max
  Clone ID: 700956316_FLI
gtgccaaaatcatctccgaggcaccaacatcggcagccacatatttctttatttattggtacagtattgtttttttcttcttcttcttcttcatttttcattaacatatatttctttttcgaagaatcaaaggtagaatctacaatattaaaaaaaactgtataagaaattaaaggtagtggtagtggagtgtgtgtgtgtgtgttaattatgtgtatgcatggtggaagctagagtaatagaggcgcaacatggtcactgtttctgtgggggctatagccagcttctcatcatgttcgatttctcttattcttacccatcttcttatatataaatatttataataacgtgtttcagtttctttctcagaaggaatcagtatataaaacacctgctttctaacggtggcgcaccagaggggtttaggttcaggttcggggaagttcttcgcggcggagcaaggcggcgatgaggaagcggaagagagtactgaggtaggttctgttccgagccatgtggtgtcagcctctgcagcttcggcccaaaccaatcagtgggtgccgcggggaagtggttttcccatgatgtcacgttttatgcatgcgccttctcccgttctgtcttcttcgcatcctcatttgggagttggccacaagagagagcgtgaagatgacactggcgctggtgcgagtggaggtgttgctattgcagcagcttcttcacaaacgcaaacacaagagattgaaagtgctggcggcgacaggaggaggagatacaggggagtgaggcagaggccgtgggggaaatgggcggcagagattcgcgatcctcacaaagcggcgagagtgtggcttgggacattcgacactgccgaggctgcggccagagcctacgatgaagccgcattgaggttcagaggtaacagagcaaaacttaatttccccgaaaacgttgtaccggttccacctcctcctccggttcccgatttaccggcaagtgcggtagccggttccgattccatttccggttccggttcagtggtggcaggtttttcgccgacgctgatgcagggagcgccgtttcagggctcctctgcttttctgagagattattgggggtattctcagctgctgaggagtacaggggacttccatggactcgaccagtggttctttgattctcaaatggcagcgtttcaatcttcttcatcgtcgttgttgccatcgccgccgccgccgtcgttttcgccttcctctgcttcgtatcctctgttttcttccagccagcaaatggggattttccggccgccgggagagcagggtcatggcggagaagacggtggtagtgggtcagagttttcggagcttccaccttcgacgtggtcagataccagtggctatcctcctccaccacctggttgacatggaatacacatttttttctttattctattttttctctttctttggttaaagaaagaacaaggctttcttctgtttatttattttaatttatctgtttttgcttttttagattatttggagtccagttcactgaatttttatgtggttttgggttaaactgttactatttgctgctgttatttgaataaatactatttgaagagtagggagtagggaatgggaggttggaggatgcatgataaaggctttaagcctttgaggtagatacgaatggagtttaagtggtacgaggcagcactttgaagaattgtttagagataaagacaaagcagtacttaggttggaagctgagtttattccagattatcaactcaatggatttgatgttaacattttgtcaacaatccacgcaaaggtgaagaaaccaatatcttttataaaacctgttcccaataaaccaacttttttattaaggaatgaggattgagggatgtatttagaagatataatactaatttagtgtgatatgcataattttggtttttaagctggtgttaattgtttggtaagtgtattaaaatgtctaaatagtaatatttggaagtttgagt

SEQ ID NO: 10652 - DNA, 941 bp, Glycine max
  Clone ID: 700956458_FLI
ctcgatggcaaggtccttcaagttatgcgcccttaattctacctcagggagtggtttcagtgcctgggtggagtgcatacagtggtcaaatggggtcaatctctacttcagacagtccacagcaagcaatgagaaacggtcaaacatatggaacttctcgtcaaggtgagcttgcaggatcacaaggggcatattctcaattccgttctggcaccgttcctgtagggttttatacattgcagagggagaacatatttcctgagagacctggtcagcccgaatgccaattctacatgaagacaggagattgtaagtttggcgcagtctgtcggttccaccacccacaagagaggctagttcctgctcctaactgtgtcttgagtcccataggccttcctttacgtcctggagaacctttgtgtgtcttctattctcgttatggcatatgcaaatttggcccaagttgcaagtttgaccacccaatggaaattttctctcataatatctctgcatctccttcagctgatgccccaagcaggcatctgttaggatcttcatctggaactgctgcgttaaatttatcttccgaaggacttgttgagtcaagctcagcaaagcccagacggctttcattatcagagacaagacagattccttctggtgatgatgacatcgatgatgatggatgatgatgtctcttgaaaatgggtcatttggcttttacaatttttttctgaggggggaaatgattaatctgtaaattgattttcccattgctggagatgtacagaggtcatgtcaggttgattctgtcattctgaaattaaatgcagttgacagattcaattattctggatttcatgttacctggctgatttgataaatttaagcaaatgttgtcacgtttggtcaatcccaacgtgaacaatccttctgtcctt

SEQ ID NO: 10653 - DNA, 1063 bp, Glycine max
  Clone ID: 700956625_FLI
ctgcttttgtctcctgcctcccacatttcaccaccccctttatccttatctcctctcttcattgttctgctcttccccttaacaaacaataactctatttaaagcacacacaaagggatcatatatcttggttgcaccttggtaaggtgagaaaatatggcatttgcaggaacaactcagaagtgcatggcttgtgacaaaacagtttatctggttgataagttgaccgcagataaccgagtgtaccataaggcttgcttcagatgccaccactgcaaaggaacactcaagctcagcaactataactcttttgaaggagttctttactgcaggccacactttgaccaactgttcaaaagaactggtagtcttgacaaaagcttcgaagggacaccaaaaattgctaaaccagaaaaaaccggggaagagaaacctgcagcaaccaaagtctcaagtatgtttggtggaactagagataaatgtgcgggttgtcagaaaacagtgtatcccactgaaaaggttaccgtgaatggaactccttatcacaagagttgtttcaaatgcactcatggagggtgtgttattagtccctccaactacattgcacacgaaggcaaactctactgcaagcaccaccacatccaactgatcaaggagaagggcaatttaagccaacttgaaggtgaccatgagaagagtacagaggaagagaaaatcaacggtgaagtggttgcagctgagacatgaaatgaaatgaaatgcttgagttatgacaaatgaatattctcttcctcaagttccatatttctgtatcatgtgtttgtgctatatctcctgctttatcattatggagtccataatgctcttgaaaaatatggtaatccctttttttttttgtggtcggggacttggggtgtgtgaaaatccgtcattttgttttctgttgctgtgaggttgtggatactaaaaatgagacttaatggcatgcgattctgaatgtgattcagaagccagtgctactgaatttgtatgaactctcttttgtattcatattgatacatat

SEQ ID NO: 10654 - DNA, 1450 bp, Glycine max
  Clone ID: 700956765_FLI
aaatgcccttgacaattcttctctaaactcggaagcaaaacaaaaagccatagctatgagtggtgaagcgcgatcctgtgactactgtggccactccacagcacttctttactgcagagccgattcagcaaaactctgtttctcgtgcgatcgcgaggttcactccaccaaccagctcttctcgaaacacacgcgcacgctgctctgcgacgcatgcgatcattcccctgccaccatactctgttccaccgacacctctgttctgtgccagaactgcgactgggagaagcacaaccctgcgctctccgattcccttcacgaacgaaggcccctcgaaggcttcactgggtgcccttcagtctccgaactcttatccatcgtggggttttcggatttaagcaaaaaatctcttctttcttcgcctcagggaagtggcgctgatgggatcttcggtggagaaattgaagggctttcggatttgtttgtgtgggattctccttctttcgttacgcttgatgatttgatttcttcttctccttcttctcatagctttcaggccatggaggttcctcctctgcccaagaatcggaaggctgcttgtgggcaacacaaagaagagattcttagtcagcttcgggaattggccaagtctgagccattggaccttgaaccatatgtgtcatcggggaacttgtcctcgggttttgaacgtgaaccagaggctgatatctttccttctcatgagtggcatagagaaagcagcgagcctatgtatcaggttgttcctcctgacccattaatgagaacttatacagaagaaattccatttaaacattctacttctgctgttggggaaactcaaacctacggtgacaatggaggaaaaccatccatttctcttaaatctgaaaccctatcaactactcccaaagctgcagcatgtgagttaacaagccaagaaagagattctgcattattacggtacaagcagaagaagaaaactaggagatttgacaaacacataaggtatgaatcacgaaaagttcgggcagaaagcagggtaagagtcaagggtcgatttgccaagatggaacatgaacattgaaatcatggtaggctgctatgacatcataactataattcccagctcaaatcacatgcactatgtagcatatcccttgtatagtgaacttaacaaaattttccaagtgatgtattctaggattcagagctaggatataaggcagacatattcttgcagtacagtagtgtttttatcatcctttttgcttcataattgactgcacctgaggtagacaaatatgtgcagtattctgtaaatcagaatcaaatttactggggtctttggccttggattgtgtttggagagtatcttgtggacgactgagaattttttcttcttgattatcaaataataataataataatt

SEQ ID NO: 10655 - DNA, 2009 bp, Glycine max
  Clone ID: 700957069_FLI
caattattgtcgtaactattactcactctaatattctcatactcacagctactttatcatttttctccctttcttttcttcttctgttcagcttagacactcatttttattagttttgttgctgagtgtgtgtgaaactgtgaaagagagttatggcaggaggtggtggagctccagcacctaagattgatgagccacaacctcatcccccgaaggatcagttaccgaatgtttcttactgcagtacgagtcctcctccatggcctgaggccatacttcttggttttcaacattatcttgtgatgctcggtacaactgtgctaattcccactgctcttgttccccagatgggaggtggcaatgaggagaaggcaaaagttatccaaactctactttttgtagctggaattaacacattgctgcaaactctgtttggaactcgattgcctgcagtaattggagggtcttatacttacgttgcaacaacaatctctattattctttctggtcgattcagtgatgagccagatcctatagagaaattcaagaggataatgcgggcaacccaaggtgctcttattgttgcttcaactcttcaaatagtactaggctttagtggcctttggcgaaatgttgcaaggttggtctcaggttcttagttcttaagtccactttcagcagttcctttggtatctcttgttggttttgggctttatgagttaggctttcctggggttgctaaatgtgtagagattggactgccagagcttatattactagtatttatttcacagtttgtacctcatgtgctacatgcaggaaaacatgtcttcgatcggttcgctgttttatttacaattgcaattgtatggttatatgcttatctgctcactgttggaggggcatacaaccatgctgcacctaaaacacagtcaacctgtcgcactgatcgatctggtttaatagaatctgccccatggatacgagttccttatccatttcaatggggagcacctacatttgatgcaggtgaagcctttgccatgatgatggcatcctttgttgctcttgtagagtccagtggagcttttattgctgtctatcggtatgcaagtgcaacaccattaccaccatctattcttagtcgcggcatcggttggcagggagttggcattctgttatcaggattgtttggaactggcaatggatcctctgtatctgtagaaaatgctggtcttttggctttaactcgtgttggcagtcgaagagtggtgcaaatagcggccggttttatgattttcttttcaattctcgggaaatttggagccgtttttgcatccattccacctcccattgttgctgcactgtactgcttgtttttcgcttatgttggagcgggaggtctaagttttcttcaattctgcaacctcaacagttttagaacaatatttgtattaggctactccatcttcattggcttgtctgtgtcgcagtacttcaatgagtacacagcaattaatggttatggtccggttcacaccaaagcaagatggttcaatgatataatcaatgtcccgttccaatcaaaagcctttgttgcgggttgtgtggcatatttcttggacaacacactacataagaaggaagctgctattcggaaagatagaggaaagcattggtgggacaagtaccgttccttcaagactgacacaagaagtgaagagttttattcactgcctttcaacctcaacaaatacttcccatctgtgtaactgtgcagcttaactaataaaaatagggggtttcatttcatccaaaattgagtcacaagagtctctgaaaggtcgtgatttgactttttctgatatgagattggatcttattacaggttatagttatatgaagtcctcttctgctatagaatattctataacatttgttatattgcttttctttatgtaaatgctgacttggaatttggaaagttgattcactgtagttaagtgccc

SEQ ID NO: 10656 - DNA, 1784 bp, Glycine max
  Clone ID: 700957246_FLI
caaggtcggtgaaagcgagactcaaaccaaaaagtttattgctattaatatatggctttgttttccagtgtcaaattgcattattacaataatcaaatgcactaaccacactccatcacccccatatataccccttctcctctcacactaattaacacactcatcaaaaaacccttctttctttcaggttcattacttgatcagtgtcaaaagggtagttgcaaattgcaatggctaagcatgatgttgagggtggttccttctcagcaaaggactaccatgatcctcctccagcacctttgattgatgctgaggaactcacacagtggtccttctacagggctttgattgctgaattcattgccacattacttttcctttacatcacagtgctcactgtgattggttacaagagccagagtgatgtcaaggccgggggtgatgtgtgtggtggagttggcattcttggcattgcttgggcctttggtggcatgatcttcatccttgtttactgcactgctggaatctccgtcgcgctgttatggtttcatcgcaatgccggaaattgcagacaaatatggccaatgtggcaatgtggttgcaattgaccaaaattatggtcgcagactgttttttaaaatcatagattgttgtagaaatatcaagcatacccccatttagacaattagcattctcggtttggttttgagtgcttatgaaatgatataatggtgttcgtcaaatttaactggcctttcatgtttaataattccccttttctctcaagtttctaagcctccaaactgaggaagctggtgcatttgtgcttcttttcttggttggaagtaaacaaatatccatggcttgatttgtttgcaaattttggtttcctattctgaaaactgtaatttttctatccaatgtagggggtcacataaacccagcagtgacatttgggctcttcttggctcgcaaggtatctttgattagagccataatgtacatggtggctcaatgcttgggagccatatgtggagttgggttggttaaggcattccaaaaggcatactacaacaggtatggtggtggagccaatgaactcagtgaagggtacagcacaggtgttggattgggtgctgagattattggaaccttcgttttggtctacactgtcttctctgcaactgaccccaagaggaatgctagagattctcatgtgccggttttggcaccacttccaattggctttgctgtgttcatggttcacttggcaaccatcccagtaacaggcactggcattaaccctgctaggagcctaggagctgctgtcatgtacaaccaacagaaggcctgggatgaccattggatcttttgggttggaccatttattggagcagccattgcagccttctaccaccaatttatcttgagagcaggtgctgctaaggctcttggatcattcaggagcaaccccactatttgagtcaatttcctcttcataatcatgggtttcaaaaaggagataattggaagcaaaatgacttgatattgtaagaataataatgttattaataatggcaattgcttgtgcttttattgcaagcttttctttgatcctatgtagattaaaggttctttcaagacaagagcctttggtaaataccctttagtattttcaagcactttcctttcttcagtgtgtgttcttttcttttaggtaattaatctcttctactcaatgtattcatgaaaaaaaaaattatataatatccatgcttttactc

SEQ ID NO: 10657 - DNA, 1497 bp, Glycine max
  Clone ID: 700957441_FLI
gtaagtatggtggttatcttagcagcttgagaaaggaatttctaaagaaaaggaaaaaaggtaagctaccaaaggatgcaaggatgatactcatggactggtggaacacacactataggtggccttatcctacggtaattgaaattaatatcatgaagtatatatatagcaatatagcttacgttatattgtgtattgctcattaacagtagtatgtgatctgatttgatgaaatatgccaaattgccaatataaagccaccttgaataatgtatgtccatcagcaatgatttgaaatccatagtttgtaattatggtcaagttgtgtgttatgttaaccctgcacaaaacattctaattgcttaattgcagaaaaattgtaacttggtgaattttgtcgccgatttgtatattgtagtgatatagtaattttcttcttaaggtagtccatgactagaggattcataacttgcatatttgtactgtgttccacatgcctagagaattcctattgttttgtaaaggaaaaaaatgtggttttagtccttatactttccacttaaactttttagttaaacttggctttatcctgataatttcaaagtgatgaatttaatcttccaacttttggaaatacgtgaattcagtccctcttcatgttttaacttgaactttttgaggtggattttagcctctaagaagaagagggactaaatttacatattttctaaagttggagaactaaatcaattgaaaagtatgggaatcaaaaccatgtttgaatgagagtatagagacaaaaaacgaatatttttcccttttttatatatttctagtagaggatgaactctacaaagttttgtatgaacttctgaatttaatatgcgagcatgggtaatttcatttttgttagttgcagaaaatgaggatgaaattgggtaattactaattaagcatgcgtgcttaacttaaatttgcacatgcaacttaccctgagccctggtggccaattaatcaatcaagcacagtttccatttaaatagacattgccaaatcttatataaatgccttgaaactaatcatttgttaggaggaagagaaagtgcagctatcagaaatgaccggacttgatcaaaagcagatcaataattggttcatcaatcaaaggaaacggcattggaaaccaacagaggacatgcgatttgccattatggatggtgtaagtggcagtggcttaggaggacctatgtgatttatttctcgagatggaccgtgttgattcccaatacttgtatcttctgctcgtgtgatgtgtgtataccttctattccgcgagatattaattttttgaacctacatttgtatgctaagtaggtccttcagctatatatatatatatatatgcaagtgtaaaaaactgtagctaatatacgcgacgacagtgataatcgatcaatgttactgaatcattatttcatggcaatacgttatactatt

SEQ ID NO: 10658 - DNA, 1021 bp, Glycine max
  Clone ID: 700957594_FLI
gtagtgaagaaaatgaaagtccttgttttctttgttgctatagttctagcagcatggcattgccatggctcagaccatgaccatgaccatggccacacctaccaaattttccctctgagaatgaaaactggccatggtggccactacattccggaggtatcatgccaaagttggaggcttggtgtggaagcacacaacgtcattgactggaaaaccgttcctcaagattgcgagggatatattgggaactacatgcttggcgaacaatatagatcagactccaaaatagttaaccaacaagcttatttctatgctaaaaccctcaatatcactgccaaaaccgcatgggtgttcgacatagatgagactacactctctaatctcccttactatgctgaccatggatttggggtggagttatataatgaaacatcgtttaataaatgggttgaccttggcgaggcaccggcactgccagagagtctcaaattgtacaagaaactgttgtctcttggcatcaagattgtattcataacaggaagaccactggatcaaaaggctgtaactgctaccaacttaaagcttgctggatatcacacatgggaaaagttaattaccaagaatacatctgaataccatggtaagacagcagttacatacaaatctactgagagaaagaagctggaggaaaaaggatacaaaatcattggaaacattggagaccaatggagcgatctattaggaaccaacacaggcgataggacctttaagttgcctgatcccatgtactacattagttgaggtctctagggctcttactagcatgttcctatgaataaaataagatgcatgttgtaataatggagagatcgacttaaaccaaggagcactcgttaattaattgctatgtatgtgactttgtgtgagacaaaaggtcacgtggtaagagactgtacaagcacaacggtgttttatctttcgtggttttaataaatcatgtgtgctataattccgttaattt

SEQ ID NO: 10659 - DNA, 1233 bp, Glycine max
  Clone ID: 700957611_FLI
gaagaattaaaaggaattgaagaagatccaagataggttcatatggagaggtataccatgctgactggaatggcacggaggttgctgtgaagaaatttttggatcaggatttttcaggcgctgcattatcagaattcaaaagagaagtgcggataatgcgtaggctacgtcatccgaatattgttctttttatgggtgctgttactcgtcctcccaatctgtcaatcatttcagagtatctaccaagaggaagcttgtaccgaattcttcatcgccctaattgtcagattgatgagaaacgaagaataaaaatggctctggatgtggctaggggcatgaattgcttacacaccagcacacctacaattgttcatcgagatctaaagtctccaaatcttttggttgataagaactggaatgttaaggtatgtgattttgggttgtcacggttgaagcacaacacttttttgtcatccaagtcaactgctggaacgccggaatggatggctcctgaagttctccgcaatgagccctcaaatgagaaatgcgatgtttatagttttggagtcatcttatgggagcttgccactctaaggttgccgtggagtggaatgaatcctatgcaagttgttggtgccgttggtttccaaaaccgtagacttgatattcctaaggaagtcgatcctatagttgcaagaataatctgggagtgttggcaacaggatccaaatttgcggccctcgtttgcgcaactcacagtggctctaaagcctctacagcgtctggttatcccatcttatcaagatcagttagctccacctatgccgcaggagatttctgtaaattccaccccctgaaatgtctcgcttcaagtgtgaataattagaggcattttgcatagttatgtgcgtataaaggtaacatgaacacaataaaaggggaaaaaaaatatcaaaacttgtaacggcaatgtttgtgttgaggaaaatatcaactgctactgcaaccaaacaactgcagagccattttgtatttgtgatgataggttgtccgaggaaccaaaactcggtaatgtgtaaattactgtacttgaaagcaaaaaagtatatacttttgcaaaagtacgttttaccgggaatgtctagaatttggccaagcagtatgtgctcaagctttaatgtggtgacgaagctcgtatactaacgaaaatgtcttcaacattttatttgagtc

SEQ ID NO: 10660 - DNA, 1056 bp, Glycine max
  Clone ID: 700957617_FLI
ggatggcttcggtgtcaacacctacacccttatcaacaaggccggcaaagcactctatgtcaaatttcattggaagaccacctctggcgaaaagtctcttttggacgacgaggccatcagggttggaggatccaaccacagtcatgccacccaggacctttacgattcaattgctgctggaaactatcctgagtggaaactctacatccaaacattggatcccgaaaacgaagacaggcttgactttgacccccttgatgttactaagacctggcccgaggacgttttgcccctccagcctgttggccgcatggtcttgaataagaacattgataacttctttgccgagaatgaacaacttgcattttgccctgccattattgtacctggtgtatactactccgatgataaattgcttcaaactcgcgtattctcctatgctgatacccagagacacagacttggaccaaattatctgcagcttcctgctaatgcccctaagtgtgcccatcacaacaatcaccatgatggtttcatgaatttcatgcacagggatgaagaggtcaattacttcccttcaaggtatgatcctgtccgtcatgcggaaaaggtccccgttcctcctcgtatcctaggtgggaagcgtgaaaagtgcatgattgagaaggagaacaacttcaagcaacctggggagagataccgatcctggccctctgacaggcaagaaaggtttgtccgccgatgggttgatgctttgtctgacccacgtgtcacccatgaaatccgtagcatctggatatcatactggtctcaggctgatcgttctcttggacaaaagatagcatctcacctgaacttgaagccaagtatctaagattggtggtggaaaccctagcttctaagagatgcagatgtaggaacaagtgagaagtttgtggcacagtattaatttgaaaggactggtccttttattacagtattgctatattgtatattgcttatttcatgaactcaacttcttgacttgtccacttaatactatatgtccattgtgat

SEQ ID NO: 10661 - DNA, 947 bp, Glycine max
  Clone ID: 700957658_FLI
ctcccctcttccccacccaaccttctctctatcacacacacaagtcaatggataaaaaacaacagtgtaagacgtctcaagatcctgaagtgagaaaagggccttggacaatggaagaagacttgatcttgatgaactatattgcaaatcatggggaaggtgtttggaactctttggccaaagctgctggtctcaaacgtaacggaaagagttgccggctaaggtggctaaattacctccgtcctgatgttagaagagggaatattacacccgaggaacaacttttgattatggagctccacgcaaagtggggaaacaggtggtccaaaattgccaagcatctacctggaaggactgataatgagatcaagaactattggaggacaaggatccagaagcacatcaagcaagctgagaactttcagcaacagagtagtaataattctgagataaatgatcaccaagctagcactagccatgtttccaccatggctgagcccatggagatgtattctccaccctgttatcaaggaatgttagagccattttcaactcagttccctacaattaatcctgatcaatccagttgttgtaccaatgacaacaacaacattaactattggagcatggaggatagctggtcaatgcaattactgaacggtgattaaatattatcaagataaaacctaagttctgaagttccataaggctggaatgtctctggattaaaacatattattgggtttgtttatataagtagttggatgtttggttttgcgtaccattattagctatgtgctgtaatatatacgagatcttatattaaactatatctgcatgctttatatatattttaaatgaggtgctatgtgcattgtagaagatacagttaagaaccacatagttcaaaacacttaatatatttccagtggcatgcttgcttacct

SEQ ID NO: 10662 - DNA, 618 bp, Glycine max
  Clone ID: 700957675_FLI
ggaggtgccgaagatgaagtcgactgtgccggagatgacgcagttgcggtagaacatggctacaggaatcgtgatccagggttgcaacatcgtcccagaagccgaacttttccctacaaggttccaagtgaagtcataccttggaaggccatggaagcaattctcaaggacggttgtgatggaatccaccgtgggtgacttccttcaccccgaaggatggtgcccatgggccggtgaacacttcgaagacaccttgtactatgctgaatacaacaacgatggacctggtgccaacgttaacggaaggatcaagtggaagggttaccgtggtcttattagccgcgaagaagctacccaattcacccctgcccagttcctacaggctggagccaacggtggaagcgactggttgaaagctctccgtgttcctcacgcacttagcttcatgaaggcttaattgaaattacacaaacacatatccatgcatcatcaattgagtactgttagagagtgtgatgatgagggtcatagtccgtagacaatttgttattctttgtatttatctttggaggtctaccggaaatatttttaatgaaaatttttaaaattgctttgatt

SEQ ID NO: 10663 - DNA, 765 bp, Glycine max
  Clone ID: 700957709_FLI
gtagagtggacaccctcattgacaaggcccttgagaaaattggcaccccagtggcccttaatctacgcgggaaggcagcggtagcccaagcagcattggcttaccagctctaccaaaggaaattttctggtccaaggtgggaagctctagttaaaaagggggccaagaagcaaaggctcctctgggcctcaaccagtgtaaagaatcctgcctattctgacaccttatatgttgctcctcttattggacccgacactgtatcaacaatgccagaccaagcccttcaagcatttatcgatcatggtaccgtatccaggacaatagactcaaatgcatctgaagctgaaggaatatacaatgctctccagaaattgggtattgactggagctttgttggttcccagcttgaacttgaaggagtggactcgtttaagaagagctttgacagcctcctggattctctgcaagagaaggcaaactctcttaagttggtcagccattgaagtgtgaacgtcatagttagtaatgcagtgctatgtatgaagtgatttatggattaataaaaggcagtggctgtgcattttgtgctgctgtaaatgtgctttatggagtcatttatttagacgatagtgatacaatataaatgggaaattgtccgcttcaagtaaagcgttttgttactttcccactattcaatggttgtgcggttttattcgtgttgatgtcaattatgtttcaaagtcttacattttagttcgaattttt

SEQ ID NO: 10664 - DNA, 2255 bp, Glycine max
  Clone ID: 700957918_FLI
ggacgaaccaggtgacgaagaagagttcaggaggtgcacccgaagtgcgtcaggggggtggaggtgcaaggagagggctatgcgaggaagaagcttctgtgagaggcattttctgtaccagcagcagagaaataggagtgcgaagaagaaacgtgcttctgggggtgttggtgtgccccagaaaagaggaatgaaacaaagaaaaaaacctgaaggtgatttggaaaatggggttgtgggtgctggagttgttggcgccgatggtgatggcgccgatggtgatcacactggtggtccccatgttgttgaggaatttgctgggctttttggtgaagggcatgatggtggggtgaatcttggcttgggttgtgaaagttttgacctttggggtgaagtagagggtcagcatgttcatatgggtggctttgggggaggatgtgggaaactgggtcaggttgaagggcaggttctaggtcagccatggagcaatgcaaatgctggtggtggggtttttgatgctgttctgggaggtcatgcaagtggagctggtgtgggtgtttgtgaaaatgattttctggacctttcttctggaggtctagaagctgattttgatagtctttatgatcagggttttcaagctctactttgtcaaggtgggggctgtgaggaagatgtgggtttcattggctctgattgggccattcccaactttgcagctctcggtggtagcacagggtttcaggggttgagtggtgaaaatgcataccagtttagaggtgaagaagttgctgggtgtgtgggaaatccaggagggtatggtaaagttgaagatgacagttttggtggcatagacgtgccggggtcaaatagcaggcaccatggggataatgcatcagatagcaagatgcttgttcttggtgttgaagagggaatggaacgattgttagatggaggacttgccagcagtgaagaggcaaaaggtgtagccttcaggccagtggctaggaggggtaggcctaaaggttccaagaataaggataaacagtttcacaccaccttgaacagacagagtgttggtgaaaatgttaaaggaggaacaaatgggatcagtagtgtcacagtttcagggtctgtctttaaagctgttgatgaaggtgcagtcctgggtgagattgcgaggccaaagaagcgtggtcgacaaaacggtttaaatacagtgaataatgtcacaattttagagtctgaaagatctgtattttctgttgaggaagataaggcaggtgatgaaggtgtgggtctgggtgagattgtgaaaccaaagaagcttggtcgacgaaagggttcaaataggataagtaatgtcacagttttagagtctgaaagatcattgttttctggtgaggaagataaagctgaggatgaagttgcaggcctgggtgagattgtgaggccaaagaagcgtgatcgaccaaagggttcaaataggatgagtattatcacagttttaaagtctgaaaggccattgctttctgttgaggaaggtagtgccgatgatgaaggtgcaggcctaggtgagattgtgaggccaaagaagcgtggtcgaccaaagggttccaggaataaaaagaatattttgcatgtaagtaataatgttgttgtcatgtttgcaggacccaagaagcttggtcgaccagaaggttcagaaggaagaaagaagagtgtagtgttggttggtaataaggttgttggtgagattgcaggacctaataagtgcggcaagacgaagggttcaaaaaataaaataaagaatgttgttgaggttggtaatgaagttgctggtgctggtgagattgcaggacctaagaaacatggtcgaccaagaggttccacaaagataaagaagaatgctttggaggttaataatgaagtttctggtgctggtgagatcacaggatttaagaaacgtggtcgaccaaaaggttcaacaaagaaacggtatactgttgtgtacgcttctagtaatgaagtggcatgtgaggttgcaagacaagatctggaaaacaaaatgctgagcaatctgtgtcaaaaagtttctgatgaacttgtaagcataaataataaatatggtccagcaatgagtacaagaagtaactcgaggagttttgtatttgagggtcagaagtttccagggatgtctaatgatattaatttagaaggtgatggtggaagcacaagtgtttggtcaagtggtttgg

SEQ ID NO: 10665 - DNA, 2445 bp, Glycine max
  Clone ID: 700957932_FLI
cacacaaactctctctgactagtgatatctatccatggaggccaagaacttgtggcgcttcctggttctttcaatcggtgtggtactagttttacttgtcacttggctgcccaacaaggaggctctagactgcaacctttactctggatggtgcacctcaaagaaccggttctactcttcagcacatcctaataatccgattaagaaaccatcattttccacatatcatcatcacaagaaccaacaccatgaatccgagattcctcaacaccctcttgaccctctaaccatccaagagttcaacaaggtccgcaccatccttttgaactaccctctcttcaagtcctcatccagctacactctcaactccgttgtccttgaagagccagacaaaaaacttgtcctcaaatggaaaaagggtgatctacccttgcctaggaaggcttccgtggttgcatatgtgaagggagactcacatgtgctcacggtggacctcgaaaccggccaggtggtgagccaggaagccatcacctggtcggtctcgggttaccccaccatgaccctagaggacatggtgggagtacttgaggttcccctcaagagcaccgaattcaaccgctccatcactaaacgcggtgtcaatttagcagacctggcatgcttgccaatctcttcagggtggtatgggacacaagtggaggagaatacaaggttgattaaggtgcagtgctattccaaagaaggcactgtgaacttctacatgaaaccaattgagggtgtgactgccttggttgacatgaataaaaaagaggtgctgtcaatttcagataatggccaaaacatccctgtggctaatggaattaacactgactaccgttactccattcagaagctgaatggaggagagttgaggatgctgaatccaatatccttggagcaaccaaaaggtccaagcttcacaattaatgggcacttggtgaaatgggcaaactgggaatttcatctgagaccagacccaagagctgggatcataatttcacaagccaaggtgagggaccctgacacatcaaagctgagaagtgtaatgtacaaagggttcacctctgagctatttgtgccatacatggatcccacacaagattggtactttaagacatacatggatgctggtgagtatggatttgggttgcaggcaatgccactagaccccttgaatgattgccccaagaatgcttactacatggatggtgtctttgcctcttccgatggaacaccatatctccaacccaacatgatttgcatttttgagagttatgctggtgacattgcgtggcgacatgcagagtgccccatcactgacctcaaggttacagaagtgaggccaaaggtgacactagtggttaggatggcagcagcagtagcaaactatgactatatcgtggattgggaatttcaaactgatgggctaatcagagcaaaggttggactgagtggtatcttgatggtgaaaggaactacctatgagaatatggatcaagttcccaaccaagaatatctttatggaacccttttgagtgaaaacattataggtgtaatccatgaccattttatcacatattacctagatatggacgttgatggctctgacaattcatttgttgaggtaaacataaagaagcaagagacctctccaggagaatcacccagaaagagttatctaaaagctgttaaaaaagtggcaaagacagagaaagatgctcaaataagacttcaactctatgacccatcggaatttcatgtggtgaacccattgaagaagacaaggatagggaaccctgttgggtacaaattggttccaggtgccacagcagctagcctgctggatccagaagatcctccacagaaaagagcagcttttacaaacaatcaaatatgggttactccttacaacaaaagtgagcaatgggctggtggtttatttgcttaccagagcaaaggggatgatactcttcaagtctggtccaacagggatcgtccaattgagaataaagacattgttttgtggtacacaatagggttccatcatataccctgtcaagaggactatcctgtcatgcctactgtatcatcaagttttgatttgaagcctgctaatttctttgagagaaatccaatccttggagtccctcccaatttcgaagatgatttacctgtttgcaaggctcgtgattcagcttgagatcccatcagttggtttttagtctaattagatacatgctttatttatgcatgtagcaaatgatgatgcccaaactgaactttaaacctaacttaaagtaaagagggtctagttctgttgattaaacagaatgtataaatattgtaaaaccttttgataccatgtttaattcttatgtataagaaaaattatgatgttaaaaatct

SEQ ID NO: 10666 - DNA, 523 bp, Glycine max
  Clone ID: 700957937_FLI
actcaacaagcttcgaaccaaatcttattgagaaaatgtctggtcgtggaaagggtggaaagggtttgggaaagggaggtgccaagaggcacaggaaggttcttcgtgacaacatccagggcatcacgaaacctgcgattcgtaggttagcgagaagaggtggcgtgaagaggatcagtggtttgatctacgaggaaaccagaggagttctgaagatattcttggagaacgtgattcgcgatgctgtgacctacactgagcacgctaggaggaagacggttactgctatggatgttgtttatgctcttaagaggcagggaaggaccctctatggttttggaggctaaaaagttcttagtgttattggattctattgcagcgaaaaaatacctgttcttttgaatcggtgtgatgttttggtttaggtttgttctgtaagatatgaagtttattctgttctgttctgcatagaaaatgtacaactttaattgaaattaaacgaaggagcaacgttttcgtgctt

SEQ ID NO: 10667 - DNA, 1467 bp, Glycine max
  Clone ID: 700958269_FLI
gtcatctcgtcgagtattggctagtttggataagaaacccgaaaccaccgatgttttatcagcctcaaatgaatcccatttttatgttctcatcactttggaggcagtcgtggacaagcttggtggatttttaaatccatatctcacaaatatcatggagcttctggtgctttatcctgaatatgtttcaggagtagatgcaaaagtggagtctagagctcatggagtacgaaagcttcttgctgaaaaaattcctgttcgacttgccctgccacctttgttaaaattatacccagctgccattgaggctggggataaaagcttaacaattgtatttgatatgttgggaaccataattggtacaatggacagatcatctattgtggcattccatggaaaggtatttgacctttgtttggttgctcttgatctgcgccgtcaaagtcctccttcagttcaaaacattgatgtagtggaaaaagctgtgcttaacacaatgactgttctgaccctaaaacttactgagagcatgttcaagcctcttctcataaagagtattgagtgggcagaatctgaagtggatgaaactgcctctagcggaagcattgatagggtcatatcgttctatggcatggtaaataagcttacagagagccatcggtcattgtttgttccttacttcaaacacttgcttggtagttgtgttcatcatcttagtgaaggtggagatgtgaaagtgtctagagtgaatcagaagaaaaaggccaggattctggatgatggcaatataaaagaaataggcagtgtgtctatcaatgcctggcatctcagggcactagtcttgtcatccttacataagtgtttcctgtacgacactgggaccttgaagtttcttgactcctcaaattttcagatgttgttgagacctattgtttcacaacttgttgtagatccaccagcactgttggatgacagcattaatataccaagtgtgaaggaagttgatgacctactggttgtatgcattggtcaaatggcagtgactgctggatcagaccttttgtggaaacctttgaatcatgaggttttgatgcagacacggagtgaaaaattgcgagctaaaatattgggcctcagaattgttaaatattttgtggagaacttgaaagaagaatatctagtgttcatagctgaaacaatccccttcctcggtgaactgcttgaggatgtggagctttcagttaaatctcttgctcaggaaattctgcaggaaatggaatctctgagtggagaaagccttcgccaatacctatgacgtagattaggagagccgtattcatggttttgtgacatgagcaaagagctagagatgtgtaatcaaacaaaaaatataatggataggccagtgtaaactgtggttaatcaaggaaaattagcatttatttattctgataaaggttaaagttc

SEQ ID NO: 10668 - DNA, 1069 bp, Glycine max
  Clone ID: 700958281_FLI
aagcatttgcccaagagcgcgttttttattctcaatatccttcttcttgttattattattattgttattgttccttgttgttaacatatattaataactctttcttaaacccaaatcttgtgacatcacaaaccgtaccctttttgtttatttcctttgtgggttttcaattcgtgcaaatttctgcgacacccagatggattttgcgctgaatccgtgtcctttgcgatcttctacgttcgtgaatttcgtcgagagggttaaacagcttggtaccctcgccttttctgcagtcattgggaacatcttctccgcgatcttgaccttctgcttcgcattagttggcactttgttgggggctttgactggagctttgataggacaagaaactgagagtggcttcattcgaggggctgctgttggtgccatatcaggagctgttttttccattgaagtgtttgaatcctctcttgttctctggcaatctgatgaatctgggattggctgtgtcttatacttgattgatgttattgccagcttactgagtgggagacttgtgcgtgagaggattggtccggccatgttgagtgctgttcaaagtcagatgggtgctgttgaagccagctttgatgaggttcaaaacatcttcgacaccgggggttccaaaggtttgtctggagatttggttgaaaaaatccccaaaataaaaattacaacagacaacaattttgatgcatccggtgatagagtctcttgttcagtttgcctgcaggactttatgcttggagagacagtaagaagcttacctcattgccatcacatgtttcacctaccttgcatagataagtggctcttcagacatggttcttgcccattatgcagaagggatctgtaattttgtatatgcttagtacagaccgctaataatgtccctattttatttttgtttttgtttataagcttatttaattctaggacttacatctagtgggagccattgcagtttgagtggtatcattgtactaaattagtgtaaagaaaattttgagatgaaacagcttccacttgt

SEQ ID NO: 10669 - DNA, 1959 bp, Glycine max
  Clone ID: 700958579_FLI
ccctagggctttgagaaaaccacattgcccgaaggccaataagcaaacgcagggaagaaaaaaagaaaaaagagtttcataataatcataagctgttagagatgaagaatggactcgacaccacccatgagaagaagaagaggaagctcgccattctgagcgtgtcttccctcctcctggtggcgatggtggtcgcggcggccgtcggcataagagaaggcgccgatgtggtcgaggaaggcggcgactcgatcgtgaaatctcaaaggaacgtgcaagtgatatgcgaatccgcggaatacaaagaaacatgccacaagagtctcgccaaagcttccgaaacttccgatctgaaggagctcatcataaccgcgttcaacgccacggccgaagagatcgcaaagcaaataaaaaactcgacgctctaccacgaacttgccaccgacgacatgaacaaacaggccatggacatctgcaaggaagttctaggttacgctgtcgatgacatgcaccaatccgttcgcaagttggaagagtttgaactaaacaagttgaacgattacgcctatgatctcaaggtctggatcgccggtactctcgctcaccaacagacatgtttggatgggttcgagaacacgaccaacgaggctggcaagaccatggctagggttctcaacacttctttggagctcagcaacaacgcattggacatagtgaacggtgtatcgaatctcttcaagggtcttaacttgagttccttcagcaacaacaacaacaggaagcttctatcggaggtagatgggttccctacgtgggtgagtgaaggacagaggaggcttcttcaggctgcggacgccaaagcggacgttgttgtggctcaggatgggagtggacaggtgaagacaattcacgaggctcttaaattggtgcctaaaaagaacaagaagccttttgtcatttacgtcaaggccggtgtctaccaggagtatattatgatcaacaagcacttgacccatgtcaccatgatcggagatggccccaccaagaccagaatcaccggcagcaaaaactacgtcgatggcatcaaaacttacaacaccgctaccttcggtgtgaacgctgctaacttcatggcgatgaacatcgggttcgagaacacagcaggagctgagaagcaccaagccgttgccctgagggtaacagcagacaaggctgtattctacaactgcaacatggatgggttccaggacaccctctacacacaatcccagcgtcagttctaccgcgactgcaccgtcacgggcaccatcgacttcgtgttcggcgacgccgtggccgtgttccagaactgcaagttcatcgtaaggaagcccatggagaaccagcaatgcatggtcaccgccggtggaaggaccaagatcgacagccccagtgcactggtcttccagagctgcatcttcaccggcgaacccgacgtgtttgccttgtcccccaagattgcttacttgggaaggccgtggagggtttacgctaaggttgtcatcatggactcgcaaatcgatgacatctttgtccctgaagggtacatgccgtggatgggaagtgctttcaaggacacaagcacctactacgagttcaacaacaggggttttggtgctaacactcaaggtagaatcacgtggcctggttttaaggttatcactcccattgaagctactgattactacccaggaaaattctttgagatcgctaattcgactgagcgtgattcttggatcgttgggtctggggtgccctactcccttggcccaattattgcgctgcctttgccaacagcttaattcatggtctttttttaatgactctaatagaatatacatgtagctacatatccctgctgcatgcctgcatctgcatgccctttttgacattgctatatatgtctgccagtatttaagg

SEQ ID NO: 10670 - DNA, 871 bp, Glycine max
  Clone ID: 700958586_FLI
gaaagatccagatcaagaggatagagaacaccaccaaccgccaggtcacttattctaaacgacggaatggccttttcaagaaggccaacgagctcaccgttctatgcgatgccaaggtttctattattatgttctccagcactgggaaactccacgagtacatcagcccctccacctcaacaaagcagttcttcgatcagtaccagatgactctaggagtcgatctctggaactctcattacgagaatatgcaagagaacttgaagaaactcaaagatgtgaataggaatcttcgtaaggagattaggcagaggatgggagattgtctgaacgatctgggcatggaagatctcaagctccttgaggaagaaatggacaaggccgccaaggttgttcgtgaacgtaagtataaggtgataacaaatcagattgacacccaaaggaaaaagtttaataacgagaaagaagtgcacaacagactcctgcgtgacttggatgcaagagcagaagatccacgttttgcattgatagataatggaggggagtacgagtctgtgatcggattctcaaatttaggtccacgcatgttcgcattgagcctacagccaagccatcctagtgcccaaagcggagcagcaggctctgatcttaccacttaccctttacttttttagtacgcaagcttaagcagctcgatctcttcatcaatcagaaataccacattcactcaaatttcaataagaatatgacttgtgatcgatatcttaagttatgcacccgtacgtgcagtttgtacttaaccacaaaacaatctcacgaatcttctcttctcggtcgatcgcatatatgcatgtgtgaattattcagttgc

SEQ ID NO: 10671 - DNA, 598 bp, Glycine max
  Clone ID: 700958668_FLI
ggaaggttgcttgtattggtgcctggcatcctgcaagagtttcattcactgttgccagggctggtcagaatggataccaccaccgaactgagttgaacaagaaggtttacaagcttggcaaagctggagatgaatctcactctgctcttactgagtttgataggtaagtgttttgttgattatggttttgtgcaataaatttagcaggaagtattttgtttgtaagtcaaactaacccctctacttgttttctgattcaggaccgagaaagacattaccccaataggtggtttccctcactatggtgttgttaaggatgattatatcatggtcaagggatgctgcgttggtcccaagaaaagggttattacattgcgccaatccctccttaagcagacttctcgtgttgctctggaggagatcaagctcaagtttatcgacacctcttcaaagtttgggcatggtcgcttccagaccacacaggagaagcagaagttctttggacgcctcaaagcataattttgttaattggatggaaatgctggatttctattcggttaccatatcttataaacatattgtagtgttttctgttttg

SEQ ID NO: 10672 - DNA, 1064 bp, Glycine max
  Clone ID: 700958917_FLI
gtcttcttctcctttccttaccacagaagaatagtagcaatcagagactgaagacgagcttccccttgcgccgaagggccaccgatggttgaaaccgagatggatgcagaaactgttgcaaatgtggttccaccaaaggagactccaaatagtgtttccatttctcatcattcctcacaccctccccttaatgagaggattatttcatccatgaccaggagatctgttgctgcacacccatggcatgaccttgagataggacctggtgctccaattatcttcaattgtgtgattgagattgggaaagggagcaaggtgaaatatgaactggacaaaaagtcggggcttatcaagatcgaccgcgtgctttactcatcagttgtttatcctcacaactatgggtttatccctcgtactatttgtgaggacagtgatcccctggatgtcttgattattatgcaggagccggttcttccaggttgctttcttcgggccaaagcaattggtctcatgcccatgattgatcagggggagaaagatgataaaattattgctgtctgtgctgatgatcctgagtatagacattacaatgatatcaaagagcttcctccacatcgtttagctgaaattcgtcgtttttttgaagactacaagaagaatgaaaacaaggaagttgcagtaaacgactttttgcctgcctcagctgcttttgaagcggttaagcgatccatgagcttgtatgcggattacatagtggagagcttgaggcggtagccgatgaatgatgcacgtcaaggatttttaactgacggaccaatggaagatatttgcatgaaaaaaggctgcattatcaatattatgtagggataaaaaaaaaacattttactttagctgcctcttagcacatgcgtgttctacagactacacgtgcttaatttcaaatatttcatctctgcactttagccacatgttttatccctgtataattttatattcattagaaagggtagaaagggtgtaatatttttttttgttttttacaagtaggttaaaattattttctc

SEQ ID NO: 10673 - DNA, 1150 bp, Glycine max
  Clone ID: 700958949_FLI
gttctttctctcgcaatcttcactacattcaccggttagataccctctctctctctctctggaaagcatttgcattcacattgaatatggctgagactacacaatctaatgctgagttgttggagtggcctaagaaagataagcgccgcttcctgcatgttgtgtatcgtgttggtgatcttgatcgcaccattaagttttatactgaatgttttgggatgaagcttttgaggaaaagagatattccagaggagaaatatgccaatgcttttcttggatttggccctgaacaatcccattttgttgtggaattaacatacaattatggggtgacctcatatgatattggaactggatttggacattttgctatcgcaactccagatgtttacaaattggttgaagacatccgggctaagggtggaaatgtcaccagggagcctggtccagttaagggtgggaaatctgttattgccttcgtgaaggatcctgatggttatgcttttgagctcattcaaagaccttcaacccctgaaccattgtgccaagtaatgcttcgcgttggtgatttagagcgctcaattaagttttatgaaaaggctttgggtttgagggtggtaaagaagactgatagacctgaatacaagtatactatagctatgcttgggtatgcagaggaacatgagacaactgtgttggagctgacatataactatggtgtcactgaatacaccaagggaaatgcttatgcacaggttgctattggtactgatgatgtatacaagagtgctgaggttgtcaacatagtcacacaagagcttggagggaagattactcggcaaccaggaccaattcctggccttaacacaaagatcactgctttcttagatcctgatggatggaaaactgttttggttgacaatcaagattttctgaaggagctggagtaaagagttatggctttttaatttaaagtactaatgctattgtatgaataagtgatcagctcctgtatttatcagtgaagtagtagtgttcaatacggtttctctgatgtgtttgcctgtttggttgagattctagacagtctacagtgacatccaacagtatttcaatatatttagtaaaagttggagaataattctgatgt

SEQ ID NO: 10674 - DNA, 584 bp, Glycine max
  Clone ID: 700959026_FLI
gtgagctcaagagacaacttgaggattttaatgaatcttcttagagagtcaagcaagagcatacagattgaagcatttcatgttttcaagctatttgctgccaaccaacataagccagctgatatcgtcagtatatttgttgcgaacaaaagtaagatgctgagactattggaagacttcaaaattgataaagaggatgaacaatttgaagccgacaaagctcaagtgatgagggaaattgaagctctttaaacaagggaacaacgacgcacctgaactgcaaattgtgttaagtggcaagttgcaatgtggcatttcactttagcgaattgtgtattgtaatagttctgttagtctttatcacgatatgagaccatccgtttcatacagacttcaatgcttcctttctgtaattttataaccgtcctttaaaattgtagataaataattgcttaaatgagctacattattagtgtctttgtaggtgttagtaataaggtcttccaagctgccgtgtaaattattaattgtgcaaggtcatgcaataatctgacaatcacatttgtttaactaaactgttactc

SEQ ID NO: 10675 - DNA, 1104 bp, Glycine max
  Clone ID: 700959087_FLI
gttattcccaaagccgatacttccttttcaagtcttttctctctctctctctctataataagattcttccctctcccttctctctctctctctagaacttcgtcctccctctgcttctttctttcttagttgcagcgcgattgctgcatcgtcctccaataagagctcgctgctagtgaaccctaacacggcggcaacgagaggtgttcggttgaagctcagatcagcgatggcagcagcaacccgcacttctctgcggttcctcctctcagtctccgtaaccctaactctcgctcacctcgccgcctcaaattccgaaggcgacgctctctacacgctgaaacggagcctctcggaccctgacaacgttctccagagctgggatcccactctcgttagcccctgtacttggttccacgtcacctgcaaccaggacaaccgagtcactcgagtggatcttggtaactctaacctatctggacatttggtacctgaacttgggaagctggagcatctacagtatcttgagttgtacaaaaacaacattcaaggaactattcctccagaacttggaaacctgaagagtctagttagcttggacttgtacaacaacaacatatcaggcaccatcccaccttcattggggaaattgaagaatcttgtctttttacgactcaatgacaaccgactaactggcccgatccccaaggaacttgctgctgtttcaagccttaaagtagtggatgtctccaataatgatttatgtggtacaattcctacctccgggccattcgagcatattccattgaataactttgagaataatcctcgtttggaaggtccagagttgttgggacttgtaagttatgacacaaactgctcgtgaataacgtgatgtggtaggatctcaatctgcgttgaattatatatatgtattacctcatagtgtaatgggcagtggtaaatgtaatctctggtatatgtaaatttacatactgaagggcattggaatttgtaacaatattatgatctgacaatgatgttaagacttgaatatctattgatgtaatactaaaaaaaaaatcgacttggtcactcactgat

SEQ ID NO: 10676 - DNA, 1050 bp, Glycine max
  Clone ID: 700959116_FLI
gatatttctgaccagagtagcgagaagattcataggaagcagatcaagcatttgttccttgacctattcgttgcggggccggtggtggccgtgaagaggttgaaggatgtgacaatttccgagaaggaatttaaggagaagattgaggcggtgggagcgatggatcacgagagtttggtgcctctcagggcttactatttcagcagggatgagaagctccttgtctatgattatatgcccatgggaagcttgtctgcccttttacatggaaacaaaggagctggtaggacaccactgaattgggaagtgagatcaggcattgcacttggagctgcccgtggcattgagtacctacattcacgagggcctaatgtttctcatggaaatatcaagtcatcaaacatcctcttaaccaaatcatatgatgccagagtgtctgactttggccttgcacaccttgttggcccctcctctacccctaaccgtgtggccggctaccgtgcgccggaggtgactgatcctcgcaaggtgtctcagatggcagatgtgtacagctttggtgtgttgctcttggaacttctgactgggaaggcacctacccatgctctcctgaatgaggaaggagtggacctccccagatgggttcaatccgtggttagagaagagtggacttctgaggtctttgatcttgagctccttaggtatcaaaatgtagaagaggagatggttcagttgttgcaacttgcagttgattgtgcagcacaataccctgacaagcgcccttcaatgtctgaagtggtaaggagcatacaagagttgcgaaggtctagcttgaaagaggaccaggaccaaatccaacatgacaatgatatactattatagaagaacatgtatcttctccctcgactttgctttgtcagagtcggagcccatattttacttgctaaatcctgtgcgtatgttgcttgcattctgttggcttgggccgtcctcaaatttctttctttggcaccaaacttttgaattttcttcctttttttttcccccccc

SEQ ID NO: 10677 - DNA, 897 bp, Glycine max
  Clone ID: 700959130_FLI
gttgaaacaatttgcactaagggcattggctagcacacttaatgaaggagagttgtctgatctaaaagatcagtttgatgcaatagatgtggacaaaaatggttctattagtcttgaggagatgagacaggctcttgctaaagatcaaccttggaagttgaaagaatcacgtgtgctagagatattgcaagcgatagacagcaacacagatgggctagtggatttcaccgagtttgtggcagctactttacatgtacatcaattggaggaacatgattctgacaagtggcagcaacggtcacaggctgcttttgagaaatttgacttggataaggatggctatattactccagatgaacttagaatgcatacgggtttgagaggctccattgatccattgcttgaggaagccgatattgataaagatgggaaaatcagcttaccagaatttcgtagacttctaagaactgcaagcatgggttctcgaacagtaatgagcccaagtcaccgtcatcatcgaaagatttagattagatatgtttcggagacagggataattcaggagatgagagtgatggatttccttttaagatgatgatctcttatgcagattgtgctgaagccctccttgtgatatctattctgctgcacattttgcactctgaccatcattatatggaactctgaaactagagttaatattgactatggcataccacacaggattgtgtgttaagcttagtctagacgaccatgtcaagaggaatttaaatagtgtgtggattgacttgaggtatcagagtttcatcggtgtacatcattggcttgtttgtgccatacatgtaatgtgtaatactgtaactataaataaaaaacttcttactccccttccccttc

SEQ ID NO: 10678 - DNA, 1535 bp, Glycine max
  Clone ID: 700959152_FLI
gaagaaaaaacaataaaacatgtcccattttggtcggaaactcagccgctcctccaccgtccggcgacggttccaccaccgcgtttccctgctccagcggtgcctcctccgcgtcctccaccgcatcctcctctgctccgggagcaaggccaccaatgccacgtatagcatgctgccgccggcattgccctctccgccgccgccggtgagctccgacggcgagcttggccgtgaagagatggacctttcttcgtcggcggtgtttcagacccatgacttggactctgatttggtttccttgaagatcagcttgttgggggattgtcaaattggaaaaaccagctttttggcgaaatatgttggggatgaaaaagagcagcaagggaaccagagggaagggttaaatcagatggacaagactttggttgttgaaggagcacgtatatcgtattgtatctgggaagtacaaggtgatggaaaatcagaagaccaactcccaatggcttgtatggactccgtggcaattttgattatgtttgatctaacaagtcgatgcacattaaacaggtatcttctatgttgtgtcacttttaaatttaaaattaattcaagctttttcaagagctaattgctaatataaggtgaatttttcaccattttttgggggtgctttgtgtttccattgtgggtgtttgatttcagtgtcgtgggatggtacaaagaagccagaaaatggaatcagacggcaattccagtgttgattggaaccaagtttgatgatttcattcagctccctattgatttgcaatggaccatcgccaatgaggcaagaaaatatgcaaaggccctcaatgccaccttgttcttttcaagtgcaacctacaacatcaatgtgaataagatcttcaagttcatcactgctaaactctttgacctaccatggacagtggagaggaatctaactgttggggaacccatcattgacttctaaattgtacaatacataaagttttgaagttgagtgatatatcaaagtcaaccgggctccaataggagtgccatgagtccatctcaatcacacttggggcaatagagttgttaggtttggacacatgtcaattcctatgaaaattacaagcctcttcaatcaccaccaccaacaataaggttttatacaaggggaggaataaagggcaagttagaaatagaagaaattgaaacaaaggagaggactataaggttttgtagcataacaagagaagggaactaatgcattattgagtacaaattagtcattaatggtgctcttgtcttgattattaaggaagtgtcctgtgagttactgtcaaaagcacatagaaaatgagattaggatgtaccgaatctccttttgtttcatttttatgcatttctcacccagttttgaagttctggtaatccaaagcttcttctgaataaataaatcattttgtatgattcccttatctgtgtcactcaagtctcagggatctttcaatttaatagaatttaacatc

SEQ ID NO: 10679 - DNA, 800 bp, Glycine max
  Clone ID: 700959213_FLI
tgcaaatccagcggtgtccaaaagaacttcttcaggtccagcagtgggttggcctccaattcgttccttcaggaagaacattgcaagtggaagcacttctaagttgccttctgggtcccaccagcaacatcaaaatgttgttccatacaaggttgctagccaaaaacctactgacaaatctggtaaaggcttgtttgtgaagatcaatatggatggtgtccccattgggagaaaagtggacatcaatgcttatgacagctatgaaaaactttcctctgctgttgatgagctctttaggggcctccttgcagagatgaagttatctcatattggctcttcccaatgctgttctggtcaaagagattcctgtgctggtggaattcaaaacaaggaacaggaagagaaatccaataagggtttattggttggaagtggggaatatactcttgtttatgaggataatgaaggagacaggatgcttgttggagatgtgccgtggcacatgtttgtatcgacggtgaagaggctgagggtgttgaagagttctgatcttcctgcttttacacttggtagtaagcaagactagttacaccacttgacttgacaatgagaaatgaaggatgaagcagcagcttgaggtcttcttccatgctaaaaattgatgactaagagtgtttttatttgacattttggttcctttgaacattgaagattaggcaatgaaatgttcagtctataagtaatgtttgtatgaatgaatgtatcttgttttctttagtgaagttttgaattgtttctgc

SEQ ID NO: 10680 - DNA, 1160 bp, Glycine max
  Clone ID: 700959264_FLI
gtagaatgtaaggaagttgtttctgaatatggagaattgttatgggatctcttggtatcaggggtacgacctgatgatgtatgctcacaggttggtttatgtttcaaaagggctaaatcagagaggttaggatttggtcttttaaatttgtaagaagcattttttatatatcaatgttttgtatgctctttttgtcatatttgattcagtatacttcgattgagtaatgatttaaagatgtttgatggatgcttaataattctggctgtgagcttaaagtcaagttctgagtataatcaagtatacaatatgcagaaattttctgcaaaaataattgtcaaagaacctctattaccaaccaatttctcagggcttgatacccttcgtaggttacaattactggtttatacatttcttcttttgctattgggagagtttaggttctattcttgcttataatgctatcagattttgggtgaaacagactccaaagtttactttgaatcctaataccatgcagcaatggaattgagatggtgaccgaaaagggacaaagagagttatcagctaaagatactgctttgtgcacttcctgtcagatgcttgtggtttggattcagaatcaactaaaacaaaagaagaccaaggagatagtattcaactatgtaaatcagctgtgcgagagcttgccaagtccaaatggagagtcagtagtagactgtaatagcatttatggattgccaaacatcacgtttactgttggagacaaacctttcaccctcacccctgagcagtatattctgaaaactggagaaggcattgcagaagtttgccttagtgggtttattgcttttgacattcctcctcctcgaggtcctctctggattcttggcgatgttttcatgagggtatatcacaccgtctttgactatgggaacctccgagttggtttcgccaaagctgcctaacaagacatctaggagattatatagggcatgttttaataagcttgttagtgtgttgtaaataagctttctgtaactactatggcacaggtttacattatagatctcaagaatgtacttgtgaaactatgcaccttgatgtattgtgttgtatttgaagggaccattttcattaaatgtcatgtagaaccgtat

SEQ ID NO: 10681 - DNA, 1437 bp, Glycine max
  Clone ID: 700959345_FLI
cgaaacaggtttcctataaaatcccgcatgtgccgtagcagttgagctgaaaccgagaagaagaagatggagatgtatcagatctggagcaggagaatagcgttgggagcgttcgcgtttgttctgcttttcctatcggcctcagcagacgacgtcgttgtgctctctgaagataacttcgagaaggaagttggtcaggacagaggagctctcgttgagttctatgctccttggtgtggacactgcaaaaagcttgctccagaatatgaaaagcttggtagcagcttcaagaaagccaaatctgttttaatcggcaaggttgactgtgatgagcacaagagtttgtgcagcaaatatggagtctctgggtacccaacaattcagtggtttccaaaaggatctcttgaacccaaaaagtatgaagggccacgcactgctgattcacttgctgagtttgtaaatacggaaggaggaacaaatgtgaagattgctacagctccttccaatgtagtggtgcttacatctgaaaattttaatgaggttgtcttagatgaaaccaaagatgtcttggttgagttttatgcaccctggtgtggacattgcaaaagtcttgctcctacttacgagaaagttgccacagcatttaaattggaggaagatgtagtaattgcaaatctggatgctgataaatataaggatctggctgaaaagtatgatgtgagtggatttcctaccttgaagttcttcccaaagggcaacaaagctggtgaagagtacggaggtggaagagacttggatgactttgtggcttttatcaatgagaaatctggaacaagtcgagatgtaaaaggacaacttacttcccaagctggtatagtagaaagcttggatgtcttggttaaggagtttgtagctgccagcgatgaagagaagaaattcgtgtttacccgaatggaagaggaagttgagaagctgaagggttctgcctcaaggcacgggaagatttacttgaaagctgccaagaattacttggaaaaaggttctgattatgctaagaacgaaatccagcgcctacagcgcatacttgacaagtccattagtcctgccaaggccgacgagttaactctaaagaaaaatatcttgtcgacatatgcggcttgactttttggtgcatcattaaccatctctcatggaagctcgtgatcaatcgcagctcctgatgattgtttgactttgatatcgaaaatgctgggagatattcaacgtggatacttgtagtgcttaatttgagtctgtactattgaccttatcttgcatggcgcttttggggttaaaaattccgaacttacgattcttctccccattgtagtctacctgagcggtttaaaattttgggagacgatagcttttgtctttataccatgtgtttcgttcgtt

SEQ ID NO: 10682 - DNA, 3090 bp, Glycine max
  Clone ID: 700959795_FLI
caacaactactactactactacctctaaccgtgccgtttgtcaggtgcaagattgtagggctgatcttagtaatgccaaggattaccaccgtcggcataaggtttgtgatgttcattctaaggccactatggcactagtgggaaatgttatgcaacgtttctgtcaacagtgtagcaggtttcatgttcttcaagagtttgatgaagggaagagaagttgtcgaaggcgtttggcaggccacaataggaggaggagaaaaactcatcctgatgtctctgttgttaatgaaggctctctgaacgatcaaagggacagtaactatctgctgatgagtctgttacggatactgaccaatttgcattccaatggctcagatcatacaaggaaccaagatattctctctcatctgctgaagaacctggcaagtctggctggtccaaataatggtggaaggttagcacccttactggaggaatctaaaggcttggtaaatgctgggacgcatggagctgatcatgataaacccaaccttaactcaaatgctcctgaagcttccaggccttcttcttccatcaagacagacaatggcatcatcgctcaggaccctccaatgtcggtggtgcagtatgaaacacctgctaatggcatgacacaaaaatgtatagcttcaggtgatggagtaggaaatttaaaacctccttcaggaccactgctctcaaatgtatgtgaaccaagggacagcgttccatcccaattaactacagcagagactaaagtaggaaggggaaacttgaataacattgaccttaataatgtttacaatgatatacagaatactgttgagaatcataagaagccttatcctcctgtggcttcagggatggggtttattgaccatgcctcatggttgcaatgtgattctctcaaatcaagtcctccacagacaagtagaaactcagattcaacctctacccaatcaccatctagttccagtggagaagctcaggtatactcttgatgtaatttaaatccatttcctcttttctgaataatttaataattctgctatttactttgtatcaaaatatttagattacttaaatgattgtatagatatctttactgataaagatactattttgccaaggtcatcatttgaagtccccttttcaggttctttgccttttcattagtgtgtaggtctactttttgtggctgactcagaatgacatgttatttgtttactgtttacagagtcgcacagatcgaattgtttttaaactctttggcaaggatccatctgattttccccttcttctccgatcacagattctcaactggttatcccgcagtcccacggagatagagagctatataaggccaggttgtatcatattaacaatatatctccgtcttgaaaaatctgcatgggaggagctctactgtaatctaggatcaagcttgagaaagcttcttgctgcatcaaatgattcattttggagaacaggatgggtatatgcaagggtgcagcacgctgtagctttcctgtataacggtcaggtagtcttagatgtgcccttgcgtctcaaaagcccacaacattgtatgatttcatgcattaatccacttgctgttcctgcaagtgctagtgctcagtttattgtgaaaggtttcaacctttcccaatctagcacaaggttgcactgtgcacttgaagggaagtatctggtacatgctagttgtcatgatttgataggtggagctgatgcacccattcagcatctaagcttctcttgtcaaataccaagtgtaactgggagggggtttattgaggtggaagatcatggtcttagcagctgttcctttccatttatagttgcagagcaagaagtttgttcggagatctgcaagctggaaaatgtgattgaggaagctgaaaccactgatgatatccagataaaaaaccaacatatggaagaaaagactcaagctttggatttcttgcaagaaatgggttggcttcttcatagaagtcatgtgaaatttaagctaggttccatggctcctttccatgatctcttccaattcaatcggttcgcttggcttgttgacttctccatggaccatggttggtgtgctgtgatgaagaaactcttggacattatatttgagggtggtgttgatgcaggagagcatgcctccattgagcttgcattgttgaacatgggtcttctacacagagctgtaaagagaaactgtaggcctatggtagaactactgttaagatttgttccagttaaaacctcagatggtgcagacagtgaaatgaagcaagttgccgaagcccctgacagattcttatttagacctgatactgtcgggccagctgggttgactcctcttcatgttgcagcaagtatgagtggctcagagaatgtgttggatgcattaaccaatgatccacgaatggtgggaattgaagcatggaaaagtgcccgggacagtacaggtttgacccctaacgaccatgcttgccttaggggctattactcttacattcaactagtccagaacaagaccaacaaaaaaggtgaaagacaacatttggttgatatccctggaactgttgtagatagtaacacaacgcagaagcaatcagatggaaataggacatgtagagttccaagcttaaagactgagaagattgaaaccacagcaatgccccgtcaatgtagggcatgccagcagaaggtggcttatggtggcatgaaaacagcaatggtttataggccagtcatgctctccatggtgaccatagcagttgtgtgtgtctgtgtagctttgctcttcaaaagctcacctagagtttattatgtcttccagcccttcaactgggaatcattagagtatggggcaatgtaatgttgtatatcaggtgttttctgctgtaagcttccaccttttcttaatatattattttagaaactgggtaagtcttagattttgggtttagagtatagacatgttatacatccatagtaatagtagctgtcatcaatatatatggggaaaacccgaggttgacactt

SEQ ID NO: 10683 - DNA, 1990 bp, Glycine max
  Clone ID: 700959801_FLI
gttttatcttatgaagacagtgactcctaaatttcttgtctttttctatatgtttcttgtccatttcttaggctgctgagttgtccattttcatgaacgataggaggataagtactcaagtcaaagcctcagcacaagcgcgacaagtgggacgacaaatatccatatcaagtcctggatttatctatgaaccctatgaacctcgtgagaaaatcccattttggaagagatggttcactagaagtggttggagaagaacaaaaaatgacataattcttgagcttaaaagtgcctatgctattgcaaagttaagaaaaaagggttattcaaaaaatcagttctacaatgaggctgccaatatgtacaaggagaatgtaggtgcatgattgttataagttaatagattaagagagtgcattgtgaaagaaattgaagggaagccgttttgtagtgatatagtcacttcagatagcgttcaggagaatcgatttaaagaaatgcctcgaagaaattaagaaaagaacagaagacattgatgtttggcctttggatgtgttttgaattttcacctgctacaaccatttatcatcactatttcctggcagcttctttcttttgcattgtaataaacactctaatagctaaaggtgacaaaagaacattaaggaaagcagttactgagaatatgttttctgcccttaagaatgatattaaacaaagagacactgcttggagcagggtatactgggaaatggttgagcctgttgttaagatttgaactttgcgtgcacgtctggttagtattcttctgcactgtgtttaaattttggtcaagatgatgtgacaactcaaaatgtagcacattttttaaataagagaaagaaaatctgcctctactggcattgggtcacatcaaagagctgacatatcaacttgctaacattgaggcatcactgatcaaaatctggtcccattggattaagtattgctttgttagtatgtattgctggaggtgttctgaccagtttacaagtgaaaattttgaatttaatcactttttgtttcttggtatctttgtatggtttctctggacttctccctgaagttactggttatgtcttgtaggcatcatgaacaaaaacttaattatgtagctttttcatagtttctgctgcatagaccttttatgggaataaatatataaacaatttttttattgtattaacctgatattttcacccttcaagcacggtgacaattctagaagtgttaatcaaccaggtcctgttagtatgcacgtccttttaacctactagccttatgcagatgacagattatgtatgatgttgaattgtactgtcactctctcacagacgtgcgcacatattttgaaatcagtattttgcttttcaatataatgatttttatgatgaccttttcaattacagattggagttgatcggaaagacctaaataaaacatttattcagcttactcttgagatttttggctaaacagaaatttgaagcatatgactcaaaaggttctgtagtagctggagataaaagcaaggaggttcttgtccgtgatatatgggtattggagaagtctatgtttcatcctggtgcaacctggcatctgtgtggacggatatcaccaaaagcatcacagttatttccttgaaagaagagacctaagtttatgatagttagctgttcctttgttaagctaaattctcacatttgtttgtcactggagctttgtcctctgaataaaatcaaatataggtgtaaacctatgtaagttttgttgttcgaatgaaattcatttggagaggattttttttttttttttatcagtttctttccttgctggcaaactggaaaataatgtatcgatcaatggaaaccatgcgggaaaggaaatctgcaacataaaatattaataaaatagtaaacgtggaagaatgggcaaagtgattctattctcc

SEQ ID NO: 10684 - DNA, 976 bp, Glycine max
  Clone ID: 700959857_FLI
cgtggccccaccatggtcgccaacactctccacgccgccgctattgctctgacggagagtgatgactgggattggttcattaatctcagcgcctccgattaccccctcgttacccaagacgatctgctgcacgcgttctcgcatttgccacgcgatcttaacttcattgatcataccagtgacattggctggaaagatcatcaacgggcgaggcctataattattgatccggggttgtatatgactaagaagcaagacgtgttctggattacgcagaggagaagtaggccaacggctttcaaacttttcacaggttcggcttggatggtactatcaagatctttcattgattactgtatatgggggtgggacaacctacctcggactgttctcatgtactacacaaatttcatatcttcccctgaagggtacttccacactgtcgtttgtaatgctcaagagttcaagaacacaaccgttaacagtgatcttcacttcatttcttgggacaatcctcccaggcaacacccccactacctttctcttgatgacatgaaaaggatggttgacagcaatgccccctttgcgaggaagttccacggagatgatccggtattggacaaaatcgacacagagctattatctcgaggtcctgggatggttgttcctggtggctggtgcataggaagcagggagaatgggagtgatccttgttctgtagttggtaatactactgtcctcaggcctggccctggttcagagaggctagaaaccctgatcaattcgttgttgtctgatgaaaattttcgaccaaaacagtgtgtatgacaagaagctactgccacttgctttagctttcatctctaaatttagttaatacggtcagtgagttcatgttccttttcagttgaaaatgtaaatattgagagtgaaaagcacaaacattattttttattaaattgacatgaattgaggc

SEQ ID NO: 10685 - DNA, 1335 bp, Glycine max
  Clone ID: 700959859_FLI
gtgatttgatcagaaaggaatatgacatgaagtgcaaattcttacggaatctggaatcaaaaggagaaaagacttctagaattgataaaatgcgtgctgtagtcaaggatctgcattcaagaattagaattgcaattcttaggatagactctatatctaagaggattgaggaattgcgggacaaagagcttacgcctcaacttgaggagttgattgacgggttaagtcggatgtgggaagtgatgtttgagtgccacaagctgcagtttcagacaatgtcaactgtgtataacaacagccatgctggaattgctgccacacactctgaattacgtaggcaaattacttcctatctcgaaagcgagctccattatctatcctctagttttatcaagtggattggagctcagaagttctatctggaggccataaatggatggctgcacaaatgtgtttctcttaaacaaaaaccaggaaagaaaaagagaccccaacgtccactcctaagaatgtatggtcctccaatatatgccacctgtgaaatctggttggaaaagcttggcgaattacccgtccaggatgttgtggattctatgaagagtttagcgggtgaaattgcccagttcttaccgcgtcaagagaagaaccagggtaaaggtgcaaatcactcccatttaacaacttggagtgctaataatatccgtagcgaatcgtcggataatctattgagagatgggacattagaggactgggattcaggttttgatcaatttcgtgcaagctttcttggatttctcgcccaattaaataattttgccgggtcttcgatcatgatgtacacagatcttagacaagccattcagattgccaagaagaattatcatcatagatctaattctcaggctcaagatggtcagtggaattctctgtctcaagatgataattccatgtctcaatcttgagttgccaattctgaaaagaaaatcccaaaacaataattgagtttcataggttgcattaaacatggtggagttgttgcagcattacaggtttatgttgaactcatgaatgttgagtttcatacaagtccattggatgtggcatttgtacatgaaagaaagaaaaaggaaggaagaaagtatatttacaggatgagcatacttatatgatagtttcatcatttcaataatgcaagacggtggttacaggttaggcaaagctgtaattactaggttctgttaaagtgctactatgcatgctaagagaaggaacttgtgaagtgtcatttttgtaaacaaaaagtgtcatatatagtacttttacttgattttcttt

SEQ ID NO: 10686 - DNA, 1422 bp, Glycine max
  Clone ID: 700959943_FLI
ctcgtcttcaatcctttcgttattctcttattcatccttctcttctgaataatccagatctctttctgcccttttctccgtcacgcttttcgtgaccggatctgtatggatttgatccagatctacacgccgatggtggttttggccgggtctttcatagatctggtgcgtagaggctcagatctacggtaccgaggtacaacagagaatcgatgacaagaacgcagatccgacggtagatccagccgattccgcttgttcgatcgctacagacccctgtatcggatcattaagcagcgtgtctcgcgcgttctacacgtgttgccgatctcggatgttgtaaaattagtttatgatgtgaagctatggagtggaaaatatgtggatgtaggagatttcgggatgaatggcctcaaaacgctttgtcgtttgtggttattgagtcctgagtgatcttgtcatccgacctttgccatgacaggtgcgcttgcatggcaggtcaaaaaatgttaataaaaaaagttttattggtttggggagagatcgcacgggggttgcccggggtctcttcctcttgtgtggtgtggtgtttgctgtgctctccttttcgttatgccttttattattacctatctgtcgctccactccgtattacgactctggatcagaggatacatcagaggattcgctccaacccctatcgagtaaggtattatctgtcaatttacattcgaaagggttaggctattgaattttaaataattacagataaaataatcgatagctttgattttaaaaattaatcataatcatcggttaggttgcaacataatacttaattcgcttaattttttaactgcgcctcagagtattcataacatattctattaaattaataagctggtgatgtaattaatattaatatgtagttttggcaatcttattggcagaagatgctaggtggagttcatcaatattctggtaggtataatatcttcatgaatctaatataacgttattcatagtgaaaataaatcgagccaaggaatttattaataattgtcttcatttcatattagctgcctgctgcgacttccttatgcataattttactgtttatagaaattgtgaagctatactgttgtaattgtcatgtaaattgttccctttttcatcttacttgatttggtaaactccggttacttgtatccaaataagatgggccatttgtattgcgggggctttgtataattgtacaattatctacttgtaagaagttcagattcgggcgacaacatttgtaatgcagaattaggtcattaacattgtaaatcttctggcgatgattggaatatcaatgtgaagacgctatatgacttctgctatgacaatatcattgtggttgtcaaggtatttttgaag

SEQ ID NO: 10687 - DNA, 879 bp, Glycine max
  Clone ID: 700960153_FLI
catagccacaaaccatcctcaatttctcatcaaatcaaaactcatacatacacaaataacacaaaaatgaaatacagtgagatatcccatttcagccacccacagcacaagctgagatttgagtactcagaattccccttcaaatgtgatggctgcaaggaagtaggcataggatcacgttacaagtgctccatctgtgacttcgaccttcacatgcactgtgccatgataacctcccccaccttgctccaccctttctacaccaaatgcaacttccagttcatgtcaaagcctccaggtgacacgcctcgttactgcaacgcgtgcgagaaggacgtaagaggcttcttgtaccactgcaaagcgtgcgggtttgacctccacccatgttgcgccaagctaccgatggtccttgatgatggtgaagtgaagctgtacttgtacagaaaagtgagttcaccctgtcaccgttgtggcagaaaagggcgtagctggagttataggtcaaagtgcaagaactataatctgcatgtggcgtgtgtgagggacatgttggtggagaattggcacgaggtgtatgttaaaggaaggagtgtgaatagcaacattccaagtctgaggaacacactttacactcctcataatagtagaaggagtaaagggaaggtgaagaaatgctgtgagattgctggtttggctgtgcaggttgtgatatcagctgtgttgggagatccaacggctctcattgcaggccttgtgggctcgttcatgtcacgggcttgatcatgggcacaacagaatctatcagtttaacttcaaagattgtaaacaacttcagttcactacttcattgtggttgtgactatgttaatctcactt

SEQ ID NO: 10688 - DNA, 879 bp, Glycine max
  Clone ID: 700960315_FLI
aacatgcacacaaagtaatggacaaaaaaccatgcaactcatcatctcatgatcctgaagtgagaaagggaccatggaccatggaagaagacttgatcttgataaactatattgcaaatcacggtgaaggtgtttggaactccttagccaaagcttctggtctcaaacgaacgggaaagagttgtcgactccgttggctaaactaccttcgtcctgatgttagaagaggaaacattacacccgaggaacagcttttgatcatagaacttcatgcaaagtggggcaataggtggtccaaaattgcaaagcatcttccaggaagaactgacaatgagattaagaacttctggagaacaaggatccaaaagcacattaagcaagctgagacttcacaacaacatggtaattcagagaataatgatcatcaagcaagcactagtactagcaaagtgtccaccatggcacatccaaatgagactttctctccaccctcataccaaggaacttttgagccattccaacctcaattccctacaatcactgatcaatcaagttgttgtaccaccaccaacgacaacaacaactattggagcatcgaggatatctggtcgtctatgcaattactcaatggagattaaacctagctatatgcatgcctatataaatcatatatatgatgatatataaacctaagctcttgtagagtgtgttcaggcttaataacatcattaggtctgtttatatgagtagtctaagtttggtgtttgtaatgcatgatgtgagttaagaattaatttagttatggattgaaatatatagtaacttatatactacatgtgcattctcctattatcgtaaataatatggttgttgtaccat

SEQ ID NO: 10689 - DNA, 723 bp, Glycine max
  Clone ID: 700960331_FLI
cggaccgtttattaaagccttttggggtctagtgaggagaagttgcagtgcacagtgtgcttggaggatgttgaggttgggagtgaagcaaaggagatgccatgtaagcacaagttccatggtgattgcattgtctcatggctcaaacttcatggttcttgtccagtttgcaggtttcagatgccatctgaggattcaactcttgaagccaatgtgggagttggaaatggggacaatcagaacagtgagctggtcagagctggagaagagagaccaagaaatggaaggaggaactggtttcctgtgctgcaatcatttaacaattttcttccttatccttgatcaatactttgttgggttttaaattgcagtcgtggttgtggctgtggttgtggtctccttgtgatccttgactttgtgagaaactgcaaaaagatgcgattgatgctgcaattgtgattgcaatgctgtcgcggagagctaaagaaccttgatgctgctgccaaaattgctgtcacggaccgtttattaaagccttttggggtctagttttcctcaccctcatcaagcatgaacagctaagtctagacactgtcatgcctctaaaatccttcctaattgtatatatcatttagatttccttgtctgactttcttgtaccattcaaatgtatatgtttgtcaataatttgcaaaaacagaataaacttaattattattctct

SEQ ID NO: 10690 - DNA, 353 bp, Glycine max
  Clone ID: 700960394_FLI
ggagaacatgccgctggccgttgattcgcttcagttcgagagcggccacgcgcaatcgcggccgtccaagttttgcgtgacggttttgcccctcttggttctcttattttccgcttttgttgtgtagaaagaaagggtgggcccacttggtggggttagtgtctgtcctcttctctttccctctctctcgctatcacgtgaaacttagctactcgacaaaacatgcaaacaaacgggggtagtttgttttttacttgagagggtttttctggctgtaaattttcagagtccattgacatgtttgtgtgtacagtgtcaccaacttacatagaaagaagtggttctttattttt

SEQ ID NO: 10691 - DNA, 786 bp, Glycine max
  Clone ID: 700960431_FLI
caacacgaaagcatagccaaaaccttttttcgaagtctctgattttcctaatggctccggcaaaggcagagaagaagccggcggagaagaagccagcggcggagaaggcaccggcggagaagaagccgaaggcggagaagaagatctcgaaggaaggagggagcgagaagaagaagaagcgcacgaagaagagcgtggagacctacaagatctacatcttcaaggtcctcaagcaggttcaccccgacattggtatttccagcaaggccatgggcatcatgaacagcttcatcaacgacatcttcgagaagctcgcccaggaagcgtcgcgtttggctcgctacaacaagaagcccaccatcacctcgagggagatccagaccgccgtgcgtctcgtgctccctggtgaattggccaaacacgccgtttctgaagggaccaaggcggttaccaagtttaccagctcttgaattagggtttgttaggcggttgtgttgcagatctagggttttctgtggatttcttttcttaaaaattagtttgtagatgtaatgatctgaacagttgttaatggaaggtttcgtttgaataattataattgcatgactgtggattactttttcgtcctttttgtttatggtttgggcggtgattagggttagggttgttggattgactcttaagatgtataatagataagaggagtgtggggttgtgtcaatttgatcatatcgttccctaatttccgctctgtttgccgcaatttgaagaacaacagttcacact

SEQ ID NO: 10692 - DNA, 1123 bp, Glycine max; identical to SEQ ID NO: 9907
  Clone ID: 700960460_FLI

SEQ ID NO: 10693 - DNA, 1232 bp, Glycine max
  Clone ID: 700960580_FLI
aaaaatccatgcaaaatgaacagcaattggtacatgatttcatatggtgtttcggaaattatcttctcccaaattccagatttccatgagttgtggtggctctctattgtagctgctgtcatgtccttcacatactcattcattggacttggccttggtattggtaaagttataggaaacggaagaattaaaggaagcctaactggtgtaactattgggactgtgacagaatcccaaaaaatttggagaactttccaagcgcttggaaacatagcctttgcttactcctactcaatgatccttattgaaattcaggacacaatcaaatcccctccagcagagtcagagacaatgtccaaggctactttaataagtgttttggtcacaaccgttttctatatgctatgtggttgctttggctatgcttcttttggagatgcaagtccgggaaaccttctcactggctttggcttctataacccattttggctcattgacatagccaatgctggcattgttatccaccttgttggtgcataccaagtttactgccaacccctcttctcattcgtcgaatcaaatgcggcagaaaggttccctaatagtgattttatgagcagagagtttgaagtaccaatccctggttgcaaaccctacaagctcaacctcttcaggttggtttggaggacactttttgtgattttgtcaactgtgatagccatgctcctaccattcttcaatgacattgtagggcttattggagccattggattttggcccctcactgtgtatttaccagtggagatgtatataactcaaactaagataccaaagtggggcataaaatggataggcctacaaatgcttagtgttgcatgctttgtaattactatattagctgcagcaggttccattgctggggttattgatgatcttaaagtttacaagccatttgttaccagctactaattcaataggataattacttagtgatcatgatcaccattgtcagagatttcattagcaacaagaaaaaaaaaagaaggtaaattgttgcaaattgaaatcaacaggaaggtggtcttacttgtttattgcttagtaaccttgtatcttctgtatctttgtttttttttgtttgtgtgtgtgtgttctcttactttgtaacttgctctgtatccctaatttgcaatgagaaatggaggaaatgaagcagaggctttcaaattatc

SEQ ID NO: 10694 - DNA, 1001 bp, Glycine max
  Clone ID: 700960601_FLI
atcttgcttcactttcaggaatacttaaatgcatttgtaggtattttaggcactgctctagttccctgcctgtacttcaacttccaatctgtgcaatacctgtgggcacgtgggtgcccaaaattggggaatcaaatcggcagcctctagcaatgttgagaccaaccgcttctcttgcgtcagccctaaatttattagttcaaggtgtgaactttttgtctgaccttgaacatagtgtatcaaaaagaaaagcaacagagagaaagaatgaagaaattggtatcctattatacttctgagcccaagtaagctcaataccaatagttgatgataatgactcattactggatatatattgtcggagtgacataacagctttggcaaagaacagagcatatgcacatattaatcttgatgaaatgacagttcatcaggctttgcagttgggccaggacgcatatagtccctatgagcttagaagtcaaagatgtcagatgtgtttgcgttctgatcctctgcataaagtgatggaacgcttggcaaatccaggtgtcaggcggcttgtcatcgtggaagctggcagcaagcgtgtagaaggcattgtttcattgagggacatattcaagttcttcattggtgattagttttggattggtgaatggaaaagtaaaatggtatgtgctgtggttatgatactagagcatccatacaaccagccaccatcacttgtccaaccattgaaagtgctttctacacggtgattttatctctcatttcattgtaatacaattggattggcctcttgctttattgccttttttaagattttaggctgagaaagaggcctgtaaattcagagtatttgattgccccaaatttattcatctctccccattcgtattatatcttcaaatgtattgtgctcctgacatagataccagcaaggtgggggagcacaacatctgtaatcattcccatctgtgaagatatcaagtttgaag

SEQ ID NO: 10695 - DNA, 877 bp, Glycine max
  Clone ID: 700960664_FLI
gtaatggacaaaaaaccatgcaactcatcatctcatgatcctgaagtgagaaagggaccatggaccatggaagaagacttgatcttgataaactatattgcaaatcacggtgaaggtgtttggaactccttagccaaagcttctggtctcaaacgaacgggaaagagttgtcgactccgttggctaaactaccttcgtcctgatgttagaagaggaaacattacacccgaggaacagcttttgatcatagaacttcatgcaaagtggggcaataggtggtccaaaattgcaaagcatcttccaggaagaactgacaatgagattaagaacttctggagaacaaggatccaaaagcacattaagcaagctgagacttcacaacaacatggtaattcagagaataatgatcatcaagcaagcactagtactagcaaagtgtccaccatggcacatccaaatgagactttctctccaccctcataccaaggaacttttgagccattccaacctcaattccctacaatcactgatcaatcaagttgttgtaccaccaccaacgacaacaacaactattggagcatcgaggatatctggtcgtctatgcaattactcaatggagattaaacctagctatatgcatgcctatataaatcatatatatgatgatatataaacctaagctcttgtagagtgtgttcaggcttaataacatcattaggtctgtttatatgagtagtctaagtttggtgtttgtaatgcatgatgtgagttaagaattaatttagttatggattgaaatatatagtaacttatatactacatgtgcattctcctattatcgtaaataatatggttgttgtaccatatattatcagtg

SEQ ID NO: 10696 - DNA, 1056 bp, Glycine max
  Clone ID: 700960745_FLI
ggcaggaactggtttctccacctcctgtctttcctcttccagggaaactacctggaactgtaaggagaagattgtcattcataaaagcagaagtgaagtatgtgaacgctgaaaaggctaaggaacttgtggaagctgatggatatactgttcttgatgtgcgggacaaaactcagtttgagcgagctcacataaaatcttgttctcatgtgcctctttttgttgaaaacaaagacaatgatcccggtactattataaaaaggcagctgcacaataatttttctgggttgttctttgggttaccattcactaagccaaatcctgagtttgtgcaatctgttaagagccagtttccgcctgaaagtaaactcttggttgtatgtcaggaaggactgaggtctgctgcagcagcaagtaagttagaagaagctggtttcgaaaatatagcatgcataacatctggccttcaaactgtaaaaccagggacttttgattctgtagggtctacagagttggagaatgccggcaaagctggcttggtgacaatccaaggaaaaatctcaactgtgctgggaactattcttgtttgtgcatatatattcgttaccttcttccctgaccaagcagagaagctattccaattggcccctacaggctaagcctaataaatccattgtagtctttcttgattttgttcttcctcactcattatgcatttatgcatgtagcataattaaggaacgtgtgattagaattgaggggaaaaaacatgaaatgtgaataaagtaatgtaagaattagtaatgtgagtatatggctatgatgctcaagaaaccaaatggtttatatcactggtagtattctccattaagcaagaagtatacccatttctattgtttaagataccagttatttcgaatttacgttcctagggaagtatgttgccttgtactggatggcataaccctctagattgccttcatctgtacttacaaatgactttgttgacacatttgaattttgaatcctctaatgagattgtattaaatgtataac

SEQ ID NO: 10697 - DNA, 3262 bp, Glycine max
  Clone ID: 700960775_FLI
agcaattgacataccaagccctattggcactgccttgtgcatggcagctgcttctaagaaagaccatgaaaatgaggggagagaactggtgcggatattgcttgcagcaggagctgatccatctgctcaagattcccagaatgggaggacagctttgcatacagctgctatgactaatgacgtggacttggttaaggttattttaggtgctggggttgatgtgaacattcgcaatgtgcacaacagtatacctcttcacttggccttagctaggggtgcaaaggcatgtgttggactgcttcttgatgctggagcagattataatttgaaggatgatgatggtgacaatgctttccatatagcagcagagacagcaaaaatgattcgtgaaaatcttgactggcttattgttatgctaatgaagcctgatgctgacattgaagttagaaaccacagtggcaagacactacgtgacattttagaggctctcccccgagaatggttatctgaagatctgatggaagcactcgtgaataagggagttcatttgtttcctacaatatttaaagtgggagactgggtgaagtttaaaagatctgtcacaactccaacacatggatggcaaggtgctaaaccaaagagtgttggttttgtgcaaagtgttccagacagagataatctcattgtttcattttgttctggagaggttcatgttcttgcaaatgaagtcataaaagttgttccattggataggggacaacatgtacacctgaaagaagatgtaaaagagcctagatttggttggcgtgggcagtcacgtgacagcattgggacagtattatgtgttgacgatgatggaatcctccgtgttggatttcctggagcatccagaggatggaaagctgacccagctgagatggaacgtgttgaggaattcaaggttggagactgggttcgtattcgtccgactcttacatctgcaaagcatggactaggatctgtgacaccaggaagcattggcattgtatattgtatccgaccagacagtagtctgttaatagaactgagctatcttccaaatccatggcattgtgaaccagaggaggttgagcacgttgctccttttaggattggggaccaggtatgtgttaaacgatctgttgcagaacctagatatgcttggggtggtgagacacatcatagtgttggaagaataagcgagattgagaatgacggtctcttaataatagagataccaaatagacccataccatggcaagctgatccatcagatatggagaaggtggaagatttcaaggttggagattgggtaagagtgaaagcttcggtgtcttctccaaaatatggatgggaggatgttaccaggactagtattggggtaattcatagcttggaggaggatggcgatatgggtgttgctttttgtttcagaagtaagcccttttcttgctcagtcactgatatggagaaggttcctccatttgaggtgggccaagaaattcatgtgatgccatctgttactcagccacggcttgggtggtcaaatgaatcaccagctactgttggaaaaatattgaaaattgacatggatggtgctctcaatgtgagggtcactggtaggcagaacttgtggaaagtttctcctggagatgcagaacgggttccgggatttgaagttggggattgggtacggtcaaaaccaagcctgggaaccagaccaagctatgactggaatagtgttgggagagaaagtttagctgttgtgcatagtgtacaggattctggatacttggagttggcttgctgttttcgcaaagggaagtggatcactcattatacagatgttgaaaaggttcctagctttaaagttgggcaatatgttaggttccgaactggtttggttgagccaaggtggggttggagaggagctgagcctgaatctcatggggttataactagtattcatgctgatggagaagtcaggttcgcattttttggtctgccaggattgtggaggggagatccttcagaccttgagattgaacaaatgtttgaagtgggagagtgggtgaggttgaactacaatgcaaataattggaaatcaattgggccaggtagtgttggtgttgttcaaggaatagggtatgaaggagatgaattggacagaagcatttttgttggattttgtggggagcaagaaaagtgggtaggaccaagttcccatcttgaaagatttgacaaactctttgttggacagaaggttagagtaaaacaatatgtaaagcaaccaagatttggatggtcagggcatacacatgctagtattgggactatacaagcaattgatgctgatggaaagctccggatatatacaccagcaggatccaaaacatgggtcttggacccatcagaagtggaggtggtagaagagaaggagctctgtattggagactgggttagggttaaagcatcaatttcaaccccaacccaccattggggggaagtgagtcattcaagcataggggtggtgcatcggatggaagacgaggatctgtgggtgtcattctgttttacggagaggctatggctttgtaaggcatgggaaatggaatgggttaggccatttaaagtgggggacaaggtaaggatcagagacggactggtgaccccacgatggggatggggaatggagacacatgcaagcaagggacaggttgtaggggtagatgcaaatggaaaactgagaataaaattccggtggagggaagggaggccctggataggagaccctgctgatcttgcccttgatgaggactgatatgttattttaggaacatggaaggttgtatcataagtaaattttctcattcagctctttagcctatgtttttctgggctgagcttgtgcaaagtggaaagctatatatgcggtctgctacttgatgtgctctaaaccataactcctttatgaaggttgaaatgcagtttggccatacatgtattgatgttaataaacagaaggggtggaagaatggaagctgtggagataggaaaactgtcttgctgaccgagtggtggagatttaaaggcagctaaaataaatatattggcagttggcccatttatatattcattactcacaagtttgtagtcccagattttgaggtttatatcgtatgtatgtttatttcatattgtacaaattgtattcaactgtcaacttaatgcatttttttgactc

SEQ ID NO: 10698 - DNA, 1575 bp, Glycine max
  Clone ID: 700960810_FLI
tttctctttgcgttccatcttctttaggccattcttccataaaaacaccaaaaagacccacagagaggaacatggcatgtccagcaatggcaaatgggaacggctcattgaagaacttgaagctaaatgacaccaagggaaagaccatcacttgcaaagctgccgtggtatatggtcctggagagccctttgtggtggaaaacattcttgttcatcctcctcagaaaatggaggttcgaatcaagatcctctacacttccatttgtcacaccgatcttagcgcatggcgaggcgtgaacgaggctcaacgtgcttatcctcggatttttggccatgaagcatctgggattgtggagagtgtaggggaaggagtgagtgaagttgaggaaggggacatagtagtgccaatattcaatggggagtgtggagagtgttcgatgtgcaagtgtgagaagaccaacttgtgtgagaggtttggggtggatgccacgaagaaggtgatggaaggagatggcacaacaagattctccactgttaatgggaaacccattttccatttcttgaacacttcaactttctcggagtacacggtggtggattcggcctgtgtggtgaagtttctggactccgatcacagtctcagccacaagaacctcaccttgctcagctgtggcgtctccacaggggttggaggcgcttggaatacagctaatgtgcattctggttcaactgtagctattttcggcttaggagttgttgggctcgctgttgctgagggggcacgagctagaggtgcatccaaaataattggcgtagacatcaatcctgacaaattcatcaaagcccaaactatgggagtgacagacttcataaaccctgatgatgaagagaagccagtatacgagagaattagagaaataactgatggaggtgtacactacagttttgaatgtactggaaacgtggacgttttaagggatgccttcttgtcatcccatgagggttggggattgactgtaatattgggagttcatgcgtcaccaaagttgcttcccatccacccaatggagctcttagacggtcgcaacattgtaggatgtgtatttggaggtttcaaagggagaagtcaattgcctcactttgccaaagaatgtggacaaggagtggtgaagctggataatttcatcactcacgagctaccctttgaggagatagacaaagccttcgatcttttgatcactgggaagtcactgagatgccttctgcacttctaagaaaagatgccttttagaatggatgtgataattatgatatgaattgttcaataggagcatatctaaataataatgtgcaatactctcggaaagatgtcaggggtgcttttgaacagtgtactggatccaagaaagaaaattagaggaagtgtactcagctttgttcaccttccatcaattgataatagtgtgctgtagctgtacctctactgctactttttctttatttcattgcagcccataaaaaacactgctttgtaattagtagagataaaataagaattaatgttattttaaggtt

SEQ ID NO: 10699 - DNA, 1749 bp, Glycine max
  Clone ID: 700960825_FLI
ggatcttcagggctatgaatggcgctttaagcatatatttagaggtcagccacgtagacacttgctcacaactggatggagtaattttgtgacttccaagagattagttgctggagacacctttgtgtttctgagagggaacaatggagaattgcgggttggagtgaggcgcattgctcctgtgcagagcagcatgccatcatctgtgatttctagtcagagcatgcacctaggagttcttgcaactgcatctcatgctgtagcaactcagactctttttgttgtatattataagccaagggcaagccagttcattgttagtgtgaacaagtatttggaggctatcaaccaaaaatgtaatgttggtatgagattcaagacaaggtttgaaggggatgaatcccctgaaaattacaaaagattttcgggcacaatagttggagtagaggatatttcccctcactgggtaaattcaaattggcgatctcttaaggttcaatgggatgaacctgcatcttttccaagacctgatagagttttaccatgggagatagaacccattctggcttctgttcctactacatcatctcaaactgctgctataaagaataaaaggccacggcaagcaagtgaacttgcagatcttggagacacagcattagcttcccctactttctgggatgctggactgacacagtctgatatggcaaaacttagtgtcatggccgaaatcaaaaggagtgacagtagttcccatatgtggcatcataacagtaaaagcagcaacaatggtatatcaatgaatcagacagaagcaatttggctatcttctccttctcaattatatcatgacacaaccgatgatagcaagagcatctcagcttggcctatttcaaaacctcactcagagagattgaacaatgatcatttccttgaccaggttgacaaggagatcaacaaagtagaggctgctacaagttatagattgtttgggattgaccttattgatcatgcaaggaacaactctctttctgcagagaatgcatctggaatcacctctgagtgcaaaattgatgtaaaccatgtgtccgatatctcaaaggcttctaaagaatggaaccaagaacagctacaactatctccaaaagagactcaaagcaaacaagtttgtagcagaagttgcactaaggttcaaatgcagggggttgcagtgggtcgtgccgtggatttgaccacattggatggatatgatcaacttgtagatgaattggagaagatgtttgacataaagggacaacttcaacttaggaataagtgggaaattgtcttcactgatgatgaaggggatatgatgcttgttggtgatgatccatggcttgaattctgtaaaatggtgagaagaatcttcatttattcaagccaggatgtgcacaaattgagctcagggagcaaactacctatctcttctatggaagagattgtaacaagtttagacacaaccgagacctgaaacttttacattcttgtcctttctactttgttagttttcttcttcttcttcttctttttttttgctgtttcttttatttttcttatctaaggtaaggatgttagtttatttttggctaggcaagtttcatgttagatgtgaaacgctggctaattgtagctcaatttagagactctagacactaattgggtttcaaagaccaaattgaatattttaataaaaagtaaattacacatgtc

SEQ ID NO: 10700 - DNA, 1053 bp, Glycine max
  Clone ID: 700961150_FLI
atctggggaggcaagggacaaggaaaatctttccaatgtgagcttgtctttgccaagatgggaatcaaccccatcatgatgagtgctggagagttggaaagtggaaatgcaggagagccagcaaaactgatcaggcagagataccgtgaagctgcagacatgatcaagaagggaaagatgtgcgctctcttcatcaacgatcttgatgcaggagctggtcgtcttggtggaaccacacaatacactgtgaacaaccagatggtgaatgccactctcatgaacattgctgataaccccaccaatgtgcagcttccaggtatgtacaacaaggaagagaacccccgtgttcccatcattgtcaccggtaacgatttctcaacactctatgcacctctcatccgtgatgggcgtatggagaagttctactgggcaccaacaagggaagaccgcattggtgtttgcaccggaattttccgcactgatggtattcctgaacaggacattgtcaagcttgttgacaccttccctggccaatccattgatttctttggtgcactgagggccagagtatatgatgatgaagtgaggaagtggatttctggtgttggtgttgacagtgttgggaagaagcttgtgaactcaaaagatggacctccaacctttgagcagcccaagatgactctggagaagctcttgctgtatggtaacatgcttgtccaagaacaagagaatgtcaagagagtccaattggctgacaagtacttgaacgaggctgctcttggaaatgctaacgaggatgctattcagaggggaactttcttccagtcttgaattggaggcaaagcaaacttggcaagtaaatatttctgttcgtgaaggttgttgtactaatccaagtgctagaagttgtgatggaacttgcgtgtaacattcttagcattctcaatgtcttaggtgcaaagagaagatgctaagtttgagatgatcttactatatttttcatattggaccgtcttcctctataattttgagttacagtgtccacttaaattg

SEQ ID NO: 10701 - DNA, 1456 bp, Glycine max
  Clone ID: 700961178_FLI
ggcaagccccactcaaccaccacacctctcctcgttcacgctacccctttctgctcttcttctacctttcaagttttaaaagtataaagatggcagagacattcctatttacctcagagtcggtgaacgagggacaccctgacaagctctgcgaccaaatctccgatgctgtcctcgacgcttgcctcgagcaggacccagacagcaaagttgcctgcgaaacatgcaccaaaaccaacttggtcatggtcttcggagaaatcacgaccaaggccaacgttgactacgagaagatagtgcgtgacacctgcaggaacatcggcttcgtctcaaatgatgtgggactggatgccgacaactgcaaggtcctcgtcaacattgagcagcagagccctgatattgctcagggtgtacacggccaccttaccaaaaaacctgaagaaattggtgctggtgaccagggtcacatgtttggctatgccactgatgaaacccctgaattgatgccattgagccatgttcttgcaacaaaactcggtgctcgtctcaccgaggttcgcaagaacggtacctgcccttggctgaggcctgatgggaagacccaagtgaccgttgagtattacaatgacaatggtgccagggttcctattcgtgtacacaccgtgctaatctccacccaacacgacgagactgtcaccaatgacgaaattgctgctgacctcaaagagcatgtgatcaagcctgtgatcccagagaagtaccttgatgagaagaccattttccacttgaacccttcaggccgttttgtcattggtggccctcatggcgatgctggtctcaccggccgcaagatcattatcgatacttatggaggatggggtgctcatggtggtggtgctttctccgggaaggaccctaccaaggttgataggagtggtgcttacattgtgagacaggctgctaagagcattgtggcaagtggacttgccagaaggtgcattgtgcaagtgtcttatgccattggtgtgcctgagcctttgtctgtgtttgttgacacctatggcactgggaagatccatgataaggagattctcaacattgtgaaggaaaactttgatttcaggcctggtatgatctccatcaaccttgatctcaagaggggtggaaataacaggtttttgaagactgctgcctatggacactttggaagagaagaccctgacttcacatgggaagtggtcaaacccctcaagtgggagaaggcctaagtaattcattccactgttctatgctggaagttttttgagcgttgcccttataatatgtctaatatccataactttccacgtctcttactctgtgtgtttctctcctcttcctcctattttgttatttgtatgttcttttgtaattttttacgtgatcaactaaaaacatgtactctctgtttgtatgt

SEQ ID NO: 10702 - DNA, 1311 bp, Glycine max
  Clone ID: 700961244_FLI
agcgagcgccgtctctgcgaccgcgtcttcttcggattcgcctccgccgcggacttctctttcatggaggtctgccgcggatcggcgattcagctgctgaatttcgccgacgccgtcgcgatcgggagccggtcgccggaaaggctgttccgaatcctcgacgtgttcgagacgctgcgtgacctatttccggagttcgaggctctgttttctgatcagtttagtgtgtcgctcaggaatgaagcgattacgatttggaagaggttgggggaagcgattaggggaatttttatggagctggagaatttgattcgccgggacccggcaaagattgcagttcctggtggcggacttcatccgatcactcgctatgtgatgaactacctccgtgccgcatgtcggtcacggcagagcttggagcaggtttttgaagactatggcttgaaagagtacccaaagcttgatgatagggttccttcctcttcttctctgtcagtgcaaatggattggattatggaactgttggagagcaatttggaagcaaagtccaaaatttacaaggaccctgctttgtgttatattttcttgatgaacaatgggaggtacattgttcagaagaccaaagatagtgaattgggaaccctcttgggagaagattggatcagaaaacacgctgcaaaagttaggcaattccatgtgcactatcaaagaagctcgtggaataagctattagggattctgaagttggatagtaatgggtcaatgccccatattaacttggcaaagtcaatgaaggagaaactcaagtcgtttaacacagtttttgaggagatatgcaaggaacagtcttcatggtttgtctttgatgagcagcttagggaagaaataagaatttcgcttgagaaaatcttgcttcctgcgtatgtaaactttgttgcaaggtttcagagtgttcctgagcttggaaagcatgctgataagtatattaagtatggaacggaggaaattcaagcaagactcaatggtttgtttcagggaagcagtggatcaactggtagccgaaagtgaaggtgaagctgctactagttcttcttgtgtatttgtagtgtaattaaaattaaaatacaatgttttgattatcacaaaattgtagtcttgtagtcgtgtactataaatactactgtatgttattcttcttagcatcatagtggaggattgaaaaaggattttcaagtaagagctacgagttacaaaattaacctttgtgttgtaacatttgaggtggttcttatattggtcattggtttcatc

SEQ ID NO: 10703 - DNA, 1123 bp, Glycine max
  Clone ID: 700961249_FLI
aatcaattaactgaatgcttagagagagaaagaggagaaggagtagtgataaggtgatcatagagcatattataagagagtgaaaactaatggaggttggcctcaagaaggagaacatggggtttgaggaaactgagttaaggcttggactgcctggaaacggaggcactgaagaagtgctcatcaggaagaggggtttctctgagactgaaactggtcatgaagatgagtctgccaccactgtggatttgatgcttaatctttcttctaaggaggccgcaaccactgctgctgctgctgcagatccaactgataagcacaagactttgcctaaggagaagacccttctgccagcagatcctgctaagcctccagccaagacgcaggtggtgggttggccacctgtgcggtccttccggaagaacatgttggctgtgcaaaagagcgttggagaagagagcgagaagaacagcagccctaatgcaagctttgtcaaagttagcatggatggagcaccttaccttcgcaaagtggacttgaagatgtacaagagttaccgagagctctctgattctttaggcaaaatgttcagctccttcacctttggcaattgtgaatcccaaggaatgaaggatttcatgaatgagagcaagctgaatgatctcttgaacagctctgattatgtcccaacctatgaggacaaggatggtgactggatgcttgtcggtgatgtcccatgggagatgtttgttgaatcatgcaagcgtttacgcatcatgaaaggaaaggaggctattggtcttggtcttgcaccaagagccatggcaaaatgcaagaacaggagctagactagtcgcacaattcatgacctgccccatcctttgtaattgtggtgcccagttggcttagtaactaaagtaaggataagctgcagcagacacggatggacattgcagggtgttgaattatagttaatttgtgtatcattatggtttgttataatatttcaaacaaaacaatgagatgcatgtctaattaagtactaattatgaacaggaacataatgactctcaatcatgttgttagacttggctttcttatatatctttgcttgttctgtgtg

SEQ ID NO: 10704 - DNA, 2716 bp, Glycine max
  Clone ID: 700961396_FLI
agataaaaaaaattaaaatttataaaaaagaaagaagagagattatagaaagcgaaagagagagggttcaagttcaacaagcctctcttctttgtgttcttgcgaagaagaaaaatccctccgagtcaactcggacgagttgcctcatcgtacggttccttcctcggactctttcctcttcttccccttccgaatcaccgttcgcagggttttgctctctctctctctctgtctctcgcttcgtttctagttcagatctcgcattggcttcagctgaaaccacgcggtttaatttcattcccttaaattagggatttatcttatgtcgaaacacttgaagtgatgatggtgtggttgttgtgagaaattaatgatcgttgagggtgtgggacattggtacagagctttcagtgtagttgacaactacctaggagggaagaagaggaatctttcttccgccgttgtcgtgtgccgtggttgttgtactgttgatgtctcggaaactcgacagccctgtgcagactcagatggctgtggcagtgataaggagcagtccacttgggagagagtaccacgggaagcaacccgcgggtcggaggcgcgtgttcgtgcagacggagaaagggtgtgtgttgggtatggatttggatcgtggtgacaatgtgcacactgttaagaggaggctgcagcttgccctcaatgttccggttgatgagagttatctcacttttggggatatggtcttcaagaatgaccttagtgctgttcggaacgataccccccttttgctcactagggggaagaatactcatatgcctaggagttcctccaccccatgtctatcgccaaaggggagggacattgataaaagtgggcctattgagatattgggacagtcgaatcggcttgatgggatcaagcacatgatcaaggacattatgaaggcgattaagatggggattgaaccgattccggtgcatagtgggcttggaggtgcttactatttcagaaacagtaagggggatagtgttgcaattgtgaagccaaccgatgaggagccttttgccccgaataacccgaaaggttttgttggcaaggcgcttgggcagcctgggctgaagcgatctgttcgggtcggggagaccggatttagagaggttgctgcttatcttcttgattatgatcattttgctaatgtgcctcctactgcgttggtgaagattacccactcggtgttcaatgtgaatgatggtgtcaatgggaacaatttatggaggaaaaggctgtttagcaagattgcgtctttccagcagtttatccctcatgattttgatgccagtgatcatgggacatcgagcttccctgttgcttctgtgcatcgtatagggattttggacattaggattcttaacacggataggcatgctgggaacttgttggttaggaaacttgatggcatcgggagttttggtcaggtggagttgattcccattgatcacgggctctgcctgcctgaaactttggaggatccatattttgagtggattcattggccacaggcttccattccattctcggaggatgagcttgcctatattgaagatcttgacccttatcatgattgtgagatgctgagaagggaactgccgatgatccgagaggcatgtctcagagtcttggtgctgtgcactattttcctcaaggaggctgcggcttatggcctttgccttgctgaaattggagagatgatgactagggagttccgcaggggtgaggaggagcccagtgaacttgaggttgtttgtttggaggcaaggaagatagtggtggaaagagacagggaggaactgtctcccaggtctgagatgagagatgatgagtttctgtttgatatagattattatgatgaatttggatcagattttacgccaaagatggcaatagatgaccctttaaccagagcaacttttctgcctgcacttgggaatgggcagtctcgtaacccgctttccaaattggatgaatgcattgaggaggaagaggaggaagaggaggaagctgagggagaatctcctcaggggtttgttacttctgctgctgaagaaaaaatcccaagtgtttcagaactttctgtgtctctgaaaaataccatgttagatgggaaaaaccagaatcagcagaaatattcaggaggaaaggtggagaatggtcattttgcaaatacatcatctggtcacaagagtgccaatgagcagcttcctccaagcataagctttgtggatgtgacagaaatgaccgaggatgaatggccattgtttctggagaagtttcaagagctgctgtatccggcatttgccaagaggaaatccataaccttaggtcagaggcagagacagaggcttggtacttcctgccagttttgaagttgagcgatatgctggtatgataggagaggactatagaatgaagaagaataaggctttgtaggtttcagggaatgaatgaagggttgctaagatagtgttctggtttatgagatttggatgagtgctttggttggaaacgtcgtaggaaaacctgctgtaaatatacttggcatcagctaagtggtgagccgattagttgtttgtattttgatttcatgatttcatttcttcttttccccttcttcttctttgtaggataaaattgtgaaatgaaattcgtgtatatagtc

SEQ ID NO: 10705 - DNA, 1263 bp, Glycine max
  Clone ID: 700961519_FLI
gcgtttacagcactacagttccacagcattagccattagcactataaataaatagagaacacgcgaaacacctgattcccctccccagacgccgcagagtcagagagagagattcactgaaacagagcgcagaagaaaatacataaactaatccagaaaatgagcagcggcgctggaaaggtggtgtgtgtcaccggcgcttccggttacattgcttcctggatagtcaaattcctcctcaatcgcggctacaccgttaaggccaccgttcgcgacacaagtgatccgaaaaaaataaaccacttggttggcctcgacggtgctaaggagaggctgcacctctacaaggcgaatcttcttgaagaaggttcctttaactctgtcgttcaaggttgccatgctgtgtttcacactgcttctcccttttatcacaatgtcaaggacccccaggctgaattgttagacccagctttgaaggggactctcaatgttctgaaatcgtgtgtaaacttgccgacgctggaacgcgttgttttaacctcttctgttgctgcagttgcgtacaacggaaagcctcgaactcccgatgtagtagttgatgagacttggttttctgacccgggtttctgtagggaatcacagatgtggtatacactttcaaagactttggccgaagatgctgcctggaaattcgtaaaagagaacaacattgacatggttactattaacccagcaatggtgataggacctctcttgcaaccagtccttaacacaagtgctgcttcaattttaaacgtaattaatggtgcacaaacatttccaaatgcatcttttggttgggtcaatgtgaaagatgttgcaaatgcccatattctagcatatgagaatgcttcagctaatggaaggtattgtttggtggagagagtggcacactactcagaaattgtgaagattttacgtgatttgtacccgacattactacttccagagaagtgtgcagatgataacccatatgtgccaatatatcaggtatccaaagaaaaggcaaagagcttggggattgaatatactcctttggaagtgagcctcaaggagactgtggatagcttgaaagaaaagaagtttaccaacttttaatttgtgatatctcctagaggagaaaacgttaataatagaaaccttgtgtggttggtcacttggcttgtgatgctcatgcttctgaacaaacttactattaaataagacttaaatcaagattggtat

SEQ ID NO: 10706 - DNA, 816 bp, Glycine max
  Clone ID: 700961695_FLI
cacaatcaaagctatggagcctttcttcactgtagttctttctgcccttttactgggtgagatgcctactttctgggtggtttcttcccttgtaccagtagtaggtggagtggcactggcatcaatgactgaagtctctttcaattggattggattcactactgctatggcatctaacgttactaatcaatcgcggaacgttttgagcaaaaaactgatgactaatgaagaggaaactttggacaatatcaatctctactcagttataactatcatttcctttctgttgttggtcccatgtgctattcttgtggagggtgtcaagttttctccttcatacttgcaatctgctgcaagtcaagggctgaatgtcagagagctatgtgtcagatcagttcttgctgctttttgcttccatgcataccagcaggtatcatatatgatattacagatggtgtcacctgtgacccactctgttggaaactgtgtgaagcgtgtggttgtcattgtttcttcagttatattcttccaaattcctgtctcacccgttaacacacttggaactgggcttgcacttgttggagttttcttgtactcaagggcaaagaggatcaagtcagtccaaaagacaaattgaggctgcataacccttcaaaaaagaaaggaaacaggcagagggaaaagtaaatattgtagacacataacagccattgattttttttttctttctttttacattttgtgagggtatcactactccttgttaattggccatcctatgcgactaaatcttagtaaataatataggagtttaat

SEQ ID NO: 10707 - DNA, 2284 bp, Glycine max
  Clone ID: 700961924_FLI
ggctgagaaaacctcactactctgaaagctccaatttggaggaggcgtcgcctgaagagtcctctctccgccttcgtccgtcgtcgtcgatcatcgcttatgactgtaccgtctctctgtttctgtctctggtttattcgattcgattcgattctgtgaatccattgaaatatagaattctctctctctctctctctctctctttgattatcgctgattttgattgacggcctcgctctgtgtaaggtttttgcatctcaaactcgatttttttttggacgcaaacgatagtgtttgtgaatgataatgacgatgatggaattgaaatttctgaccagtgttgaattgcctgatgtatgtgtttttgaaaataaacggagaatctgcatggaaatgatagttaaagtgtaatagattatgaggaagaagctgaggtttgatgaattgattaagggaattggagtagagttagttacttgagatgatacaataagtgcaaattgacctaatgtatttatatgataaaataagtgcaaatgagttctgtggaaactcttccaaatgtgccccatgtcttttgaatctatagcagtttttattgattaactttagaggttttggaaattggaaggagcaaggatgccaaaactttatgcttgtagttcgtttgtgtgctcatagttgttactagcaagccatagccacaatggagatataatgtctctggtatgtatatgtgccccctttacatcctcttaaaatctgatttgattcaaacattcttgtacacgtgcttcaggtaatttgaaattgatggattccaacaattggagacctaatcaaggtactaaccccactatggatacaagtgattggagagctcaactaccaattgattcacgccaaagaattgtcaacaaaataatgaagacactaaaaaaacatcttgctgtttctggtcctgatggattgcatgaacttcggaagattgctcaaaggtttgaagacaagatttttactgctgcaacaagccagactgattacctacggaaaatatctttgaagatgcttacaatggagactaaatcccaaaacaccttggctaacaatatgccaccaaatcaagttggccctagccataaacctcctgatcaagtctcaagttcataatcttgggcaacaacattctattcctttgcctggtcagctccagccacatcagcagcttctatctcaaaatgttcaaaataatgttgcgtcgcaacctaaccttccacctgtatctagtctagcccagactcccagccaaaatattgtccagaactccaatatacaaaatataactgggccaaattcagttgggaccactattagccaaaattccaacttacagaatatgtttcctggttctcagagacaaatgccaggaaggcagcagattgttcccccacagaattcacagcaatatctttaccaacagcagtttaagcagaagctccagcttcaatctcagatgcagcagcaacaacaaaaccttctgcaaccaaatcagttgcaatcttctcagcaatctattatgcaaacttcatctgttatgcagccatccatgatgcaaacatcttctctatctagcataccacagaatcagcagtctactaatgttcaacagccaatgcagtccatgccacagcagcattcacaagttatcaggcatcagcaacaaacagcagtcactcatcagccaagcttaccttcacaacagcaacaacaacttatggggcatcagccaaatacaacaaacatgcaacatgcacagatgcttgggcaacagaacaatgttggtgatatacagcaacgaaagtaagtcaatttcccttcaccggtaaggttggaataacaatatttgttgaaattttaagtcgctttaacttagaaatgtggttctcgcaagtgttgatttaccttcctttgacaattaatataatatttaagattgccaatgaatgagaaacacgagcaaagtaagtacaaatacttcatcaggaaggctacagtacgtggaatgaacaaaaaaaagtgaagtttgttttgcatgttgagccttactttcgttttgattgttttattaattgaaagatttctttgaccagaagaaaaggtacaatatgtaacctctcccacttcttttttgattcatatgtaacctcccatttgcttttaaataatgtataaggatgcttgttgcctataattctcgtaattaaagggcccgttatttcatgtc

SEQ ID NO: 10708 - DNA, 1379 bp, Glycine max
  Clone ID: 700962035_FLI
cgcaatcagacacttgtcttctgcagctaaagagattactgtcagggaggctctgaactccgcactcgatgaggaaatgtcagctgatcctaaagtgttcttgatgggtgaagaggttggggaatatcagggtgcatacaaggttggttgcttccttagttgctttacttgtcttgccaccctctcctcttaagaacttcattaacttaactttcattttagatatccaaggggctgctcgacaagtatggccccgagagggttctcgatactccaatcactgaggctgggtttactgggattggagttggcgctgcttactatggtctaaggcctgttgtggagttcatgacttttaacttctccatgcaggcaatagatcatattattaactctgccgcaaaatcaaactacatgtctgctgggcaaatatctgtgcctattgtctttagaggacccaatggtgccgctgctggagttggtgctcagcattctcaatgttatgcatcttggtatggttcatgccctgggttgaaagtcttgtcaccatattcatctgaagatgctcgtggtttgcttaaagctgctataagggaccctgatcctgttgttttccttgaaaatgaattgttatatggtgagtcattccctgtttcggccgaagttcttgattccagtttttgccttcccataggaaaagcaaagattgagagggaaggaaaagatgtgactattacagcctattcgaaaatggttggctttgctctcaaggctgctgagacactggcaaaggaaggaatcagtgctgaggtcattaatttgcgttcaatccggccacttgatcgatccacaatcaatacttctgtcaggaaaaccaacaggctggtgacagttgaagaagggtttcctcagcatggcgttggcgctgaaatctgcacatctgtcattgaggagagttttggttatcttgatgcaccggttgagagaattgccggggctgatgttcccatgccatatgcagcaaatctggaaagaatggctgtcccacaggttgaagatattgttcgtgctgcaaagagagcatgctacagatctgtgcctttggccgcatctgcttgaatgctctggaaatttttcttgtcctggttagttctttgcagaaacaaattttccctaatttccgccataaaacagcaggaagaaattgcaaccaaagaatgttgattttaactcatttgttatgttaggctttggtttaaaagattctgttgtatgcataatactgtcctaattttcaggactcagatgctatacattttttccccttctcagcatatctgggaggaagttaatgtttaataataaataacttgcacaac

SEQ ID NO: 10709 - DNA, 1416 bp, Glycine max
  Clone ID: 700962257_FLI
ttcaaagagagtgtgtaactagtaataactgtgtatttgtgtgtatgtttttatgatcatataataatagatatgtttttggcatgccagttatgagtgctactattactactactactaccttaaactagaacaatgaacaggggaattgaagttctttctccagcctcatacctccgaagttccaattggctgttccaagaaagcttggggaccaggtggactccacaggagaacaagctctttgagaatgctttggctgtgtttgacaaggacactccggaccggtggctgaaggtggcggccttgattcccggcaagacggtcggcgatgtgatcaaacagtatagggaacttgaagaagatgtgagtgtcattgaatcagggtttattccacttccagggtacactgctgctgattcctttacattggagtgggtcaacaatcaaggatttgatgggctcaggcagttttatggtgttactggcaaaaggggtgcttccactagaccatctgagcaggagaggaagaaaggtgtgccatggactaaagaggagcacaggcaatttctgatgggtctgaagaagtatggtaaaggagactggagaaacatctctcgcaattttgtgaccacaagaacaccaactcaggttgcaagtcatgctcagaagtatttcatcaggcaactaagtggaggaaaggacaagaagagatccagtatccatgacatcacaatggtgaatctcccagaagcaaaatctccttcatcagagagtaacaacagaccctattcaccagatcactcagtgaaggatgtgaatccaccatcccagaatcaaagattgtctactactatggtaattaaacaggaacatgattggaaattgccatgtgaaactgtgcctatgcttttcaattccacaaatggaaacatgttcatgacaccactttgtgggatttcttcatatggatctaaaccacttcaggagcagtatttcctcagtggatgccagtttggaccttatgatacaattatgcaaatgccgtccatgcaaaatcaatgaactatatagaatgcagggattaaagttaaggtactaaaatgctaaaccttattcattgatgttggattgatttttagatgcttaagggtggttttatgtaaatatttcaaggattcacgagtttccttatcactcaatctttgaagagccttcatattgtattctgatattaaatgtgctggcaccaaagatgcaatatcagagtttggcagtgatatgcatcttccacctaggcagaaaggattatctgtaaaacgtataggacgagaggagttaccttgagtttgtgattattcacttttttttaaatgcttgatgcttcaaataaatataggcctttgcagctttgct

SEQ ID NO: 10710 - DNA, 2099 bp, Glycine max
  Clone ID: 700962277_FLI
gccatggaggaaatgatcaggctattgcaaacgaatgagcccttgtggatgaaaggtgctgatgggagggatgtccttgatcttgattcctatgagagaatgttccccaaggctaatagtcacttgaagaaccccaatgttcatgttgaagcttctagagattcaggagttgtaattatgaacggcttaactttggttgacatgtttatggacccgaacaagtggatggagctatttcccaccattgtcacaatggctagaacaattgaggttatatcttctggaatgatgggtagccatagtggttctttgcaattgatgtatgaagagttgcaagtactttctccacttgtttctactagagagttctactttctgcgttactgtcagcaaattgaacaaggcttatgggcaatagtagatgtttcatatgatttccctcaagataatcaatttgctcctcaatatcgatcccatcgtcttccttctggtgtctttatccaagatatgcctaatggatattccaaggttacttggattgaacatgtagagattgaagacaaaactccagttcataggctctatagaaaccttatttatagtggcattgcatttggagcacaaagatggctaactacacttcagaggatgtgtgaaaggattgcttgtctaatggtgacaggcaattcaacccgtgatcttggaggagtgattccctctcctgagggcaagaggagcatgatgaaacttgcacaaagaatggtcaccaatttttgtgcaagcattagtgcatcagctggtcatagatggaccacactctctgggagtggcatgaatgagattggagtcagagtcactgtgcataagagctcagaccctggccaacctaatggtgtggtgctaagtgcagccaccaccatttggctccccatccctccacaaactgtgttcaatttctttaaggatgaaaagaaaaggcctcagtgggatgttctttccaatggcaatgctgtgcaagaggttgctcatatagcaaatggtccacaccctggtaactgcatatctgtgcttcgagcattcaactcaagtcaaaacaacatgctgatcctccaggagagctgtgtggactcctcaggttccctagtggtgtactgtccagttgatctgccagccatcaacatagcaatgagtggtgaggacccttcctacatccccctcctcccctcaggcttcaccatttccccggacggccaagctgaccaagacggcggaggagcctcgaccagcacaagcacaggcagcagggtcatggggggtggttctggtcctggttctggtggctcactcatcactgttgcattccaaatcctagtgagtagcttgccatctgccaaactcaacatggagtcggtgaccactgttaatagcctcatcggcaacactgtccaacacattaaggctgctttgaattgtcctagttcctgatgagagaacctgctgcatgcttgtgtgatacttccctttactcactctcttcttccttaaatcaatgcttatcagaaaatggttcagaactgaggctatttgtgctggtgctataatcaatgtgtgggagaagtgtttttgggttagttgggacttcaatgccccctcatcaaggccacaagcctctctttatttactgctccagctgatggtagagctgtattttgcttcaaaaggcttcaactttcattaccttgcacaccaactaccagtttttttttcttttattttaagggtaaggttaagtaaggtgcatctttttttttttctttcccaaaaaaaaaattatggtttgttattttgcatacttttgctttggaacaaggtgtagtagtggccgttgtagtagtagtaatagttgttgtcttagaagagggagtcaagaacgcaccatatatatataatatacttagggggtgcatgtttttcttctctacattgcaagattagctagcactccatgaaaaatgtgtatggttcgggcattgacttccctgtgaagggacttgattattattattattcataatttattgttgttcaccttttgttgt

SEQ ID NO: 10711 - DNA, 837 bp, Glycine max
  Clone ID: 700962291_FLI
catggtcaatgatactttggttcgccaggctgcaatggtattcaagtgtatattgttgatgtattacaagaatagcagaggccgaaattatcgtaagcagggtcaaatgctgactttagttgaatacctcctcctgctttaccgtgccttgttgccaacaccagtttggtatcgtttcttcctgaacaaagaatatggaagcctcttttcatcactgatgacaggattgtatctaacatttaaactcacgtctgttgttgaaaaggtgcaatccttctttgctgcagtgaaagcattgtcgcgtaaagaaatgcactatggggcttatgcaacatcagagcaggtcaatgcagctggtgatctttgtgctatttgccaggagaagatgcatgctcccatcttactacgttgtaaacatattttctgtgaagattgcgtatcagagtggtttgagagagaaaggacctgcccattgtgcagggctttggtaaaacccgcagaccttaggtcatttggggatggctctactagcttgtttttccagttattctgaaatcatatataaataccaaccaggaagtttttttctgctttgaagctttactttttcaaagcagcagtcacgatctatatacatcaacacatgtaaaatgctctggaggcaattgtggggatactctttgaagatgaatgcagctgtatactggtcatgcgttcatataatgtactagcaaaaaaggttgagtgtatctaaatgaccctgtaaactaggaagtcgattgaaaatataatattaaacatgactcttcatttgcaaggaatgaaggtctttctccg

SEQ ID NO: 10712 - DNA, 1368 bp, Glycine max
  Clone ID: 700962293_FLI
aaaagactgatggggacctgtgtaatccctatgcctcagatggaattgtctagcaatgatgatgaagttggaaaggcaagtactgactgtagctgtgaagaccagggttccatgagatgtgtcagacaacatattgctgaagaaagagaaaaacatataaaaacatttggggttgagaaattcactgaattgggattcactaacatgggagaacaagtggcagaaaattggagtgctgaggatgaacagctatttcacgaggttgttttcaataatccagtatcccttgacaagaacttctggaactatctttccattgcttttccttcacgaaccaaaaaggaaatagtgagttactactttaatgtcttcatgcttcaaaggagggcagagcagaacaggaacgacctgttaagcattgacagtgataatgatgaatggcaaggtagtgagggcaatgatattgcaactcgagaggaagacgaggactctgttgctgagtcccctgtatgtcatgatgagacttgtatggctgactgccacaataatgatctgcaagcctataatgagtatgccgctgatgaaacttgcgcagctaatgaaacagtggattttaccaataagaacatagatgatgattcccaatacgatcctatagagatgcatcattctagtggttcccctctaattcaaccccaggatcagcctatttggcaggattcatgtgatggaaaagttaaagaagattcatgcacatcatcagatgtaggagttgcctcacaggagactaaggtgaatactgagaatggtgatcattggtgtggtaactataatggggtaaacaatggttatagccaaggatatgttttggagcattgtgatgcaaaagtgtgggattctggatttgtatcatgctctaaaaataagattgacttcgtacctacatgcaacatgatagaagaggtttttggtgatggacgaaggcaagacattagaagagcttgagcaatctcccaggcttttatgtgaagcgaatctcagttagcattctctgctaagggtgatcagacttcgatttttgtttttgtatatttgacattaagattcaaaaagtaaaccttcattgtaaaatagtgttttggaaggtgatttggtctttctgagttgtgttgtctcgtatattcttttcaagtccgtttggaactgtaaaatttcttattccttaatttatgagtttccactttgaggtgggatataagattggagggaggaaatagttggtggaaaagaaaccatcactgaaggaagagttccggttttatgatgtaatttggcattatttaatcgttaatgaaaattctcaatggt

SEQ ID NO: 10713 - DNA, 1676 bp, Glycine max
  Clone ID: 700962417_FLI
gcttctgactccgtgccctagcttcttcttcctcctcctcctctgccattgcagcaaggcacacacctcaggctccaacccatttcacgagggatcggattcgctcgccatcatggggaagaagaagaagagagtttcctcgaaggtgtggtgttattactgcgatcgcgaattcgacgacgagaagatcttggtgcagcatcagaaagccaagcactttaagtgccatgtctgccacaagaagctctctaccgctggcggcatggccatccacgtcctccaggtccacaaggaatccgtcaccaaggtacccaacgcaaaacctggcagagagagtacggatattgaaatatatggaatgcaagggattccaccagatatcttggctgctcattacggtgaagaagaggatgatgttccgtcaaaggcagccaaggtggatattccaccaactcagcttgtaggtggaatgattccacctcctttgggtacaggatatcctccgcgaccaaccttgcccacaatgccaccaatgtataatcctgctgtacctgtgcctccaaatgcttggatggttccacctcgacctcagccatggttttcacagcctccagctgtttcagttcctcctgctgccccatacacacagcagccattatttcctgtgcagaacgtgaggcctccactgccagctactgctcctgcgctccaaactcagattactcctcctggattgcctacatctgcacctgtcccagtttcacaacctttatttcctgttgttggaaataaccatacaactactcaaagttcaacattttctgctccacctctgccctcaagtgttccatcagttacttcagtgatgtctgcaaatgttcctgttgatacacatttgagcagcaattcttctgtaacaagtagttatcaggctatagggattccaggtggagcagctagtaactcacattcttatgcttctggtccaaatactggtggtccttcaattgggcctcccccagtaattgcaaacaaagctcctgctactcagcctgccaccaacgaagtctacttagtttgggatgatgaggcaatgtccatggaggaaagaagaatgtctttgccaaaatatcaggtgcatgatgaaagtagccagatgagctccattgatgcagccatagataagaggattcttgagagtaggctggctggtcgtatggcattttagatcaatctcatccatacactcttgtcaaatttcttcagtgataagggctcaaaatggtattttaataaagcttgacagcgcgtgttcaagattcctttatttaaggtccggcaagtaattgttattggtgcaattctttgccaaaatgggcaatgggccctacggttatggtggaatcgaaggaaaaatattgaaatggttctgatttcttacttcttaggaagttgcaaaactttgtttatttctcatttcataccttttctcccgttgatgtttgtagtcaacctttaggacgtggtactcaaaagagtattatatatttgctgtaatcagattattacatgttttgggtggaaaattgacggcaatttttggttggttatatgcttcgtaattagtgtctctaattgtgtaaaagacagcaaaaggtgtactttggtggagagac

SEQ ID NO: 10714 - DNA, 884 bp, Glycine max
  Clone ID: 700962505_FLI
cgcgcactttctctcttctctccgcatctccaactctctctctcacacacgcactctgaaacaaaaaaatagaaatagaaaaaaaaaacaaaagttaaaaaaaaaggttagttattcttcttcaaccacgccatggagggtcttccccaaggttaccgtcccaacgttggtgtctgtctcatcaactccgatgatcagatttttgtggcttctaggttgaatgtcccaggagcatggcaaatgcctcaggggggaattgaagatggtgaagaacccaaatctgctgccattagggaacttcgagaagaaactggaatagtatctgctgagataattgctgaggttcagaaatggttgacatatgacttccctcctgctgtgaaggctaaagtcaatcgtctgtggggaggtgaatggcatggacaggcgcaaaagtggtttcttatgagattaacaaaagatgacagtgaggtcaacttaactaatggggaagcagaacctgaatttgcagaatggaaatgggcagaccctgaagaagttattgagcaggcagtggactacaagagaccaacttatgaagaggttataagaaccttcaagccttactttcaagggagtggaatatctgccaaatgtaaatcaacaaagtggtgaatgttatgagtgtgcattgtagttttatccattttcttatctaatttcactgagtttggatagcactcagctatttgtaaagggatgatagttagaactgtccattaggtacttgccttcttgtaataataagctatgtgcaaatgcctaatttctattctaacctccctgcaaggatgattgtgaatgtgtatagaactgttcaataaagtaggaagcatttgtgcggc

SEQ ID NO: 10715 - DNA, 2555 bp, Glycine max
  Clone ID: 700962872_FLI
gcttgccagctttactcggcaatggtggcaacatatataggcagcaacccataaaatattattatgaaaaattgaaaattaacgtaaaggggttgattgcacatcctttttgctttcagggttggaagaatttttgcgataaaatattttttcacccaaaaaaaaatggtgttggatccaagactggtgctggtgctgttcatcggcacttgcattttggccatcaatggtgacacagatccaaatgacgttgcttctctaaaggttttgtttcaaagtatgaactcaccatcccagctaaattggaatggtgatgatccttgtggacagtcgtggcaaggcatcacttgctctggcaatcgagtcacagagattaagttacctggtcgttcactttctggatctttgggttaccagctagaacccatgtcatctgtgacaaacctagacttgagtaacaacaaccttggtggcaccataccataccaacttcctcctaatctgcagtacttaaatcttgctaataataatttcaatggggcaatcccctattccctttctgaaaagacttcgcttatagtcctgaatcttggtcacaatcagctccagcaagcacttaatgttgatttccaaaagctttcttccctctctacattggatctctccttcaattctttgacgggtgacctgcctcagactatgagctcactttctagcataagaaccatgtatctgcaaaacaaccagtttactggcaccattgatgtccttgctaatctgcctcttgatactttgaatgtgggaaacaatcattttacaggctggataccagaacaattgaaaaacataatacaaaaggatggtaatgcatggagctcgggacctgcacccccacctcctcctgggacacctccagcagtagcaagaaaccgaaatcacaaatctggtggacatagcccatcagatggtggctcaagtgacggtggaggcaaaaaatctggtataggaggtggtggaattgctggaatagtgatctccatcttggttgttggggcaatagtagtattctttctggtgaagagaagacccaaaaagtcatttaatgatgttgaaaagcttgacaatcaacccttggctcaaaatgaagtgcacgaaatgaattccatgcaaacttcatctgtaattgatttgaagacatttgatacatctgcgaccccaataagccttaaacctccaccttttgatcgtcacaaatcatttgatgaagacgagttttcaaacaagcccgttatagtcaataagcccactaaagtcaagaagaccgtaacagctcctacaaatgtaaaatcatattctatagctgacctgcagattgctactggatccttcagtgtggagcaacttcttggtgaggggtcttttggacgtgtataccgtgctcaatttgatgagggaaaggttcttgccgtgaagaagatagattcatctgtccttcccaatgatatgtctgatgattttgtagaactggtttcaaacatatcccaattgcatcatcccaatgtgaccgagcttgtaggttattgttcagagcatggacaacacctactagtctatgagtttcataaaaatggatcacttcatgacttccttcacctacctgatgagtatagtaaaccattgatatggaattctcgtgtgaagattgctttggggattgctcgtgctttagagtacctacatgaagtttgttcaccatctgttgttcataagaatataaagtcggccaacatattgcttgatacagattttaatcctcatctttccgacagtggattggcaagctatattccaaatgcaaaccaggtattgaacaataatgctggatctggatatgaagctcccgaagttggcttgtctggtcattatactcttaagagtgatgtttatagctttggagttgtcatgttggaacttcttagtggacggaaaccatttgatagctcaaggccgaggtctgagcaggctttggttcgatgggcaacacctcaactccacgatatcgatgccctggctaaaatggttgatcctacattggaaggattataccctgtgaagtccctttctcgatttgcggatgttattgctctgtgtgttcagccggagccggaattccgaccacctatgtcagaagtggttcaagcgctggttcggttagtgcagcgtactaacatgagcaagaggacgtttggaactgatcaaggaggatccaacagagggggtgatgaccaagatacacaagacatgtaaatgggaacaaaaaaggcttgtgttgatagaatggcagaaaaggaaatgatattcttcagatttttatcacttctttctaacccccttcagccagtttatgttctgagttagaggattgcacctttgattattgaagctagagacaatttcttggtgtatgattttgcgctatttcttctattggtggtataaatttcaataatttaacctttttgcgaaattgaagctgggttacgattgatggttgc

SEQ ID NO: 10716 - DNA, 1246 bp, Glycine max
  Clone ID: 700962928_FLI
cttgaggctagggttaccggattcttgcgttttaatatctgcaattcagaagcatggggcactccaatgtgtggaattctcaccctaagaactacggacctggttctcgcacttggtatgttactcatcttcgccaaatggtgattcaggatgagttgatccttttccctctttgttccttctcaatttgattatgcgattattattaaggtttttgcttttaatttgaagcatttaattttatcccccatatgagtactttgaatctgtgttttttctgataacaagtattttcctcattatttggttttgaataagtttcgtaccatcactattgcaatattacttttgttcttcgttaataattttaaagaggtgactcttctatcctgatgtcataataagatattcttttaaccattgattttctcttcattacgttactttgttgaaggttgagtgtgtgcttgggtgggtgtttaaaaatttgattttgaatgaaattaattttaaaagtagttgctttttcatcattgattttggttaaatgtaatttgattctgagtaatatgaaaagagtggtgtatgcattataaaatgtatgtcttattatattggtatatggcacctttattttcactcttttttcataatcataccaatatgtaatacgtgcttctctgttttaatgtatgcattttattttaaaactatagcaattttgtttggctagttttagactgttacaatttagatattctcagaaaacatatttttgacggtccaagatcggattagaattctagtgtgcgagttatttgttaattgggaatgtggtttactgttctttcctgttttgcagccgtgtgtgtgggaatcctcatggattgatcaggaaatatgggcttatgtgttgcaggcagtgcttccgaagcaatgccaaggaaattggcttcatcaaggtaaatatttggatccgttagtatcgatagatttcaaattttccgaattattttaacattggttttcgtgatcacttttttcttcgtgccttgcagtatcggtgaaagattagttttccacctgccccacccggtttggattcttgcatcaggctatgatgacgtggggatgattttactgtttgaagaacttaaaattttttgtgacatttagcaaagttaattatcaaactcaagttgtggaactaagaatatttttgttttttatataattgttttgagct

SEQ ID NO: 10717 - DNA, 1234 bp, Glycine max
  Clone ID: 700962929_FLI
ccctcaacgaaacgcaagaactggtatatagtcatggtcggaaattggaattaacttcccagaaattaaacgaaagtatgtaccctaaaaaataacagtataaaatttgcaaagttacatttttaatttaactttagccgcggaaaaggtttttgcgttgcgttgcactagcccctgcacagtagtgtggtacgatgatttgattttgataagataggtctgtgctgtggggaaaattggaagcatcgatcggaaaatgcaatcgttatcgttgagtatgagtctgaggagtagtagcttagtgaattttcttttgctgggttcagagacgagagtgagaagcagaaggagtgtcatcgtagcgtgtgcttcagagggagacagtggcagcagtagcacaagctcgtttctctctcggacccaaacctacgctcttcttaagcaacaattgcaagtagctgctaaatccgaggattacaaggaagccgctagaattcgagactcgttgaagctatttgaggacgaggaacctgttttgcgtctgaggagactattgaaggaagcagttgctgaagagagatttcaggatgctgctagttatcgtgatgagctaaacaaaattgctccacactctcttttaaaatgttgcagtgatgctacaacattgggaatcagggttcaagttaggagtgtatatatagagggcagaagtcagccttcaaaggggctatatttctttgcatatagaataagaattactaataactcagaacaccctgttcaacttcttagaaggcattggattataactgatgctaatgggagaacggaaaatgtctggggaattggagttgttggtgaacagccattaatacttcctgggaatagttttgaatactcttcagcatgcccactgaacacaccaaatggtagaatggaaggtgattatgagatgatccatgtagaaagagtaggctcacaatcattcaatgtggccattgccccgttttctctctgtctgcttggagatgatgaaggttgtattatttaaaattgaagtgctgcatcagcttctgcaacatgtaaattattatcattctcttcgccattccaaagtattaaagcaggctacttgctttattaattaagtgtaagatatcttattattacgaataaatttgatcagcatacatttgtattttattgatatcaataaagaaatcaatatttatag

SEQ ID NO: 10718 - DNA, 1488 bp, Glycine max
  Clone ID: 700962978_FLI
gaagccagttccgcaaaaaactttccaacaatccatccttgaacgtgcctttagatctgcaaacttcagcttagagcaaaacaataaataaaaaatccaccttttctatcaacctctagctatatccatttttatccaaatgacagaaaaactttccaacaatccatccttgaacgtgcctttactatccgagtggaatcaccatgatgaggagaaagccatagcctctcatccttctaccaaaaatactgtgtccttctttcgcacatgccttaatggactcaatgcaatatcaggtgttggaatactgtcagttccatatgctcttgcatctggagggtggttaagcttggttcttctatttgctattgccgctgcagcattttacacaggcacgttgattaaaagatgtatggacaagaattcgaacattaaaacctacccagatataggtgagcttgcatttggaaagataggaaggctaataatatcagtgtccatgtacacggagctctacttggtttcaatagggttcttgattctggaaggcgataacttgaataacttgtgccccattgaagaggttcagatagctggcttcgtaattggtgggaagcaactgtttgtgatattggttgcccttatcatcttgcccacagtttggttggacaacttgagtatgctttcttatgtatctgcaagtggagtgtttgcttctgctgtaatcatcctatcaatatcatggactggaacatttgatggagttggttttcatcaaaagggaactcttgttaattggcgcggaatccccacagctgttagcttgtatgccttttgctattgtgcacatcccgtcttccccaccttgtacaattccatgactaacaaacatcagttctctaatgtcctattagtatgctttctgttaaccactgtgggttatgcatccatggctataattggttatctaatgtttggtgctgacgttgaatcacaagtaacattaaacctgccactgaacaaagtaagctcaaaattagcaatatatacaaccttggtcaatcccatatccaagttcgctttgatggcaacaccaattaccaatgcgttgaaagatttacttccaagggcgtacaagaatagagcgaccaacatcttagtcagcactgtcttggtaataagcgctaccattgttgccctcagtgttcctttctttggggatctcatgtctctggttggagcgtttttaagtgtcacagcttctattctgcttccatgcttgtgttacttgaagatttcaggcacttacaatgaatttgggtgtgagaccatagccatagtgacaataatagtagcagctatagcaatgggaatatctggaacatatacctctgtcatggaaatagtacatcatttgtaatagacaatgcagtggtccattctattgactgtaaatttcctcaaaaaaggattttttttttttctttc

SEQ ID NO: 10719 - DNA, 997 bp, Glycine max
  Clone ID: 700963042_FLI
gtcaagataccagtgatctacatgagaaagtcgattttgtggcatgcttgggtggagatggcgttatactgcatgcgtcaaatctattcagagatgctgttccccctattgtgtcatttaaccttggctcccttggttttctgacttctcatgattttgaagattacaagcaagacctacgacaagtcatccatggaaataatacacgagatggtgtgtatattactcttagaatgcgcctccgatgtgaaatttttcgtaaaggtaaagcaatgccagggaaagtatttgacatcctcaatgaggttgttgttgatcggggttctaatccatacctttcaaagattgaatgctatgaacatgatcgacttataaccaaagtacaaggtgatggagtcattgtggccacccctacaggaagtactgcctattctacagctgccggaggttccatggtccatcctaatgtcccttgcatactgtttaccccaatctgtccacattcactctcatttaggccagttatacttccagattctgctcaactagaattaaagattccggaagatgctagaagtaatgcctgggtttcatttgatgggaagagaaggcagcaactctcgagaggcgattctgtccgaatatcgatgagccagcatccccttccaactgttaacaagtttgaccaaacgggtgattggttcagtagcttgattcgctgcctaaattggaatgagaggcttgatcaaaaggctctgtgatgcatgtgaaagtgaagaacagatatgcattaccctaacgtgaggatagggcttctataattactgtacagcttgtacattgagattacagaacttagatatatagcagatacctacactttattacattggctaccattgtgaagatagggtttgccaatgttttttcaacatgtcataatggcaagatgctgttgtatatacatttataaaatgtagtaattttttttaatctt

SEQ ID NO: 10720 - DNA, 1217 bp, Glycine max
  Clone ID: 700963048_FLI
tcgggtcgagctttttcctcagtggaacaaacctcagaaaaagattttacaaattaaatattgtttaaaagaaagatgtcaagtggagcaacacactggtgttatgcatgcagacagccaattgtgcttgatgggagagatcctgtttgcccttactgtgatggaggatttgtgcaagaacttgacgagttgcgaggaattgcacccaaccataaccataccttttcgtcacagtcaggagactttcatcaaatgcctgacattttcgatgctatacatgcttttatggggcagagaggttctgaccagagatttgggcttatggacgccgttgataatttcatgaggcatagaatggccggaagaaactcaaactttgatgttagagggaggtctggttctctcccagttcctgaacagagttggggcgtttatagttccggtccttatttaatatttcacggtcaagttcctggattcaccttgtctgctggcagcccaagaggtggtcctaggcgtgttgattttggtgactactttatgggtcctggactggaagaacttattgagcaactcaccatgaatgatcagcgtggtccagccccagctgcacgatcttcaattgatgcaatgcctactattaagataacacaggcgcatcttcgctcggattcacactgtccagtttgtaaggaaaaatttgaattgggcactgaagccagagagatgccatgcaaccatatttaccattctgactgtattgttccttggttggttcagcataactcatgtcctgtttgccgtgttgagctgccacctcaaggacaggctagttcccgtggtactcgaagttggggaggaaggaatgccagcaacagcagcagcagtggcagcaatgatagctccaggggcagagagaacagccatcagaaccatggaaggagaaatccattttcatttttgtggccattccgctcgtctaactcgaacaataatcattattctgagactgggggaagcagctcttcaaccactcctgaccagaataatggaacaagttatagcggttggccctttgatcgctaaaagtatcctttcttctcctggataagtacaatttgctgtctaataatgcttgtaatttaaaatgccaaggaaagagtttattagtattgtattttaaacttaagctcatgtaaggaagatagaagtttctt

SEQ ID NO: 10721 - DNA, 1528 bp, Glycine max
  Clone ID: 700963126_FLI
ttgggagttaggttctgcacgctctgcttccagcgagtgttctttcttcgtttcaacaccttaatttgcacacgctgcttcttcagcttgagaaatggcacaagaaacctttctattcacatctgaatctgtaaacgagggtcaccccgacaagctgtgcgaccagatctctgatgcagtgctcgatgcgtgccttgaacaggaccctgacagcaaggttgcctgtgagacatgcaccaagaccaacatggtcatggtctttggagagatcacaaccaaggccaacgtagactatgagaagattgtccgtgacacatgccgcgaaattggattcatctctgatgatgttggtcttgatgctgacaaatgcaaggtgttggtcaacattgagcagcagagccctgatatcgcccagggtgtgcacggtcacttcaccaagcgcccagaggaggttggtgctggtgaccagggtcacatgtttggctatgccactgatgaaacccctgagtacatgcccctcagccatgtccttgcaaccaaactcggtgctcgcctcaccgaggttaggaaaaatggtacctgtgcttggctgaggccagatggcaagacacaagtaactgttgagtactacaatgacaatggtgccatggttccagttcgtgtccacactgtcctaatttccacccaacatgatgagactgtgagcaatgaccaaattgctgctgaccttaaagagcatgttatcaagcctgtcattcctgagaagtacctggatgagaagaccatcttccaccttaacccttctggccgttttgtcattggtggccctcatggtgatgctggtctcactggaagaaagatcatcattgatacctatggtgggtggggtgctcatggtggaggtgccttttcagggaaggaccctaccaaggttgacagaagtggtgcctatatcgtgaggcaggctgcaaagagtgttgtggcaaatggccttgccagaaggtgcattgtccaagtttcctatgccattggtgtccctgagcccttgtcagtgtttgtggacacttatggaactgggaagattcctgacaaggagattcttcaaattgtgaaggagaatttcgacttcagacctggaatgatcaccattaacttggaccttaagaggggtggccataggttcctcaagacagctgcttatggacactttggaagggatgaccctgacttcacctgggaagttgtgaagccactcaagtctgagaagcctcaagcttaagattgttgtgaagttaatcactcccttcaatggatgtcttgctaggtgtggatgaataatttgcgtgttccatgactactactacttcattcataggtctaatgtcatctcatcaatacttaaactgtttttttttttccttttctccttttactcacaatttattttttggttatgcaatgttaccgttttgatgcaatggaaattttatcagaattttgtaccaattgattgcattttgagagggtg

SEQ ID NO: 10722 - DNA, 2338 bp, Glycine max
  Clone ID: 700963253_FLI
accttctcgatcgtgtcgagcttttcatcccctctgtccctctttctttagtcctttctcacctcttttgttgcctttctttcacgttttttcgtttcgctcgcgttgaaatcgcagagaccaccggcacgccaccgtgaaccaccgccgccgcctccgtcagtcactgtgccaaaaatgttgccggcgagcgactagatgatggtttcttatgttgtggaagctgtgggagggtgttggaagattacttttttgctgaggagccttcatttgttaagaatgcggcagggcagagtaaattatcaggcaattatgtaagaacagttcaaagtgagtactctgaatcacgtcaaaggactttagatagagcttatgatgaaattaaatatttaagttttggccttggagttaatgatgaacatatggctgaacaagctttgaccttttataaaatagcgcttgagcgaaatttcacccgtggacgtaaatcagaacaagtacatgctgcttgtctctacattgcattccggcacaacaataaaccataccttcttattgatttttcaaattatttaaggacagatgtttatgtgctaggagcagttttcttgcagctttgtcaagtgttaaggcttggagagcacccaattgttcaaaagcctgttgatcctagtctttttattcatagatataccaagaatttgttaaagcgagggagtaaggctgtctctgatactgcactggccattgttgcaagcatgaaacgtgactggatgcagacagggaggaaacctagcggattatgcggtgcagcattatacatatctgctcttgctcatggtattaagtgctctaagccggatattcttaaaattgtccatgtatgtgaagcaacattgaccaaacgattggtagaatttgaggataccgagtcttctagcttgacagttgaggagttgaatacaatggcaaaagagcatgaaaaaaattcaatgataatgccaggaggtggattaaaaggttgtatttcaaaagacctactgtgtgagcacaaggaggatagtggggtgacccattttgcacttggattatgtgaagcttgctataaggattttgataagctctctggtggacttggtggtggtttggatcctcctgcattccagcgtgctgagagggaaagatttaaaaaaacacttcctgaggagagtgtcgatgaagcatgtgctttggcgaatgcatcaaatgatcagtttaagagccacaaagaagatttgcatgcctatgtgccagaaagggctaatgttgagcatgaggccactaaagatggtaaatatgatgattctcatagagaagatgaatcagaaactttatctgatattgatgatgaagaagttgatttgtacattcatgatgaggaggggaagcatatcaagaagttactatgggaaacagcgaatcgggagtatcttgaggagcaggcagccaaggaagcagctgcagcagctaataagaaagcttttgaggcaaattttgaaaactgttcggaggatttactagcagcaagagagcttgctgcatcttctgctgaagccgtggcaaaatccagaaaggaaatgagacagaaacgagcctatgaggcaaaaaatacaaggccagctcaatctgctgcagaggcctttggccaaatgtctaataaaaaaaggaatttgcagggtctcaaatctaaagtcaattttgaactcctgaatgaattgtttgatgaaatggaaaataccgatgatctcaagaaaccgaagaaagtacggtttgatctgcccctagataatgatgacaatataccgtccaaggttgaggacaaaaatgaagatgagatgggattagcggatgaattcgatgatgaaggtgatatgggggagatgtatcaaaatactgaaaatatggctgataaatatttccctgaggatggtgatttcggctatgatgactatgatgattattactaaaatgttgctagatgatgtttctgattttttttagcaattcatactcaacatggctggcagcgtggaaccgaagattgtcagagacccagaaatctttggaagctaagttgcaatctgataagctagtatcactacacgagcttttttaatgattccacatgctttaaagaaagcttgggaattattgtaccggaaaatttttaggtaggtattaccagcatcactctgcttaacacaaaatagggggttagattatgtgtttcattttaaattatacttatctctaaacatttttttaaatatgacaatcaggaagttgattatttatgctt

SEQ ID NO: 10723 - DNA, 2051 bp, Glycine max
  Clone ID: 700963269_FLI
ggaaaataacaggaagacagataaagagtggcttagtccaaaacctcacacgactccctttgttgcgttgtgtttcctttcgccgaaaccctcgctcgcaacttctacagaatccctttcaccatggatattgaggaggacatccgttctttacagctcgattcagcagaagacaataatggggtggtaaatgcagaggatggaaggccagaagaagttgagaaatctgataagatggatgaagatccaaagcaggatgttgaggctgagccaaaggctgttgaggctgagccaaaagtgaaggataaggaggttccttctgttcaagatgaagaagatgaaccagagatgacaaaaagacacttgaatgttgtttttattggtcatgttgatgctggtaagtctacaactggaggccagatacttttccttagtggtcaagttgatgagcggactatccaaaaatacgagaaagaggctaaggacaaaagtcgagaaagctggtatatggcttatataatggacacgaatgaggaggagagggtaaagggaaagacagttgaagttggaagagcacattttgagactgaaacaacaaggtttactattttggatgcacctggtcacaaaagctatgttcctaacatgattagtggtgcatctcaagctgatattggagtgttggttatttctgctcggaagggagagtttgaaactggatacgagagaggtggacaaactcgtgaacatgtccagcttgcaaaaacgctgggtgtgtctaagcttcttgttgtcgtcaataaaatggatgagcctacagtgcaatggtcgaaagaaaggtatgatgaaattgagtcgaagatggttccatttttaaagcaatctggatacaacgtaaaaaaagatgtcttgtttttaccaatatctggtctaatgggtgcaaacatgaaaacaagagtggataaaagcgtttgtccatggtggaatggaccttgcttatttgaggcacttgacgctattgaagttccactgcgagatcccaacggtcctttcaggatgcctattattgacaaattcaaagacatgggaactgttgttatgggcaaagttgaatctggcagtgttcgtgagggagattccttgttggtcatgccaaataaggatccagtgaaagttgttgccatatttattgatgaagatcgtgttaaacgtgctggacctggtgaaaatttacggattagattatctggtgttgaagaagaagacatattgtctgggtttgttctatctagtgttgctaatccaataccagcagttaccgagtttgttgctcagttggtgatccttgaattgctagacaatgctatttttactgctgggtacaaggctgttctgcacatccactctgtggttgaggaatgcgagattgttgaactcttgcagcaaatcgatacaaagacaaagaagcctatgaaaaagaaagttttgtttgtgaagaatggagctgttgtagtgtgccgtgttcaggttaataactctatttgcatcgagaagttctctgattttccccagcttgggaggttcactcttcgcactgaaggaaaaactgttgctgtgggaaaagtcactggtctgtgaatttgtaacaattttgacttgaggacgggaattcctgcacaaatatagtggagtggcagctgaggcataattgacagcatcaagtttaccatatattcatttcggtatttattttgcttttacttggggtagtattcagtgaagagttatttgttgccgctggtgtccatgatgtacttgtatacggccttacaaggcctggctgcttcagtattttgcggttggctgcttccaaccgtgctactcgtgagatataatttgaaaatggatggttttaaatcaatctgccttattagctgtggaatctgatgactattttagcccaacagcggttaaacaaatttcctagttgtagttgactagcatatttaattctgatagtgatattgttttaatgaatcatgttgcttagt

SEQ ID NO: 10724 - DNA, 2011 bp, Glycine max
  Clone ID: 700963303_FLI
atccaatatgacggaggaacggaacgtgcggaagacacgtgtggtcgacgtggtcctcgactgcgtcatcccttacatcgacgaccccaaggaccgcgacgccgtttcccaggtgtgtcgacgctggtacgagctcgactcgctcacccgcaagcacgtcaccatcgcgctctgctacaccaccaccccggctcgcctccgccgccgcttcccgcacctcgagtcgctcaagctcaagggcaagccccgagccgcaatgttcaacttgatacccgaggattggggcggacacgtcactccctgggtcaaagagatttctcagtacttcgattgcctcaagagcctccacttccgccgcatgattgtcaaggattccgatcttcagaatctcgctcgtgaccgcggtcacgtgcttcacgctctcaagcttgacaagtgctccggtttcaccaccgatggtcttttccatatcggtcgcttttgcaagagtttaagagtcttgtttttggaggaaagctcaattcttgagaaggacggagaatggctacacgagcttgctttgaataatacagttcttgagactctcaatttttacttgacagacattgctgttgtgaagattgaggaccttgaacttttagctaaaaattgccccaacttagtgtctgtgaaacttactgactgtgaaatactggatcttgtgaacttctttaagcatgcctctgcgctggaagagttttgtggaggcacctacaacgaggaaccagaaagatactctgctatatcattaccagcaaagttatgtcgattgggtttaacatatattggaaagaatgagttgcccattgtgttcatgtttgcagccgtactaaaaaaattggatctcctctatgcaatgctagacacggaggatcattgtatgttaatccaaaggtgtccaaatctggaagtccttgagacaaggaatgtaattggagatagagggttagaggttcttggtcgttgttgtaagaggctaaaaaggcttaggattgaaaggggcgatgatgatcaaggaatggaggatgaagaaggtactgtgtcccatagagggctaatagccttgtcacagggctgttcagagcttgaatacatggctgtttatgtgtctgatattacaaatgcatctctggaacatattggaactcacttgaagaacctctgtgattttcgccttgtgttgcttgaccatgaagagaagataactgatttgccacttgacaatggggtgagggctctactgaggggctgtgacaagctgaggagatttgctctatatctcaggcgtggcgggttgactgatgtaggccttggttacattggacaatacagtccaaatgtgagatggatgctgcttggttatgtgggggagtctgatgcagggcttttggagttcgctaaggggtgtcctagtcttcagaaacttgaaatgagagggtgtttatttttcagtgaacgtgcacttgctgtggctgcaacacaattgacttctcttaggtacttgtgggtgcaaggttatggtgtatctccatctggacgtgatcttttggtaatggctcgacccttttggaacattgagttgattccttctagaaaggtggctacgaataccaatccagatgagactgtagttgttgagcatcctgctcatattcttgcatattattctcttgcagggcagagatcagattttccagatactgttgtgcctttggacactgccacatgcgttgatacctagaggccagagctgtgtatatataccagttttcttttgtttttcttctcccctttcatatgctgtttctatgttcctgctctatttgtagttcattttagacaattagtcttgtaataagcctgtgttttcatttgaaattctgaaacgcttcccctaacgctattggctcccttaaaaactgaacattctcaattttgtgaataaaaagcaattcttccccccttttggatc

SEQ ID NO: 10725 - DNA, 917 bp, Glycine max
  Clone ID: 700963537_FLI
tgccagccgatgctgctgcaccacatattgttaaagaagctgtacaagcaaagggacttagagatgatacaacctgcattgtagttgatatattacctcaggagaaaccacctgtttctgcgccacaaacaaagaggccagtaaagggaatgctcaagtccatgtttcgtaaaaaatcttctgaatcatcttcttatattgacaaagagtacatggagccagatgtagtagaagaattgtacgaggaaggatctgccatgctttcagagaggttagatactaaatatccagtctgcaacatgttcaagttgtttatgtgtgcagtatgtcaagtagagataaaacctggagagggtatttcaatacacgagggtgcacccgactctcgaaaatttcgtccctgggacggacctttcctgtgctcaagttgccaagagaagaaagaagccatggaagggaaaagatcatcaggtagaattagcagtggaagtgatgaatgaactctcgtgtaaatttgcattttgagagtgataaaaattgttcatatgatgggaaagtcaaacaattcaatcaacaaagactcccttctaattttcactggggctttatggatataattttgaattccacatgaaaagacatatgaaaagtaaaccaatagcagcctgttagaagatttctgacttggaagtatgaaatagcaacaagtattgtgaagggttgtgttaaatgtggaagtacacaacaagatatcagaggtaatgcattctttttatatacttttttttgtgggatccgttcatttgtatacgggtcatttggaatcactatagacctttaatgaaagtggtctttgttattgtaatgtaatatagggagtttaattagaattcatagaatcaattctactgtaggtt

SEQ ID NO: 10726 - DNA, 448 bp, Glycine max
  Clone ID: 700963596_FLI
gtaggaccagtagattcagcttacaaggctatcaatctcatcgtgaaggaaactgtaaaagtacttgagtactcactaagtacagttacagaaggcactgatgcaattgcaactacacgtgttgtaattcgtagagagaataagcaatcaccaactcctgctttgaatggaaacgtaatttatccaacatttagtggaaccggagaaggggtggatgttgttacttcaagtgtagaggcttatcttactgcactaaacaaaatgctcgatttaaaggaatgatttatatttgatgaaagaattctagcacctaaatgttagaattaacacttcaagttatatattgttctagaatgttacctttgtcaagtctccatataatgtacgagaaatggacttaataatgtcttcttaaaatatgtgaatttcaaatatcaatttcatcttc

SEQ ID NO: 10727 - DNA, 1433 bp, Glycine max
  Clone ID: 700963673_FLI
ggaagacttaggcccactgaatatcaaagaacttgagcatcttgaacggcaattggattcatctctaaagcaagtgaggtccacaaaggtaataatggataatttatacataaaaaatgtgttaagtttttggcaaattaatatatacattaagcttattaatgtagttcttgatcagtagttgcagcagcctagcgtaatttctctatttgatttaagcatctttccgtttttccgtacaatttgtttttgccaatactatggccgatgcaacattagaataggatttatcattcattaaagattttggatatttttatatgtgaagaaaatgtactgttaaggagtcatatgtaacatattcttctttttgtaatgaaaaaaaataatgcatgtggtaaatatatgatttattgtgtttgtatcctttaatttttcactactgtgtaattttcttaagaaaagcttattgtgactccttttggttacttggcactgtctgaaaaaccaatttgcagacacaattcatgctggaccagttatctgatcttcaaaccaaggagcagatgttagtagaagcaaacagatccttgacagtgaaggtaattttattccattatcctcgatgttcttcccctacctatcaagatcgattttgtaacacaaatatatatccagcttagataatttgatattctttttagttttaatcagtttgggagtgtactgtactaccctgcatctgtattttggcctatcagattggatacctgcaagttaaaattttcttcaaaatagtcctaacattgttttaaggtggtgaaacaaaaataaataaaaaccttaaggtggaaatattattctgcatattgtcgatataaataatcaatcttagtcattttacattaaggtcctctgctgatgacatgattcatgtctaactacttgttgtcagctggaagaaatcaattcaagaaaccactacaggcaatcatgggaagctggtgatcaaagtatgccatatggtggtggtggtccagagaattctcactctcagggcttcttccaaccattggaatgcaaccctacactacatattggtcctgattacaggtacaatgctgtagcttcagatcagataactgccacaactcaacctcaacaagtgagtggctttattccagggtggatgctttgaactaattaggctcagtgcattcaggtggagacataaaaaagcaaacaccttacaaaagggcaaaagccaaaaatgcatcttggtgttggcaaggtgtaaatgcaaccctgcttctacagttattttggtgtataagaaactgatgttgtgacttgttcaaacttttgaacttttagccatagacatatatggcaatttataacattaggtatcttttaaaggatccctttttatt

SEQ ID NO: 10728 - DNA, 1037 bp, Glycine max
  Clone ID: 700963825_FLI
gtattttttctgtgtgagggacagaaaatacccaactggtcaaaggactaatagggccactggtgttggctactggaaggcaacaggcaaggacagagagatatataaggcaaaggcactgattggaatgaagaaaactcttgttttctacaaaggaagagctccaagtggtgaaaaaactagctgggtcatgcatgaatacagattagaagatgaacattctgtgcacaatccacccaaaaaggccatgaatgattgggccatctgcaggatttttcagaagagtaatggtgggaagaaaatgccaatttctgggttggtgagattcagcaattttgcaaaggacatgccttcattgatggattcttctccatacaacgacagtgaatcaaaacctgttttgggggagtcatcacagccaacatgcttctctgatccaaaccaaagtgaggaccaaaggacacaagatgaaaacatagcggatagctatgaaactctcatgttggcatcttcatattcttcaaacccctctgatatttcccctgcctcatggactttttctaaatctgcccctaccgtgtcccaccaatcactccaagttgggaattcacacagctcagattacttcatgcttcatcaggaacagtccatgttggggatgttgattgaaaaccatggagcaagtgctggccaaagaactcagaaagctcaggatagtaaaggctctgatgctgacatgtcctctgtgatgtacaacaactatgaaatgttccaaagatcatttgggaaccaggaatattcatcaccttccgtaggacatgtgtattctagtggcctatggggattttaaagaaggttgaaggatacactatatgcagattaaaattagagaaactttagggattaaatgctattatacatgtaaataaattgctcttaagctaatgttatcctacaaagtacaggaaatggatgttacggttttccaaagttgtatggcttgacagttttatattatattagtaaatttttatagt

SEQ ID NO: 10729 - DNA, 800 bp, Glycine max
  Clone ID: 700963839_FLI
ggttgggatcttattcaactgctgaagcagcagcaagagcctatgatgctgcacttctatgcctcaaaggctcctcagccaatctcaacttcccttcttcaagctcctcctcacaacactatatcatccctcaagacactgccatgatgtccccaaaatcaatccaaagagttgctgctgctgctgccaacaatttcttggacaataatgctattgctattaataatgctaccaccccaccttctcctcctcttgcttcaacctcttcttcatttgtatcgtcaccatcaatgtcatcatcatctcctttagaccaaattgatgatgatgtctctcttctgacaccatttggggcctacactactactactgctactactatctgtgacgaaacaaatgaatcaatggccatgatggaatcttggtatgacttggaggggttgcaatccccaaagtatgttgatcaaatgctaagtggggcattctttgacattgattcaacacagttgcttgatgatctgtatgaagaaagtgacattcgcttgtggagtttctgctgagagtgattcattactttcaagccaacccatttttattttttctgctcacaaattcatattcgtttgccaggtggtgttatatgaagatatcaatcactgactcaccaaattataattacatattctagggaagatatccacaaaggaatagacaatttttggtctctcctttgtggatttctacatgtgtattactgatgcaatatttgttatgtgtaatttattaatagtttttcatgt

SEQ ID NO: 10730 - DNA, 657 bp, Glycine max
  Clone ID: 700963954_FLI
acaaaacccgaccctgatacaatgcagccactggatgaaggttttggcgcaattgttcagtcttgcaggcgactcaggcgcctatccctctcggggcaattgaccgaccaggttttcctttacataggaatgtacgctgagaagcttgaaatgctgtccattgcatttgctggggagagcgacaagggaatgctctatgtgttgaatggatgcaagaagcttaggaagcttgagattagagactgcccttttggcaatgtggcacttctgacggacgtagggaagtatgaaacaatgcgatccctttggatgtcgtcctgtgaagtgaccgtcggagcctgcaagttgctagcgaagaagatgccgaggttgaatgtggagatcttcaatgaaaacgagcaagaagattgtagtctggaagatgggcagaaggtagagaagatgtatttgtatcgtacattggctgggaaaaggaaagatgcacctgaatatgtatggactctataggtgcattttttaggtcatttaatttcttgttattcagaagtttgtactttgcttttagggctgactgattaatgcaattttagccgggtgtagtgttttgtaacttgcattttgctagttttatacatatgctagattgctttttctcct

SEQ ID NO: 10731 - DNA, 1552 bp, Glycine max
  Clone ID: 700963984_FLI
gaattccatcaaactcgctgcattgtcttttgttgaatttcttcttcctcacagcctaccaagttcataattaaccagaaatccaataccccatcaacaccccgaagatctaaaagaataaagcatgtggcagataaaactgccaacaatgttcccgaagtatcttcatccgaggaattattgaaggtaaaattaattacattactgaaggtaaaattacttacatcactacttgtcaagtacctctacttgttattcactttaacattccttttgatcataacagggacgtacagctgaaaattcacaagtagatggcaaagaagtctcttcagatatcgatgccttagtaatctacaaaagaaaaagactacctcgaaggaggtcttctggtcaaataggcaagtccccaaagaaaactgttcctacagagcctccaactgctgcaatttcaagctctactactgcatcacctcctcatcaagatcctcctgcagctgctccagccaatgctgatgcttctcatattgaaaatacaaacactgctgagccagtattgagtaaaagccttgtcgaagaggtcgggaaagtgaaccctgctccagccaatgctcaagaacaaattgcttccagcaagggtcaagaatctccagatcaagttgactcaaaggctgatgaagtctctactgggaacaccccactcgatctagaagccattaacaaaatgattgaagatgaccctttgagtgctattgaaaatattctgacagggaaggtttccatttcttccaagactccacaatctatcactcaggcagaacaaccaaaagttcaaggctcccctgcagatgttctgtctaaagagctaaaagacttaatgcagacctttagcttaggtgattttgttactgactatgaacaaatgtcaaaggtcctacttattcttgaagagttgcagaagaatgagaagtttctttctcatgaacagcaaacattcataaaggccttcagactcttcttcaacaatgctgttactcaccgcaaagaatgtgatatggctagaataaagaaagtcgacttgaaccgagctaaagaagatatccttcgcaaactgcaagaagttaaacatacacaggaacaaatcacaatgtccatttcaaatgccgacaacagggtcaatgaaatatcttcttgtattgaacaacttgaagaacagttatacaaactgaaggaagagagggagacctttcagttggctattaaggaacgggagaaacaaagggagacattgaagaatgatagcatcttatgggctcatcagactaaggacctggtttttgatcttgcagagattgaggccaaagaaaaaatccttggacagcaacttgaagccgacaatgatgcatatgaccaatttaaagcgtcctttcctttttaatttccatttgaacaattgatagttgtaattacactgttatgttcaattcatgtgtggtttagttcatgtatgtttagtttatgctccttcaaatcaatttaaggatttagacct

SEQ ID NO: 10732 - DNA, 2232 bp, Glycine max
  Clone ID: 700964002_FLI
cattgttgttggagtgagcgaagaatatgtattctagagattcatggggtggaccgttggagataaacgcgacggactcggcgacggaggacgagcggagccggaacctgcaggacgttgacagggcagcgctgtcgcgtcccttggatgagacgcagcagagctggctccttggccccggcgagcagaagaagaagaagtacgtcgatctcggctgcatcatcgtcagccgcaagatcttcaagtggaccctcggcacaatcctcttcgccgccttcctcgccggcctcatcgccctcatcgtcaacaccgtcccccgccaccgccacaaacacccccctcccgacaactacaccctcgccctccacaaggccctcatgttcttcaatgcccaacgatcggggaagttgcccaagcataacaatgtttcgtggaggggaaactcgggaatgcaagatgggaagtcttcagatcattctgctgcgattaaggatctggtgggtgggtactatgatgccggggatgctatcaagtttaactttcctgcttcgttttccattactatgttgagttggagtgtgattgagtatagtgcaaaatatgaggctgctggggagcttgaacatgttaaggagatcattaagtggggtactgattattttctcaagagtttcaatagtactgctgacaccatcaccacccttgctgctcaggttgggcttggagatacttccggtggtgacagtccgaatgaccactattgctggatgcgcccagaggacatggactatgaccgccctgtgactgaatgccatagttgttctgatcttgcagctgagatggctgctgccttggcatctgcttccattgttttcaaggacaacaaggcctattcgaagaaactagttcatggtgctaccacgctgttcaagttttctagggagcagagaggcaggtacagtgcagggagttcggaagcttctatattttacaattctaccagttactgggatgagtatgtttggggaggcgcatggatgtactttgcaactggaaattcatcgtaccttaagcttgctactgctcctggcctggccaagcatgctggtgccttctggggaggccctgattatggggtactcagctgggataacaagcttgctggtgctcaggttcttctgagtcgtttgaggttgttcttgagtcctgggtatccatatgaagaaattttgaggacctttcacaatcagacaagcataatcatgtgctcctatctaccagttttcacaagctttaacagaaccaaaggtggcttgattcaattaaaccatggtaggcctcagcctctccaatatgtggtcaatgcggcctttttggctgccctatatagtgattatcttgatgctgctgatacacctggatggtattgtggacctaatttcttttcaaccgacgtgctccgtagctttgccaagtcccagattgattacatccttggaaataacccaaggaaaatgagttatgtcgtaggttttggtaatcattacccaaaacacgtccaccatagaggagcatctgtaccgaagaacaagatcaagtatagctgtaaaggtggatggaaatggagggacacttctaagccaaacccaaatacaattgttggtgccatggttgccggtcctgacaagcatgatggcttccatgatgttcgtacaaactacaattacacagagccaacacttgctggaaatgccggtttagttgctgcactagtggcattgtcaggcgacaaaggcacatctattgacaaaaataccattttctctgctgttcccccaatgtttcctacaccgccaccacctccagcgccatggaaaccataagctcatcgtgccattggttatttctttctagcaagtaccccagatgatatgagtgcaccgttaaccttcgttgttttgtatcaacttgaagatcagggtaattttgaagaaaaaaaagcttggagaagtggagcttggccactgaatatagctgcctggggccaatgatcgactcaagattagcattaagaattgataaagtggtacttgagagtgtgtctctttaaatttttgtgatactcatatagtatatatgtatctaaatcaaatcttgtattctttaaacatgaaaaactgaacagcttgtaattgtttgacagtttcatctaatgccttcacagttttaccc

SEQ ID NO: 10733 - DNA, 1972 bp, Glycine max
  Clone ID: 700964040_FLI
cggaaataaaaaaatcccaaagaaattcaatcttcttcatccccaaaccaaagacttgagatctcagattacaccctttcttcctttgttttctcattcctgtcctttctcagacaacaccatctctctctctcttgttccctttttagggtttttgtaatgggtctcggtaacgacgaagaagaggataacaataacaatgataaggttgtggatgacggagatgttggaggaggaaagtctttcggttcagtgtcgtgttccatttgcctcgaggttgttgccgataatggggatagatcctggtctaagcttcaatgcggtcatcaatttcacctcgattgcattggttcagcattcaacataaaaggagcaatgcagtgccctaattgtcggaagattgagaaaggtcaatggctatatgctaatggttgtcgctcatatcctgaatttagcatggatgagtggactcacgatgaggatctttatgatcttagctactctgagatgtcctttggagttcattggtgcccttttggcaacctggcacgacttccatcatccttcgaggaaggggaattttcatcatctgcgtatcatgatgtattgggacacatgccatatttgctgaacatacagctgtgtcatctgccagccatccttgcccgtatattgcttactttggaccaatacatccatcctcctccaattctggtggaactgtatcagaagcttcaaacttcaaccattggaatggctcgtctgtgcccagtgacatgccaacttcctacacatttcctgctgttgatcttcattatcgcagttgggaacaccactcccctcctttctctacagcaagtagtcgtctagttgctgcagatcagccatcagtatcccctggtagtcaaaggccagccaggggtggttcggatgtaccaagatcaggatcttttatgcatcccttccttgttggtcacagttctgctgccagagcggggagctcggttgcttcctcaatgatccctccttatcctggtagcaatgctcgtgcccgtgatagagtccaggctcttcaggcatactatcaaccacagcaacctcctaattcaaccacaatgcggacacctatcgcttctggcacccgaagatccagtagtcataatggaccagctcaattagctccaatggccacatcgccagaccaaggtggtggcttctttcttatcccatcaagttcatcaggacgcaattttcaagaagaaaatcatcatctaccaaatcacttccatgcttgggaaagagaccacttgccttcattatcattgaaccatgttgatagagattcaggttggagagcataccaccaggctaccagccggtcagacccagctaccaggtccagcagctttcgtttaaggcacggatcagatagaatgccttcacaaaatcggtaatacacttgtatcctgttcactgtgaagcaaactaccattactatggaaagttatgtatgctttgaaaaatgttacatattgctttggcacttcggcctttgggtctgtcctgttatgacagactatatactctggctggccttggaattgatttttccatagccaccggtgtgatggacatttgcttcctctagtttatttgccccggtgggcataaaataagatggtatatctagttggggaaatcaggttttggaagaaatactgggacgttgtgatttcaagtggtgaatcaagtggacgaaagcagctgtggctggatttgtagtgggtcaactatttatgtttgataacaacgctcatgcaaatgctgtgtattgagaatacaattttacttctactccatggcaagagtgatttgtaaactgttgtgcaagaattgagccaaggtatatggtaatggaactcgcatgagaactaccatacctcggaataataggagttcaaaggctggtttt

SEQ ID NO: 10734 - DNA, 661 bp, Glycine max
  Clone ID: 700964081_FLI
caaaccacaccaacatcacagccacaacaacaaccaatgcaacttcatcatcatcagcagccgatagcagtgtctcaaccattgggatgcaaggacaacaaggagcagctcctcagttgagggggaagagacaaggaatagtgctgtagatggatgaatgaatgaatgtcccttcatgctaactagaaaactttcacgtgatgtgttccccatcaatgttgttggtgtgggggcaccctgacacagtgatgggggttggagggtaggaacttcacaagtggattaatgcttgaaaataggttggagatttttttttttttatgctttcaaggtgaagaaaattggttatatcttgggggttggattgggattttgggatttgatgatttcttcagattacacttttttttaacataaaaattattctcaatgattttttattttgttgggtggaataaggggacaaagcatcgtggttttgtattgggtatgcatgggagctgtcagagaattatttttctcctttttttttttgtttggagaggaagggggtgtctgatcgtagtagtttaatttcttgtttttcttcgttttggaactaattgtttgctattttgtattttatttggatgaattgtacaaaattttaattaagccagct

SEQ ID NO: 10735 - DNA, 869 bp, Glycine max
  Clone ID: 700964194_FLI
gggcttttttgttgttctccccgtctgtgactcactgttttagggtttggtcaattggtgacagattgaagatgatagaccttgcgcgcgtgcagaaggagcttgtggaatgcagcaaggacgcggagggatcgggcatcaaagtcagccccaaaaacgacaaccttgttctcttgatcggcaccattcctggccccgtcggaactccatatgaagggggcattttccagattgatatcacattgcctgatgggtacccgtttgaaccccccaagatgcagtttaaaaccaaagtttggcaccctaatatcagcagccaaagtggagctatttgcctggatatcttgaaggaccagtggagcccagcactcactctgaagactgcacttctttctgtgcaagcacttctctctgctcctcagcctgatgatcctcaagatgccgtggtggcacagcagtatctgaaagactatcagacatttgttaacactgctcgctactggacagaaagttttgccaaggcttcgtctcgtgggattgaagataaggtacagaaactcgttgagatgggatttccagaagctcgagtaaggagcattttggaagctgttggtggtgatgaaaacatggcccttgaaaggttgctgtagatcatggtcaagtttaggaagacgtgtctccataatatgatggaaccatatagacaataggttttaaattgaatagagtcatataaatctacttggaatatcgtatagtccttttgttttacttttctcctccttggaaactacagttctcgactatttcctgattattatatatatcagctatgaaattaaataccttgttggcaaggtttctgcttc

SEQ ID NO: 10736 - DNA, 874 bp, Glycine max
  Clone ID: 700964235_FLI
cccttttcagtttataccaaataaatgatgttacaagcttcttttttgcgcttgatctctttcttctttctcatcgcactccctcttggaagaagctctaccaccttgaatgtaccaaaggacataatcaaccaaacatgccaaaaatgtgccaaccaatccatcatcttgagctacaacctatgctccacttctcttccggcggttccggtgagtcactccgcaaatctcgaagggttggcgttggttgcaatggagctagcactagagaatgtcactagcactttggcaatcatagagaagctattagatagcacaagtttggataattctgctttggggtgcttagcagattgcttggaactgtactctgatgcagcatggacaatactgaattccgtaggtgttttcttgtctgggaattatgatgtaactaggatttggatgagttcagttatggaagcagcatcaacatgccaacaaggttttactgagagaggtgaagcttctcctttgacacaggagaattataatctctttcagttgtgtggtattgcactttgcattattcatttggctacacctggagtaccttattctcaattattccacagataaatttggtcgtatacgctgtctttctcatcaataaagtgagagacatcgatttagtatctcaaaatggacaatattagtgagtatagtggaaacgttttgtatcttaatagaaaagggaattaaaggagaaagacggagtagagatgctagtgctagacattagacatagaaattagaatcatctacgttgttttctttgttttagtttttattagagcaaaatcttttctatgaatgaaaggtgtatttatcgtag

SEQ ID NO: 10737 - DNA, 1316 bp, Glycine max
  Clone ID: 700964422_FLI
ttcatcacaaaaatctagtgaaacttttagggtgcagcattacaggacctgaaagccttcttgtttatgaatatgtgcctaaccagagcctccatgatcacttttctgttagaaggacttctcaaccgctgacttgggaaatgaggcagaaaattatattaggaattgcagagggcatggcctaccttcatgaggaatctcatgtgagaatcattcatagagacataaaattaagcaacattctgcttgaggaggacttcacacccaagattgctgattttggacttgctagattatttccagaagacaagtctcacattagcacagccattgctggcacactggggtatatggctccggagtatattgttcgtgggaagttgactgagaaagcagatgtttacagttttggagttcttgttattgaaatagtttctggcaagaaaatcagttcctatattatgaattcatcctctctcctacaaacggtttggagcctctatggatcaaataggctatatgaagtcgttgatccgaccctagagggtgcttttcctgcagaggaagcatgccaactgcttcagatagggttgctttgtgcacaagcatctgcagagttgagaccatcaatgtcagtagtagttaaaatggttaataacaatcacgaaattcctcagccagcacaaccgcctttcatcaattccagtagttcagaattcagcaaatctggtttacctggatataattttcagcctggatccaacactcagtcttcagggaacaccataagtgaaagtcagattgagcctagataagttacactgcacaacctttctcctggaccatttttatgtgctcacaatccccaattacccttgtaaaagctgttggcattcttgctttcttgtaaaagtgtggtttcagttatcagcatggcattgcccttgtacatctctgaattgaaaggggagtggcataaccccatatgaacctctgccaacagctaccacccattgctttgtgtatagattacagtttcacaaaaagctgcaaggtaaaaaagttaaattttgccgaaaacttgtacattacattatcacacaggtcacctagaaaagaatcaataagcggattatactatatgctttttaacagtttgagttctctactaacacctgattgagttttctaccaggcacctagaacgaaaggtgcaaggattccaagaattttacttgtaaccaccagtgattattcatttacattttattcttttatgtaacattaatttattttaagttccttattttattgtt

SEQ ID NO: 10738 - DNA, 999 bp, Glycine max
  Clone ID: 700964450_FLI
gtgtgggtttcctagggaatccattctcattctcacagatgatatggaggagagaaacccacaaaaattcccgacgaaatataacattctgaaggccatgaggtggctaattgagggtagccagtcgggggattcattggtgttccagttctcaggacatggttgtcaggaactggatacgaatggggatttcgatgagcttgatgagcgtgacgaagcaatatgtccggttgattgggaaaagcagggaattatactcgatgatgatattaatgctgcaattgttaggccactaccatacggtgctaaacttcatgccattattgattcatgcaatagtggcactgtccttgatttagcttatgtgtggagccagagggacacatgggattatcaatatggaggtcctgataaagacacaagtggagggctagcaatttgcatttcaggttgtggcgattatcaatcgtccaaagaaatccctgtcttaagtggtggtggcggcggcaatgcggtcactggcgtttttacttatagtttcatctataccatgctaaatgaaccagctggactaagttatggtggcttgctcagttccatgcgttcaaccatccgtgggatgctaaataacccaaatgcttcgctgtttaatacagattttaccttggccccaagacaggatttgcagaagccacaactatcctcttccatggagtttgacgtgtatacagcccgggttgaactgtgatggtaaattctcgtcagaaaataattatggagattataacagtgtagacagttgacagagattaaagatgtactactattcgaaataaattaaacgagttattggagattcgtaacatctaagattcagaaatttatggtatatcttaacatgtaaaataatgaacatgttgcatgctgctagcgttctaattacatttgaattaacaatgtccagtgttatatctgtaatgaaaattttttaagtgtggg

SEQ ID NO: 10739 - DNA, 1298 bp, Glycine max
  Clone ID: 700964632_FLI
gctcatcacagccgatcttacatcaattattgttcaattgatctctactgctggtagtcttctcccctctgttaggcacaccctcacaaacgcaaatcccttggttggccagcttgaccagcttcatgggattaacctcccttttgaatcagaaccaagtagtggtattaggccacaaaataacagtggaaataaactgtttgatcagtccattcagaatgatctaccaaataaattggaaatggagcaaaactacaatatggaagagcatgagccaaaagatgaagaagatgtggatgagggagagaatcttccacccggttcctacgagattttgcaattagaaaaagaagaaatcctcgcccctcacacacatttctgtacaatatgtgggaaaggattcaagagggatgcaaatctccgaatgcacatgcgcggccatggtgacaagtacaaaactcctgcagctcttgcaaaaccacacaaagaatccgggtctgaaccaaagctcatcaagaggtattcctgcccctataacggctgcaagcgtaacaaggatcacaagaaattccaaccactaaagaccattttgtgtgtcaaaaaccactacaagagaacacactgtgacaagagctacacttgcagcagatgcaacaccaagaagttttcagtcatggcagaccttaaaactcatgaaaaacactgcggtaaggataaatggctttgttcatgtggcacaacattttcaaggaaagacaagctttttggacacattgctctattccaaggccatacaccagctattcctttggatgaaaccaaaggaatggctgagccacctgatatccagaacagagaaagcaacaataaggtagaaagtattaacttctgttttggatcaaattcttcaagtgaaaatgtagttcaaaacatgatggatatgaaaggtaataatgatgatcccatgaattatttctcatcattgaacttcgaaggctgtaactttggggcgtttaatgaattctcccaacctccatttgaagattcagatggttgtttctcttttcccatgtcaggatcctttaattatgctcccaaatttggtggcggtgaatcaagttctgacaatctgtagtgacaatttataataatgttactctacatcatgtctatgttttctttattcccctgttaacgaataatccttttgttttgtcaaatttgtaaatccaggtaatatcatgtactcccaccatctctttatattgaaaaaaacaacttttatgtttatatttttt

SEQ ID NO: 10740 - DNA, 846 bp, Glycine max
  Clone ID: 700964776_FLI
catatacattttttagccttttgttagccccaaacacccacacgggcacacccctgcaggtacaaaagggggagttcacaacaaaaagaaaacaatgagaaaaccttgttgtgacaaggaaaacatcaataaaggtgcttggtccaagcaagaagaccaaaagctcattgactacatccaagtccatggtgaaggctgttggcgttccattcctaaagctgctgggctgcatcgttgtggcaaaagctgtaggatgagatggttaaactacttacgaccaggcatcaaacgtggaatctttgctgaagatgaggaagacctcatcatcaaactccatgccctccttggtaacaggtggtcactcattgctggaaggttgcctgggaggacagacaatgaggtgaagaactattggaattctcacatccgaagaaaactaataaagatgggaattgatccaaatagccataagccacaccaaagctttcctcgtcctcatgtttcttctgctgatcatcagggtgcatcaacatctgagtccatcaacaacaacaaagtccctttcttcaattcccgtggttcagctgccactgatcatcataagatttcgttcactaaagaagaaacatcaattatttcatcaccccctttgaatcttgatcttacaatttctttaccttcgcctgtggaagaaaacaaaaattctgatcatgagtccgccaagacatgtgacgtggatatagatctcaactgttagtacttttagttgttggcaagagtattaattaccagcagtagtacttcatgtttgttacaaattaattttggagaaataatcagtttttc

SEQ ID NO: 10741 - DNA, 1959 bp, Glycine max
  Clone ID: 700964909_FLI
cttcatgaccctgcccaacatcaaggttcctctcattcttggtatctggggaggcaagggacaaggaaaatctttccaatgtgagcttgtctttgccaagatgggaatcaagtgagtttctagctgaactagcccctccattatgtgcatttttagattcacgttagttcatccaaaaccacattgaaatatcagctcagctaatgtaattttatatataaaatcacttgttcgatgtcatgctgaggaattgattttgacttttaaacggctttaaaagtaacttttgtgtgttgggtccaaaattttatagtaaatttgggctgttaacttgctaattttaaaataaaatcgtctaaatataaatcatttcacctcaaaataagttttacaaaagctcactcaaacacacacaatggaaagaactgatgtcttgctatactcatgctgcatcaaagatttgaattattattgaacctcacaactaaaaaatccaacactctttaacttttaaacccctttgtggtattgtgattgattccattacagccccatcatgatgagtgctggagagttggaaagtggaaatgcaggagagccagcaaaactgatcaggcagagataccgtgaagctgcagacatgatcaagaagggaaagatgtgcgctctcttcatcaacgatcttgatgcaggagctggtcgtcttggtggaaccacacaatacactgtgaacaaccagatggtgaatgccactctcatgaacattgctgataaccccaccaatgtgcagcttccaggtatgtacaacaaggaagagaacccccgtgttcccatcattgtcaccggtaacgatttctcaacactctatgcacctctcatccgtgatgggcgtatggagaagttctactgggcaccaacaagggaagaccgcattggtgtttgcaccggaattttccgcactgatggtattcctgaacaggacattgtcaagcttgttgacaccttccctggccaatccattgatttctttggtgcactgagggccagagtatatgatgatgaagtgaggaagtggatttctggtgttggtgttgacagtgttgggaagaagcttgtgaactcaaaagatggacctccaacctttgagcagcccaagatgactctggagaagctcttgctgtatggtaacatgcttgtccaagaacaagagaatgtcaagagagtccaattggctgacaagtacttgaacgaggctgctcttggaaatgctaacgaggatgctattcagaggggaactttcttccagtcttgaattggaggcaaagcaaacttggcaagtaaatatttctgttcgtgaaggttgttgtactaatccaagtgctagaagttgtgatggaacttgcgtgtaacattcttagcattctcaatgtcttaggtgcaaagagaagatgctaagtttgagatgatcttactatatttttcatattggaccgtcttcctctataattttgagttacagtgtccacttaaattgaatttggtgccttttccttttgtcctatattcttgatttatttttttaaaatttatttcttttgtttgacgtacaaatattagtacatatctagcccttatagcttcattttcaagtgctaaggatctgaagaacttggagagaaaggtcaagttcagagctcaataatgaatggcaagcggccaccaaatcataaacattacaaattgttccttatatacagtaactactttaggcccaaaaagaaatgagcacccaaaccacttatcaaataactcccatcagatgttgcactgataacactcttttaacgtgatctttcatttttcatatgttacactgtaatgttcttttagcatatgtacccttatgtaagtgtcgatggacattttcatgaatgaattattgaccccccgccaaaaaag

SEQ ID NO: 10742 - DNA, 2077 bp, Glycine max
  Clone ID: 700964957_FLI
ttcagctcctcttcaatcatttttaaagctctgagcttaaacaaaacattggatacgacatgggttttcagaggtttctcataatatgaccaatgtttgtggcaccggttcttttgggggaagtagatcagcttcaaagattgcagcttttcattttgcttattttccatattttatgaggggaaattaagaaattggttgttaaatagagaaacaaagatttgtctccactgcatcattttcaccgtgatgctattgctatatcttgttccatattagctgtgaatccttgtcacttatgggggatattaggcttacccgggtagagcaaggtcaaacaaagattagaaatgttccaattgctgtcacccctgaaggattttggtgttgccctactcctgttgggtttcagaaaagcctcaaacctcaaaaccctttgaataaactcaaaccctcttcaccacctccaaagcctagttcccagaaaaaggctgtttcggagagtcagagaaaaacagtgccttccccttcaagattggcggtttcagatgctcaacaatgtaatgatgatccagaaagacctccgactagcacttctgtgcctgcacagagagcacccaaaaaggtggctattgagtttggtgaacctggaacttttgacatgaagctgcttctccttggaaagcagggattttgtgtgaagttaagtgtgcacagggatgttctaatagagaagagtagcttctttgctgataaactttctgaacaatctagtttgtcatgtctccaagttgatgactgtgaggatgttgaaatatatgttgagactgttgggcttatgtactgcaaagaaatgaaacagcagctaatgaagcaaagtgtttctcgcattcttcgaatactcaaggtcgcagaattccttggcttcagctcatgtatccaatcatgtttggagtacttggaggcagtcccttggaatggaaaggaagaagaagaaaaggtgatcgcaaccgtcctacgactccaaggagaaggaatcggggtaaatccggtgctaaaacgagtttctcctgatatttctaatgccccaaaagataccctctcccacattgttgaacttgttctcaaaagcaatgaggagagaggtcgccgagagatgaaatccatagttctaaagctccttagagagaataacagtcttccaagttcttcaggctcagctgacctctgtaatgacatgattaataagtcatgcagaagatgcatggattctttattgtgtctgttcaaccaggtggcagagccaggctttagtgataacaaagaacctgtagtaaaacatatagctcttgaagctgataacttgtcatggttgcttgagattttagttgacaaacaagctgctgaagattttgcactgatgtgggcaaaccagcaggaattggcagcccttcatggaaagcttccgattgtgtttcgttatcatgtcagttgcatttcaggaagactatatgttggcattggaagaggggaggttttgccatcaaagaacacacgccagttcttgttgcagacatggctacagcctctaatcaatgactataactggttgcagcacgggtgcgggtcattcgataggaaacttgtggaggaaggaattggaaggacaattctcaccttgcctttggaggatcagcagagtattttgctttcatgggttggaagtttcttgaaaactggtgatggctgtcccaatcttcagagagcttttgaggtgtggtggcggaggactttcattaggccatatgtggaaggccaaactattaacgtcatgccagatacgtgatgatatgtttatgattcatgaatatatcttagaatggttttggaatttgaattttctcttttgaggtgactattctaagcaattataaatgttatgttgatttgccaatgtggcttacctccagctgctaactagtactgagtcctgtatatatggccgtttcatgtatacaatcactcgttgaattgtaactttcagtaattatacaaatactaaggatttagtttttct

SEQ ID NO: 10743 - DNA, 1333 bp, Glycine max
  Clone ID: 700964974_FLI
cacacatcattttctacgactggaatgctctaaacattcttaatattcccacactatacggaccatgttctcttcctcaacttccttctttctttgccttctcctcttctctgtaaccttttgtcatgttttgggggataaagtatttacaggaacatatggagtaaactacggtaggatagcagacaatctaccttctcctgagagtgtggttactcttctgaaagctgcaaagattaggaacatcagaatatatgatgctgatcgtcaagtcctgaatgccttcaaagggtcagggatttcaattagtgtttgtgtaccaaatgagctacttaaagagataagtgtgggagaggatcgtgccatgaattggatcaaacaaaacgttgaaccatatcttccagggacaaaaatccgtggcatttccattgggaatgagatattgggaggaggagatatggagctttgggaagctttggtgcctgcatctaaaaatgtgtattctgcccttgctaggcttaatttggcacatcaaattcaggtctcaactccacattcagaggctgtgtttgcaaattcataccctccatctgcatgcacttttagggaggatattctccctgtcatgaagcccctcttgcaattcttctcacaaattggcactcctttctacataaatgcataccctttcttggcctataagaatgatccccaacacattgacataaactatgctcttttcaagaaaaaccctgggatttatgatgccaagacaaagctacactatgataacatgtttttggcccaagttgatgcagcatatgctgccttggacaaacttgggtttgacaagatggaggtcattgtttccgagactggttgggcctctaaaggggatgataatgaagctggggcaacagtgaaaaatgcaaggacttacaataaaaatctgcgtaagttactgctcaagaaaaagggtaccccttataggcccaagatggtagtcagggcttatatatttgctttatttaatgagaatttgaagcctggcccaacatctgagaaaactttggattgttcaagccagatggaagcatttcatatgatataggctttactggccttgtaccttcctcagcaacctccccttttctttccttcaagggtattggatctttatatgcagtggtttctacaagttgtgcggcttttcttattcttgtagcattataagcggtcataagaatgaatgcatacaagtgatttcaattattctttggatgtaacaattttcagaactcacatgcaattccaattgtggaaattccaaagt

SEQ ID NO: 10744 - DNA, 1545 bp, Glycine max
  Clone ID: 700964981_FLI
ggccacaacctcatcgttcactacggcctccaccgccgcatgcaggtcaaccgccccttccccgcggcggaggccgacatcggccgcttccacgccgacgactacgtcgacttcctctccaccgtctcgccgcaaatcctctccgagaattcccactcccactaccgtcagctcaagcgcttcaacgtcggcgaggactgccccgtcttcgacggcctcttcgacttctgccgcgcctccgccggcggctccatcggcgccgccgtccgcctcaaccgcgaagacgccgacgtcgccatcaattgggccggcggcctgcaccacgccaagaaggccgaggcctccgggttttgctatgttaacgacattgttctcggcattctagaacttctcaaagttcataggcgtgtgctgtatattgatattgatgttcaccatggagatggcgttgaggaggcattttacactactgatagggtgatgacagtgtcatttcataagtttggggattttttcccaggaactgggcacattaaagacattggggtgggtgctggaaagaattattctctaaacgtcccactcaatgatggattggatgatgagacttttccgtggtctgtttcgccccatcattcaaaaagtcatggatgtttatcaaccggatgcagttgttcttcaatgtggagctgactcgttgtctggtgatcggttgggttgcttcaacttgactgtgaagggccatgcagattgccttcgtttccttagatcattcaatgtccctctaatggtcttgggtgggggaggatatacggttcgcaatgttgctcgttgttggtgttatgagactgcagtggcagtaggagtggagcctagtcctaagttgccttacaatgaatattatgaatattttggcccggactataatcttcatgttgagccatccacaatggaaaacctaaacacacccagggatctggaaaaaattcggaatacattactggaacaactttccaggcttccccatgcacccagtgcaccttttcaaacaacaccatcggtcatcgaagttccagaagaggaagaggaggacatggatgtaaggccaaaacgtcgtatatggagtggtgaagattttgattcggatcatgatgatgacatggctagttcaaagaactctgatttaactgcacaaacgagcaggtctgttgcagatgacatggacgaagataaagattaaagcaggagtgcatccctcatcttaataatgatagaacagagcaagtaccagatttagcattttacaaattagtgggaagcttattgctgtttgatctattgcatattttctctagactttttatggataaagtagggagcagtgttgcctttggcttgttgggggatggtgccctagtaatggcgggtttctactttttagaacacaccaccccccgaaaataacattgccttgcatgtttgctttggcggaccggattttaaatttcaatagaaaaatatacacaattaccattttaccctttt

SEQ ID NO: 10745 - DNA, 643 bp, Glycine max
  Clone ID: 700965032_FLI
ccctcaaaccctagccagggtcgcaattcacttgcggctgcagtagagaagcactcttcgttcttcgactgtctacgatctgctttctctgaattgtgaaaatgtcgctcggagaaactgcttgttcatacgcagctctcatccttcatgaagatggaattagtgtaactgctgacaagatcagcaccttgttgaaaactgcaaaggttccagtagactcttattggccaaccttgtttgctaaacttgctgagaagaaaaatcttggcgatttgatagcaaatgcggcaggcggtggtgcaccagttgctgttgcagctgccccagttgctgctgctgctggtggtgctgctgccgcagctccagctgctgaggagaaaaagaaggaagaaccggaagaagagagtgatgatgatatgggattcggcttgtttgattagggacattctcaatgatttggttaaattttgtggttctttaccttttaaggttactctggatattgtaggttttatttttgtgctggttatttatatttgtatacgacttgattttgtagtgttatatgaacttcggaatgtgggttttatgtccatttgagaattcggatgggagaaatgtttactttatattctgtttcttc

SEQ ID NO: 10746 - DNA, 1082 bp, Glycine max
  Clone ID: 700965132_FLI
atcactgttcacacatagccatagattccccttttggcagccacaaagcaacaccctttctttttctctctaccctccaacgtgctctcttccctcctccacttcatccaaatctttctcattttctctcccaaatcacactctcaattacaataacacacactcaacttgagaattttccccaaaaatcccaagagctcgcgccatggtttccccggaaaacagcaattggctgttcgattacccgttgatcgacgacgacgttattcccgtcggcgactcctccttcgccgtctccgcttccaccttctcctggcccccacctcccgccaatgtcagtgtcgaaattgatgcttcgcttggggattctgatggcctaaaaaatcctgctttgaagaaaaggactaaatctgattcaagtactgcttctagctccaaagcgtgtcgggagaagttgaggagggataggcttaatgacaagtttgttgaattgggctccatcttggagcccggaaggcctcccaaaacagacaaggcttccattctgattgatgctgcccgaatggtgacacagctgcgggatgaagccctgaagttgaaagactcaaatacgagtcttcaagagaagattaaagagttaaaggctgagaagaatgaacttcgtgatgagaaacagaggcttaaggcagagaaagagaagttggaggtgcaggtaaaatcaatgaatgctcaacctgctttcttgccaccccctcctgcaatccctgctgcatttgctccacaaggccaagcccctggcaacaagttggtgcctttcatcagctatccgggagttgccatgtggcaatttatgcctccggccgccgtggatacctcacaggatcatgtactccgtccaccggttgcctaagttggcattgtacaattatttgggcttccattttggctcaaaagttgtaatcattttcctatagctttttagttattatcttctaagtgttccaagtaactggattcagtggtggctttgactgtatttggcatctgatactattatgaagtaatggctggtatttgcatgt

SEQ ID NO: 10747 - DNA, 1059 bp, Glycine max
  Clone ID: 700965290_FLI
agcgcctagggttttcaaggcggcggcggtggcgaggccggtgcagtggttcatcggagaccccgccgcagcaacaacaaccaggaagaaggcggcggcgaagatagtgagggaaggggtggagttttacagcaatggggatttctacgaaggggagtttcacaagggaagaagcaacgggagtggggtctaccattacttcgtgaatgggaggtacgaaggggattgggtggatggaaggtacgatgggtacggaattgaaagctgggcgagagggagtcgctataggggacaatataggcaagggttgaggcacggttatggggtttataggttctacactggggattcttattcaggagagtggtgtaacggtcagagccatggcgtgggtcttcaaacttgctccgatgctagctgttatattggtcaatttaagtatggcgtcaaacacggtcttggctgttaccattttagaaatggggatagatatgctggagagtattttggggacaagatacatggatttggggtctaccactttaccaatggccactattatgagggagcatggcacgagggtcgtaggcaaggtattggctcatacacttttcgaaatggtgacagaagatgtggtgaatgggatgctggcaccctcaagcaatctctaccaccactatctgatgttgttcttcgagcagttcaggctgctaggaaaacagcagagaatgctataaaccttaaacgagtagatgaccaggttaacaaagcagtaatcgctgcgagcaaggctgccactgctgctagagttgctgctgtgaaagctgttcagaacaggatggatggaaaattttgtgacactgatgtctaagaattagatgttagctttgtttggaattgtaattgtaattttttttttttttttactaattttgagtccttggaagatgtcaccctggtgagcaaaagcttattggaggttgaagagagagtatgtttgtttcaccacactgtaacttgtatataaaccatgtatatcaatgaaaaatgaatttgctc

SEQ ID NO: 10748 - DNA, 1560 bp, Glycine max
  Clone ID: 700966722_FLI
ctcatctatctttgcttccccttagtcaaacaaagtaacacaccatccatcctctctctcttctcttcttctgttctctagtttcctgctcttgtttcttagaatccgtacggtctaatcaacacaacaaaatggatgcaattagttgcctggatgagagcaccaccaccgagtcactctccataagtcaggcgaagccttcttcgacgattatgtcgtccgagaaggcttctccttccccgccgccgccgaacaggctgtgccgcgtcggtagcggtgctagcgcagtcgtggattccgacggcggcggcgggggtggcagcaccgaggtggagtcgcggaagctcccctcgtccaagtataagggcgtcgtgccccagcccaacggccgctggggctcgcagatttacgagaagcaccagcgcgtgtggctgggaacgttcaacgaggaagacgaggcggcgcgtgcgtacgacgtcgccgtgcagcgattccgcggcaaggacgccgtcacaaacttcaagccgctctccggcaccgacgacgacgacggggaatcggagtttctcaactcgcattcgaaatccgagatcgtcgacatgctgcgtaagcatacgtacaatgacgagctggaacaaagcaagcgcagccgcggcttcgtacgtcggcgcggctccgccgccggcgccggaaacggaaactcaatctccggcgcgtgtgttatgaaggcgcgtgagcagctattccagaaggccgttacgccgagcgacgttgggaaactgaaccgtttggtgataccgaagcagcacgcggagaagcactttcctttacagagcgctgctaacggcgttagcgcgacggcgacggcggcgaagggcgttttgttgaacttcgaagacgttggagggaaagtgtggcggtttcgttactcgtattggaacagtagccagagttacgtcttgaccaaaggttggagccggttcgttaaggagaagaatctgaaagccggtgacacggtttgttttcaacggtccactggaccggacaggcagctttacatcgattggaagacgaggaatgttgttaacgaggtcgcgttgttcggaccggttgtcgaaccgatccagatggttcggctctttggtgttaacattttgaaactacccggttcagattctatcgccaataacaataatgcaagtgggtgctgcaatggcaagagaagagaaatggaactcttttcattagagtgtagcaagaaacctaagattattggtgctttgtagcgttacgttactttttttgagttttttttttttttgagttttgtgactgatgaaagaaagaaggtacaagaagaacggcggtgtagtggcatagtggcatcgcaagttgctgcaaaaggtgaattgtatattacttaatattagatgctgaaatattaggtgtaatgtaacaaaaaactgtacaaggagaagaaaaaaggttctaagaaggggagaagctagaagaaaaaaaatgatgtcatcatgggataactgtttaattgtatatgttgat

SEQ ID NO: 10749 - DNA, 1446 bp, Glycine max
  Clone ID: 700966775_FLI
gaaaacctaaggaaagtggatggggatgataacacatgtataatagtgggaaaggtggtggtcaccaaaaatccttgccttcacccaggagacatcagagtccttgatgctatctacagtgaagaattagaggagaagggtttgagggattgccttgtatttccacaaaaaggacataggcctcatccaaatgaatgctctggaggtgatctcgatggagatttgtttttcataagttgggacaaagatctaatcccatgtcaaactgaggctccaatggactacacaggaaggaggccccgtataatggaccataaagtgaccctagaggaaatccaacaattctttgttgattacatgatcaatgatactttgggtgctatctctactgctcatctagttcacgctgaccgtgaacaagataaggccaagagtagaaaatgtctggaattggcagagcttcattccatggctgtcgactttgcaaagactggagcacctgctgcaatgcctagagttctgaaaccaagagagtttccagatttcatggagagggttgacaagcctatgtacatctccaagggggtactgggaaaactttatcgcgccataattgagtcacaaatgcaaataagatatagctttgtgtggtcagagaagcatgctgaagaagcatatgaccgtagccttgaagtgaatggttttgaggccttccttgagacagcatcaactcacaaagaaatgtatgcagagaagatgagcagtttaatggacttctatggtgcagagaccgaggatgaaatgctacttggtaacttgcaaaaccgtgcttcatatttgcagcgtgataacaggagatatggtgatatgaaggatcggattctgctctcagtgaagaaccttcagcgtgaagctaaagaatggtttgaaactagttgcgaaccgcatgaatataagcctatggcatctgcatggtatcatgtgacctatcaccccagctattattgccgggaaagcccatgctttctaagctttccatggatagttggtgagattttgctgcaaataaggtctgtgagcaaaggagttcacaaatgaaggcttcctctaatgctgtgtgcatttttattttgaaaaaagaagaaaaaatctgaagccgtttgtggtggataacatgtatatgcagatgttgattgaaggtaccaccttgtctgcgagagtttccttttgcaaaatattattgttatcaatatttggcattataaaaatttactagccgtatatgtgatgttgatgccagtggcttcatctataaccaggttcagcgaatcaagtgggttgggttactccaaaaccgtttcaccaaaattccgggtttgtaggatctggttacaccctgttcgagtttattaaagtcaatttaaaacgagtattgaaaagagtgtc

SEQ ID NO: 10750 - DNA, 779 bp, Glycine max
  Clone ID: 700966802_FLI
gctgtaagcaatgttctaccccttgttgcaacagcttttcggccaccgagtggagtgaagcttagatgtccacatgcaattgttgctgcaagggctgcccttgcccgtacaacctttgtgaaaaacatgcgccctcagcctcttcctgcaaaaatgcttgttattgcagcgttaggcatggcggttaatgtgccctttggcatgtggaaggagcataccaagaaattttcattatcttggtttgtagccgtgcatgctgctgttccctttatagccatgcttcggaagtcagtggtgatgcctaaatcagcaatggcactgaccattgcagcttctatacttggacaagttattggctcaagagctgagcgaatccggctgaaaacaatagctgttgagatgggaaaagtgaaaacagagacagtatgcagcatggaaagctataatagtcccatgcaacttggtgatattagggccaatcactgtggtgctgaaggaatggtcctcaagtcgtcacttcctgtgaaggatactggttcaacttcaactgctggcgtgtgttattgatctataaagattggaaagaaatccattcaggttctatttgaacatattgatgaactggaattgtaataaaattgattaatataaataagatccttatgagctatgtataacttgaacagaaattaagacatgctgttactatgcatgcagaaatgtatatggagaattgatcgcttaattctgataaaagttgagttcgtcttaaattattc

SEQ ID NO: 10751 - DNA, 1261 bp, Glycine max
  Clone ID: 700966852_FLI
gggggtctgattaattctctagttatggctgagagcagagcgaatcacacagtgagcgtatttgggtgggcagctcatgattcgtcgggcaagattaccccctacagcttcaaaagacggcagaacggtgtgaacgatgtgacaataaagatcctctactgtgggatctgccacacggatctccactgtgctaaaaatgaatggggcatcactatgtaccctgtggtacccggacacgagatcattggggaggtaactaaggttgggaccaatgtgaaggggttcatggaaggagacagagtgggtgtgggctgtttggcggcttcatgtttggaatgtcaccactgcaagaccgatcaggaaaactactgccaagacctccaatttgtctacaatggaatcttctgggatggcaccatcacctatggtggctactcccaaatctttgtcgcggattacagatatgtggtacacattccggcaagcctaccaatggatgcggcggctcctctgctatgcgcaggaataacagtgttcagtcctttgaaagagcacgatttggtagcaacagcggggaagaggattggggtggttggactgggaggccttggacacattgctgttaaatttggcaaggcttttggccaccatgttaccgtcatcagcacttctccctccaaagaaccagaagctaagcagcgtttgggtgctgatcacttcattctcagctctaatcctaaacaattacaggctgcaaggagaagcatggatttcatattggacaccgtttcggcagagcactctctcttgcctattttggaattgctcaaagtcaatggaaccttatttctcgtgggtgcaccagacaagcctttacaattgcctgctttcccattgatatttggcaagagatcagtgaaaggtgggatcatagggggaataaaagagacgcaggaaatgttggaggtttgtgcaaagtacaatataacgagtgacattgagttaatcacaccagacaaaatcaacgaggctatggagcgccttgctaagaatgatgtgcgctaccgtttcgtcattgatattgctaatgctgtcacttccaacaacaaatgaactagccttcaatttgattcaaatttcgtctattcattacttgtttctatatctactgtttagtaaaccggtaattttacctctgcaattggatcactaagtcatatatttatcccaattatcttctgtttaagtttgaattaagagt

SEQ ID NO: 10752 - DNA, 1995 bp, Glycine max
  Clone ID: 700966883_FLI
cacaaacttcctctgaagcattccacttccatggccgatccaaactccaatcctaaccactctaacgctcacgtgaaccgttccagacactacaccactcacgtgaccttccgtctcctctgtcacgcgtcgcgcgtgggcgccatcatcggcaagtccggcgtgctcatcaagtcgctccaggaggccaccggcgccaagatacggatcgtggacgcgccgccggactcccctgaccgagtcatcctcgttagcgccccctccgtcaccgaagacggtgagctctccacggcgcaggaggcgctgctcaaggtcttcgaccgggttctcgacgtcgccgccggcaccgaagtcggcgacctcgtggtctcttgccggcttctggccgaaacttcgcaggtcggcgccgtcatcggcaaggccgggaaggtcgtggagaagatcaggatggacaccggatgtaagattagggttttgaatgaaggtttgccggccggcactgctccctccgatgaaatcgttgagatagaaggccagctgacatctgtaaagaaggcactcattgctgtctctcatcggcttcaagattgtcctcctcctgatagaacaaagatgacaggaagcagacattatgaagtggttcagtctgagacattttcagttccacttgagtctttaactaatctgcatatagatcatcatctgcaaaggagctctacattatccactttatccaataggtctaatggcaatgcctctggagctcataaattatcagctgaagttaatagagtctcagccctggatccaaaagcatatcagcaggaagttacctttagaattatttgttccaatgatagggttggtgccgtaattggaaaaggtggcagtattgtaagagctcttcagaacgaatcaggggctattataagtgttggtccttcattagttgagtgcgaggatcgactagttactattactgcttcagagaatcctgaatcaacatattcccctgcacagaaggctgttgtgcttgttttctccaagtctgttgaggctggtgttgagaaggggctagagttgggatcaaaaaaggagccatatgttactgcacgacttgtagtcccatcaaaccaagtgggttgtttgttagggaaaggaggggcaatagtctcagaaatgcggaaagccacaggggctaacataagagtaattgggaatgatcaggttccaatgtgtgtatcagataatgaccaattggtacagatatcaggagtgttttcaaatgttcaagctgcaatacataatgcaactggtagactgcgagatcatctttttgtcagtacgcaaaacagtggtggagcaaggagcctttcctctgttctagctggaggccaaccaactcttgctatttctcatagtctcaatagacattctttgccaggattacaggcaccacagacagtggctgggataaattccagaggcaccaatggtgttagtcggggattgatttctcgaaaaggtggcttagaacttatcagtgggagtaaaactgccattgttactaatacaactgtgcaaattgtggttcctgatgatgttattggctctgtatatggggaaaatggtagcaatctggctcgcctgagacaaatatcaggggctaaggttattgtccacgaacctcgtcctggaacaagtgataggactattatcatatccggtacacccgatgaaactcgagcagcacagagccttctccaagcatttattcttgctggatcatcgtgacaatatcctctcactgatgacccattaattctcaactagtttttaccattttttaaaatcctttttgtcctacctgaaagcatgtacaatataggaaaatatccacaccatttgccattccctgttagtaatcttggtgtctactgtcactctaatgtgtcattgtcactcttatttatttaaatttcagaaaaattctct

SEQ ID NO: 10753 - DNA, 1158 bp, Glycine max
  Clone ID: 700966927_FLI
cacatttttccttcactcactcccatcacaataatttcttccctccttccttcccacaatggtcatggaagaatctaaccctttagacaatgaagttcaaccaaccacttcatcatcctctttcaccattactactccctctacctcctcttcctcctccatagaagaagccactaacactactactaaggagaaaaagaagaagagagccattagtaatattgaagggaagcaccctacgtatagaggagtacgtatgcgtcaatggggcaaatgggtatccgaaattagagagccaaggaagaaatcaagaatttggcttggaacttttcccactcccgatatggcggctcgagcccatgatgtggcggctctcacgatcaaaggcagctcggcttacctcaatttccccgaattagccgccaagctgccccgccccgccagcacctcccccaaggacatccaagctgcggcggctaaagcctccgccttggatttcggtcaccaaagccatgaagccgaatccgagctgagccaagccgtttcctcctcaatccaaacacaatcatcatcatcatcatccaattcatcgttgaagggtgtggatgacacattcttggaccttcctgatctctctcttgacttgagccatggagccgatgagtttcattattcatcggcttggcttgtagccggagccgaacatatagagctgggtttccggcttgaggaaccttttctttgggaatcatattaagttaccttcctcaagtaggccaatttccctttttttgatgtttgtgctgcctctcttttttctttgttcctttcacttttgagctacttgcaagaaccttgaagaatccaatatgctctatggcagcatgacgtgggggtgtcaaacttcagtgtccatgacaaataaagaagttttactaaacccactccatagctttttttattcaagaatttatgtaaatattaaaatatcatctgtcattttcagataaggtaattaattaagttgccttgcatcatattcctcaatttgttgtaaatttcctcgcttgtcatctgtatatcctcccctttgtcaaaattcagtttaatttgtgtatgggtgaatgtggaataaagttcagctgggtaaatttgatt

SEQ ID NO: 10754 - DNA, 2756 bp, Glycine max
  Clone ID: 700966936_FLI
aatcaatcttctgagagcgtttggttgaaagtagcaaagatgtttcctttcgggcaaaagggtcaaaagataaaggggactatggtggttatgcagaagaatgtgttggatatcaacagcatcaccagtgttggagggatcgttgaccaaggcttaggcttcataggcagtgcagtcgatgcacttacttttgcagccaccaaaatctccatccagttgattagtgctaccaaggctgatggtgggaaaggaaaaattggaaagagtacaaatttaagaggaaagataacattaccaaccttgggagctggcgaacaagcatacgatgttaattttgaatgggacagtgacttcggaattcccggtgcattttatattaagaacttcatgcaaaatgagttctacctcaagtctctaattctcgaagacattccaaaccacggaaccattcacttcgtatgcaactcctgggtttacaattcaaaaaactacaagactgatcgcattttctttgccaacaatacatatcttccaagcgagacaccagctccacttttgaagtacagagaagaagaattgaagaatgtaagaggggatggaactggagagcgcaaggaatgggataggatctatgattatgatgtctacaatgacttgggcaacccggatagcggtgataaatatgcacgccccgttcttggtggttcagccttaccttaccctcgcagaggaagaaccggaagaggaaaaactagaaaagatcccaacagtgagaagccgagcgattttgtttaccttccaagagatgaagcatttggtcacttgaagtcatcagattttctcgcttatggaatcaaatctgtatcccaagatgtcttgcctgtcttgactgatgcattcgatggaaatattttgagccttgagtttgataattttgctgaagtgcacaaactctatgaaggtggagttacactacctacaaactttcttagcaagatcgcccctataccagtgatcaaggaaatttttcgaactgatggcgaacagttcctcaagtatccaccacctaaagtgatgcaggtggataagtctgcatggatgactgatgaagaatttgcaagagaaacgattgctggtttaaatccaaatgtcattaagattatagaggagttcccactaagtagcaagctagatactcaagcctatggtgatcatacctgtataatagcaaaagaacatttggagcctaacttaggtgggctcactgttgagcaggctatccaaaacaagaagttgttcatcttagatcaccatgactatctcattccttatttgaggaaaataaatgcaaataccacaaagacttatgctacaagaaccatatttttcttgaaagatgatggaactttgacaccattggccattgagttaagtaagccacatcctcagggtgaagaatatggtcctgttagcgaagtctacgtgcctgccagcgaaggagtggaagcttatatttggttactggcaaaggcttatgttgttgtgaatgatgcatgctaccatcaaatcattagccattggctaagcactcatgcaattgttgagccatttgtcatagcaacaaacaggcaactgagtgtggttcaccctatttacaaacttctgtttcctcactaccgtgacaccatgaatattaattcacttgcccggaaagccctggtcaatgcagatggtattatagagaaaacattcttgtggggtaggtactctatggaaatgtccgctgtcatttacaaggactgggttttcactgatcaagcattacctaatgatcttgtaaagagaggagttgctgttaaggacccatctgctccccatggagttcgtcttttgattgaggactatccttatgcttctgatgggctagagatatgggatgccatcaagtcctgggtgcaagaatatgtctcattctactacaagtcagatgaggaactccaaaaagaccctgaactccaagcttggtggaaagaacttgtagaggtgggtcatggtgatttgaaagataagccatggtggcaaaagatgcaaactcgtgaagagttggttgaagcttccgctatcctcatatggattgcttcagcccttcatgctgctgttaactttggacagtatccatatggaggtttaatcctaaacaggccaactattagcaggagattcatgcctgaaaaggggtctcctgaatatgatgcgttggctaagaaccctgagaaggagtttttgaagactattactggcaagaaggagaccctcattgaccttacagttatagaaatcttgtcaaggcacgcatctgatgagttctaccttgggcagagagatggtggtgactactggacttctgatgccggtccattagaggcatttaagaggtttggaaagaagcttgaagagattgaaaagaagcttatagagaagaacaaagatgagacattgagaaaccgctatgggccagctaaaatgccttacactctgctctatccttctagtgaggagggattgactttcagaggaattcccaacagtatctctatctaaggaccctatggttgcttaagtactgttcctggttttaaataaatgtgaaattgaaggaaccagattccttaatcagttgtgtatgcttaagtcatgtatttggagtggctgaatgtatttgtatttgtcattaataaagagagttgtgttagtat

SEQ ID NO: 10755 - DNA, 903 bp, Glycine max
  Clone ID: 700966994_FLI
aagaaagcggtttcacagaccgagaaatcccaatcctatggcagaggaagggaaacccgatgaacagctctttcagcttctctccaatcttctccaccaggtggaatcactgacgaatcaagaagaagttgagctgcgttctaaaattgaaactcttggattagaggttacaaaagttccttcaaagtcaacgcagcaccttaacgaggtgtttttcacttgatgcagagttctcttatccctgttgaaatgtgctagaacatatgaaaagattttttcatcttatattatcctgtgaattagtttttcgatttcctcgttatctcttgggattagttattatattttctcaacatttttatttcctcattgaggattagctatcatattttcttttcttatcatgattttttttcttaattaattaggatcattattagtatagataagggttagtgcttaagttctatgaacatatcaaacacataatttcaacaaaatgaaataccattctctcattttgtgttcttatttttttaatacattatctacacagttggaaatagctgaggagttggataaattatcagcaagattggataatcttgatgagatgatatcatcatcaatggcttcagatccacaggtgcagtcactcttgagtgatacagccgatgtgtggatgccagttatcactgctacttctgaggaaaggcgcaacttcacagcggctactggagacagcaccctccaaactgatgtggaaaagtctaaatagtttcctattttcttgtctttgaatatggacatgtttctattgctttacagtatactaattcatttatttgtaatagactgagctacataatagtaaataaagtgtttcattatattgttcttttt

SEQ ID NO: 10756 - DNA, 1282 bp, Glycine max
  Clone ID: 700967304_FLI
gacctcgtgttttcttctctctctcacactttctctcagcgttgaaacttgaaattcttcttctccgaaacctctttgaaccgggtcaagaaataaacctcgctgggaaccgttgattgggtttgtacgaataatttgaaatgaagattcagtgcaacgtgtgcgaggccgcggaggccaaggttctgtgctgcgcggacgaggcagcactgtgctgggaatgcgacgagaaggttcacgcagcaaacaagctcgccagcaagcaccagagggtccctctctctctctccgcctctcacatgcccaagtgtgacatatgccaggaaatggttggttatttcttctgtttagaggatcgagctttgctatgtaggaattgtgatgtatctatacatacagcaaatgcctgtgtctctgatcatcaaaggtttttgcttactggtgtgagagtaggccttgaagctactgagcgcggtgcttcctcgtcttctgtgaagtcacagtctggggagaaaatgtctgatgctaaatcttcatccatctccagaaatgtttcctcactgccccagccatcaaatgccaatgaagtgttaccactccaaatgcaaggagttgaggagtttccaccaagcaatttctcaggttatacttctggaaacgtctcacaatggcccattgaagaatttctcggattaaatgaactcagtcagtattataattacatggatggatcatctaaggctgacagtggtaaacttggggattctgattcttctgttttgaggtctggtgaagaggatatggatgatgacggcttcttgggacgtgttccagattcatcctggacagttcctcagatcccttcccctcctacagcttcgggtttatattggccgaaagtccctcaatatacatctgacagtgccatgtctgttcctgacatatgcttttctcatgtgcgacagccccaccatgcccagcataattctaatgtttccaaaaggcgtaggcaactataatttgttctctgatcactagctcaatatgttaaaaagattgttttttatctgttagagatggagcgaacttttgaagttctacccttctttagatcatttgaagttcagtttgctacatgtttcttctattcacggcagccttcatttctttttgggagcaaatcccttaactctccatttgttattgggaatttgacaaagaaaatagctggaacaacaatgtaataggcttctcatttcaatttgatcttgtgcattttaac

SEQ ID NO: 10757 - DNA, 1261 bp, Glycine max
  Clone ID: 700967375_FLI
gggggtctgattaattctctagttatggctgagagcagagcgaatcacacagtgagcgtatttgggtgggcagctcatgattcgtcgggcaagattaccccctacagcttcaaaagacggcagaacggtgtgaacgatgtgacaataaagatcctctactgtgggatctgccacacggatctccactgtgctaaaaatgaatggggcatcactatgtaccctgtggtacccggacacgagatcattggggaggtaactaaggttgggaccaatgtgaaggggttcatggaaggagacagagtgggtgtgggctgtttggcggcttcatgtttggaatgtcaccactgcaagaccgatcaggaaaactactgccaagacctccaatttgtctacaatggaatcttctgggatggcaccatcacctatggtggctactcccaaatctttgtcgcggattacagatatgtggtacacattccggcaagcctaccaatggatgcggcggctcctctgctatgcgcaggaataacagtgttcagtcctttgaaagagcacgatttggtagcaacagcggggaagaggattggggtggttggactgggaggccttggacacattgctgttaaatttggcaaggcttttggccaccatgttaccgtcatcagcacttctccctccaaagaaccagaagctaagcagcgtttgggtgctgatcacttcattctcagctctaatcctaaacaattacaggctgcaaggagaagcatggatttcatattggacaccgtttcggcagagcactctctcttgcctattttggaattgctcaaagtcaatggaaccttatttctcgtgggtgcaccagacaagcctttacaattgcctgctttcccattgatatttggcaagagatcagtgaaaggtgggatcatagggggaataaaagagacgcaggaaatgttggaggtttgtgcaaagtacaatataacgagtgacattgagttaatcacaccagacaaaatcaacgaggctatggagcgccttgctaagaatgatgtgcgctaccgtttcgtcattgatattgctaatgctgtcacttccaacaacaactgaactagccttcaatttgattcaaatttcgtctattcattacttgtttctatatctactgtttagtaaaccggtaattttacctctgcaattggatcactaagtcatatatttatcccaattatcttctgtttaagtttgaattaagagt

SEQ ID NO: 10758 - DNA, 576 bp, Glycine max
  Clone ID: 700967417_FLI
aaggtgaagtatggctccaaggtgcaaattgttctgcaggacacaagcatagtgactactgaggaacaccctatgcatgttcatggattccacttctttgtagttggttcaggttttggcaacttcaacccagcaactgatcccctcaagttcaaccttgtagacccacccgtgaggaacaccattggaacacctcctggaggatgggtggccattcgttttgtggctgacaatccaggaatttggtttgtccattgtcacatagactcacatctgaattggggtttgggaatggcacttctggtagaaaatggagttggcctttcacagtcagtattacctccaccaccagatctaccccaatgttaaggttaatgaagcatcattagttaataaatttattgttctgtattacaagttctacaagaatttgccaaacaaacagtatggctttctgcagtttccaataccagaattagattatgcttaattgagctgtatgttggcggtatgttgattaggtggcattgcaaacctatattaacaaaaataaaatttaaatgatttcttttcatt

SEQ ID NO: 10759 - DNA, 1022 bp, Glycine max
  Clone ID: 700967431_FLI
gctacatatatatattatagagattttatacattctaaattttgtgagtgtggacatactctgagcgtgagaaagagaaggggaagaaagagagagagtgatgggaaggggaagagtggagttgaagagaattgagaacaagatcaacaggcaagtgacctttgcaaaacgaaggaacgggcttttgaagaaagcttatgagctttccgttctttgtgatgccgaggttgctctcatcatcttctccaatagaggaaagcagtacgagttttgcagcggttcaagcctgctcaaaacgctggagaggtaccagaaatgcaactatggagcgcctgaggacaatgtggcaacaaaggaagccttggagttaagcagtcaacaagaatacttgaggctgaaagcacgttatgaagctctacaacgttctcaaaggaaccttatgggagaagatcttggccctctaagcagcaaagagcttgaatcacttgaaaggcagctagattcgtctttgaagcaaatcagatcaataaggacccaattcatgctggatcagctttctgatctacaacgtaaggaacactttctaggtgagtcagacagagatctcagacaaaggttggaagagtttcaaataaatccactccaactgaatcccagtgctgaagatatggggtatggacgccatccagatatcatcctgatccagtatcagtggtgacagaaggcccaagcatgaataattacatggcaggatggttaccatgaaagagtgtcaaatgtggagcataattaaagatcctgccgtttaatttcaaatttatttgaagttaaggaaaacggaaatttgtaatagcacgtaatggacttacactagactctaccttctaattaagctaggaacaatataagcagtgattttgtgtgtgagctttcataaacagtacctagctagcctcttccttgttccaataatcacttcttccttttcctaattaataaaactatcgtatgcaccctttgcc

SEQ ID NO: 10760 - DNA, 631 bp, Glycine max
  Clone ID: 700967461_FLI
gaaacgggtgtagtgggagtgcttgtgggggtctagttcgtgattcctcgggatgttacctaggtggtttcacagttaacttaggcaacacatcggttactttagcggagctatggggtgttgttcacggtctgaagttggcgtgggatcttggttgcaagaaggtgaaggtggacattgattctggtaatgctcttggtcttgttaggcatggccctgtggctaacgaccctgctttcgcgttggtttcggagatcaacgagcttgttcggaaagagtggttggtagagttctcgcacgtgtttagagaatctaaccgtgcggctgataagttggctcacttgggacactcgcactctctggaatcgggtgcgaagcgattctcggacccaccctctgcccttgttgctattcttcaagatgacttggcagggcttgccaagcaacgtggtgttaattaagtgtaagagactgttgaccaagcaatgtaaattagttagagcttgcattctcgatcatcaaagtattttgactttgactgagtgtgtacataaagtttatctgatctagattatgatttataatccaatgctttctttttaatcatcccaagattatgagcttctcaatt

SEQ ID NO: 10761 - DNA, 512 bp, Glycine max
  Clone ID: 700967675_FLI
ggagcacgcaatcttgcataaatacagagaagaagagaagagtgaagagacgaaggatggggaaggcaaaagaagcggcggtggtggcgggagccctagcattcgcgtggctcgctatagagctcgctctcaaacccttccttaccaaggcacgtgcttccatcgacaagtccgacccggcacgtgaccccgacgacgatgctcttcctaaaaccaccgccgacgacgttcccgaagcctccgctgacgacgtgcctgtcgctgctgataccaaaaccaccgacgacgcctgaacttatctcattcatgttattttgaatgtcctgaaaattactgtccaaatgaaataatgttgctagcctctttgtgtttctgttaattttgtgtatattgtgttgtcagtatttttgttctgttttgtttggttttaggattgaaaaaataccaggttgttctgttctgtttgtttcccttgtcatggtcagatataaacggacaattggtattttggt

SEQ ID NO: 10762 - DNA, 1580 bp, Glycine max
  Clone ID: 700967818_FLI
attatttggtgtagggattgcgggaaacaagtctatttgggtatggatttttaatttatgaatttatgaatttcagtgtttattttagggtacatagtttttgtactatctgaaatcgtattctatggtttactattttaagcatcttttgacaaaattggtatttgagcttgtaggtggatttgacacggctcatgctgctgccagagcctatgatcgagccgctattaagttcaggggagttgatgctgatatcaatttcaatctgagtgattatgaggatgaccttaaacagatgcagaatttgtccaaggaggaattcgtacatatactgcgtcgccaaagtactggtttctcaagaggaagctctaaataccgaggagtaacactccacaagtgtggccggtgggaagctcgaatgggacaatttcttggcaaaaagtgaggacatatttttatatatcaacttacgtagtgatctactgtggttatgaaatattatgaatttaagcacctatggggctgcaaagtgaaattggtttcagcttaattctcaatgcatctttatgcttttttccatgtttggagaaacatgtctaagatagtaatatagagatgcgttttggttatagagattgcaatgctttcatgcaggtatatatatcttggactattcgacagcgaagtagaagctgcaaggtcctagtgatacatgaattacattctacccgcactgaatttatttacatgaattatcaaagctcattaggctccatccaacacgtatctcccttttgattttctggaaatcagggcttatgacaaggcagctatcaaatgcaacggaagggaagcagtgaccaactttgagccaagtacttatgaaggagagctgaaatctgcagccattaatgaaggaggcagtcagaatcttgatctcaatttgggcatagcaaccccaggacctcccaaagaaaattgggggcaacttcagttcccctccttcccttacaatacacatggtggaagaagttcaatgatggaaaccaatgttagttctggaattggtaatccatctttgaaaaggatggttgcaactgaagatcgtccttcattatggaatggcatgtctcctaatttctttcccaatggggaaagagcagagagaatcggcgttgatccttcaaacggactccccaactgggcgtggcaaacacatggccaggtcaatgctaccccagtaccaacgttttttgctgcagcatcatcaggattttcaatttcagctacctttccatggggtgccatctttccaacaagttctatgaactcaattccccagagtctctgttttacttcatccagcatgcctacccgcaatgcatctgaatattattactaggttaagcccccacaggcaccaccatagctgattttgcagtacagattaaagacaaactaaaacaaaagtgttttcggtccaaattctttttataattcagccactgattggtgtatactgagattcgacaccttattgctgtctcttgcttaaactataatgccccatgtttggatac

SEQ ID NO: 10763 - DNA, 2373 bp, Glycine max
  Clone ID: 700967833_FLI
ataccccacaatttttagggcttccaactggggtttggccaacaggaggtggctttgatcgggctggagaagacattgtgattggacttgtggacacagggatctatcctcagcacccaagttttgcaactcataattctgagccatatgggccagttccaaagtacagaggaaaatgtgaagctgatccagaaactaaaagaagttactgtaatgggaagattgttggagcacaacactttgctcatgctgcaatagctgctgggtcatttaacccttcaattgactttgcttctcctcttgatggagatggacatggaagtcatacagcctctattgcggccggaaataatggaattcctgtgaggatgaatggccatgaattcgggagagcgagtgggatggctcctcgtgctaggattgctgtctacaaggcaatttatagactgtttggagggtttgttgcagatgtagttgctgcaattgatcaggctgtatatgatggagtggatatactcaacctttcagttggacccgacagtcctccagcagccaccaaaactacatttttgaacccttttgatgccacacttcttggagccgtgaaagctggtgtatttgttgcacaggctgctggaaatcatggtcctcttcctaagacattggtttcatatagtccatggatagcatctgtagcagctgcaattgatgatcgtagatataaaaatcatttgatccttggaaatggaaaaaccttagcaggaattgggttatcaccttccacacatttaaacgaaacatacacattggttgccgcaaatgatgtgttgctagattcttcacttatgaagtatagccccacggattgccagagaccagaacttttaaataagaatttaataaagggaaatattcttctctgtggatattccttcaactttgttgttggcactgcatcgatcaagaaagtctcagaaacagcaaaggcccttggtgcagttggatttgttctttgtgttgaaaacatttccctaggaacaaaatttaatccagttcctgttggccttcctgggattctcatcatagatgtcagcaattcaaaggaactgatagattattataatatcactacaccaagagactggactgggcgtgtaaagagtttcgaaggtaaaggtaaaatcggtgatggtttgatgcctattctgcataaatctgcaccacaggtagcattattctctgctcgagggccaaatataaaggacttcagcttccaagaggcagatcttctcaaaccagatatattagctcctggttcattgatttgggctgcttggtgtccaaatggaactgatgagccaaattatgttggtgaagcgtttgccatgatatctggaaccagcatggctgcaccacatatagctggaattgctgctcttataaagcagaagcatcctcattggagccctgcagccattaaatcagctttgatgactacatcaacgactctagacagagcaggggatcctcttctagcccagcaaacttctgaatcagaagctatgaggctggtcaaagctactccttttgattatgggagtggtcatgttgatccaactgctgcattggaccctgggctcatctttgatgcagggtacgaggattatataggcttcttgtgcacaacacctagcattgatgttcatgagataaggaactacactcacaccccatgtaacacctccatgggcaaaccatcaaatttaaacaccccatcaataacaatttcccatcttgtgagaactcaagttgtcacgcgcacggtcacaaatgttgccgaggaagaaacctatgtgatcacagccagaatggaaccggctgttgccattgaagtcaaccctccagcaatgactatcaaagcaggcgcatcgcgccagtttttggtgtcacttacagtgcgctcggtgacaggaaggtatagttttggagaggttttgatgaaagggagcagagggcacaaggtgaggattcctgttctggccaacggataccgacgatagatagcatagtgaagtttggtcagcaaaggaaaggaaagcaagtgctgcttgtaatattctttgtaacctgtggggaataaggtatggcgctacatttattcgtctaaatatataaatatgtaatgttaaattatgaataggtgtaaaggtaagcaggtgtaaggggtcactcctagtttcttccacatatagttttgcttatattgtctagtaattttgttggaatgcttcatcacaagttttaacctgtatctgccccattccccaaaagttcgttgcttacagcatgtgtaatacatgaaataatttgtat

SEQ ID NO: 10764 - DNA, 1298 bp, Glycine max
  Clone ID: 700968009_FLI
tcgattccaaaggtgcgtttctgctgtgctagggtttctgcatcttccacctccgtcgcgatgaaaccaggcttcatctgattccgatttcccttcgctccttctcctccttaacattcatcttcttcgattcctctacaaattatgattattattatgatgaactccatcttcgcctcgcataaccttcgcgtcttcggtcccggcttgaatcccttcgcaccttattgcatcgccaatcactcccttttcctttccctttcctctcgctaaattacaattccctttctttttcctctccaacttctccttctccgtttctccgaacatgtaaattcggaggacaccgtctttgattcggtctatttttttgggggttactttacttcggttacgcgtcgtcgttttgcttttctttgtcgtcgtttttgcgttgcgttgattgctgagaaagaaagaaagaaagaaagatgctggaggaacagcctgttgttttgttcaggaagagcccttccaggaggcgcttgagatctgcttttgctaccgatgataggggttggacctcgcttcatgttttcgctcgaaaaggcgatctcaaattggttaaaaaacttctcaatgaaggaatggatgtcaatgtgtctgcatggggccccaaatcaaaaggggtgacccctctccaccttgctgccgaaggtggtcacattggagtgatggatgtactacttgagtgtggtgctgacattgatgccagaactaagggtgcttgtggctggacgccgctccacattgcagccaaggaaaggaggagggatgctgtgaaattcttgatagagaatggagccttcatgccacctgatatcagtgatagcagatttaacccaccgcttcattactgccccggactggaatgggcctatgaggagatgaagcgacttcgtcaggaagacttgtctgctggagagacatgttacagctctgaaagttaatttgcttttcagggatttggttggtgtttgatagtgtgtttggatgccattcagaggagatcaaagttaatataactagcttttgcgtcacctttacaaatttgacatgaaaatatgctgatacgtacattcagaaagcgtatccagacatgcactgtatctgtattgtatgaataaatgtacaattgaaataaaactactatgtagtgtatggggatgttttactattttagcatcttggatgcccttgtttatggaaacaattatgtacgattattaatgtgatatgctgtgattgttgatgttttc

SEQ ID NO: 10765 - DNA, 979 bp, Glycine max
  Clone ID: 700968115_FLI
cgatcattttcctatacttcgttttttatgagtctgatctttttgttctcagacttatgcatcttcttgtgctaaaacaaaaggagttgaagaatgggaagggggaagatcgaaatcaaaagaatcgagaacacaacaaatcggcaagtgaccttctgcaagagaagaaatgggcttctgaagaaagcttatgagctgtcagtgctgtgtgatgctgaagtttccctcatcgtcttctccagccgtggccgtctctatgagtattccaacaacaacataagatcaaccatagagaggtacaaaaaagcctgttcggatcattcaagtgcgagcactaccacagaaatcaatgctcagtattatcaacaagaatctgctaagctgcgacagcaaatacagatgctgcaaaattctaacaggcacctgatgggtgatgccttgagcacactgactgtgaaggaacttaagcagttggagaatagacttgaaagaggaatcactagaatcagatctaagaaacatgagatgctattggctgaaattgaatactttcagaaaagggagattgagctggaaaatgaaaatctttgcctccggactaagataactgacgttgagaggattcagcaagtaaacatggtttctggaccagaactgaatgtcattcaggcattagcttcccgtaacttcttcaatccaaacatgttggacggtggaactgtttaccctcagacagataagaagattcttcatcttgggtgatcaataatatgatcttcgctatagcctataactatctatccaattagccggaggctaaatgcattattattactactcttttgattgctcattaactagaccaaatgatctatatacattacatatgaattatggattatggatacttatgtttaatgattgtatgatatcataacaatatgttagaaataataattaaaaagtagagttgtgtttg

SEQ ID NO: 10766 - DNA, 1790 bp, Glycine max
  Clone ID: 700968235_FLI
ggcgttttcgtcacatatatcgtggtcagcccaaacgacacttgcttactagcggttggagcttattcgtgaatgcaaagaaacttgttgctggagattcatgcattttcgttagaggggaatctggagaacttcgtgttgggattcgtcgcgcagcagaaaatctcagcaatatatcgcaatcttcatctctgatatcgggtcatagcatgcaacttggaattttgactaatgcttccaatgctgttggcaacagaaccatgtttcttgtctattaccgcccgtggacaaatccctttgaatttattgtccatctccaaacctatttgaagtcaactttacaagactatccaattggaacgagggtacaaatgcagcatgaagttgaagaatctttaagaagacttgcaggtacgataattggtaatgaagatatcgatagtattaggtggcctggttctgcatggagacgtctcaaggtgcaatgggacgccatagtagaagacaaaatgcatcctgaaagggtttgtccttggtggattgagcccttggaatctgccaaggagaagaagcaagttcctgctctccccaccaagaaaaaggggcatgcacttcttaaccagcgctctttgcctggaataagtggctttggcaagaatgatgttcatcagaattcagccggcccttcgtctcagactcggagggcagacggagacctgcaaggtcaagattacagcggcctatctcctccacagcctttgcaaagagcaccatcaactgatataatccgcccatcaaaggtcccaatccgtggctcgcggttcgggaaggagaatcggaatcagcatccctttctcaagcaagatcctcttcataaatctcttggcagatcaatgtcacttacacatgaagacttgtcaattacaagctcaaacctaacttccattggttctgaatcccttggaatgccttctactgaatctagaggtgaaaatgatgctccttttgggcagcctggcagttctagtacattcaaactttttggagttaacttaattgacagctcccctgagatcccatcggttaattttgttgatctcaacaagacttcaagtcttccttctagtcctccaatgggtgttgccccaggaaaaacatgcaagaagtgtcgctgtgttaataatcggagctgcacaaaggtgcttaagctgggaaatgctcttggaagagcagttgaccttgcacgctttaatgggtataccgaacttattgctgaattggactccatgttcgattttcaaggaaccttgataagcggaggtagtgggtggcacgttacctgcttggatgatgaaggagatatgatgcaacttggagattatccctggcaggatttcctgggcgtggtgcaaaagatgatcatatgtccaaaggaaggtactgacaatctcaagccaggctcctcagctaatccttgaaacctttagtcgcctaccttttctccccttttccaccattgcatgcatgcacagtttgcagtactgtgtcgtttctagttcgaataaatttctcttttcctgagaatctaggagatcaataagtttctgctataaaaatatagcaatcatagtgaaataaatttacagagtggaaaaacaaaaactgatttttcttgttttaagaacctgtttttcatgatacttgtggaaagtactcatgagtcatgaccgtgatatgaataattgacataataaatgcatggttattccgtcctcatgaacgggcgttcg

SEQ ID NO: 10767 - DNA, 620 bp, Glycine max
  Clone ID: 700968271_FLI
ccttttgttgttctgtgtttgtgtttgttttttctctcacctgaaaatgtcttgctgcggtggtaactgtggttgcggaagctcctgcaagtgcggcaacggctgcggaggctgcaagatgtacccagacttgagctacactgagtcaaccaccaccgagaccttggtcatgggagtggcacctgttaaggctcaatttgagggtgctgaaatgggtgtgcccgctgagaacgatggctgcaaatgtggaccaaactgctcctgcaacccctgcacttgcaagtgaggtgttgggagagcaagcttcaagcagagatagcccttaattaggaataatgataaactattaatgtgtagctaaaaacttatgtattatgtctgtgatggttttcgtgcactctggtgttttgtgttaaacaaacatccttagaataaagtggtcatgtcttgcctttcagcaagttcaagtgttttggacttgtgatgggtgtgttaagctcatggttgcttcttttttttttttttttaatgtttggtaattggtcgcttctgtataaagttcggctaatctgaattatgaatctctgcttataatattaaatactattactggaaaaaaa

SEQ ID NO: 10768 - DNA, 1495 bp, Glycine max
  Clone ID: 700968295_FLI
atatgcgaaagccgagggagaccaaaaaacaaaccaaaaaccatcatcataacccaaacccaacacaccatagcacagcaccacctcgtatcacataataacaaccttaaacccccaaactttcatgtctcggatcccgtgattcggatccccaacaacaacaacgccaaaaacaaaaaacaacctagtattatttggatccggttcccatgacgcggcgttgctcgcattgcagccacaatgggcacaactcaagaacttgccctaaccgcggggtgaagctcttcggggtccgattaaccgatgggtcgatccggaagagtgctagcatgggcaatctaacccactatgccggttccgggtcgggtccactccataccgggttgaataaccccggttcgcccggggaaacccccgatcatgccgccgcagtcgccgacggttacttgtccgaggacttcgttcccgggtcttcttctagctcccgtgaaagaaagaagggtgttccatggactgaggaggaacatagaatgtttttactcggattgcagaagctgggcaaaggtgattggcgtggaattgcaaggacctatgttatatcaaggacacctactcaagtggctagccatgctcagaaatatttcatcaggcagagcaatgtgtccaggcggaaaagacggtccagcttgtttgatattgttgcagatgaagcagctgacactgcaatggtacagcaagacttcttgtctgctaatcagttacccactgaaacagaaggcaataaccccttgccagctcctcctcccctcgacgaagagtgcgaatccatggattccacaaactcaaatgatggagagcctgccccatcaaagccagaaaacacacagtcatcttatccaatgttatatcctgcatattattctccggtgttcccgtttcctctgccctattggtcaggatacagtccagagtccaccaagaaggaggagacacatgaagtactgaagccaactgcagttcattctaaaagccctatcaatgttgatgaactggttggcatttcaaaattgagtttaggggagtctattggtgactctggtccctcctctctgtctcgaaaacttatcgaagaaggaccctctagacagtcagcttttcatgcaacaccgacatgtggcagttcaaatggcagtgccatccatgcagtttaagcgtgtgcctcatgttccgaggaagggattgttatgtgagcattgttgattgatgggcgcgcatgaatgtggtcttgtgttcatcaatacatctgtttgtggggtaacctaaataattttttttttttggcccattcacagtgattaacctagtttgtttatttgctggtaggcagtagcgtctaggagttactttgggtctaaagtaaaacttttatgtttgttcagtgattttatttgtcagggttatgtaaagttaatgttaattgtgcagtttgacaatc

SEQ ID NO: 10769 - DNA, 2477 bp, Glycine max
  Clone ID: 700968464_FLI
aaaaacacactgtatgaggtgaaagaggttcttgagcttctagacatagagaattttcagcagaaacttaaaggtgttggatcaccaatcaagtgtccttttggtgttcctgaaaaccctggattcactgttgggttgaatccactgttgagcaagttgaagatggaggttctcagggacggtatgtccacccatttgttgactggtttgggtggatctggtaaaacaactttggctacaaagctctgtagggatgaagaagtcaagggtaaattcaaggaaaatattttatttttcaccttctcacaaacgcctaagttgaagaatatcatagaaagactatttgaacattgtggataccacgttcctgagtttataagtgatgaagatgcaattaaacggttggaaattttgctgcggaaaattgagggaagtccacttttgttggtcttggatgatgtttggcctggatcagaagccctcattgagaaatttcaattccagatgtctgattataaaattgtggtgacttctagggttgcatttcctaaatatggcaccccatatgttttaaaaccacttgctcatgaagatgcaatgaccctattccgacatcatgctctcttggaaaaaagcagttcacatattcctgacaaagaaattgtccaaaaggttgtgagatattgcaagggtttaccgcttgccgttaaagtgattggtagatcactcagtcatcggcctattgagatgtggcaaaagatggtggaggaattgtcacaaggtcattctatacttgattctaatattgaattacttacatgcttccaaaagctcttgcatgttttggaagataatcccaacaacaaggagtgcttcatggacttggggttatttcctgaagaccaaagaattcctcttcctgttcttattgatatatgggcagtgttatatggatttgatgatgacggcatagaagcaatggacatcataaataaattagactccatgaatctggttaatgtcttagtagcaaggaaaaattcaagtgactcagacaattactactacaataaccactacgtcatcctccatgatcttctaagagagcttgcaatctatcaaaacaacctggaaccaattgaaaagagaaaaagactgattaatgacataaatgaatccgaggagaagcaacaaggcatgatagcccgcttattgtcaaaatttgcagatgcagtgttaaccaggcactccaacaggtccccggccggcacattgtctatatcagctgatgaaacaaacacttcatatcagtcccacatacaaccatccctagctgaagttctggttttaaatcttcaaactaagaagtattcctttccagagtacatagagaaaatgagtgaactaaaagttcttatcatgacaaattatggttttcatccgtgtgaactagacaatttcaaactactcagctctgtatcaaacctgagaagaatcagactagagcggatttctgttcctcacttaggggcattgaaaaatcttggaaagttatccctctacatgtgtagtaacataagtcaggcttttgaaaatggtaccatcacagttttggattcatttccaaaactatcagatttgaacattgactattgcaaggatatggtgaaattgcctactgggatctgtgatattgtctcactaaagaagctcagtattactaattgtcacaagcttagttctctgccccaagaaattggacagttgttgaatttggaactcctgaacataagttcctgtactgatttggaagagataccagattctattgtaaaactttctaagctaagacttcttgacctctcaaactgcataagcctttcaagtttaccagaggacattggtgatctatgtaatctcaggaatctcaatatgacaagctgtgcaaggtgtgaattgccatactcagtaaccaatcttgagaatttgaaggtggtggtatgtgatgaagagacagctgcttcatgggaagcattcgaagctatgcttccaaatctgaagttagaggttcctcgagtcgaggttaacttaaactggcttcattctattagctcctaagacatgacctggttcatgggaagcatttgaaactatgattccaaatctaaagtttgaggttcctcgagttgatgttaactgaagctggtttcgttcaatttgctcctatgacctctttctataaatgttagaccaatggccgtgactgtttcatgtgtaataatcttgtttaaaatatggataataatgtgtattcaagttgctgtagtagtatttgcatgtttagtgtaaacagtactatgttacttgaaagaagttggcgattttatttgttgtatgtgttgtcatgagtgaacatcttagcatgatgatgtccacaaaataattgaactatggtaagttaaaaagtttgtttttat

SEQ ID NO: 10770 - DNA, 497 bp, Zea mays
  Clone ID: 700968602_FLI
tgaagtttgtgtgatacttgacagcggacaatactctggagatgttcttgtgtttaaacatcctgggctacattttggcgatatacatatcttaactgcaaggcaaattgatggactagagaagaattttattggatattcaaaaaatgcaatactttttcctacttctggacaaagatcattggctgatgagatggccaatagtgattttgatggtgacgagttctgggtctcaagaaacaatatgctctgcaagtttcaaccttcgccgttcgttagcctccccttctgggcttgctcccgaagttgctgctttcagccatcatctttgttgcttacgcatagacgaagcgcctttgtgcacttctttagccgaagcttagcttcgtctactaatgagaatattcctgaaatacacttgttaatgccgaagcaatatgttagacaagtcattgtttcttcgctaataagtgatcttcggcataagaggccccaac

SEQ ID NO: 10771 - DNA, 1473 bp, Zea mays
  Clone ID: 700968684_FLI
gcctgtaagcgtcagcgtgttccagttccagcttctatttttgctccaaacaagtcgtgctccactagggatcctatccagattcgtggggacacccccgtccagttccagccttccaacttccaaccctctcctctccgcaggctgtagcatttgtcgggttggattgggttgttccgcttgggtagcctggtgggatcgaaatctgtgtgggatccatggcggcggtcgaggggacgacgaagaagaaggtaatcatcgacaccgaccccggaattgatgacgcgatggccatcttcgtggcactgcggtcgccggagctggaggtgctgggcctcaccactaccttcggcaacgtccacaccgccctcgccacgcgcaatgcgctccacctgttggaggctgttggaaggactgacatccccgtggcagagggatcccatgtaacaatcaagaaagccaccaagctgaggatcgcaagctttgtccacggttctgacggcctgggaaaccaggatttccctccaccggctaccaagcctatagatcagtcggctgctgccttcctagttgagcaagcaaatctgtaccctggacaagttaccatcgtcgccctcggtccactaaccaaccttgctctggcagtggagcttgacccttcgttcccgaagaagatagggcagattattattcttggaggtgcgtattcagttaatggaaatgtgaaccctgcagctgaggcaaatatctttggggatcctgatgcggcagatattgtgttcacctgcggtgctgatattttggccgtgggactaaatgtaacccaccaagtagttctaaccgatgctgacagggagaagcttgaacagtgtgatagcaaatatgcccgctacttatgcaagataatggacatttattttgattaccacaaggatgcctacttcattaaaggagtgtatcttcatgatccaacaacggttattgctgctgtgaatccatcgctgctgacttacacagaaggtgttgtgagggtacagacggttggaatcacaaagggccttactgtttttgataacaccaagaaaaggtacggagagatcacagcctggagtggcatgcccaccgtgaaggttgctgtcaccgtcgatgcccctgccgtggtagagctgatgatgcagaggttgatgactgatgactagcagcaataccagctaattggcagcgccaccattaagacaatttccagttcttaagggagaaacaaatgttggaacatggaagtgcatttgttgttcaccagaaatttggtcgtcttgtcatcaaaacaccagaattgctttattgcacgctagctactcatttctttggtaattatgtgcgtgcttggtgtttatgtacagttttatgtgcttgataatgggcacatggccagttcgacaatgtcatacagttatactatactagtacattgct

SEQ ID NO: 10772 - DNA, 1145 bp, Glycine max
  Clone ID: 700970311_FLI
aaaacagagcaaagagagagtgtgtgaaaagtgaaacaaaaaacagaacaacaatggcgacacttaaggttcctcagcctcttccccccgttgcagatgattgtgagcagctccgaaaagccttctcaggttggggaactaacgaggagctgattgtatcgatcttggctcataggaatgctgctcagaggaagcttatcagagaaacttatgcccagacctatggagaagatctcctcaaggccttggacaaagaactcacgagtgattttgagaggctggttcatctttggacacttgattctgctgaacgtgatgcatttttggcaaacgaggcgactaaaaaatggacttcaagcaatcaggttctggtggaaatagcctgcactaggtcctctgaacaattgtttgctgcgaggaaggcttaccatgttctttataagaagtctctggaggaggatgttgctcatcacacaacaggagacttccgtaagctcatactacctctggttagttcttatcgatatgaaggagatgaggtcaacttgaccctgcaaaaactgagcaaaaattgctgcatgagaagatttcaaacaaggcttataatgatgacgacttcatcaggattttggccacaaggagcagagcacagattaatgctacttttgaatccactacaaagatgcatttggacaagatatcaacaaggactgaaggctgatccaaaggacgagttcctgtctttactaagagcaactgtgaagtgcttgatccgtcccgagaagtacttcgagaaggttgttcgcttggcgatcaacaagcgaggaaccgatgaaggagcccttacaagagtggtggccacaagggctgaggttgatttgaaaaacatagcagatgagtatcaaaggaggagcagtgtccctcttgaacgtgctattgttaaggacaccaccggtgactatgagaaaatgcttgtggcgcttttaggacatgatgatgcttgacatactcctttgtgtttgtgtgtgtgtacttgtggcagagttactatatagtgtgcagtgtactgctttgtggttccatgttgttgtgttttctggccattattgtcttcctttgttgaataaaatgaaccactttggcac

SEQ ID NO: 10773 - DNA, 838 bp, Glycine max
  Clone ID: 700971082_FLI
cttcggcgggcgagggcgcggaggcgacaggggccgcggccggcgtagaggtccccgccgcgaggaggaggagaagtgggtcccggtgactaagctgggacgcctggtgaaggaaggaagaatccgaagcctggagcagatctacctccactcgctgcccatcaaagagcaccagatcatcgacacgctggtgggccccaccctgaaggacgaggtgatgaagatcacgccggttcagaagcagacccgggccgggcagagaacccgtttcaaggccttcgtggtcgtcggcgacaacaacggccacgtgggtctaggcgtggagtgcagcaaggaagtggccaccgcaattcgtggcgcgattattctcgcgaagctttcggttattcccgtgaggaggggttactgggggaacaagattgggaagccccacaccgttccgtgcaaggttaccgggaagtgtgggtccgttaccgttaggatggttcccgcgcctaggggttccgggattgtggcggctagggttcccaagaaggtgctgcagtttgctggtattgatgatgttttcacctcctccaggggatccaccaagacccttggcaacttcgttaaggctacttttgattgcttgatgaaaacctatggattcctgacaccagaattctggaaggagactcgcttctccaaatctccattccaagagtacacagatctattggcaaaaccaacagggaagactctaatcttggaggaggaaagggtggatgcttgatttgctagttttggttttatggatgttttagagacattgttatttacctttgttggttctgtgctt

SEQ ID NO: 10774 - DNA, 562 bp, Glycine max
  Clone ID: 700971908_FLI
cccttgtggaggcactacttccaaaatacacagggtctcatttttgttgttgacagcaatgacagggacagagttgttgaggccagagatgagttgcacaggatgttgaatgaggatgaactgagagatgcagtattgcttgtatttgctaacaaacaagatcttcccaatgcaatgaatgctgctgaaattactgacaagctgggactccactctctcagacagcgccactggtacatccagagcacctgtgcaacctctggggagggtctctatgagggtttggactggctttccaacaacatagccaataaggcttgatgctttttgggtgtcttgtggatgcaggggtgaatattatctggttttgttttttggttctcttctgagacacattggctttatgttcatgttttctggtttaggacatcttgatggctaaaattatagcaggaatttgtttcatgggatgtctaatacttttgagtttttttattgggcttggattcaatgtttataactgtaattgataccaatcaatgtgccatcccattgagctttt

SEQ ID NO: 10775 - DNA, 526 bp, Glycine max
  Clone ID: 700971981_FLI
ggaaaaataataaaaagaaagagaaaaacacaggagaagagaagagagtagaagatacgaagatttgaggcatttatataatcgaaattggaagcgaggaaggaaaatcgaaatcgaaaatggcagtaatggagaggttgaagatgttcgtcgttcaagagccagttgtcgccgcttcctgtctcatcgctggcttcggtctttttcttcctgcttttgtgaggcccatgttggattcatatcaggcaaccaagcaacctcctcaacctgctttaagcgatgtggttgcaggtatgactggaaaaaagtaaaggtgatttacttgacagatacaagtgcaaatttgctaatttccttgtttgaacttattttaattctcaaatgtgagagaaataagagtactgaatattggatctagcttccgtgtctgacgatgtctatttgttccggaatcattcagtggtttcacttcatattagttttggctgagttgtggttgaaatgtcagtttttctgccgcttgatt

SEQ ID NO: 10776 - DNA, 1326 bp, Glycine max
  Clone ID: 700974382_FLI
gctgttcttatcattgattcgaccactggtggttttgaagctggtatttccaaggatggacagactcgtgaacatgctctgctttcattcacccttggtgtgaaacagatgatttgctgctgtaacaaaatggatgctactacacccaagtattccaaggccaggtatgatgaaattgtgaaggaagtctcttcctacttgaagaaagtaggatacaaccctgacaagattccttttgttcctatctctggttttgagggagacaacatgattgagaggtccacaaaccttgactggtacaagggtccaactctgcttgatgcacttgaccagattagtgagcccaagaggccctctgacaagcccctcaggcttccccttcaggatgtgtacaagattggaggtattggaactgtgccagtgggacgtgttgagaccggtgtcttgaagcctggaatggtggtgacttttgcaccaactggactgacaactgaagtcaagtctgtggagatgcaccatgaatctcttacagaggcacatcctggtgacaatgtgggattcaatgttaagaatgttgctgttaaggatttgaagcgtggttatgttgcctcaaactcaaaggatgaccctgcaaaggaggctgctaacttcacagcccaagtcatcatcatgaaccaccctggtcagattggaaatggctatgcccctgtcctcgactgccacacttctcacattgctgtcaagtttgctgaactcatgaccaagattgacaggcgatccggcaaagagcttgagaaggagcccaagtttttgaagaacggtgatgctggttttgttaagatgattccaaccaaacccatggttgttgaaactttctccgagtatcctccacttggtaggtttgctgttagggacatgcgtcaaactgttgctgtgggagtcatcaagaacgttgagaagaaggatcctaccggagccaaggtcaccaaggctgcccagaagaagaagtgaatcgtgcgggctggttcatcaggggatgttggttacaataaatgttggtttcttttctgtactcttgtgtcttcttttctaggtagcttgtttttcggacaaagtttgaagtctccaccatcatctcgcaactgttgttcccagaactgggttcttgatcgacggtggcaaaattgcttttatttatctgtgttttaatgtgttgtgtttgtcggaacccctgattacatttttgttaagcgcagcgagtttcaggactttgctgcgttgtgttgctttggtttattaaatgtcaactttctatttgtagtgttc

SEQ ID NO: 10777 - DNA, 963 bp, Glycine max
  Clone ID: 700975194_FLI
atcaaaacaaccttctttctttcaggttcttgatcagtgtcaaaaccaaaagggtggttgcaaattgcaatggctaagcatgatgttgagggtggttccttcgctgcaaaggactaccatgatcctcctccagcaccattgattgatgctgaggaactcacacagtggtccttctacagggctttgattgctgagttcattgccacaatgctcttcctttacatcacagtgctcactgtgattggttacaagagccagagtgatgtaaaggctgggggtgatgtgtgtggtggagttggcattcttggcattgcttgggcctttggtggcatgatcttcattctggtgtactgcactgctggaatctcagggggtcacataaacccagcagtgacatttgggctcttcttggctcgcaaggtgtctttgattagagcaataatgtacatggtggctcagtgcttgggagccatatgtggagttgggttggttaaggccttccaaaaggcttactacaacaggtatggtggtggggccaatgagctcagtgaagggtacagcacgggtgttggattgggtgctgagatcattggaacctttgttttggtctacactgtgttctctgcaactgaccccaagaggaatgctagagattctcatgtgccggttttggctccacttccaattggctttgctgtgttcatggttcacttggcaaccatcccagtaacaggcactggcattaaccctgctaggagtctaggagctgctgtcatgtacaaccaacagaaggcctgggatgaccattggatcttttgggttggaccatttattggagcagcaattgcagccttctaccatcaattcatattgagagcaagtgctgctaaggctcttggatcattcaggagcaaccccactatttgagtcaatttcctcttcatggggggttagtggaaaggg

SEQ ID NO: 10778 - DNA, 1452 bp, Glycine max
  Clone ID: 700975602_FLI
gccagtccccgtaatggacaatgctcaagttttaaataaaacagaaggtgaatatgcttcagatgtgaagagcaaagctgaagaaactccacagtgtgataagagaatcgagaatgatgctaatgtttggcaaatcaacatggatactgctgaaacgactgtggcggtgaatcccaaagcttttgaagtggctgatagtaaaacttgccttaatggtgactccaactccatatgccccagtcataatgagcctaatacaccacatgcaattcctactgaaatcaatagtggattagacaatgagaatagggataatgaaaagcaggctgttgttgcacatgcagataatggacattcgatctcaaagaacttgtactttttggaccctgatgattcatataatggtaatgagtcaggaacagaagaggagcaatcagcttttatgaaggagcttgaaaatttctttagggagaggagcatggaattcaaaccacccaagttctataaagaggagcttaattgccttaagttatggagatctgtacacagattgggcggctatgacaaggttacctcatataaattgtgccggcaagtgggagagtctttcaaacctccaaagacatgcacaacagtttcatggacttttcgggttttttatgagaaggcacttcttgactatgaaggcatacaacaaaggtggtgagctgaatgtgcctattactcctcatgctgagccaataaatattgaaaatcagtgtgtccagggttcagcatcatcgggtagggcgcggagagatgctgcagcaagggctatgcagggttggcactcacaacgtctccttagcaatggtgaatttagtgatcctattattaaggataggaactctttgtctacacaaaagcgtgaaaagcagcttaaaaacatcaatttacttaaacgcaagaaatcatcagacacagttaatgctgtcaaagtggcacacagccaaccatctagaccacaatcggacacatatgtggttgacattggacctcctgctgattgggtaaaagtcaatgtgcaaaaaactaaagattgttttgaggtctatgctttagttcctggccttctgcgggaagaggtgcgtgttcaatcagacccagctggacgcttggtcataagtggagagcccgagaattctgacaatccatggggggtgacacctttcaagaaggttgtcagcttgccttcaagaattgatactcagcagacgtcggctgtggtgaccttgcatggacaattgtttgttcgagttccatttgagagcaatcagaatagagaaggctgatagattcatgacgaactaatttgccatggtttataggatagttgacccctaagccaaattcatgccgtattctattaactctgaattatgttaataattttttatttaaatttttcacctg

SEQ ID NO: 10779 - DNA, 540 bp, Glycine max
  Clone ID: 700975650_FLI
tgaacccgaagattatttccgttgtagaacaggaagcgaaccacaaccaggaccggttcttggagcggttcacggaagcgttgcattactactcgaccgtttttgactcgctggaggcgtgtccggtcgaaccggacaaggcacttgcggagatgtacctgcaaagggagatatgcaacgtggtgagcagcgagggaccggcgcgagtcgagaggcacgagccgctggctaagtggagggagcggctcgagaaagccggcttcaagccgctgcatttggggtcaaacgcgtacaagcaagccagcatgttgctgactcttttctctgctgaagggtactccgtggaagagaatcaaggatgcttgactttggggtggcatagccgccctctcattgcggcttcggcttggcaagctgcgccgatgcaggacagggaaacgctgcgtttcgagcaatgagtttcaagaaacggaaaaattgtttaattatagtagtaactagtaaacaagagtgatgtataatgtaaatttttctctctct

SEQ ID NO: 10780 - DNA, 1286 bp, Glycine max
  Clone ID: 700975691_FLI
ccaatacaatcaaccaaccccttcactctctctctctctctcttgcaatggctgccattgttttcatccacattgcatcattggtctctctttttgttgcaacaagtgcaagaatccctggagtttacaccggtggcccctggcagagtgctcatgccaccttctacggtggcagtgatgcttctggaacaatgggtggtgcttgtgggtacggaaacctgtacagccagggctacggagttaacaccgcggcgctgagcactgctctgttcaacaacggtttaagctgcggcgcgtgcttcgagataaagtgcgaccaggatccacggtggtgcaaccccgggaacccttcgatcctaatcactgcgaccaacttctgccctccgaacttcgcccttccgaacgacaatggcggatggtgcaaccctccccgcccgcacttcgacctcgccatgcccatgttcctcaagatcgcccagtatcgcgccggaatcgtccccgtcgcataccgccgggtgccatgcaggaaggcaggggggatcagattcacaatcaacggtttccgttacttcaacctggtgctgatcaccaacgtcgcaggtgcaggggatatcgtgcgcgtgagcgtgaaaggaagcaaaaccgcgtggatgagcatgagccgcaactgggggcaaaattggcaatccaacgcggttctggtgggccaggccctttcctttagggttaccggcagtgaccgacgcacctcaacctcctggaacgtggcaccacctaattggcagttcggacaaaccttcaccggaaagaatttccgtgtctaaatccaagaagaagaagaagaagaaaagagagaagaaaataacaatactcttaaattaatggctcctggtatttttgagtttgtttgcttcagtttccctgcttctaacttccctctattttcctgggaaagctttggagtgggtggtagggggttaaaagaaaattaagagaaaggtagttttaggaaaagtaaaagtgaaagtaaggttaataattaatataaatgtaagtcgggggggtgtttgcattaaatgttaaagtgttttatgtatgggtgatgctggaatattaattacccagcattagcaacccgtttttcttttctttgtttattcaaagtgtgagggggctgaggaggttgcaaggaggaacatgtagcccgcagctctggctttaatattgacataaatgtactatcatatcaacaaatataaataaaagaatagcatttcagttgctat

SEQ ID NO: 10781 - DNA, 1479 bp, Glycine max
  Clone ID: 700975823_FLI
ccgagggagaccaaaaaacaaaccaaaaaccatcatcataacccaaacccaacacaccatagcacagcaccacctcgtatcacataataacaaccttaaacccccaaactttcatgtctcggatcccgtgattcggatccccaacaacaacaacgccaaaaacaaaaaacaacctagtattatttggatccggttcccatgacgcggcgttgctcgcattgcagccacaatgggcacaactcaagaacttgccctaaccgcggggtgaagctcttcggggtccgattaaccgatgggtcgatccggaagagtgctagcatgggcaatctaacccactatgccggttccgggtcgggtccactccataccgggttgaataaccccggttcgcccggggaaacccccgatcatgccgccgcagtcgccgacggttacttgtccgaggacttcgttcccgggtcttcttctagctcccgtgaaagaaagaagggtgttccatggactgaggaggaacatagaatgtttttactcggattgcagaagctgggcaaaggtgattggcgtggaattgcaaggacctatgttatatcaaggacacctactcaagtggctagccatgctcagaaatatttcatcaggcagagcaatgtgtccaggcggaaaagacggtccagcttgtttgatattgttgcagatgaagcagctgacactgcaatggtacagcaagacttcttgtctgctaatcagttacccactgaaacagaaggcaataaccccttgccagctcctcctcccctcgacgaagagtgcgaatccatggattccacaaactcaaatgatggagagcctgccccatcaaagccagaaaacacacagtcatcttatccaatgttatatcctgcatattattctccggtgttcccgtttcctctgccctattggtcaggatacagtccagagtccaccaagaaggaggagacacatgaagtactgaagccaactgcagttcattctaaaagccctatcaatgttgatgaactggttggcatttcaaaattgagtttaggggagtctattggtgactctggtccctcctctctgtctcgaaaacttatcgaagaaggaccctctagacagtcagcttttcatgcaacaccgacatgtggcagttcaaatggcagtgccatccatgcagtttaagcgtgtgcctcatgttccgaggaagggattgttatgtgagcattgttgattgatgggcgcgcatgaatgtggtcttgtgttcatcaatacatctgtttgtggggtaacctaaataatttttttttttggcccattcacagtgattaacctagtttgtttatttgctggtaggcagtagcgtctaggagttactttgggtctaaagtaaaacttttatgtttgttcagtgattttatttgtcagggttatgtaaagttaatgttaattgtgcagtttgac

SEQ ID NO: 10782 - DNA, 710 bp, Glycine max
  Clone ID: 700976261_FLI
ctcaatacctcaattcttcgctttaacgaaaaaggacacattttcccttacaatggcacgaaccaaacaaactgcgcgcaagtccaccggaggcaaggcacctcggaagcagctcgccacaaaagccgccagaaagtcagctccggcgaccggcggagtgaagaagccgcatcggttccgccctggcacggtggcgctgagggagatccggaagtaccagaagagcacggagctcctgatccggaagctccccttccagcgcctggtgcgcgagatcgcgcaggatttcaagaccgatttacggtttcagagtagcgctgtttccgcgcttcaggaagcggcggaggcttacttggtagggttgtttgaggacactaatctctgtgccattcacgccaagcgcgtcaccatcatgccgaaggatattcagcttgcgcggagaattagaggcgagagggcttgaggattttttaatgatttgtcactgctaggatacgttaaaactggatctggtttatgtagtttgtggttttggtgtatttattcgaccgtaagggttgtggttgttagtatgaagatgtagagttaacattatctggctaattagttggttaatgtttactttgaatttgctgtttgtgtgaatgaattaaaagggttgattgcaatggattttggttatttttaaccctttttacattttggcttgc

SEQ ID NO: 10783 - DNA, 1081 bp, Glycine max
  Clone ID: 700976572_FLI
tgcacttgcacgacaatcgctcatcaacgcagatggcgttatcgagcgatcatttttgcccggcaaatactctctggagatgtcttcggcagtttacaagagttgggttttcactgatcaagcccttcctgcagatcttatcaagagaggaatggcaattgaggatccctgtgccccccacggccttcgccttgtgatagaggactacccttatgctgttgatggactagaaatatgggatgctattcagacatgggttaagaactatgtctccttgtattacccaacagatgatgcaattaagaaagactctgagctccaagcttggtggaaggaagctgttgagacgggtcacggtgacttgaaagacaagccatggtggcctaagttgaacactcctcaagatttggttcacatttgctccattatcatatggatagcttcagctctccatgcagcagtgaattttggacaatacccttatggaggtttgatcctaaaccgtccaactttaaccagaagatttctccctgaaccaggaagcaaagaatatgaggagctttcaaccaattatcaaaaggcttacctgagaacaattacaagaaagattgaggcccttgtggacctttcagtgatagagatattgtcaagacatgcttctgatgagatctaccttgggaagagggacagtgacgattggactgatgaccaaaaggcaattcaagcctttgaaaagtttggaaccaagctgaaggaaattgaggccaaaatcaattcgaggaacaaagattcaagccttagaaaccgtaatggaccggttcagatgccttatactgtgcttcttcctaccagtgaggaaggccttactttcagaggaattcccaacagcatctctatctaaggccagagtgcgtttatgtgtggttctctttccaaacctacgttacctttctcgttgacgagtaaatatgcaagcttatgcatgcatataataattgtcttatgcattcttaagtgttgtatgtggacgttatctagttttcgtatttaataagaatggtatcaccattactttgttttt

SEQ ID NO: 10784 - DNA, 1934 bp, Glycine max
  Clone ID: 700976843_FLI
acgccatggagggtcttccccaaggttaccgtcccaacgttggtgtctgtctcatcaactccgatgatcagatttttgtggcttctaggttgaatgtcccaggagcatggcaaatgcctcaggggggaattgaagatggtgaagaacccaaatctgctgccattagggaacttcgagaagaaactggaatagtatctgctgagataattgctgaggtttgctcataatcttagctctatctatagatcagtgatatcttacaacattcaattaattgagttcaaagtagttttaccattgtgtaataaaatgaacaaaaacaatgtctgagagcatgaaacagaaacacccagaattagattcaagagaagcatttatacatctatgtcttggtacattatatataaaacactgatcattttgataaccgggtggatgttgatcttttaatacatttggccgagcttgtgcgttacaggttcagaaatggttgacatatgacttccctcctgctgtgaaggctaaagtcaatcgtctgtggggaggtgaatggcatggacaggcgcaaaagtggtgagtatttttttttaattttatttcatgtgctttacatagccatgtacttgacatttcagtgctaacttctgaaaatattacctctaatctaaaactctggtggtgtatctctataccaaaaaatatgaccaccaaactgggtgaaagattaatgaaattaaatcagtttggtccataatgctggttaaaacatttgaaagagtttgtgaatgcatgaaacattataccaggataagtgtccaaagaagccccctcacaacttacatggttgctaaaatattagcttggcagtatagaaagcaagatggatggttggtttgcttgactttgtaaaatgaaaagaaaaagacagatttatgatgtaaagtctgaattcaatgtgtgaaagtttaaaacttaatttcttttctttagctgaagcagatgtaagcaactggaaaaaaggtcagtcttcaacaatcaacacaatgaaggctgagaaaaggcaaacatgaaaatcctgagtgtgagtgaagagagacaaataatacctgtggtattagtatatggagattacattgtgatccttttcctagtaaaattggtgtttgtgttttgtgcattttttccattttgtgtggtagttgtttgatctggagtttcaggtttggtgcctgttttgtcaattgtgtacttcaatgtagatatgagaaaccattgacttttctcaataggtttttcattactcaagctggatatcctgtttacttatgacatgccaatttaggttaaaatacggataacttaaaaattcttagtgtcccaaacttactactttttggtagtcagaatgataattgtcttaactcttaattatccagttatgtaaatgtacagttaacaaagccgatacatttagttgagtgtttctatgtctatatcctaccaaaactctgctttttctgccattgattgcgaacatttgataggtttcttatgagattaacaaaagatgacagtgaggtcaacttaactaatggggaagcagaacctgaatttgcagaatggaaatgggcagaccctgaagaagttattgagcaggcagtggactacaagagaccaacttatgaagaggttataagaaccttcaagccttactttcaagggagtggaatatctgccaaatgtaaatcaacaaagtggtgaatgttatgagtgtgcattgtagttttatccattttcttatctaatttcactgagtttggatagcactcagctatttgtaaagggatgatagttagaactgtccattaggtacttgccttcttgtaataataagctatgtgcaaatgcctaatttctattctaaacctccctgc

SEQ ID NO: 10785 - DNA, 682 bp, Glycine max
  Clone ID: 700976961_FLI
ttcggctcggctcgaccgtcattccgcgctttaacaacagaaagaaatccacacatttccctttcaatggcacgaaccaagcaaacagcgcgcaagtccaccggcggcaaggctcctcggaagcagctcgccacaaaagccgctagaaagtccgctccggcaaccggcggagtaaaaaagccgcaccgttttaggcccggcacggtggcgctgagggagatccgaaagtaccagaagagcacggaacttctgatccggaagctcccgttccagcggctggtgcgcgagatcgcacaggatttcaaaaccgatttgcggtttcagagtagcgctgtttccgcgcttcaggaagcggcggaggcttatttggttgggttgtttgaggatactaatctttgtgccattcacgcaaagcgcgtcaccatcatgcctaaggatattcaacttgcaaggaggatcaggggcgagagggcttgaggttttaaaatgtttcgtcaccgctaggatacgttaaaataggatctggttcatgtagtttggggttttggtgtatttagtctatcgtgagggttgggattgttagtatgaagatgtggagttaaagatatctggcttattagtagtttagtgattactttgaattttctgattgggttaatgaattgaaaggttgattgcaatg

SEQ ID NO: 10786 - DNA, 919 bp, Glycine max
  Clone ID: 700977108_FLI
gattgctgtctcaggtggtccaagattgctgccaggttacccggaagaacagacaatgagattaaaaatcattggaacacccatatcaagaaaaaactccttaagataggtattgatcccgttactcatgagcctctcaaaaaacaagctgcagcatcttctcaggatagttcatcctcccctgcagagcatttgccgcaacctggcaataaccttgatgatcaggtcaaagaaactgaagggattcttctcaactcagaggagaattcaagttcatcacaagctgaaaattcttctggggatgattcacttttgctagatagcatttgcagcgacgattctctattaaacagcatgtggctggatgaaactcctctggtggaagcattatgggacacaacacctaaccttgagaatactagtaataacatgggtttgttaccatcttgggaggataattgtgcttggttattggactgtcaagactttggtattcatgattttgggtttacctgtttcaacgagatagagtcacatgcactgcaaacgataggaatgaaggaagaggggcattagcacgggaatttaattgtctatgaaagaaaattaagggtaagatatcaaatctataaatgtgacaaaataccacgggctcaaatttaggttcttggtgttgaattttatctacctagtattttacaaaaatgtttctctcggaaggtggaaggtgaacgtttcctcttgtgaggttcctcgccaaccaaaacacaaaattgatagcaaagcaaaaccaaatcatcatcaaaatggcacagtacgtacgtactttcttcttctaattaaatgctgcatgtatttatgtgtacggtagggacataacaaatgggaaatgtctagtgagtgcagaaacatattgtac

SEQ ID NO: 10787 - DNA, 1267 bp, Glycine max
  Clone ID: 700977203_FLI
gggttccaagtttgaacttgaaagtgttgaactttctctagctttttcacaaatttggttgcacttgcaactgaggcaggaaagagggatcaccagggggcacgagaggaggaagaggaaagagaagaaaaaacaagaaaagtagagaaaggggtaggtgttgtacagaaatagaaattaaaaaattgagtgaaaaattaaaagggaaatttttttagaagaagagtgatagggatatggggaggggaagagtggagttgaagaggatagagaacaagataaacaggcaagtcacttttgcaaagaggagaaatgggcttctcaagaaagcctatgagctatctgttctctgtgatgctgaggttgccctcatcatcttctccaaccgaggcaagctttatgagttctgtagcagctctagcatgctcaaaacacttgaaaggtaccagaaatgcagctatggtgctgtggaagttagcaaacctgccaaagagctcgagagcagctaccgtgaatacttgaagctgaaagcaagatttgaatcacttcaaaggacccaaagaaaccttttaggggaagacttaggcccactgaatatcaaagaacttgagcatcttgaacggcaattggattcatctctaaagcaagtgaggtccacaaagacacaattcatgctggaccagttatctgatcttcaaaccaaggagcagatgttagtagaagcaaacagatccttgacagtgaagctggaagaaatcaattcaagaaaccactacaggcaatcatgggaagctggtgatcaaagtatgccatatggtggtggtggtccagagaattctcactctcattctcactctcagggcttcttccaaccattggaatgcaaccctacactacatattggtcctgattacaggtacaatgctgtagcttcagatcagataactgccacaactcaacctcaacaagtgagtggctttattccagggtggatgctttgaactaattaggctcagtgcattcaggtggagacataaaaaagcaaacaccttacaaaagggcaaaagccaaaaatgcatcttggtgttggcaaggtgtaaatgcaaccctgcttctacagttattttggtgtataagaaactgatgttgtgacttgttcaaacttttgaacttttagccatagacatatatggcaatttataacattaggtatcttttaaaggatccctttttattattaaatatctgaacgaccgatttcaatttt

SEQ ID NO: 10788 - DNA, 475 bp, Glycine max
  Clone ID: 700977257_FLI
cccaatcgtttgctcaaagattatctcgaggtgatgatcacgaataggaaggaacgaggtgaactattggaagccttagtagttagcgacaaagatatcatcatcccaaatttttcacagagaatacatcttttatggggagagaatgataaaatattcaatctggagcttgcgcaaaatatgaaagaacaactaggggatggtacaacatttgaagccataaagaaagctggtcacatggttaacatggaacgaccccgtctcttcaacagatgtctcaagcagtttattgcctccttcttggccccaaatggacccaaaaaataatgtccagggtctgtattctaaacaggcacactacttttcataagatgattttactgttcctttcttttctatttttttttatttaacgcaaaagttatgagcatttatctaaaaccatgttacacgataatttaacattattttaaat

SEQ ID NO: 10789 - DNA, 1051 bp, Glycine max
  Clone ID: 700977282_FLI
ctttggaatagttttcaaggcatgcttgaatgatgggtctgttgtggctgtcaaaaggttaaaggactataatgcagccggtggtgagatccaatttcagacagaagttgagaccataagtttggctgtccaccggaatcttctgcggctttcggggttttgcagtactcagcatgaaaggctccttgtttatccctacatgtctaatggcagtgtagcctctagattaaaagatcacattcacggtcggccagctttagattggacgaggcgaaagagaatagctttaggtacagcaagagggttggtttacttgcatgagcaatgtgaccctaaaattattcaccgcgatgtcaaagcagcaaacattttgctagatgaagactttgaagctgttgttggtgattttggtttagctaagcttctggatcatagagattcgcatgtgaccactgctgtgcgtggcactgtcggtcacattgctccagagtatctatccactggccaatcatcagaaaaaactgatgtgtttgggtttggaatcttgctgcttgaactgatcacaggtcataaggctctagattttgggcgagcggcaaaccagaaaggtgtaatgcttgattgggttaagaagctccaccaggatggaagattgagtcaaatggtagacaaagatctaaagggcaacttcgatctgattgaactagaagaaatggttcaggttgcactcttgtgtacacaattcaatccttcgcaccgccccaagatgtcagaagtattgaagatgttagaaggggatggcttagctgagagatgggaggcctcacagaggattgaaacaccaaggtttcggtcttgtgagcctcaaagatattcagatttaatagaggaatcttcactcgtagttgaagccatggagctttctggtcctaggtgacaaacaagtatcttggttttccactatagctccttgtttaaaaggtgtagtttaaatgttaaatatgacattgtcattcgtgtcaatagctatgtaatgctcgtattcatctgt

SEQ ID NO: 10790 - DNA, 782 bp, Glycine max
  Clone ID: 700977319_FLI
atttaaaagaaaagaaaaacgttcgttaaatactcatttgaacttacaccgcgtgacctagccaagccaacacaaagggcacagaagagggtttcttttcgtttcgtttcaatggggagcgaagaggagaacggcgaattctacctgcgatactacgtcgggcacaagggcaagttcggtcacgagttcttggagttcgagttccgccccgacgggaagctccgctacgccaacaactccaactacaaaaacgacaccatcatccgcaaggaggtttacctcacccccgccgttctccgcgagtgccgtcgcatcatctccgagagcgagattatgaaggaagatgataacaactggccggaacctgatcgggtggggcggcaggagctggagattgttatggggaacgagcacatttcgtttacgacttcaaagattgggtctcttgttgatgttcagagcagtgctgacccagagggtcttcgcatcttttactatcttgttcaggatttgaagtgctttgtcttctctttgatttcccttcacttcaagatcaagcctatctagggtgtttgcaatattatgcattcatcctctgggaaatatgtacttgtttagcaactctcactttttgctaatggagttcagcttctgatagattgactttgtaatcgtgaaatgatttagttctgtattggtggttacatgaattggaattttagatttgagggtatagcccttgaactataagtgttgattggattggtttttatgcatggctt

SEQ ID NO: 10791 - DNA, 1625 bp, Glycine max
  Clone ID: 700977406_FLI
cattaacatggaccaaaatgattaacattcaggtaaagactcgaaaatgattaagaaagaagtgagaatacgaaagaaggggttttattgccaaatgaagaaggctcacgagacacgcatggggtcagccacatgctatccctcctcctcctccttctctctccggtggtggtgactcgccggaaaacacccactgccacctctaacgccgccgccggcgaacacccttctcaaaatctcacccgacccaattcacctttctcctctctcttctcaattccccatctgggtatccctgtttccctcaaagttctcttctttttcgtgattcagaagtgctcagtgatacccttttcttagaacaatgagagcggggaaagggagtcaggaagaggatgagtacgaggaagaagagtttggttcttccaagaaacagggcacttcctctgcccctaacaccaataaagcagatggaaaagccatcgataaggctagtgcgataagatcgaaacattctgtgactgagcagcggagaaggagcaagataaatgagagattccagatattgagggatctcatacctcatagtgatcaaaagagggacacggcatcatttttattagaggtgatagagtatgttcagtacttacaggagaaggtacaaaagtatgaaggttcatatcaaggttggggtcaagaaccctcgaagttgatgccatggagaaatagtcattggcgtgtccagagctttgccggtcaacccacggctgtaaagaatggtttgggtccagtatcaccttttcctggaaagtttgatgaaagcaatgttagtatctctccaactatgcttaatggctcccagaatacaatagatcctgatcagagcagggatattgtcaacaaaacggctgagaggcaacctgatttagtaagcaagggaatacctcttccccttgctatgcatgcaaacatgtctgttcctgtcagaagtgatggcgtacttgcacatcctcttcagggaactgtttctaatgcacaatcaactgaatgcccaacaactagtgaaccacagaatcaacaggatgaactctcggttgaaggagggacaattagcatctcaagtgcatactcccaagggttgttgaataatctaactcaagcgctacaaagtgctggtttagatctgtctcaggctagcatatcagttcagattaatcttggaaaacgggcaaacaaaggactgaattgtgggacctcttctctcaagcatcatgacaacccttcttcaaacaatcaaacaattgcacattttagagatgcaggcagtggagaagactctgatcaagcacaaaaaagaatgaaaacatataagtgatatatatgtggcattttcatgagaatccacttgcatccagatttctcacttattcttggtgcagcatataacttgtggttactgtacatccttccccatttgtttgacttttaatggttattttaaaactatttaaaccttgaacacgatcatttgtggagatattgaggcttctactgtagggagcatgtcatctatttcgcttgtatgatacatattataattataattattcagtattattgagctt

SEQ ID NO: 10792 - DNA, 1063 bp, Glycine max
  Clone ID: 700977467_FLI
cacacaaaaaatttctagagcgagaaagtgagaggagagagaaagtagctgatcctccatggcctccaccaaggaacgcgaaaactttgtctacaccgccaagctcgccgaacaagccgaacgctatgaagaaatggtggaagcaatgaagaatgtggcgaagctgaacgtggaattgacggtcgaggagcggaaccttctgtcggtagggtacaagaacgtggtgggtgctcgtagggcttcgtggaggattctatcgtcgattgaacagaaagaagaagctaaagggaacgatgtgagtgtgaagaggataaaggagtataggcagaaggtggagtctgagttgtccaatatctgcagtgatatcatgactgttattgatgaacaccttattccctctagctctgctggtgaacctagtgtctttttctacaaaatgaagggggactattaccggtacctcgcggagttcaagtccggtgatgagagaaaagaggctgctgatcattccatgaaggcgtatcagtcggcttccactactgcagaggctgagttaccacccacacatcccatccgtttgggcctggctttgaacttctctgtcttttattatgaaattttgaactctcctgaaagggcctgtcaccttgctaagcaggcatttgatgaagccatctctgagttggatactctgagcgaggagtcttacaaagacagcaccctaattatgcagcttctgagggacaatctcaccctgtggacttctgacatccctgaagaaggagctgaggaacaaaaggtggattctgccagagctgctggaggtgacaatgcataggtattggctaggaatttgtggtgtcatacgagaaggctagtctttctcttgataatttaccattaggatgtagtaatagaacatggagttggtctctagaaaatcaccatagggctttgtgagccttttattctatgcgtgtgctttctgttactggatggagactggagttgagatttgtatgttgtttgcctgtgattcagtgaatttcttcattttgacttc

SEQ ID NO: 10793 - DNA, 1530 bp, Glycine max
  Clone ID: 700977518_FLI
caattgcaaacgtaggataggggtttttgtttcgcagtgagctgagcctattatcaacatcaacattcaacacaaacaatttcagtgaatcagcacaattttttattttttttgtcttcgtgattattattatttggatcatgctcttcgcttcaattttccttttcaaatccccctgaattttttttctttctgaatcacatcagattcaattgaattataccccctcaatgcaatggtggtctgcaaatgtcgcaaggctactaagttatattgcttcgtgcacaaagttcctgtctgtggggaatgtatctgcttcccggagcaccaaatctgcgtggtccggacttattccgaatgggttatagatggggagtatgattggcctccgaaatgctgccaatgccagtctgttttagaagagggggatggatctcaaacaactcgactgggttgtttgcatgttatccacacaaattgcttggtctcgcatatcaagagttttcctccacatactgccccagcaggatatgtgtgtccttcatgttctactacgatatggcctcctaaaagtgtgaaagattcaggatcacgtcttcattccaagttgaaggaagctatcatgcagtctggtatggagaagaatgtttttggaaatcatcctgtatcagtgacagaatcacgaagtcctccacctgcttttgcttcagacccattgattattagggaaaatcatggaaactcagactcagttgatggatactcacctgcaactgggtcagaactacctaaactttcagtgacagatattgtggagatagatggtgctaatccagcaggaaatttcatgaaaaactcaagtcctgttggtcctggtgccaccacaaggaagggcccagtccatgttgaacgacagaattctgaaatttcttactatgctgatgatgaagatgcaaatcgtaaaaagtacacaaaacgaggtccattccaccataagtttcttagagctttgcttcctttctggtctactgctttacctactctaccagtgactgcacctccaaggaaagatgcatcaaatgcagcagccgaaacctcggaaggccgtacacggcatcaaagatcatcaaggatggaccccagaaaaattcttctcctgattgcaattatggcttgcatggcaactatgggtatactgtattacagactagcgcaacggggtccaggggatgagcttcttaatgatgaataaatttgtctgccattgagtgagtgctcttaaagtccggagatgttcagcggctcccattttccatattgctggttactgttgcttcttaaatccgtttgccttctttatttggaccagtcgcagtcttggcaaacatacaagtagtagtttgttgataatttttcatctggaatgcctatgacagtgacgtgttacataaaatcctagtcagccatctttgctctttgccctcagttttggtgtccacttggaatgaaattgcatcatattcagatttt

SEQ ID NO: 10794 - DNA, 1013 bp, Glycine max
  Clone ID: 700977648_FLI
gcaaaatgcaaatcgaaattcaattcttgctgccaaagccaccaaaacaaaactgagtcctttccttgtttggttctgcaaaagcaaaaatggaagcagagcatcatcaccagacctcaaacgctggtggtattattggaggcctttacgtcaaagttatgaccgacgatcaaatggaactgctcaggcaacagatttctgtctatgccaccatctgtcaacagctcgttgagatgcacaaggccgtaactatccaacaggacctcgcagggctgaggctgggtaatttgtactgtgatccgttgatggcgtgctctggacacaagataactgcgaggcagcgctggactccaacacctttgcagcttcaagtacttgagcgtatttttgacgagggaaatggtactccgagcaagcagaagatcaaggacataaccattgaacttggccaacatggccaaatatcagagacaaatgtttataactggttccagaacagaagagctcgttcaaagcggaagcaactcactcccgcactgaatgttgtggaaccagaagtggagacagaagttgaagttgagtctccaaaagagaaaaagactcgtgcagaaggctttcaggttcagccctatgagaaatcgtcacctcataggatcaaggatatgtacatccagagtcctgacataggatttgaccaattgatgagtaaaatagaagttgcaggctgctacagttcttattttctttgagaaatctgtggaatggatgggttgaagactctattcttgattgcagcttggtggactcgagtttgttgatgagactgttagatatataggggctttcgtccaaatatattgatgaaccacacgcatgatgtggtataactatatatattcacaagcattgtataaattgttttgcttaggtgctttgcaaagcttactgttgacaaccgttactgtgtgacatgttataattttacaagtttataaacatgattgcttctccta

SEQ ID NO: 10795 - DNA, 1865 bp, Glycine max
  Clone ID: 700977656_FLI
ttttattttttgtatatattaaggcggcacagacccaagtgggtgtaagtcagtcttgggaacaatatgcgaagaactggcttgttacatttgttatgccttgtcattgctttagtaagtgtgcaagcagaagatgcgtataagtattacacatggacggtgacttatggaactatttctccattgggtagtccccagcaggttattcttatcaatggtcagtttcctgggcctagacttgacttggtgactaatgagaatgtaattctcaaccttatcaacaagctggacgagccatttttactcacttggaacggtattaaacaaaggaagaattcatggcaagatggagttttgggaaccaactgtcccattcctccaaactcaaattacacatacaagtttcaggccaaggatcagattggtacatatacatactttccatcaactcaactgcataaagcagctggagggtttggagcactgaatgtttatcatagatctgtcatcccaatcccttatccaaaccctgatggagattttactttactcgttggtgattggtacaaaaccaaccacaagacgctaaggcaaactttagaatctggaaaacctcttgcatttcctgatggcctccttattaatggtcaggctcattcaaccttcactggtaacccggggaaaacctatatgttcagaatctcaaatgtaggcttttcaacctcaattaacttcagaattcagggtcacaccctaaaattagttgaggttgaaggatcacacactgttcagaacctttacgattcacttgatgtccatgttggccaatcggttgctgtgttagtaaccttaaaccagcctccaaaggactactatattgttgcctcaacaagatttacagagacacctctcactacaactgctgtactacactatgcaaactctttttcctctgcattgggacccgtgcctgctccccctgttgataaatatgactttgactggtccatgaagcaagctagaacctacagatggaatctgacagcaaatgctgctaggcctaacccataagggtcattccattatgggaagattactcctacaaaagtaattaagttggccaattcagcacctttgatcaatggaaagctccgttatgctgttaacagtgtctcctatgttaaccctgacacccctctcaagcttgctgattacttcaacattcccggaatcttcagtgtgaatttactccaaaactctccctcaaatggtccaggatacataggcacctcagtgttgcaaacttctctccatgattttattgaggttattttccagaacaacgaaaacaccatgcaatcttggcatcttgatggttatgatttttgggtcattggtcatggtttcggccagtggacagatgccagcaggaaaacatataatctagtggatgccctgactagacacactacacaggtgtatccaaaatcctggactactatattggtgtctttggataaccaaggcatgtggaacttgaggtctgcaatatgggaaaggcaatatcttgggcaacagttctatctcagagtgtgggatgcacagaaaagccttgctaatgaatatgacattcccaacaatgttctgctttgcggcaaagctgttgggcatcacccttagaacatatatcaactatcagcctcctatttatcggtgtattttctggtcatgagggcttgactacaactagaattccttttcctttttcttaaaaatgaaaaaggacaatgagaagctactttctccaaatttcggatagactcgagtatatttgagaaaaaaaaaagtatttttattaatttttc

SEQ ID NO: 10796 - DNA, 1233 bp, Glycine max
  Clone ID: 700977657_FLI
gccctttgtacaatggctctacctgtgctacaatcaaagagagccagaattgcatcatcaatgggaggcatgactccacctaccttcgctggagatggaaaccaagtgaatgccatcttccaaggtttgaaccaaacacttttctccaactcataagaaacaagcatgtagcttttgttggggactctatggctaggaaccaaatagagtcccttctttgcttgctagccactgcatcaactccaaaacgtgtccaccacaagggttctcgtaggtggcactttgattctcacaatgcaagcttgtccctctattggtccccttttcttgtgcaaggggttcaaagaacaagcacagggccacagcataatgtaatgcatttggatcttgttaatgagaagtgggctagggatgtggatcaaatggacttgattgtgctgtctgttgggaattggtttttggttccttcagtttactatgagggtggtaaggtcttaggttgcctaaagtgtcatggtcttaagtacagtgatgttagtttttatggttcactaagaaaggctttgaggattgctcttaatagcattattgagaggaaggtgggtaaaggaaatggagttgatgtaattttgagaacattctcaccttcccattttgaaggtgattgggataagggtggtagttgttcaaagactaagccttatagaaagggtgagatgcaacttggagaagtggatgctgagatcagaaggattgagatggaagaagtggaaaatgctaaggcaaaagttaaacaatttggagggtttaggttggaggcacttgatgtaacaaaattagcattgttgagaccagatggtcatcctggtgcttatatgaatccttttccatttgctaatggggttccaaagcgtgtgcagagtgattgtgttcattggtgcttgccagggcctatagactcatggaatgagatctttctagagatgatgaaaaagtgggagaaacagccaagaagccaacagtgaagaattcctcttgttaatttattacactaatatttttccaccacacaataagtcctatttttgttggtggaatactaatgacattcttttttattagttaaaattgatgtaaatcttaccgatttgtaaataatatctactaaatcgagattgggactcatgtttagtagaactctcatcattttaattaataaaaaagaaagcgtcc

SEQ ID NO: 10797 - DNA, 825 bp, Glycine max
  Clone ID: 700977714_FLI
cattattaggaattatggagtccttgttgacaaccacagaactagcaaatattgtgccaaagctaaaaaatgctagcctctcagtttttgtagaaacatttagcaatgagtttgtgtctcaagcatgggatttcttctcagatgcaactgttgagatcaacacatatattacgggagcacaaattgatggtatcatcacagacttccctaaaactgctgacagatacagaaggaacaaatgcttaggtttgggtgacaacaaacctacttacatggaacctgttcaaccaggtagtctttttggactcattaccaaagaattcttgcctccagccgaggctccatttccacccttgacagaatctgaagtggcagagccacctttgcctcctgttgctaaaatagccccagcttccagcccgaatgccggaaccaaatcaccacagggaaattcacagcctaaagtcactgtctgcttcttcttgtccactctggccgtgtttatagcttctcttctgctttgagtaaaatcatctctaaacttccttctaaggaaaaacaaaaaaaatatggagaaaaggttgtttttggtggtttcaaccctctatttccacatctcttctaggattgagtggcattgaagcttttggcttcaagactagatgaacaatccacattttttttgttctcttcttaaaaggagcaaattctctcaaccttatttgttgtagctacgcttgtccattcttagttcctcaattgcttctcgggttggatctatgagcacaaaagcccgcgtggtatatatttatgaattctttttag

SEQ ID NO: 10798 - DNA, 1865 bp, Glycine max
  Clone ID: 700977821_FLI
gaatgatcttcattcacagatgcctccagaatttggcctccttcagaacctggcagttttggatcttcgcaatagtgccttgcacggttcaattccagcagatatatgtgactcaggcaatttagctgtcctccaacttgatggaaattcatttgaagggaatattccgtccgagattggaaattgtagctctctttacttgctgagtttgtctcacaataatttgactggttcaattccaaagtccatgtcaaagctaaacaagctcaaaatcctcaagctggaattcaatgaactaagtggagagataccaatggagcttggaatgcttcagagtcttcttgctgtaaacatatcatacaacaggctcacaggaaggcttcctacaagtagcatatttcagaacttggacaaaagttccttggaaggaaacctgggtctttgttcacccttgttgaagggtccatgtaagatgaatgtccccaaaccactagtgcttgacccaaatgcctataacaaccaaataagtcctcaaaggcaaacaaacgaatcatctgagtctggcccaatccatcgccacaggttccttagtgtatctgctattgtagcaatatctgcatcctttgtcattgtattaggagtgattgctgttagcctacttaatgtttctgtaaggagaaggctaacatttttggataatgctttggaaagcatgtgctcgagctcttcaagatcgggaagtccagccacaggaaagcttatcctgtttgattcccagtcctcacctgattggatcagcaatcctgagtccttgctcaacaaggcatctgagattggagaaggagtctttggaacactctacaagttccattgggatcacaaggtagaatggtagcaatcaagaagcttatatccacaaacataatccaatatccagaagactttgatagggaagttagaatcctcgggaaagcaaggcacccaaatctaatagcattgaaaggatactattggactcctcaactacaacttttagtaactgagtttgcaccaaatggtagcttgcaagccaagctacatgaaaggcttccttcaagtcctcctctttcttgggctataaggttcaaaatcttgcttggaacagcaaaggggcttgctcatttgcaccactctttccgtccaccgatcatccactacaacataaagccaagtaacattttgcttgacgaaaattacaacgccaagatctcagattttgggttggctcggcttctgacaaagcttgaccggcatgtgatgagcaacaggttccagagtgcactaggatatgtggcaccagaattagcatgccagagcttaagggtcaatgagaaatgtgatgtgtatggttttggggtgatgatccttgagctggtgacaggtaggagaccagtggagtatggagaagacaatgtgctgatactgaatgaccatgtgagggtgctgcttgagcaagggaatgtgttggagtgtgtggatcaaagcatgagtgagtatcctgaagatgaggtattgcctgttctgaagctagcaatggtatgcacctctcaaattccttctagcaggcctactatggctgaagtggtgcaaatactgcaggtcattaaaaccccagttcctcaaaggatggaagtattttgaagagatatgcttctctgttgaactagcttgacatatagaaaatctgtgactgatgagatttttttcttttcttttttcctttatgttgtgtatcctttttaatttccttggctatttggtttatgtagactcttgttttatgtccaagtagattttcctcgtataaatggaaatcactatcatat

SEQ ID NO: 10799 - DNA, 281 bp, Glycine max
  Clone ID: 700977983_FLI
tccagaccgcggtcaggcttgtgcttcccggtgaattggccaagcacgccgtttctgagggtaccaaggccgtcaccaagttcaccagctcatgaaccgactattatttggattttgtttctggttgcacacacaaatctgttctatgtatctggagacttatgtttggattttgatcagtaattgtgcatgaacgttgtagtggtgctgatatagttagtatattcttggtatggtacatggagtgggctgtttcagtattaatgcatttaagattctct

SEQ ID NO: 10800 - DNA, 1083 bp, Glycine max
  Clone ID: 700978017_FLI
cattaattgcaagaatggcacttcgttgcttggtgatgtccctttctgttctcttcactcttggtcttgcgagagaaagccatgccagagacgaagatttttggcatgctgtttggccaaacactcccattccaagttcattgcgagatcttctaaagcctggccctgcaagtgttgaaatcgatgatcaccctatgcaaattgaagaaacacagtacccgaaaaccttcttctataaagaagaccttcatccaggcaaaacaatgaaagtacaattcagcaagcctccctttcaacaaccatggggtgttggtacatggttaaaggaaattaaagacactactaaagaaggatatagttttgaagagctatgcatcaagaaagaagccattgagggagaagagaagttttgtgcaaaatccttgggaacagtaattggttttgccatttcaaagctgggaaagaacattcaagtactttcaagttcctttgtcaataagcaagaccaatacactgtggaaggagtgcagaatcttggagacaaagcagtgatgtgtcataggctaaatttcagaactgcagtattttactgccatgaagtccgtgaaacaacagctttcatggttccattggtggctggtgatggaaccaaaactcaggcacttgctatttgccactcaaatacttctggaatgaatcatcaaatgcttcatcaacttatgggagttgatcctggaactaaccctgtttgccatttccttggaagcaaggccattttatgggtacccaatttatctgtggacactgcctatcagaccaacattgttgcttaattagtccatgcatcttgagcaccatgagaatgagattgtgtataaaataaattatcatgtgctgtgtgttgtgcaagtactaccttctctagctagattgctagagctagaatttcaacctacctatgtgtactgataagatctgcttccctacttaaagagagcatcatcctgtgatcagtgtgcttcgtattctctctctctatatatatatggtaaaaagtggttatctcgtgcctcgccttgagct

SEQ ID NO: 10801 - DNA, 1161 bp, Glycine max
  Clone ID: 700978095_FLI
gactttcaatgtgcctgccatgtatgttgcaattcaggctgtcttgtctctgtatgccagtggaagaactacaggtattgtgcttgattctggtgatggtgtgagccacacagttcccatatatgaagggtatgctcttcctcatgcaattcttcggttggaccttgctggccgtgatttaacagagtacttggtgaaaatccttactgagagaggatactccttcagcacctctgctgaaaaggaaattgtccgtgatgtgaaggagaaattggcatatgtggcccttgattttgaacaagaaatggagactactaagagtagttctgcagtggaaaagagctatgaattgcctgacggacaggtcattacaataggttctgagagattccgttgcccagaagtactgttccagccttctctaattggtatggaagctactggaattcatgaaacgacgtacaactccatcatgaaatgtgatgttgatattagaaaggatctgtatggaaacatcgtgcttagtggagggtctactatgtttccgggaattgctgatcgtatgagcaaggaaattggtgctcttgcacccagcagcatgaaaatcaaggtggttgcacctcctgagagaaagtacagtgtctggattggtggctctatcttggcatcacttagcaccttccaacagatgtggatctctaagggcgaatatgatgaatctgggccagctatcgttcatcggaagtgcttctaagttgggtcaagagctggatggtgatcaagttcttcatgcacccagtcctgtgccatatttcagtcaagtttggttgacttatttgatatttgaagctttgggtttttaatagatatatctagtttaatgaatggatttgtaagttgagtatgttataagtttctccgttaggtccccttggaagccagacttttttatgcaattggcggatggtattggaactttgtaggttctgattggtttgatttttttccttttattcgattttcttgttgtggccaagaattaggtgcctcgagttaggagaacgatagtctagtatcttttctcccagagggatttttgagtcagtttctgtttatatttattatatgcttaattggtttttatgtttgcattaaactcag

SEQ ID NO: 10802 - DNA, 701 bp, Glycine max
  Clone ID: 700978126_FLI
caaggtcagtgatgtggagcttgatcaaatcagccttctcccaaatgctgagtatttgcttacgagcttcctcagcatttgggagaaggctgatttgatcaaggtcagtgatgtggagcttgagttcctcaccggaagtgacaagattgatgatgaatctgctttgtcattgtggcaccccaatttgaagttgctccttgtcactcttggagaacatggttccagatactacaccgagaatttcaaaggatcagtagatgcttttcatgttaatacagttgatacaactggtgccggtgattcctttgttggtgctctattgtccaagattgtcgatgatcagtccattcttgaagatgaaccaaggttaagagaagtactcaagtatgcaaatgcatgtggagcaattacaactacccaaaagggagcaattcccgcccttcccaaagaggaggatgcactgaaactgatcaaaggcgcatagaatcttttgacaaaaatgctagcatgatttcgttttcttcctctaatgtttcaattttccgttggatttgcttgctatcaatttaggagggaatgcctcttgattttctttggtatttttttgtttttttttctcctatgcactgttttcaggttttaccaaaataacgctttctttcaaattttgagattgacgattgaatgaaaatttgaattat

SEQ ID NO: 10803 - DNA, 525 bp, Glycine max
  Clone ID: 700978144_FLI
ctccacctgctcagaaggaggccattgaagcgctgcctaccgtcataatcaatgagaattcgcagtgttctgtgtgtctggatgattttgaagttggttctgaagccaaagagatgccttgtaaacataggtttcatagtgggtgtatccttccctggctggagcttcatagttcttgtccagtttgcaggcttcagttgccattggatgagtctaagcaagactctgatctgtcaagggatagcagaagccaaagggaggatgaaagtattgaacatgacaatgatgaagaaagagatggcgaagggagaaatgcaagtgggggtagaagattctcatttccatggcctttcaatggattattttcttcatcaaactcttcatcctcttaaagttccaatgccaacggaaatgataatcaatcagatgaaaactgagtatttttgcatatctgttgtgctattcatgtgctgccttgcttatgtacagttttcgaccaatgaaagaatccaatgttgatagaac

SEQ ID NO: 10804 - DNA, 1023 bp, Glycine max
  Clone ID: 700978152_FLI
cacagagtatgtgttcggtggatacgagtactgtattcaaattttgcaaggttttgtaaggaccaggagtatctgatatctctgcatgggaaagcagcaagggagagattcgactatgtggagggtttcgtgatagttgatgaagggctgatcaacaattggaggtcttcgttctttgcagctagtaaccctgttaaaatcacttccctcaacgctgacggaggtgttttgtactgcttggagattaccaaaaactacgaccaagggaacgcagattctgttgatgaggaaatacaagctctattgaaaaagttaaattttataccaacatcggttttcacaacggacttgccttacgtggattttctggatcgtgtacataaggcagagctgaagcttaaatccaagggtttatgggatgtacctcatccatggctcaacctttttgttccaaaatcaaggatagaggacttcgacaagggtgtgttcaagggcattcttggaaataagacaagtgggcctatcctcatataccctatgaacaaaaacaagtgggaccatcgaagctcagtggtgacaccagaagaggatgtgttttacctggtggcatttctaagatcagcattggatactgagacattggagtacctaactaatcagaaccgtcagattctgagattctgccatgattcagagatcaaggtgaaacagtacctaccccattacactacgcagcaggagtggatggaccactttggtgataagtggacccaattcaatgccaggaagatgcaattcgatccccgccgaatcttaggcacagggcaacaaatttttcaatttcatccctccctcactcccaacaaggatgatatgtaatatgtagaaagtagagcaaacatgcaaaatagataaataagggaagtgatgatgggttcaagttgagtagcaagtctagggcttacaaaataaacaagtgttgtattattgtaattaggagtaaattacaaggaggatcatagc

SEQ ID NO: 10805 - DNA, 1923 bp, Glycine max
  Clone ID: 700978193_FLI
gaaagtgggtgcaaaggaagttaggaaatccggttctggataccggcatgggcagaggtttgagtctgtaaaggaaggttataattctagtgtagagtcttatagtcatgatgcaaatgtcgcagttactggaggcacggagaaagggactccagttgttgagaagagtgaagaacataaatcaggtggaaaggttgagaaagtgggggataagggtttagcatctgttgaagagaagaaagatgctataacaaatcatcaaagtgaaggcagcttgaagagtgcaaggagtactgaaggatctttgtctaacttagaatccgaagctgttgtaaatgatggatgtatatctaattctaaagggaacgatttacattctgtgcaaaatcaaagtcagagccaaagtctttctaacatagcaaaaacttttattggcaatgaaatgtttgatgggaagacggtgaatgtggttgatggactaaagttgtatgacgatttatttgatagcactgaagttgcaaatcttgtttcactggtcaatgatctaagggtttctggaaaaaaaggacagttacaaggaagtcaggcatatatagtttcaagaaggcccatgaaagggcatggaagggagatgattcagttgggtgttcgaattgctgatgccccagcagaaggggaaaatatgacaggagcctccaaagatatgaatgtagaatctattccttccttgtttcaagatattattgagcgtatggtttcctcgcaagtaatgactgtgaagcctgattgctgcattgtggatttctataatgagggtgatcactcacaaccccacagttggccatcatggtatggaaggcctgtttatgtgctttttctgactgaatgtgaaatgacttttggaagagtaattgcctcagagcatcctggggattataggggcagtatcaagctttctctagttcctgggtcccttctggttatgcagggtaaatccagtgattttgctaagcatgctcttccttccacacgcaaacaacgcatactggttaccttcacaaagtcccaaccaagaaagtcactatcaagtgatgctcaacagcttgcctcggcagtagcatcttctcattggggtccaccgccaagccgatctcccaatcatgttcgtcatcacgtaggccccaagcattacgctacacttccaacaactggggtactgccagctccacccattcgaccacaaatggcagctcccgttggcatgcaaccattgtttgttgctgctccagttgtacctcccatgccattttctgcacctgtgccaatcccagctggttctaccggatggacagctgcacctcctccaaggcatcctcctcctcgagtccctgctcctggaacaggagtcttcctacctccatcgggctcaggtaattcatctcaacagttaccagcaagtactttggctgaagtgaacccaagcacggaaactccaaccatgccggagaaggaaaatgggaaaattaatcataatagtacaagtgcttcaccaaaaggaaaagtgcaaaagcaagaatgcaatgggcatgctgatggaactcaagttgaaccagctctagagacacggctagatagcaatgacaaagctgcaccaagtcattgagctgtaccatacttatagagagagagagagagagagaggtaaagcttatcacacgaacacgataggctgtgaacttaacttgagtttgaagcaaatgtaaagcgcggcaacaggagatatcactatatatatactgcagaggagaacaagggaaggaggtagaacttttggttctctctgtaatcctttctttgctccattccttttttgttgtcttaaaatattaactattacaggaagggaaacccattcttaattct

SEQ ID NO: 10806 - DNA, 1668 bp, Glycine max
  Clone ID: 700978404_FLI
tcctttctcctcttttgatgtcttaggaaccatccaatctgaatttgtgtattcattgcgtgattgattttccttcttcctttttgttgttgctgtgtgtgcgtgtggcggagaatagtgatcgatcgttgttaatggcataccaagcgatccaggttccgagttcgggatcgagttcgagttcggggtttcagttattgaattctccgttcggagacaccacctacaccaaagtcttcgtcggaggattggcctgggagactcagagcgaaaccatgcgccgctacttcgaccagttcggcgagattctcgaggccgtcgtcatcaccgatgagaacaccggaagatccaagggctacggtttcgtgactttccgggatcccgaggctgcaaggagagcgtgtgccgatccaactcctgttattgatggcagaagggccaattgtaatttggcttcacttggtcgaccacggccccctctgccttatggacggataagacctgcctccccttatgttggaagtttgcaaccagctcgtggtgcttatgttgggggttttggctaccagcaacaaccagtttcctacagctatcaacaaggattggtttaccctccttatgggtatacgacatatggacctgagtacatctacccacagagtctgtacaacccatatatggggcaacagtatcttcagatatatggagtgcctggggcagtgaatacaactgtttatccttatggacaagtgggtcaggctattcctagtggtcatggttattcagctatacagggttatacagtaccaggtcatcagattgtgccctatggtggatctaatgttaatgccataacaacttcacctatgcctgccattcaagcttcatatcctagtggaattgctgcaccagttcctggccaaccacaatttattgttcctgctcattctcctcagtttatgcaaggtagcggtcctgatcaaacagctgggtgagggggcgaataaggtatccatagtttgcagcaggactaagagcagcggaactgctacttgagtggcgggcttccaatctagccttgcaagttaattattttgcattctagaggtcatatgtagtcatgctcaccaagttgtgtctgagtcgctccagatggcgaaggaaactggaatgtgcaggctgcttttccatttggacatttacactagtgtatttatacctaatgctacctgtactcaagaagagttgcagtagtattggatcgatggatgctggaataggtttctagcagccattttaggaataaacttctgtaaaaaggaaaatcatgtctgaatcaaaatatgattctttgtagtcttgtccagcattgagtttgtagatagttgtcaatgctggtaaattgtgtgacgatggatgggccatcatattgaatgtgatttttgtgcatagtagttgtcaggggttcgttctactagaagacaagggtgtaatataagattttaagaacctgccgattatgcagggtagaaccatcagtatattccattagagaggattgcagtggttctttagtgttattttaccgtcattcagcacggagtcacatgttcaacattttcttgaattaattttcaacctttcgtcatggtgccctttataattgat

SEQ ID NO: 10807 - DNA, 998 bp, Glycine max
  Clone ID: 700978484_FLI
cagaagtattctaaggacgagagtgtcacttttgctatgtatggagatggcgctgccaatcagggacagctctttgaggcgcttaatatcgccgcgctttgggatcttcctgctattttggtctgcgagaataatcactatgggatggggactgcggagtggagagctgccaagagtcctgcttattataagcgtggggattacgtgcctggcttgaaggttgatggtatggatgttcttgctgttaaacaagcttgcaaatttgcaaaggaacatgctttgaagaatggaccccttattcttgaaatggacacttacagataccatggacactctatgtctgatcctggcagcacataccggacacgtgatgaaatttctggtgtgagacaggagcgtgatccaattgagagagtaagaaagctggtattgtctcatgatattgctgctgaaaaggagctaaaggacattgagaaagaagtcagaaaagaagttgacgaagccattgctaaagcaaaggagagtccaatgccagatccatctgatctatttaccaatgtctatgttaaaggttacggagttgagacatttggtgctgataggaaagaagtgagagctactttaccataattcagaactttgtcctttgaatatcttgccaccttgtcgtagcagactcttcaaaatagtgaagaataaaaggttctacagagggtcatctctctcccctattcgttgagtttctgcccgcgtgtatagtgtgaatttattcatatgcttggttagcaatggggcggggtttgttatttttttgtcatgtaatatttgcggatctaacagccaaagcatcattgtgattgatgcaactggggtgttctgcaaatttgaggaatacattgtgcactactgaagatatgtagttcagaatattttagacacgtcaaacagttcaaaaatctatatagatatatattaaagaataggctggtggaaagtct

SEQ ID NO: 10808 - DNA, 721 bp, Glycine max
  Clone ID: 700978528_FLI
attcggctcgtgcagcaacctgtttatttgagtggtgaggttgtgagcaaccatgatgagctaatgtcaaacttttttgcacaaccagatgcccttgcctatgggaagaccgctgaacaattgcaaaaggagaatgttcctccacatcttgtgccacacaagacattctcaggcaaccgaccttctctcagccttctgcttccatcattgaatgcttataatattggacagttgttggcaatctatgaacacagagttgctgtagaaggttttatttggggcatcaattcttttgaccagtggggagtggagcttgggaagtcattagcctctcaagtgagaaagcaacttaatgcatctcgcacaaaaggagaaccggttcaaggctttaacttcagtactactgctatgttgacaagataccttcaggcaagtgcagacgtcccggctgatcttccaactcgcttacctcagatttaactgtcttttttgaggaatgttattttttttatattttaattggatcaaagtcatcttacaaatctcactcatataagctgttaaacagcatccttcaaacttttgtttctgggctacttattgagtaacttctagtacatcatccttcaattttgttttgaaatgatgtcctaaaaaaaccattgctcaatattttgttggattttgaaaggcattgtttaatttgtcataagagttcatg

SEQ ID NO: 10809 - DNA, 1202 bp, Glycine max
  Clone ID: 700978547_FLI
gttctctccatcaaaacaaagccacttttcatggtcaccagaatctggtgattcacttagtggtgaaaatcttgcaagactagatacgagatcgccagatcggttggttggcgagctacattttcttgatgatacgataacattgacgcctgaggagctctcaagggcccctgctgaagttttaggaagaagtagtcacggtacttcttacaaggcaactctggagaatggtttgttgttgagagtgaagtggttgagagaaggagtggcaaaacagagaaaagaatttgtaaaggagacgaagaaatttgcaaacatcagacatccaaatgttgtaggattgagaggatattattggggtcctacacagcacgagaagcttatactttcagattacatctcactaggaagtcttgcaagttttctttatgatcgaccaggaagaaaaggtccaccactaacttggacccagaggctcaaaatagcagttgatgtagcacgtggcctgaactatctccattttgatcgcgctgttcctcacgggaatctcaaagctacaaatgtgttgttagatacaactgatatgaatgcacgtgttgccgattactgccttcaccgactcatgactcaagctggtaccattgaacagattctcgatgctggggtcttgggttattgcgcaccagagttagctgcttccaagaagccaatgccctccttcaagtcagatgtttatgcttttggagtgatacttttggaacttctaactggaaggtgtgctggtgatgttatatctagtgaggagggaggtgttgatctgacagactgggtaaggttgcgtgtagcagaaggccgaggctcagaatgttttgaggctaccttgatgccggaaatgagcaatccagttgtagaaaagggaatgaaggaggtcctgggaatagcaatgcggtgcattcggtccatttctgaaaggcctggtatcaagactatttatgaagatctctcttctatatagtctgctcatgctaactgtttgaactttgacatattgtgggaattaatgtctcattagtgtcccatagttgttcagagcctggccttttaacatgtttgtattaaccatttttttagctgtaaaaatggggctgtgccaaaagcatatacatggatgatggatgttacttgatgggttataaccatct

SEQ ID NO: 10810 - DNA, 745 bp, Glycine max
  Clone ID: 700978668_FLI
aagattcagtcagtaatcctggccatccattttcttcaggtgtgactttggctaagcttgctgctgttacaatggatgaggaggggaatgaaacttttgatacaagtggtgctttggataggctgaggaagtcagtgcaccttgagagactagctctttatcatgattctaaccagcttccttgggagattgataagagatgggcggatataaatccacaagaatggattgagatatttgaagatggcataaatgagcctactggggatcataagttggtacctaagtgggctaggaatcgcacgtacttggtttatcctatcaatgcagtcctacagtatcatcgtcttggaaaccaagaaagagttaatcctgatattccatttgagaaagttacgcttgtcctcacagatatctctctaactcttacagaggctcagtatcatgattggattaaacttttggaagctgtttcaagatacaagacatatatggaagtttctcatttacgacctgtagttcccatctccaaggctccttatttgtggtggcagtatgctgcacaggctgtactccagaagcagcagaagtggtatcttgaattttttattttgttaaataagtcatctacctttttgtaaatggtacggagagaattttgagaaaacattatagagaacactattgttattgatgtattctgtgtaattgaaacataatgagagagacatacaatcatttattt

SEQ ID NO: 10811 - DNA, 1609 bp, Glycine max
  Clone ID: 700978672_FLI
caattgcaagaaaaagcaatggaagctcaatcacaccaccgactcaatgtcctttttcttccatatccgacacctggccatttacttcctatggtagacacagcaagactatttgccaagcatggtgttagtgttactattctcactacccctgctattgcttcaacattccaaaatgccatagacagtgacttcaattgtggatatcacatcagaactcaagtggttccattcccttcagcccaagttggtctcattgatggacttgaaaacatgaaagatgccactaccctagaaatgttggttaaaatcggttatggactatcaacgctccaagatgaaattgagcttcggtttcaagaccttcaaccagattgtatagtgactgatatgatgtatccttggacagtggaatcagctgaaaaactaggcattccaaggattttcttttacagctcaagctacttctccaactgtgcttctcattttatcaggaagcatagacctcatgagagcttagtctctgacagccacaagtttacaattcctggtttgcctcatagaatagagatgaccccttcgcagctagcagattggatcaggtctaagactcgtgctacagcctatttagagccaacttttgaatcagagagcagaagctatggggcacactataatagttttcatgaacttgaaagtgagtatgagcaacttcataagaacacattggggataaaatcttggaatattggaccagtttcagcctgggttaacaaggatgatggagaaaaggccaataggggacacaaggaggaccttgcagaagagccagaattgctaaattggcttaactctaagcaaaatgagtctgtactttatgtaagttttggaagcctcacaaggctccctcatgctcaacttgttgaactggctcatgggcttgaacattctggtcatagtttcatctgggttataaggaaaaaggatgagaatggagacagttttcttcaagagtttgagcagaagatgaaagaaagcaagaacggttatatcatatggaactgggcaccacagttgctgatattggaccaccctgcgataggaggcattgtgactcactgtggttggaattcaattcttgaaagtgtgagtgctggattgccaatgatcacatggccaatgtttgcagagcaattcttcaatgagaagttgctagttgatgtgttgaagattggagtcccagtgggagctaaagaaaacaaattgtgggcaagcatgggcaaggaggaagtgatgggaagggaagagattgcaaaggctgtggtgcagtttatggcaaaagaagaaaccaaagggctgctgctaagaaggccgcaggtggagacggagacgaggaagacgaggattagactgttcattatgtctttctctagtgctattagatcttatgccaccttttactttgcctacctaatcgattttggttgttatacattttcatcctttggttcccttgtttgagaaaatattaagtggtgacatattatgtttttgtgaatttggatattttaaagtatcaagattttccattaaataatttttgatgatc

SEQ ID NO: 10812 - DNA, 1783 bp, Glycine max
  Clone ID: 700978815_FLI
acaaaacatagagcaagtagaagagatagataaatggaaagcgagctaagcatggcggtggttggtggtggtgcctgccggaattgaattgaattgaagagagatgttgtttcaggtgggcgggcaaggcagtcgccccaccttcttcgagatggcggcggctcaacaactgccggcgagcctccgcgccgctttgacatactccatcggcgtcttggccttacggagacccttccttcacaaactcctcgacttcgaagacgaatccttcgccttactcatgctcgtcctcgaatcccacaccttacgaaccacagatgcttccttttcggaatctctctacggcctccgaagaaggcccgccaatatcgccctcaagaatgacgacgccactaccaccaccaccagcagcagcgcattacggaggcgccagagagttctttccgttgtttttttggttgtgttgccgtatttgaaatccaagttgcattcaatctacaacagagaaagggaagccaggcttcaagccactctatggggagatgaaacccaaggctttgatgatggccgaggagattattctccggtgtcaacgctaacttctgatgccgcagcctccatttcaatgcgcatcgcaaacagagttcagagaattgttgggttttgctacccgtggttacatgctagtactgagggcttgcaatttgcttaccaactcttatacctgttggatgctactggatactactcgctagcactgcacgcacttgggattcatgtttgccgagctacagggcaagagctgatggatacctcttctaggatttcaaagatgcgtaaccgtgaacgtgagaggcttcgtgggcctcaatggttgaagacattgcaaggagcattgctcagctgttcgtacactgtacttgactatgcacaaaccggattgattgcagcagtgttcttttttaaaatgatggaatggtggtaccagtctgccgaggagagaatgtcagctcctacagtatatcctccaccccctcctcctccaccaccaaaggtagcgaaagaagggataccactaccaccagacagaacaatttgccccttatgctcgcaaaagcgtgtaaatccatctgtagtttcagtttcagggtttgtcttctgctatgcttgcatatttaagtatattactcaggtgagagctctagacatccttactgtgactaatatataacctacatataaatgcaaactggttttacttttcatgattctctatactgacgacttcatgactaaatttaaactatattacgagatacattagaaatttctgggaagttcaattagatatattgcggatgcatgaagccttttggttgccagaatttacatgatcccactgtggttgtcagatggggatcactcaaacaactgaataacaatgttaactcatttctgtcatatttattatgaatatcttgcaaatcccactgaaaataatcaactgatgagtcgtcactcgttttatctaatgcaagttttcgtgtttccccattacagtataagcgctgcccaattactttaatgccttcaacggttgaccagataaggagactctttcatgatgtctaggccagttggagcggaattggtagaaattacagttatcttgagtacataggcaaaagactcccaattattgttgtactactactactactactaatataaagtatatctttttcttttagtaagtggcttaataagaggtatcatttttgtt

SEQ ID NO: 10813 - DNA, 769 bp, Glycine max
  Clone ID: 700978919_FLI
agcgccacgaatgctatacaccgcccaacacttcgtcaacaattctgttacgctttcgaacaatttttttgcagcaatggcttctcattctgctgccacggagaggacttacaaagaatcattcgattccgccgcaaacaagctttacgctgatcacataattcctcacattctgcatctgtatggatcgtgtgcaacgtctcgcgactttgaaatctatgccgcacatgcttcatatgaggatccacttatgtgtgcacacggggtgaaacagatcaaatcagcgttctatactcttcccaaggtatttaaggagtcaaagattgtggaatatagtatcaaagaaaatatggtttcaccaggaaaaggagagatattaattgacaataagcaatactacaaattcttggggaaggatataaatatggtatcgcttatcaagttgtatattgaggagggtaaagttgttcgccatgaggactggtgggagaaaaaaccaatttcaaatagagaaacggtgaagctgccactgcttggtagaatagcagaaatgactcgcaggggatcaatgctggcaacacatgtgcttatgaggtttgggaaggacccaaatgtgtgaataactaaaatccatgcaaaatattgtatctttattatacatgggcctgtgtatgatgctcttacctgacgttgtttattcctttttgtggctttgatgaatactagaatgctgtattttgtatggaacagactttgttgccaaaactat

SEQ ID NO: 10814 - DNA, 551 bp, Glycine max
  Clone ID: 700979059_FLI
gtcgcgttgtgttgcgtcgtgtcgtgcgctgttcctctgtctgtcgtttttgttttcagaccaaaccctagctccgcatcgcaaccatgtcgaccaagcaaggtggaaaagctaagcctttgaagaaacccaagtctgataagaaggattacgacgaggttgacatggctaacattcagaagaaaaaggaagaggagaaggcgctaaaggagttgaaagccaaggcgcaacagaagggaagctttggaggttctgggctcaagaaaagtggaaagaaataagggctctttatcatgattgtatacatccaatattgagccctgtagtttattaccatgataacttctgtcttattgtggccttctttattgctctaatgttagtactgaactgaggtatttcgtgatgtaagctgcaacaagttacttgtttgtagctttattgtgtggcccttcatggggttctgataattacatcctattagtagtgctgtggatttggcatagacttgttcaagtaataatgacttggcttgcgaaattttatttgtc

SEQ ID NO: 10815 - DNA, 1072 bp, Glycine max
  Clone ID: 700979179_FLI
gaaaggggtaggtgttgtacagaaatagaaattaaaaaattgagtgaaaaattaaaagggaaatttttttagaagaagagtgatagggatatggggaggggaagagtggagttgaagaggatagagaacaagataaacaggcaagtcacttttgcaaagaggagaaatgggcttctcaagaaagcctatgagctatctgttctctgtgatgctgaggttgccctcatcatcttctccaaccgaggcaagctttatgagttctgtagcagctctagcatgctcaaaacacttgaaaggtaccagaaatgcagctatggtgctgtggaagttagcaaacctgccaaagagctcgagagcagctaccgtgaatacttgaagctgaaagcaagatttgaatcacttcaaaggacccaaagaaaccttttaggggaagacttaggcccactgaatatcaaagaacttgagcatcttgaacggcaattggattcatctctaaagcaagtgaggtccacaaagacacaattcatgctggaccagttatctgatcttcaaaccaaggagcagatgttagtagaagcaaacagatccttgacagtgaagctggaagaaatcaattcaagaaaccactacaggcaatcatgggaagctggtgatcaaagtatgccatatggtggtggtggtccagagaattctcactctcattctcactctcagggcttcttccaaccattggaatgcaaccctacactacatattggtcctgattacaggtacaatgctgtagcttcagatcagataactgccacaactcaacctcaacaagtgagtggctttattccagggtggatgctttgaactaattaggctcagtgcattcaggtggagacataaaaaagcaaacaccttacaaaagggcaaaagccaaaaatgcatcttggtgttggcaaggtgtaaatgcaaccctgcttctacagttattttggtgtataagaaactgatgttgtgacttgttcaaacttttgaacttttagccatagacatatatggcaatttataacattaggtatctttt

SEQ ID NO: 10816 - DNA, 1249 bp, Glycine max
  Clone ID: 700979345_FLI
acataagtttgattgtcctagctttgagcaacatcatgaagatctccattctctttatcacaatcttttcttgtggttttcttggaaatgttgtttcaaatgctagtcctcttccatatgaagctatttttaactttggtgactctataagtgatactggaaatgctgctcataaccacccacctatgcctggcaatagtccttatggttcaacatactttaaacatccttctggacgtatgtcaaatggacgactaatcatagattttatagccgaggcatatgggatgccaatgttgccagcctatttgaatctcaccaaaggacaagacattaagaaaggagtgaattttgcatacgctggttcaactgcacttgataaggattttttagtacaaaaaagaatcaatatagaggaagctactttttcattgagtgcccaatttgattggtttaaaggactcaaatcctccctttgtacaagcaaagaagagtgcgataattacttcaaaaactcattgtttctagtaggagagattggtgggaatgacatcaatgcactcatcccatataaaaatattacagaacttcgagaaatggttccatcaattgttgaaacaattgccaataccacctctaaattaatagaagaaggagcggtagaactagtggtaccagggaacttcccaattgggtgtaattctgccgttttggcaatagtgaatagcgaaaagaaagaagactatgatcaatttgggtgtttgatagcttacaatactttcattgagtactacaatgagcaactcaaaaaggctatagagacattaagaaaaaacaacgcacatgttaagataacatattttgattactatggtgctaccaaacgtttatttcaagcaccacaacaatatggcttttcttccggtaagactgaaactttcagagcatgttgtggaaagggtgaaccttacaatctcagttttcaaatattatgtggtagtcctgctgcaatagtttgctcagatccttcaaagcaaataaattgggatgggcctcattttactgaagcagcgtataggctaatagctaagggactagttgagggccctttcgctaatccatctctcaaatcccctcctttcaagatagcttagaatttaagcatggatgaaaatgaacaagaataagcttttctccatatgtttcatgtgtatatttgtaacatggatgacataagcaaagtgttgct

SEQ ID NO: 10817 - DNA, 1022 bp, Glycine max
  Clone ID: 700979419_FLI
gctacatatatatattatagagattttatacattctaaattttgtgagtgtggacatactctgagcgtgagaaagagaaggggaagaaagagagagagtgatgggaaggggaagagtggagttgaagagaattgagaacaagatcaacaggcaagtgacctttgcaaaacgaaggaacgggcttttgaagaaagcttatgagctttccgttctttgtgatgccgaggttgctctcatcatcttctccaatagaggaaagcagtacgagttttgcagcggttcaagcatgctcaaaacgctggagaggtaccagaaatgcaactatggagcgcctgaggacaatgtggcaacaaaggaagccttggagttaagcagtcaacaagaatacttgaggctgaaagcacgttatgaagctctacaacgttctcaaaggaaccttatgggagaagatcttggccctctaagcagcaaagagcttgaatcacttgaaaggcagctagattcgtctttgaagcaaatcagatcaataaggacccaattcatgctggatcagctttctgatctacaacgtaaggaacactttctaggtgagtcagacagagatctcagacaaaggttggaagagtttcaaataaatccactccaactgaatcccagtgctgaagatatggggtatggacgccatccagatatcatcctgatccagtatcagtggtgacagaaggcccaagcatgaataattacatggcaggatggttaccatgaaagagtgtcaaatgtggagcataattaaagatcctgccgtttaatttcaaatttatttgaagttaaggaaaacggaaatttgtaatagcacgtaatggacttacactagactctaccttctaattaagctaggaacaatataagcagtgattttgtgtgtgagctttcataaacagtacctagctagcctcttccttgttccaataatcacttcttccttttcctaattaataaaactatcgtatgcaccctttgcc

SEQ ID NO: 10818 - DNA, 1483 bp, Glycine max
  Clone ID: 700979473_FLI
tagaagacgacagaaggggaaatcgagaagaagaagaagaagaagatggagaagtatcagatctggagcaggagaatagcgttggcagcgtttgcgtttgctctgctgttccaatcggcctcagcagacgacgtcgttgtgctctctgaagataacttcgagaaggaagttggtcaggacagaggagctctcgttgagttctatgctccttggtgtggacactgcaaaaagcttgctccagaatatgaaaagcttggtagcagcttcaagaaagccaaatctgttttaattggcaaggttgactgtgatgagcataagagtttgtgcagcaagtatggagtctctgggtacccaacaattcagtggtttccaaaaggatctcttgaagccaaaaagtatgaagggccacgcactgctgaatcacttgttgagtttgtaaatacggaaggaggaacgaatgtaaagattgctacagttccttccaatgtagtggtgctaacacctgaaaattttaatgaggttgtcttggatgaagccaaagatgtcttggttgagttttatgcaccatggtgtggacattgcaaaagtcttgctcctacttacgagaaagttgccacagcatttaaattggaggaagatgtagtaattgcaaatctggatgctgataaatatagggatctggctgaaaagtacgacgtgagtggatttcctaccttgaagttcttcccaaagggcaacaaagctggtgaagactacggaggtggaagagacttggatgactttgtggcttttatcaatgagaaatctggagcaagtcgagatggaaaaggacaacttacttcccaagctggtatagtagaaagcttggatgtcttggtaaaggagtttgtagctgccagcgatgaagagaagaaatccgtgtttacccgattggaagaggaagttgtgaagcttaagggttccgcctcaaggtacgggaagatttacttgaaagctgccaagaattacagggaaaaaggttctgattatgctaagaacgaaattcagcgcctacagcgcattcttgacaagtccattagccctgcgaaggccgacgagttaactctaaagaaaaatatcttgtcgacatatgctgcttgacttattggtgcattgttaaccaactctcatggaagctcgtgatccaccgcagctgccgatgattgtttgactttgatatcgaaattgctgggagatattcaacgtggatacttacttgtagtgcttagtttgagtctctattaatgaccctatcttgcatggcgcttttggggttaaagattacgattcttctccccattgtagtcttacctgagcagtttaaaattttgggagacgataacttttgtctttataccatgtgtttccttcgctatttgatggtgtacgatttgcttataaataagaaatgaacgcaacaatcaaccatctcgaatgaaaaaac

SEQ ID NO: 10819 - DNA, 1523 bp, Glycine max
  Clone ID: 700979537_FLI
tgatttgaggccaggcaagccccactcaaccaccacacctctcctcgttcacgctacccctttctgctcttcttctacctttcaagttttaaaagtataaagatggcagagacattcctatttacctcagagtcggtgaacgagggacaccctgacaagctctgcgaccaaatctccgatgctgtcctcgacgcttgcctcgagcaggacccagacagcaaagttgcctgcgaaacatgcaccaaaaccaacttggtcatggtcttcggagaaatcacgaccaaggccaacgttgactacgagaagatagtgcgtgacacctgcaggaacatcggcttcgtctcaaatgatgtgggactggatgccgacaactgcaaggtcctcgtcaacattgagcagcagagccctgatattgctcagggtgtacacggccaccttaccaaaaaacctgaagaaattggtgctggtgaccagggtcacatgtttggctatgccactgatgaaacccctgaattgatgccattgagccatgttcttgcaacaaaactcggtgctcgtctcaccgaggttcgcaagaacggtacctgcccttggctgaggcctgatgggaagacccaagtgaccgttgagtattacaatgacaatggtgccagggttcctattcgtgtacacaccgtgctaatctccacccaacacgacgagactgtcaccaatgacgaaattgctgctgacctcaaagagcatgtgatcaagcctgtgatcccagagaagtaccttgatgagaagaccattttccacttgaacccttcaggccgttttgtcattggtggccctcatggcgatgctggtctcaccggccgcaagatcattatcgatacttatggaggatggggtgctcatggtggtggtgctttctccgggaaggaccctaccaaggttgataggagtggtgcttacattgtgagacaggctgctaagagcattgtggcaagtggacttgccagaaggtgcattgtgcaagtgtcttatgccattggtgtgcctgagcctttgtctgtgtttgttgacacctatggcactgggaagatccatgataaggagattctcaacattgtgaaggaaaactttgatttcaggcctggtatgatctccatcaaccttgatctcaagaggggtggaaataacaggtttttgaagactgctgcctatggacactttggaagagaagaccctgacttcacatgggaagtggtcaaacccctcaagtgggagaaggcctaagtaattcattccactgctctatgctggaagttttttgagcgttgcccttataatatgtctaatatccataactttccacgtctcttactctgtgtgtttctctcctcttcctcctattttgttatttgtatgttcttttgtaattttttacgtgatcaactaaaaacatgtactctctgtttgtatgtatgccctaccaatgtgtctcttaatatcaatatcaaaaagagagtgttcaagtt

SEQ ID NO: 10820 - DNA, 1438 bp, Glycine max
  Clone ID: 700979543_FLI
gtttgctaatatatacgaggttgagccattaaactttgatgaatctttatggcttttcaatttgaacgtctttaagcaaaaacatcctgaaatagagtactatgagctatcaaagaaagttgtcgattatgccaaaggcattccgtttgttcttaaacttttgggtcaccgtcttcatggaaaagagaaagagatatgggaaagccaattagaaggacaaaatgtgcaaaccaaaaaggttcatgatattattaaattgagttataatgatcttgatcaggatgaaaagaagatacttatggatattgcatgttttttctatgggctgcgtctagaagttaagaggataaaacttttattgaaagatcatgattattcagtggcttcgggattagaaagattgaaggataaagctcttatcagtatttctaaagaaaatatggtatcaatgcatgacattataaaagaaactgcttggcagattgctccccaggaatctattgaagacctagaagccaaattcgactatttgatcctgatgatgtctatcaagtactaaaatacaacaagggtaacgaggctatcagaagcatagtcgtcaacttgttgagaatgaagcaattgcgattaaaccctcaagtatttactaagatgaacaagctccattttctaaatttttatagtgtatggtccagcagtactttcctccaggatccatggggcttgtatctttctcaagggcttgaatctttgccaaatgaactaagatatcttaggtggacgcattaccccttggaatctttgccttcaaagttttctgcagaaaatcttgttgagttgcacttgtcatatagccgtgtgaaaaaactttggctaaaagtaccggatcttgtgaatttaaaggtccttaaactgcattcatcagcacatgtaaaggagctgccagacttatcaacggccacaaatcttgaaataataggtctccgattctgtgtagggttgactagagtgcatccatcagttttctctctcaaaaagcttgagaaattggatttaggtggatgcacttcccttacaagccttcgaagcaatatccatatgcaatcccttcgctatctctcccttcatggctgcttagaactaaaggatttctctgtgatctcaaagaatctggtaaagttgaatttagaactaactagtatcaaacaattgcctttatctattggatctcaaagcatgcttaagatgctacgtctagcatacacttatatcgagaccttgccaacaagcatcaagcatcttacaaggctgcgacatctagatcttcgatattgcgcggggcttcggactctaccagagcttcccccatcacttgaaacactagatgtccgcgaatgcgtgtcattggagactgtaatgttcccttctattcctcaac

SEQ ID NO: 10821 - DNA, 653 bp, Glycine max
  Clone ID: 700979602_FLI
gctatttgcagaaattgagcacatgaagaagagggagatacacttgaacaatgacaatcagcttcttagagcaaagatagcagcaggtgagaggagtcaccataatgttaacgggttgtctggaagcataagctatgaatcgatgcaatctcagtttgactcccgcggcttcttccaagtaactggattacaacctaataataatcagtatgccggacaagacaacatgtcccttcaatttgtttgaagagtttaagcttaagaaggagaaagacttagatttcctattgtttgtatttgacatctagaatgatatataggaatgctaaagcctatgaagtatgcagaattcaatggagggaattcatttaagtattcccctcagtactatgttatggactatttagtatgcatacaggtactctgagtacagagattgcaccctgccatattttgtcaacttttgtttactttccctatttctcctgtaagataggcttctatatatgtctattaatttcatacttcacttactatgaattcaaggtcctactcatacatgcaactgttcttgagtatgattttttctcgggggatcattgttattggtgcaaagtattcccatcttttttagtatgattaatttaagattt

SEQ ID NO: 10822 - DNA, 956 bp, Glycine max
  Clone ID: 700979623_FLI
ggctcttccaagcttgatgctgttgattccagcatggtcgaacgagatgccaccattcaagcaattcgaaagaaacttttgaaagcacaagagcgaatgaagaggtacgctgacaagaaacgcagagaggtgactttcaattgtggtgagtgggccctggtcaaattccgaccacaccggcagacatcggccaagggagctcagcgtacccccggcaaactatccaaacgcttttatggtccatttcagatactagagaggatcggaccagtagcatatcggttgcaattgccggaagggatgcacattcatcctgtatttcatatttcttccttgaagcagtttaagggaccaccggacaacgtggaagcaattgaattgccggacaactttgatggctaccaaccactaatctcacccatggccatcttgaaccctcgtagaaaggattctacttcgaatgctccctgggaggtgttggtgtagtggagcgggttatctcccgacgaaacatcatgggaggattggtcccaactctgccaggaatttcaccttgaggacaaggtgactctgcaagggccaagggatgatacagaggcaggggtagaaaaggaagaagaaacagcaatagagaaccaagaggcaaacatggaagcaggggtaagcatagcaggaaccatagcagatcagcccaagggaaccaagaggaaaattactaagcccaattaccttggtgattacgtttagaagaatcagagccagccaaggaatgcttcgtgaatcttgcttgaaggattggagctgtcgaccttagggggagcagtgcaccaattctgttaggattgttaggataaaattccttagggggcccacagtagctcaatttagttattttcatccattataaataccatgtactcaataacaagcaagatcaatgagaattattcagcttt

SEQ ID NO: 10823 - DNA, 1095 bp, Glycine max
  Clone ID: 700979643_FLI
gcaagaatggcacttcgttgcttggtgatgtccctttctgttctcttcactcttggtcttgcgagagaaagccatgccagagacgaagatttttggcatgctgtttggccaaacactcccattccaagttcattgcgagatcttctaaagcctggccctgcaagtgttgaaatcgatgatcaccctatgcaaattgaagaaacacagtacccgaaaaccttcttctataaagaagaccttcatccaggcaaaacaatgaaagtacaattcagcaagcctccctttcaacaaccatggggtgttggtacatggttaaaggaaattaaagacactactaaagaaggatatagttttgaagagctatgcatcaagaaagaagccattgagggagaagagaagttttgtgcaaaatccttgggaacagtaattggttttgccatttcaaagctgggaaagaacattcaagtactttcaagttcctttgtcaataagcaagaccaatacactgtggaaggagtgcagaatcttggagacaaagcagtgatgtgtcataggctaaatttcagaactgcagtattttactgccatgaagtccgtgaaacaacagctttcatggttccattggtggctggtgatggaaccaaaactcaggcacttgctatttgccactcaaatacttctggaatgaatcatcaaatgcttcatcaacttatgggagttgatcctggaactaaccctgtttgccatttccttggaagcaaggccattttatgggtacccaatttatctgtggacactgcctatcagaccaacattgttgcttaattagtccatgcatcttgagcaccatgagaatgagattgtgtataaaataaattatcatgtgctgtgtgttgtgcaagtactaccttctctagctagattgctagagctagaatttcaacctacctatgtgtactgataagatctgcttccctacttaaagagagcatcatcctgtgatcagtgtgcttcgtattctctctctctatatatatatggtaaaaagtggttatctcgtgcctcgccttgagctatccatcacttttttttttt

SEQ ID NO: 10824 - DNA, 1419 bp, Glycine max
  Clone ID: 700979737_FLI
ggtaaagagctggatgatcatttcctgaaagcatctggatgtataaaggaaattgctgttcttatagatatcaatggaggagatactcttcttcggcagaattctgggcatcttgataggaagagaggcaattctgcaaaggtcttcagtgtactgtcatggagtaggtattcaaagtcacccccatccaccaaagatggtgctgaattttctggtcatagtgaaccatgcaaacctggagctcattgtgccacagttaaaaaattatatgtggcagagaagaaacttttcaaggcattaaaggaggagggaattgttgcattggagttcgacaggaagtccacgttattgtgtaaacaagaggatgagaaccttgacatagtcaagattgacaaaactcgatcaagtgttgagaagttggagtctgatttaataagcctaaggcagtgcatcagtgaaacaacttcatcaattttggaaatgatagatgaggagcttttgccccagctggttgcattaactgcggggttgacacaaatgtggaggacaatgcatgagtcccataaagcccaagcactcatctcccaacatttgagtaacctcagtgataatcataacacgatactaaattctggatatcatcaccaggctactattcaatttgagactgaagtttcttatttgtataatagcattggcaaacttgtaaaatttcaacaatttgagactgaggtttcttattggtataatagctttggcaaacttgtaaaatttcaacgggagtatgtgaggaccctctatgagtggattaagcttgctgaaagcctcaaggatggtaatgaatgtagcaatcattcttctattcttgccatttgtgatcaatgggagcgtgggcttaacaagttacctgacaaggagacctctgaagcaataaaaagcctgatgtcatgccttcgtttcataactggccaacagattgaggaagataacattctggaaaggttacaaaaacttgaaaggaagttccaaaaatgcttgaactccatggctgagatgcagcaaagaatagatggaggtatggctgatacaagccccaagcatccaatacatcttaagaaaactgaaaccgaagcccttaagaagcaagtggaaagtgcgaaagcaaattatttggattctgttcagtacagtagggcaatgacccttgatcacctccaaaagacacttccccctctcttccagtcactgatggagttttcaagtgaatcagctcaggctattgaggctatcaatgccccaggaaagccagtagagtagagtgcaggactttgcatcgcataacttttttctgttgcctggtgctttggatggtatgagcacaaaatatatgttattgtaaattgtgttcttgacagtttg

SEQ ID NO: 10825 - DNA, 1964 bp, Glycine max
  Clone ID: 700979762_FLI
gtttgataggtttgacgacgtgcgtggactctttgaaggtggaattcatctccctacagatgcactcagtaaaattagccccctaccagtgctcaaggaaatcttccgcactgatggtgaacaagtcctcaagtttccaccacctcatgtcatcaaagttagtaagtctgcatggatgactgatgaagaatttggaagagagatgcttgctggtgttaatccatgcctaattgagtgccttcaagtgttccctccaaagagcaagctagatcccacagtgtatggtgatcaaactagtacaataaccaaagaacacttagagatcaaccttggtggactctctgtggaacaggcactgagtggtaacagattgttcatattagatcaccatgatgcattcatcgcatatctgaggaagatcaatgaccttcccactgcaaagtcttatgccacaaggaccatccttttcttgaaagatgatggcaccttaaagccattggccatcgaattaagtttgccacatcctaggggagatgagtttggtgccgttagtagagtcgtcttgcccgcagaccaaggtgctgaaagtacaatttggctaattgccaaggcatatgttgttgtcaatgactcctgctatcatcaactcatgagccactggttaaatactcatgctgtgattgaaccatttgtcatagcaacaaacaggcatcttagtgtgctccaccctatttataaacttttgttgcctcactatcgtgacaccatgaacatcaatggactcgcaagacaatcactcatcaatgcaggtggcattattgagcaatcatttctgcctgggccatttgctgtggagatgtcttcggcagtttacaaggggtgggttttcactgatcaagcccttcctgcggatcttatcaagagaggaatggcagtggaggatccatcctctccctatggccttcgccttgtgatagatgactacccttatgctgttgatggactagagatatggagtgctatccagacatgggttaaggactacgtctccttgtactatgccacggatgatgcagttaagaaagactcagaactccaagcttggtggaaggaagctgttgagaagggtcacggtgacttgaaagacaagccatggtggcctaagttgaacactcttcaagatctgattcacatttgctgcattattatatggactgcttcagcactccatgcagctgtgaatttcggacaatacccttatggcggtttcatcctaaatcgtccaactctaaccagaagattgctcccagagccaggaaccaaagaatatggtgaacttaccagtaatcatcaaaaggcttatttgagaacaattacaggaaagactgaggcccttgtggacctaacagtgatagagatattgtcaaggcatgcttctgatgaggtctaccttggacagagggacaatccaaattggactgatgacacaaaggcaattcaagcctttaagaagtttggaaacaagctgaaggaaattgaggacaaaatctcagggaggaacaagaattcaagccttaggaaccgtaatggaccggcgcagatgccctacactgtgcttcttcctaccagtggggaaggccttactttcagaggaattcccaacagcatctctatctaatgagagtgtgtggtgtgtggtgtgtggttttctttccttccaacgtacctctcattgacaaataaacgtgcaaacttatgtgtgcataattttcttatgtatgcttaagttttgtaattggatgctatctagtttttcatatctaatagggtgttgtgtcagtttttatgtatagtattgtgctcctatcatgttcacccgtatcatgttcacccgtatgtaagtctgatattctgatctatgaatgtcaaatcaaatttctctatgtcaccaacttggatttgat

SEQ ID NO: 10826 - DNA, 2326 bp, Glycine max
  Clone ID: 700979801_FLI
gacttatcggttggtcccttcaaccttggcctttcactttctcttcctatctctctctcacgttcacattccatgccagtgttttaggcagcaccccttcatattctttcaaccagacacagagccagaaaaccctgaagaagccagagtcagagagaaacagagtaatactatagtggaatatttgttggaccatgaagcataaagatggaaaaccgattaatcagccaaataagaaccgggctgtgactttggcagtcactttaattgctctatgtggtttttctttctatctgggaggaatcttttgctctggaaaggatggggttgtggttaataccattcagaagacccttgattctcctaagcaatcctcaggttctctgcaaattaagccaatcagtttccctgaatgcagcatagactatcaagactacactccatgcacagatccaaagagatggagaaagtatggtgtgtaccggcttactttgttagaacgccattgccctccagttttcgacaggaaagaatgcttggttcctcccccagagggttacaagcctccaatcagatggccaaagagtagagatgaatgttggtacaggaatgtgccatatgactggatcaataagcagaagtctaaccagcattggttgagaaaggaaggggagaaattcctgtttccaggtgggggtactatgttccccaacggtgttggtgaatatgttgatttgatgcaagatctgatcccaggaatgaaagatgggactgtgagaactgccattgatactggttgtggggttgctagctggggtggtgacttgttggatcgcgggattctaacagtttctcttgccccaagagataaccatgaagctcaagttcaatttgctctagagcgtggtatcccagctgttcttggtgtcatttctacacagagacttcctttcccatcaaactcctttgatatggctcattgctccagatgccttatcccatggacagaattcggtggtatttatctcatggaaatacaccgtatccttcgtcccggaggattttgggttttgtctggtccacctgttaactacgagcacaggtggcgtggatggaacacaaccattgaagaccagagatcagattatgagaagttgcaagaattacttacttcaatgtgctttaaattgtacaataaaaaggatgacattgcagtatggcagaaggctaaagataacagttgctatgaaaagctggccagagagtcctatccaccacagtgtgatgacagcattgaaccagattcaggatggtacactccacttcgtgcttgttttgtggttccagatccaaaatacaagaaatcaggcctcacatacatgcctaagtggcctgaacggttgcatgctacccctgaaagggtcacaactgttcatggttctagtactagtactttcagtcatgacaatggcaagtggaaaaagcgcattcagcactacaagaagttgctgcctgaacttggcactgacaaagttagaaatgtcatggacatgactacagtatatggagcttttgctgcagccttgatcaatgatcccttgtgggtcatgaatgtggtctcatcttatggtcccaacacactccctgtggtttatgatcgtggccttattggaaccttccatgattggtgtgaagctttttcaacatatcctcgaacctatgacctccttcatcttgatggactcttcactgctgaaagccacagatgtgaaatgaagtatgtgttgctggaaatggatcgaattttaaggcctggtgggcatgctatcattcgagagtccacttattttgtggatgccattgctactattgccaagggtatgagatgggtgtgtcgcaaagaaaacaccgagtatggagttgacaaagagaagattctgatatgccaaaaaaagctatggcactcatccaacaacggttcaagatgacaaactctggaacctgtgcagtggtgagagggggtggctacaattgtaaatccagaagcagaagcaaagggaaatggattcagagccaccatcaactaaacattgattcattctataatatagaagccaagaatcggtcgagttcaaatttatcaaatgaagaattggtaactcaataatctgatcttgttaagttatatagaaaattttcatatagatactattctttatatggcatcaattgtatcagctaccactctcctatatctattttttgttgttgttgttgtgtaatatccaagtgaattcatgtgagaaatgaaagttttaattccgac

SEQ ID NO: 10827 - DNA, 588 bp, Glycine max
  Clone ID: 700979909_FLI
ctttagccagacggttaaatctccggcctcgacaagttgaagtgtggttccagaatcggagagccagaacaaagctgaagcaaacggaggtggactgtgagttcttaaagaaatgctgtgaaacattgaaggacgaaaacaggaggttaaagaaggagctgcaagagctgaaggcactgaaactagctcaacccttgtacatgcctatgcctgctgccacactcaccatgtgcccttcttgcgacaggctcggtggcgttaacgataacggttcgaataaaagccccttctccatggctcccaagcctcacttctataaccccttcgccaatccttcagcagcatgttgattattgtggttaggttttcactattcattcggggcgaagaggttaaaaaggcaagagttatttcccacaaccattgtatttttttggttgagggcgatgcgtctagctagctagggaaaattaagctgtaattagctaatactgttgagaatagtaactgctgattgaaattatcttttgcttttttcttcatctattgtatgtttatataaaccgttacagaaggtgttcatctatg

SEQ ID NO: 10828 - DNA, 1339 bp, Glycine max
  Clone ID: 700980082_FLI
ctgcagtatcctttttacactgaagggtcaaaggctctcctcgatgccagaatttatattgctaaatattctttgacaagggctgcattacgaattcaacgtgcacagagaagaagggatgatccagatgaagatatggatgcagagatgaattgggcattgaagcaggctgggaatttgagtcttgaattcagtgaaattggagatgatcggccactttctggttgctccttctcaagggatggaaaatggcttgctacctgttctctgacaggagcttccaagttgtggagcatgcccaaaataaaaaagcattccagctttaagggtcacacagagcgtgctactgatgttgcttattctcctgttcatgatcatttagcaactgcctctgctgatcgaacagcaaagtattggaatcaaggatctcttttgaagacatttgagggtcatctagaccgtcttgcacgcattgccttccatccatcagggaagtacctgggcactgctagctttgacaagacatggagattatgggacatagaaacaggagacgagttgcttcttcaagaaggccatagtagaagtgtatatggtttggctttccacaatgatggatcattggctgcatcttgtggactagactccctggctcgtgtttgggacctccgaactggaagaagtatccttgcactggaaggtcatgtcaaaccggttctcggcatcagtttttcacccaatggatatcatctagccacgggtggtgaagacaacacttgtcggatttgggatttgaggaagaagaaatccttttatactattcctgctcactctaatttaatttcacaagttaaatttgagccacaagaaggttactttttggtaactgcctcgtatgatatgactgctaaggtttggtcaggccgtgactttaagcctgtgaagacactatcagggcatgaagctaaagttacttctgtggatgttcttggagatggcgggtatattgttaccgtctcccatgatcgcaccataaagctgtggtccagcaatacgactgacgaacaagctatggatgttgactaagctaatttgaggggatgcaatttatcaaaggactttggtggtgcaagttagattaatcatttttgttagaaacaacagcgtagcagcatgactatgcttggatttttagtaattatacattgcattgaaaacatgttatttgccgcctgatgtatcactcaattgaggaactggagtactggtaatatctttctcgcttgatgtagcatgagtaaatatctcttaaatttttatatagcttttcccttgctgc

SEQ ID NO: 10829 - DNA, 1271 bp, Glycine max
  Clone ID: 700980250_FLI
caaatttggagttttgtcgccgccgctgctgctcccgaaatggtgtcggtgccgcagcagcagcagcagcaggcttcgttgttcgctcatcaccaccgtcagcagcagcagctggccatcggagaagctttggcggcgagggtgggaaattaccttccgggacatctgaatttgctcgcttcattgtcaggtggacctgggaattctggtcggagagacgatgagcctcgttgattgtgacatctcttcaacggtggcggtgaggatggttgtggacggtggtggtggtggtggtgtttttttttcttccgtatatatacatattctcgtgttgtggttgctgttttgttgtgtgtggcaagcaggagattcttagggttaggttttcccttagattttgagtggagaagtccatcaattaagaagacattcaattagggttttttgttttacttcctgctggtttggaaaacttaactaggtttttagatgttggataattgttttagattctggtgctttgttggaggagaggaggaagaaaaagggagaatgtaatgaactgatgatttaatttgtgaaattgtgatggtgagaaattggtaccgattgagtctggaattgggtttcagaagcttggtccgtgtgctagtacagttgaatttgtaatgtaatgttgtacttcttcaaattgaagagcatggattggattgcattgttgattctgtttcactttcatagtgggttttgggctttgactgactgggtctacacgtttggtggtggctgtggttgctgttgaggtaattagtgattgcaagcttgtttctgaggcgagtgaattgtgtttccaaagttcaactgtcacttccagaatgttggagaaccctaatactttccaacttgggttgagaattcatgtctcttggatgctgttgggggcatgttttgagggattgaggttcatgtaaggtggtcatgttgtgaatttggtgcagctgcgggggacttatgctctctgaccctatctcctccactttcacactccttgatggtctttgttgttttcagaaatgagactggtgagtggaagatgaaaaaaagaagaagaaagctctggttgtactccgtatgactgacttctgttttgagatttttatcttcaattcttagccatttattagattgatcagcgtgagaataatgttttcttgtatgtaagtggattgttttggggtgccagtgatttgaataaaaaactcatcttttct

SEQ ID NO: 10830 - DNA, 1487 bp, Glycine max
  Clone ID: 700980321_FLI
ttcaagtatgcctgggtgctggacaaacttaaggctgagcgtgaaagaggaatcaccattgatattgctttgtggaagtttgaaacaacaaagtattattgcacagttattgatgcgcctggacatagggatttcattaagaatatgattactgggacatcccaagctgactgtgctgttcttatcattgattcgaccactggtggttttgaagctggtatttccaaggatggacagactcgtgaacatgctctgctttcattcacccttggtgtgaaacagatgatttgctgctgtaacaaaatggatgctactacacccaagtattccaaggccaggtatgatgaaattgtgaaggaagtctcttcctacttgaagaaagtaggatacaaccctgacaagattccttttgttcctatctctggttttgagggagacaacatgattgagaggtccacaaaccttgactggtacaagggtccaactctgcttgatgcacttgaccagattagtgagcccaagaggccctctgacaagcccctcaggcttccccttcaggatgtgtacaagattggaggtattggaactgtgccagtgggacgtgttgagaccggtgtcttgaagcctggaatggtggtgacttttgcaccaactggactgacaactgaagtcaagtctgtggagatgcaccatgaatctcttacagaggcacatcctggtgacaatgtgggattcaatgttaagaatgttgctgttaaggatttgaagcgtggttatgttgcctcaaactcaaaggatgaccctgcaaaggaggctgctaacttcacagcccaagtcatcatcatgaaccaccctggtcagattggaaatggctatgcccctgtcctcgactgccacacttctcacattgctgtcaagtttgctgaactcatgaccaagattgacaggcgatccggcaaagagcttgagaaggagcccaagtttttgaagaacggtgatgctggttttgttaagatgattccaaccaaacccatggttgttgaaactttctccgagtatcctccacttggtaggtttgctgttagggacatgcgtcaaactgttgctgtgggagtcatcaagaacgttgagaagaaggatcctaccggagccaaggtcaccaaggctgcccagaagaagaagtgaatcgtgcgggctggttcatcaggggatgttggttacaataaatgttggtttcttttctgtactcttgtgtcttcttttctaggtagcttgtttttcggacaaagtttgaagtctccaccatcatctcgcaactgttgttcccagaactgggttcttgatcgacggtggcaaaattgcttttatttatctgtgttttaatgtgttgtgtttgtcggaacccctgattacatttttgttaagcgcagcgagtttcaggactttgctgcgttgtgttgctttggtttattaaatgtcaactttct

SEQ ID NO: 10831 - DNA, 1385 bp, Glycine max
  Clone ID: 700980340_FLI
tcaaaacaaccttctttctttcaggttcttgatcagtgtcaaaaccaaaagggtggttgcaaattgcaatggctaagcatgatgttgagggtggttccttcgctgcaaaggactaccatgatcctcctccagcaccattgattgatgctgaggaactcacacagtggtccttctacagggctttgattgctgagttcattgccacaatgctcttcctttacatcacagtgctcactgtgattggttacaagagccagagtgatgtaaaggctgggggtgatgtgtgtggtggagttggcattcttggcattgcttgggcctttggtggcatgatcttcattctggtgtactgcactgctggaatctcagggggtcacataaacccagcagtgacatttgggctcttcttggctcgcaaggtgtctttgattagagcaataatgtacatggtggctcagtgcttgggagccatatgtggagttgggttggttaaggccttccaaaaggcttactacaacaggtatggtggtggggccaatgagctcagtgaagggtacagcacgggtgttggattgggtgctgagatcattggaacctttgttttggtctacactgtgttctctgcaactgaccccaagaggaatgctagagattctcatgtgccggttttggctccacttccaattggctttgctgtgttcatggttcacttggcaaccatcccagtaacaggcactggcattaaccctgctaggagtctaggagctgctgtcatgtacaaccaacagaaggcctgggatgaccattggatcttttgggttggaccatttattggagcagcaattgcagccttctaccatcaattcatattgagagcaagtgctgctaaggctcttggatcattcaggagcaaccccactatttgagtcaatttcctcttcatggggggttagtggaaatggaaaaaaaaagataattggaggcaaaaaaagttgatattgcaacaataataataataatatggaactgtttgtgctttgatcctctgcagatagaaggttctttcaagaaaaggaagcctttggtaaatagtaaagaccctttagtacttcgaagcactttcctttgtatttccttgttagaattgatgagcttttttttgatatattggaagtaaaatctattagatatcttgttttaatattttgtgatatgtaataagtcgacttgttggtgaactagtgtggtaacccatgttttgagggatgctaggccaatgtcacactttttgcttgtgatattgaattttcccaaaaaaaataaaaaaatcaagtcactgtatgtatgttggaaaattcagaacgaaaatacactttcattccccc

SEQ ID NO: 10832 - DNA, 1106 bp, Glycine max
  Clone ID: 700980420_FLI
ctttcttttccctctctcaattccaaacagtagatttagacacccttttggaaaaggaagtgttttttgagggaaaggagggaattttttgtgtgggagggtggaacccggaattcggtttggttggggtagagaggatgaagattcagtgtaacgtgtgtgaggctgcggaggccaaggttctttgttgtgctgatgaggctgggctgtgttgggagtgtgatgagaaggttcatgcggctaacaagcttgccagcaagcaccagagagtgcctctttctacctcttcctctcatatgcctaaatgtgacatttgtcaggaagcattaggctattttttctgtctagaagatcgggctctgctctgcagaaaatgtgatgtggcaatacacactgcaaatgcttatgtctctggtcatcagaggtttcttctaactggtgtaagagtaggccttgaagctacagaccctggtgcttcctcaacttctttgaagtcagattctggggagaaagtttcagattcttctgtctctagaaaggtttccacagcgccccagccatcaaattataatgaagtgttacccgctgaagttggaggagttggggagtttccatcagccaaggtgtcctttggtggtggttccacagctggaaatatctcacagtggactattgatgaatttattggcttaaacgagttcagtcagaattatgattacatggaaggatcatcaaggtattgcagagttcagattcatcttttgtcatagattgtgtatactagtgccccttcagacacactaacacacgcgcgcgcgtgcagggagtaaaaggacagggatggggctgatccggtcttctgagggaatatgccctgttaacatggtcacatgactaaacaactggccaatgtagtataagttttataaatatgttgaatatttgtggtcagaaaaggtgtgagtagacttcaaacagtggaatctgacagattggttggttgaagtgcttgtgcttggtttcattctttcccttatttgtaagcccgttttaaatttggaaaacttgaccttttagaagtgcaatactcagttggctttcacctg

SEQ ID NO: 10833 - DNA, 1896 bp, Glycine max
  Clone ID: 700980490_FLI
ggaacactgaccattactgttggcaaagaccagaggacatgacaaccgaccgtcatgcctacaaggtcgatccgagcaatcccggttccgatctcgccggagaaaccgccgccgcaatggccgccgcatccatagttttcagacgctctaaccctgcctatgccggcgaacttctccgccatgcctaccagctatttgattttgctgacaaatacagaggcaaatatgacagcagcatcacggttgcccaaaagtattacagatccatcagtggttacaatgatgaattgctctgggctgctgcttggttgtatcaagcatctaacaaccagtattacttggattaccttggaagaaatggtgattccatgggtggaactggttggagcatgactgaatttggttgggatgtcaagtatgctggtgttcagacattagttgccaagttcctgatgcaaggcaaatctgggcatcatgctccagttttcgagagataccagcagaaggctgaaactttcatgtgttcatgccttgggaagagtagtcgcaatgttcagaagactcctggtggcctcatcttccgccagagatggaacaacatgcagtttgtcacaagtgcctcatttttagccactgtctactctgactaccttgcttcatctggtagaaacctgagatgcagttcagggaatgtcccccctgctgagcttctctcccttgcaaagtctcaggtggactaccttcttggggacaacccaagagctactagttacatggtgggctatggaagcaacttcccacaaagggttcatcacagaggttcatccattgtttccatcaaggttaacccttcatttgtcagctgccgtggaggttatgctacatggtttagcagcaaaaggagcgaccccaacctgctcactggtgctcttgttggtggacctgatgcatatgatgactttgctgatgaaagagataactatgagcagacagagccagcaacatataacaatgctcctcttattggtattctggcaagactaggtggaggtcatggtggctataaccagcttcttccagttgttgttccagctcctaagcctgctgttaccaagcctcaaccaacccccagtcccaagacaactccttctccagcttcatggtcaggcccaatttccattgaacagaaaaggaccacctcatgggttgccaatggaaaaacttattacagatactcaacagtcgtgactaacaaatctaacaagagtctcaattctctcaatctttcaatatccaagctttatggtccaatctggggtgtcacaaagtcaggtgattcatacacattcccatcatggctcagctcattatcagctggcaaaagccttgaatttgtctacatccattctgcttctccagcagatgtctccgtggcgaactacgtgttggcctgaaagtggcatgggaatggtttactgctttcttgtgtaagactgtgtagccatacaaatgtgcagcgaggggagtgtctttacgtttttccttctataatttggtgtcaaatcttcttcttcttcttcttcccttgtgtattttgcatttcagtaggttagatcaaaataggtagattatataagatggaaggaccggagcagaaaggagtgaagagacaaaaggcagagctcatcctctttcttctccgctttacaacttatatacagtgagtgatacaagacaggtagtgaaacagtgttgttgagaagttaaaaaaaaaaaggtgaacttctcaatatttcagagaagagtcatcacttgtatttttcaacagctttggatgtcttttctgtgtttgatgttgtaagctttgcagcattttgtaatctctacagagaaaca

SEQ ID NO: 10834 - DNA, 540 bp, Glycine max
  Clone ID: 700980733_FLI
ttagggttcatgcacttaatctcttcccttgttggagtgcccagaaccttgatgatttggtatcaagactactacaatactcccctaacttgcggtgcacagcttttgatgccttgacgcatcctttcttcgacgagcttcgtgatccaaatactcgcttgccaaatggccgattccttccaccactatttaatttcaaatcccatgaactgaaaggagtcccatctgagattttggtgaaattggttccagagcatgcaaggaagcaatgcccgtttctaggctcgtgaagtgttgtttccatatgagaatgctgcgctttccttttctatttaatatgatatttttgttggtatctttattgtattcggttgccctgtaaaagcagatttagagatacatgctactcattatcacccaacccccgatggttatgtagaataccctgtttcctgtatcacagcagattgtaacatacaatagaggacaaaatgtctgcaattatctaaatgttgcatcaatatttgtatttgttgagac

SEQ ID NO: 10835 - DNA, 1233 bp, Glycine max
  Clone ID: 700980834_FLI
atgatcgtcagacaaggattgaaggtgctgaaatcaacaagagccttttggctttgaaggagtgcattcgtgctttggacaatgaccagatccatattccttttcgtggaagcaagcttacagaagtgctccgggactcctttgttggaaattcaaaaactgttatgatctcttgtatatccccaaatgctgggtcatgtgaacacacacttaataccttgagatatgcagaccgagttaaaagtctatccaagagtggaaatcctagaaaggaccaggccccaaatcctataccaccaccagcaattaaagaggtttcatccacatcttcacttccaggtagtgttggtgcagaggattttaataatggtcaacgtcaagaggtaaaaacaatggacatgagcaggaaagttgtcgaaaaggaaagttctttgtacagctccgctgctgatgttgacaaacaatcaagtttttcttctagttgtcaattcaatgggcgagaggaaaaaagctcagcttctgccccaatggacagggaaaagtttgaagtaaagaattcttacggtggtgattctaccagtcagaagatgaactcttattccctaaatgttacagatgagaaagtgcaaagggtgtctcctccacgcagaaaagggactaaggaggagaaatctgaaagatctgtaaattgggtaaaacgggatgtcgatggttatgatcattccaccacaagctccaaacagcagagcacaggaaattataacattaccactggatcggggcagtctgaaacagaatcctcttctaatgtgaatatcagcgcaatacttgaggaggaagaagcactaattgctgctcataggaaggaaattgaagacacaatggagattgttcgtgaagaaatgaaactactggcagaagtggaccagccgggaagtcttattgacaactacgtgacccagttgagtttcgtgctttctcgcaaagcagctagtctcgtcagtctccaagcacgccttgcaagattccaacatcgactaaaagaacaagagatactaagtagaaaaagagtgccccgttaagagactcggtttctcttgttcagtgatgacgtgtatgttcttgatgtcatttctcagtgtttgttagcgatatagttttaaaggtttttgttcattttataaaaaaaaatggatcttttgttgggtattcaaattaaatttactcaaatgt

SEQ ID NO: 10836 - DNA, 2269 bp, Glycine max
  Clone ID: 700980868_FLI
ctgggaagttttgtcatagctgagagctgactctagctagaggataataagattacaagagagaggaattgtttttgattggatccacaaaattcaagatgactccagttaatttggcaggccagtttggtgacacgacatacactaaggtgtttgttggaggcttggcctgggagactcaaaaggagacaatgaagaagtattttgagcaatttggtgagatcttggaggccgttgtcatcactgacaaagctactggaagatctaaaggctacggatttgttacttttcgtgaaccagaagctgccatgagagcttgtgtggatcctgctcctgtaatcgacggcaggagagctaactgcaaccttgcttctttgggtgtccagagatctaagccttcaaccccaaagcatggaggagcagggaggaactttagagtaatgggttctttccagacaggatttggagggggagtgggatcagcttttccttcagcagcaaccttccctcattacgccatccagcaagggataccttataatgtttatgggtactctccttactcgccggattacacttaccctacgagctactatggtgtgtatggaggagcaacagcacagtacccagtttatggaagtggacctgctgcagctgcaggagggatgatgagcggtggtgcagcgttctacccatatctgcagtacggaggagaagggagtggcggcggcggtacttccggacagggttatggtgtgaactaccctcctcaggctcatctttttcagtattctcccattgcttccaccgctggctatgcccagcactatggtacacctactatgtctcttgctccttcccctgccttgcaatcagtctgttttgctgtgccgcaggcgtgaccatgcctcttcaagctccaattcctcatcgctagagactcatcatctcaaactagctatgtcaaaacttcccagttgctcctgctccttgaagtctctcttccactcatcaacctttgccctaaccatggtgctctctctctctcacacacccacccactctttcactaacacttaaacaaagtccatcaatggcatttggactttttccagcataagaagccccccgtaggggctcaaatgtttctcctcgtttggagagtcatgcattcctttttctcaacataaagaagactctgttgcatcttcaatgaaattaaggttccttggaagaagagaaccaagccaacacaaagctatcggatatagctgacttgttggaaaaaaaaataattaagaacagcaaagcttggcccttggaaaggccaagcccaaacgaaccatcttcttaacttgggcccaagacgggctaagtaaaagtacagaatggtttcaaaatttgtaaatggcagatcacagatagctagctcatcaactagaaattttaagttagttctgcaaaaataggtattccctccaagcaatgctaatcacctctggatgaagaggaacttttagcaatcaatatcatggacattggatgtcccagcttttttgtatggtaacatctagctagtcttaggctttagtgttaggatcagtcatgtcttcataaatatgtttttgtcaattttcagaaaaaaaggggtttaaccaaccaaccaaccaattaacaatcttccctttgggtaaggggaggcaacaactaactgctgttttttatcctgtaaattcaatgaggctaaactatgggagtttaagcccaatccactaatctttaggagggatagtgttttaatttcccgcttagcataagtagtacatttcatcatcatcttgagaactacgtcaatggatgtggtactcaaaacacttgcatgtaaccctgggagatattttggttcccttgggtacttcacttactcaccaaccatggttaggacataggtgaatctcatcactctctttctctcttctccctgctttctgtctggcaacttttacatcgagatggaccttgatactctattaattatatgtttaagcctatatggtttggattgtaattaggaatactaaagtaggaggatttcattctctatccatgctggatgagaatggatttgctactcatcctactatgcctttaatttgatactatgcttgcttctattcaacctatgtcaagataagcaaatcaagttaatgcttcgagtaatgttcaacttttttgttatatttcaatcaaggatattttattatagggc

SEQ ID NO: 10837 - DNA, 1344 bp, Glycine max
  Clone ID: 700980869_FLI
gaagaagcccatacttgtgggagatagatggcacgcttgtcactgctcattttcgcgttctgcgccgtcgccgtcgccgtcgccgtcgcgggctcctccttcgatgatgccaaccctatccgtttagcgtcggacttggagtcgcaggtgctggacgtgatcggacagagccgccacgctctctccttcgcccgcttcgctcgccgccacggcaagcgctaccgttccgtcgacgagatccgcaaccgcttccggatcttctctgataatcttaaactcatcagatccaccaacaggaggtctctcacctacacgctcggcgtcaatcattttgctgactggacttgggaggagttcaccagacacaagctcggcgctcctcagaattgctctgccacgctcaaaggcaaccacaggctcaccgatgctgttcttcctgacgagaaagactggagaaaagaaggtatagtcagccaagttaaagatcaaggcaactgcggatcttgctggacattcagcacaactggtgcattggaggcagcttacgcacaggcctttgggaagaatatcagtctttctgagcagcagctagtggactgtgccggtgctttcaataactttggctgtaatggtggtttgccatcccaagcctttgaatacattaaatacaatggtggcctcgacacagaagaagcatatccctacaccggaaaagatggtgtctgcaaatttacagctaaaaacgttgctgttcgagtcattgactctatcaatatcactttgggtgctgaggatgaattgaaacaagcggttgcttttgttcggccagttagtgtggcatttgaggtagcgaaggacttccgattctacaataatggagtttacactagtaccatttgtggtagcacgcccatggatgtaaatcatgctgttcttgctgttgggtatggagttgaagatggtgttccatattggatcattaaaaattcatggggaagcaactggggtgacaatggttacttcaagatggaattagggaagaatatgtgcggtgttgcaacttgtgcatcttatcctgttgtggcttaaatgtatgcagagagatgtggtgcccgatatgcccgtgtaactgcaccttgcacgtcatgcttcgtatcgtccatcttaaagggtgaaacattgtactgcgataaaaatttacagtatatgttgatgtttatctgtaaaataagtttggaattgggatgttcattctccttgagctgaatcacattacaaaatcgtactgtaaatcatttgtcacatagaggtatcatagaaattataaactgtgttatgctcccc

SEQ ID NO: 10838 - DNA, 1118 bp, Glycine max
  Clone ID: 700981026_FLI
ccaccacacaatttcatttcatttttccttttcacttcactttcccccaattttctttctcaacaatggccgcagcaacacaactccacttaccccctggattccgattccaccccaccgatgaagaactcgtcgttcactatctctgccgcaaatgcgcttcgcaagaaatcgcagttccaataatcgccgaaatcgatctctacaagtacgacccatgggaccttccaggaatggctttgtacggagagaaagagtggtattttttcacgccgagggaccgcaagtacccgaacggttcgcggccgaaccggtccgcggggaccggatactggaaggcaaccggagcggataaaccggttggcaaaccgaaacctgttgggatcaagaaagcattggttttttacgccggaaaagcgcccaagggagtgaaaactaactggatcatgcacgagtatcgtctcgccgacgtggatcgttcggttcgcaaaaagaacagcttaaggctggatgactgggtgctgtgtcgaatttacaacaagaaaggtgcaattgagaagcagcaaccagcaccgccaccaccgagtggtgtccacaaaattgaatgttacgaaatggaagacgtgaagccggagtatacggcggcggattgcctgtacttcgaggcttccgactcggtgccgcggctgcacacgacggagtcgagctgttcggagcaggtggtgtcggcggagtttgcgagcgaggtgcagagcgagcggaagaggcagggcaacagcgagttttcgtataattacatggatgccactctcgggaataatcagatgtcgccgctccaggatatcttcatgtacctctccaggcccttctgaaatcaacacgcacgagacggcacgacgtcgttctttgctttgtgtgtgcatgatgcatttttgacgtgcctgctgcattgcatggaagcacgagactgagtgaatgtccgtgagtgtgtccgtgctggtgcgcgtagatgattattattataaaaaaacaaaaaaacaaaaaagagaagcattcatatatgaacatgatgaatccaactgtttacatgatctagtcgcaattaatagtttgatatt

SEQ ID NO: 10839 - DNA, 1043 bp, Glycine max
  Clone ID: 700981106_FLI
ctcgaattctcggacaggactggaatgagtgatttggatccctataaatggcccaagtcaaaatggaggtgcttgatggtcagatgggatgaggatattgagattagtcatcaagatagagtatctccatgggagattgatccttcttcgtctcttcctcccttgagcattcaatcctccagaaggctgaagaaactgaggccaggtctgcaggctgccacacccagtcacctcaccactggaggcagtgggtttatggactctgaggagtcagtaagatcatccaaggtcttgcaaggtcaagaaaatacgggttttatgtcactatattatggatgtgacaaagtaactaagcagccagaatttgagatcagatctccaagtcatcctaatcttgcatcaactggagtgagaaagatttctgctgctgagtttatgagggttcacccttctagttttgcaggcttttcggaaactaacatgtttccaagggtcttgcaaggtcaagaaatatgtccatttagatccctaacaggaaaggctgatttgaactttggttcttggggcaaacccaatgtcagttactcaaataacaacctgcatcaggcaaccaaacctagctttcactctttaggaccagaagttattcaaactgcatatttcccttatggtgatattcacaatgctggtcaaggtagcagcatcttgtgctccaaaccgaccaatttccaacgagagaatatcccatttaacactccttctactcagtcagggatcatgagaaatgaagttggacggtcagacatcacaattccaaatgagcagaagctgcaggacaatatttctggtactgcttctttaggggcaaacatgaggattccaaaggatgacaatttcaaggggcaggtaaaagcttgtaaactatttggaatttccttgtccggggaaactaccgcccaaaatttacagaactctgctaaaagaagctgcacaaaggtgagcgacgatagcaacagagttatattgtgaaatatgcctttttt

SEQ ID NO: 10840 - DNA, 2727 bp, Glycine max
  Clone ID: 700981181_FLI
gatgaaatctatgctcaaatgactctgcaaccactgaattctgaaagagaagtttttcccatatctgattttgggctaaagcacagtaaacatcccagtgagttcttctgcaaaactttgactgctagtgacacgagcacgcatggcggcttttcggttccacgcagggcagcagagaagctctttcctccattggattacacaattcaacccccaactcaagagcttgttgttcgagatttgcatgataatacctggacatttagacatatataccggggtcaaccaaagagacacctgctcacaacaggatggagtttgtttgtaggctcaaaaaggcttagagctggtgattctgttcttttcatcagggatgagaaatcacaattgcgagttggcgtgaggcgtgttaatcgtcagcagacaacactgccatcatcagtactttctgctgatagcatgcacattggtgtgcttgctgctgcagctcatgctgctgccaatcgaagtccattcactattttctacaatccaagggcatgcccttcagaatttgttattcctctggccaaatacagaaaatctgtatttggaactcaggtctcagttggaatgagatttggcatgatgtttgagactgaagaatcgggtaagcgcagatatatgggtacaatagttggtatcagtgatgtggatcctttaaggtggcctggctctaaatggcgcaatattcaggtggagtgggatgagccagggtgtggcgataaacagaatagagttagtgtgtgggagattgagactcctgaaagcctttttatctttccttctttgacttcaggtctaaaacggccattaccatctggacctttggaaaatgagtggggaactttgttaacaagacccttcataagagttccagaaaatggaactatggagctctcaaactcaattccaaatctctactcagaacacatgatgaaaatgctttttaaaccccagctgattaacaataatggagcatttttatccgccatgcaacaagaatctgctgctacaagaggtcccttgcaagaaatgaagaccactctggcagcagaaaaccaaatgctgcttaaaaatctacatcctcaatctatccctgaccaacctaatgccttaaacatgcaatcactgttgaaaaatgatcagcctgaaaaatttcatcctcttgccaaaattgataatcatcttccttctgggatagttattgacaagccaaaattagaatgtgaggtattacctgaccgcgtgattgactatccttccatggaagggtgcaacaatgaaaaggtggcagtaaatcctgttaaccagcaaggcctagcaacccaattgccattccataatcaaaaccagagtccactactccctcaatccagtccatggcctatgcaacctctgatagaatcctccatgccccatcctcaaatgattggtatggctcaagctgattctgccatggtaaatggcctgtttcctcagcttgacattgatgaatggttggcgtatgcttcttcccaaccttttgctgggcagaacagaccaactggacctttttctgacttgcaagaacataactcacttcagcctcaagtagtgaatccccctttaccttcaatgaacaatgaagtatgggatcattatgtcaagaacttcaagttcttatctcaagcagaccagcttacatccatctgtcagccagggatgtatggcctcaatggcgtaccaagctcaaataatttgagggatctttccgctgagagcaataaccaaagtgagatttgtgtcaatgttgatgctagcaacagtgtaggcaccaccatggttgatccttctacttcaagcaccattttggatgagttttgcacgatgaaggacggagaatttcagaatcctcaagattgcatggttggcaacttgagttcaagccaggatgtccagtctcagataacctctgctagtctagccgagtcacatgcctatcctcttagagacatccctgacaactccggtggcacttcatcaagccatgttgattttgatgaaagcagcttcctgcagaataactcatggcagcaagtacctgcacccatccgaacctacacaaaggtgcaaaaggcaggttccgttggaagatcaatcgatgtgactactttcaagaactatgaggagttgatccgtgcaatcgaatgcatgtttggactcgatggcctgctgaatgacactaaaggctcaggatggaaattggtgtatgtagattatgagagtgatgttctacttgttggtgatgatccttgggaggaatttgtaggctgtgtccgctgcataagaattttatcaccttcagaagttcagcagatgagtgaagaggggatgaagcttctaaacagtggagctttgcaagggatgaatgtttgaatatcaggtggtggctgcatccaatgtcactaagccatgctttgtgatgttcttgtacaaggcaatgtttgaaaagcaaaggcatatgttgtggaagaagtcagtattattaacttgtatggaacaaaccttgaagatggaagagagtttgagttttattatcacacagatcaaaagttgtaagatgatgttccaatgagtcaagggtgttgcataccttatgttgtaagaaattcttgctggcaagtggacatattatgctttattatt

SEQ ID NO: 10841 - DNA, 1112 bp, Glycine max
  Clone ID: 700981223_FLI
ccaatccattgcttaacaggtaacagtaacactcagaacgcaacaaagagagagtgagagagaatcacaaaccctcattccatttcctcccttttctctcttgcagtcacgcaagcagcaaggatcgcaattgcattttgtgggaatcggcggcgagaaaatgcagggttggttctcggggcagagtagcgaggaggaggcgaagccggcgtcgtcgttgctcgccgattggaactcctacgcatccgcccaaacctctgaagattcatccactttccccttcgatatcgaatccgccgttaggtctgccaacgacaccgtttccggcactttcagcgtggtttctaaaggtgtgagagatctacctggcaacttccagtctgccactagtaatgtgccttctggcaaagcgcttgtgtattttggtttgtttctggcaagtggagtcttctttgttttcatagcatttacattatttctgcccgtcatggtagttatgccccaaaagtttgccctatgctttacacttgggtgtggatttattattggatcattctttgctctcaagggtccaaagagtcagcttgctcacatgttgtcaaaggagaggctccctttcacattggcttttttaggcagtatgattggtaccatatatgtatcaatggtgcttcacagctacattctctctgtggtattctctgtagtgcaggttctctcacttggctactattctatatcgtactttcctggtggatctgctggaatgaaatttctgacttctgcttttacctcttcaataatgaaatgttttgggcggtgacctattttttgttgatagttgagttgagttcagacctgtgtccatatagtagttgacttgtaaatttgtctcctaagatctatcagctgaagcttcaaagtgacctaagaatattactgcgttgaagcatctctaacagtttcttagggttcaccgtttgttgttacttgccacatctaaatgaaaaaaattgttttgcctcgtgtttgtaaaagcaaattaacattatctgattgaagttgattgttgctacctttgtgttgcaatttgaaatatatttttgtttgag

SEQ ID NO: 10842 - DNA, 1551 bp, Glycine max
  Clone ID: 700981286_FLI
ggtcacaataggactgagatagttaaatttcttcttgattggcaaggggcagataaggttgagatggaggccaagaatatggtgggtacaacgtccattttttactgaagttattctttgaatataaatatgtataatctagacttccagttattgtcttgtaattctgaaaaggtttctttgtatactattgcagtatggagaaactccattgcacatggcagctaagaatgggtgcaataaagccgcacaattgcttcttgctcgtggtgctattgttgaagccagagcaaatgtgattatttttgtcatttcatctttcatttaatcttgtttaaatctagcaagaattgtttttattgttttataatgcatataaaagtttgttcccaactttttcttgcagaacggtatgacacctttacatcttgctgtttggtactcactacgagcagaagagttcttaactgtgaaaacattgcttgagtacaatgctgattgcagtgctaaggatgatgtaatgaacttaatttcctgttttttttcctgttattttaacattttcggtgaaattgtcatagatgctcaagactatgaattgcaggagggaatgactcctttaaatcatctatcccaaggccctggaactgagaaacttagggaactattactttggcatcttgaagagcaaaggaagcagcgagccattgaggcatgcagtgaaaccaaagctaaaatggatgagcttgagaagcaactatcaaatattgtgggtcttaatgatctaaaagtacaactacgcaagtgggcaaagggcatgcttttggatgagaaacgtagatctcttggtctgcatgttggaaggagaagaccacctcatatggcctttcttggcaaccctggaacaggtttttagaatatcttgctcatattaatgattgattgttttagaatatctcatttatactatcttgcaatcaatattggaaagatatcttattgtgcagttaatttcattgcctccattcaccattccatgttatactatttttattgaattgtcatgtttctgtctgagcatcttggcttgatctttggattgtatatacacatttccatgaacacctaattggtatactggaatcgtatttagttctgaaattaatttatatttgacttgtgtatttaataggtaaaactatggtagcacggattcttggaaaattactccatacggtgggaattctacctactgataaagtgacagaagtacagcggaccgatttagtcggtgagtttgttggtcacactggtccaaaaaccaggaggaaggtatgttattgactttgaaatccttcgcctattacagaaaccaaattttttgtgttgcttaacgagttcaaacttcaaacactgcctacagatcaaggaagcagaggggggaattctttttgttgatgaagcttatagattgataccaatgcaaaagtccgatgataaggactacgggttggaagccttagaggagattatgtctgtcatggacagtgg

SEQ ID NO: 10843 - DNA, 1882 bp, Glycine max
  Clone ID: 700981350_FLI
cgagacttctaccctacctcccatcatcaatgccattgaaatttacagagtgaaagagttcccgcaacaagacacataccaaggagatgttgatgcgattacaaccatcaagtctgtttatggggtgacaagagattggcaaggtgatccatgcagcccgaaagactacttgtgggagggtctgaattgtacgtatcccgtaaatgactccccaagaatcataactttgaacttatcttcaagtggattgtcaggaaaaatagacccttcaattttaaatctcaccatgttggagaaattggatttatcaaacaatagcttaaacggtgaagttcctgattttctgtctcaattacaatacttgaagatcttgaacttggagaataataacctctccggttcaattccctcaacacttgttgaaaaatctaaggaaggttccctatcactaagtgtgggccaaaatccatatctatgtgaatctggtcaatgcaatttcgagaagaaacaaaagaacattgttacgcccatagtagcatcaatttgtggggcgttgattcttctagtagccgtggcaatattgtggacccttaaaaggagaaaatcaaaagaaaaatcaacagctttgatggaagtgaatgatgaaagtgagatctcacgcctgcgatccacaaaaaaagatgattcattagcgcaagtcaaaaaacaaatatattcatactctgacgtccttaaaatcaccaacaatttcaatacaattattggtaaaggaggatttggaacagtttacctgggctatatcgatgacagtccagttgcagtgaaagtgctttctccatcggctgtacatggctttcaacaatttcaagcagaggttaaacttctaatcagagttcatcacaaaaacttaacatcccttattggttattgcaatgaaggaaccaataaggctctcatatatgagtatatggctaatgggaacttacaagaacatctctctggtaaacacagcaaatcaacgttcttgagctgggaggacagacttcgtatagcagtggatgcagccttaggattggagtatctgcaaaatggttgcaagcctccaataatccacagagatgtaaaatctacaaacatcttgttgaatgaacacttccaagcaaaattgtctgattttggtctatccaaagctatcccaactgatggggaatctctcgtgtcaactgtccttgctggtactcctggttatctggaccctcactgccacatatccagtagattaacacagaaaagcgatgtttatagctttggagttgttcttttggaaataatcacaaaccaaccagtaatggaaaggaatcaagaaaagggtcacataagtagaagggttaggtccttgattgagaaaggggatatcagggccatagttgactcaaggttagaaggagattatgacattaactcggcttggaaagccttagaaatagcaatggcttgtgtttctaaaaatcccaacgaaaggccaatcatgagtgagattgctattgaactaaaggagacattagcgatcgaaatagctcgagcaaaacattgtgatgccaatcccagacatttagttgaagcggttagcgtgaatgtggacaccgaattcatgcccctggcgaggtagaagcttacctaaagaagaataagataatgtcgtcaaaaataagtcattaaagtgtgttggaggatgaagacgagttaatgaaatcaagccacaaaagagatgtgtgtaaaaataaataatgaaagaatgaaaacctgtgttatttaatttttccttgtataagatttatagagttttataaaacatgataatataaaatagttttataatatt

SEQ ID NO: 10844 - DNA, 1225 bp, Glycine max
  Clone ID: 700981385_FLI
ggtaagtagttcttaagaaattaacaatcactttccattaagtgctgtttggtttgagggatgattaattgcgatggagtttttggattggtgatcgaaggtgttccttggacggaggaagagcataggttgttcctgttagggttacacaaagtcggaaaaggagattggagaggaatttctcgaaacttcgtgaaaactcgcacgcctactcaggtcgctagtcacgctcagaagtacttcctccgccgccacaaccagaaccgccgtcgccggagatctagcctcttcgacatcaccacggatacggtgatggaatcttctactataatggaagaggaacaagttccgcaagaaacgatggcggcgcctatccccgccgcatatccgccttttcccggcgcgggttttccgatgagtctatctccggtggtgttgccggtgagtggtgagagactgaccaagccgatcaggccgacgccgattgtaccggtgcctccgtcttcgaagatggctaatttgaacttgaaagggaaagcttctcggacaaatctcattgagcctttgccgttgtcgttgaatctgccatcgccaacgccgcggtctcaggatcagtcgccggcgaatagtggccactcgtcgccgtcatcgtcttcggcggcggcttttcaggctatgtctgcagcgaagttcggcggcgggggggatagtatcatcagcgttgcttgaaaagaaggaaacaaagaacaaatgagtgtcattaacttattaagtatggtcttagtagttaatttgggtatgtaaattaatgttacaaaatcgggcatgtatccaacagggaaaaaatctaagagatatgtgttggagatttgtttattacgaaagatgtatgatataggtaggagggagaggatattagaattaaatgagtatgatggtaattatgattagaaaaaaataaaataaagagatatgtatggtaattaggttatgtaggtaattaggcaatttaattgctggtttcagtgtacaggtttagttgaattaaaaaagatgggttgtcatattctctagctgttgagggattcttgtttctatatgtatgggggagtgtgaccgtgaaatgatagggcaccgggtactcttgataagcgattggtctgtgtaatgccactggggtcattaaaatattgcttagattagacaaaaggaatatttcatgctc

SEQ ID NO: 10845 - DNA, 2168 bp, Glycine max
  Clone ID: 700981436_FLI
ttatctccctcctcactctccattcaacttcttcacttcagtgcctagaatactggttcaactttcaagtgttcaaatgggggcaatttcaacaccccttgtgttggttcttctattttgctgcctggtttctgtttcacaagcagaatacttgaagtacaaagacccaaaacggccactgaatgttagaatcaaggacttgttgaagcgaatgaccctggaggagaagataggccaaatggtgcagattgaacgaagtgttgccacccctcaagtgatgaagaagtacttcattgggagtgtgctgagtgggggagggagtgttccagaaacaaatgcatctgctgagacttggatccaaatggtgaatgggatccaaaatggatctttgtctacccgtcttgggattccaatgatttatggaatagatgcagttcatggccacaataatgtctacaaggcaaccatttttcctcacaatgttgggctaggagttaccagggatccaatgctgataaagaagattggagatgcaactgcccttgaagttagagctactggaattcaatatgtgtttgctccatgcattgcggtctgcagagatcctagatggggacgttgctatgaaagctatagtgaggaccctaagattgttcaagcaatgactgaaattattcctggtttgcaaggagacatcagtgacaattccagaaagggggttccctttgtcgctggaaagaacaaggttgcagcttgtgctaaacactatgtaggagatggtggcacaaccaagggcattaatgagaacaatactgttgtcagctataatgggttgcttcgaattcacatgcctgcatatcatgactccattgtcaagggggtttcaacagtaatggtctcctactctagttggaatggccaaaagatgcatgctaatcattttcttgtcactgattacctcaagaacaaactgaagttcaggggttttgtcatttcagattggctaggcattgacaggattacttctccttctcattctaactattcatattctattcaagttggtgttggtgctggaattgatatgatcatggttccctttaatttcaccgaattcattgatgtcctgacttatcaagtaaagaacaatattatcccagtaagtaggattgatgatgctgtgagaagaatcttaagagtaaaatttgtcatgggcctatttgagaatcctcatgctgatataagcctggtgaaccaacttggtagtgaggagcatagacagttagcaagggaagctgtaaggaaatcacttgtgttgctaaagaatggtaagtctgctgagaagcctctgcttccccttcccaagaaagctgcaaaaatactggtggcgggaagtcatgctgacaatttgggttatcaatgtggaggatggacaattacctggcaggggggtgggggcaataatctcacagtcggtacaacaatccttgatgctgtaaaacaagcaattgatcctgctactaaagttgtctacaatgaaaatccggactccaactttgtcaagtccaacaacttctcttatgccatagtcattgtaggtgaacacccttatgcagaaacatttggtgatagtttgaatctgactataccagagccaggtccaagcaccatcaccaatgtatgtgggtctatacaatgtgtggtagttctcatcaccggccgaccagttgtgattcagccatatctatcaaaaatagatgcacttgtggctgcatggcttccagggactgaaggccaaggtgtaactgatcttctctttggtgactacggattcactggcaagttggcaagaacatggttcaagacagttgaccagctcccaatgaatgttggcgataaatattatgatcctctatttccatttggatttgggttatctacaaaccccacccggtactaaaaccattaatgagattactcaaaggtgtcacggttccttttctacaatgagactggcaattgatttacacgtgtacctttgtaatgaaagcgttagagaaactccatttagcactagaaaataagcatgctatttaaaatataatttactctggagccttggcaattttatcttataaacttggctttctaattggtttggtaacctc

SEQ ID NO: 10846 - DNA, 986 bp, Glycine max
  Clone ID: 700981519_FLI
aagaaaccaaaaagcggagaataaaccaaacacaaacacaaaaacctcccaggaaaaacgacaactatgtcaactccgaacactccgattcggattgtcccacgttgccaaccgccaccaccccgacaacctcggagccgaagaaaagagggagaaaaccgattctcggacgcgagactccggtaaaccacgtggaggcagagagacaacgtagggagaagctcaatcatcgattctatgcgcttcgtgctgttgttccgaatgtttcgaggatggacaaggcttcgctgttgtcggacgctgtcgcctacatcagcgagctgaaggcgaagattgagtacttagagtcgcagcagccgagagacagtagtaaaaaagtgaagacagaaatgacggatactctagataaccatagcaccacgacaatatcgacagtggtggatcaaagcgggcctgaacctagattgggcccaagcccgcttggtctcgaggtcgatgtgaaaatcgtggggcccgatgccatggttagggtacaatcagaaaatgtgaaccaccctggggcgaggctaatgggtgctttgagagacctagaatttcaggttcatcacgctagcatgtcttgtgttaacgatctcatgcttcaagatgtggttgttaagcttcccaatggaatgaggagtgaagagggtcttaaatctgcgattctgatgaggttggatcagtgacactggtgaggttattagctgtaatgtaactgtgagatgttgttgctgttcatagtagtcggtttttggtgtacgttatagataatttgtatttatcttttttgtttttttggggggtctttgtcttgcgtggtgcttgatgacggtggggttggctccaacctgcaattatgtgagggaatctaagaagcctgtcgtttatgttttgtatatataataatccttttggattttgaagttgatcaagaactagactagaag

SEQ ID NO: 10847 - DNA, 1303 bp, Glycine max
  Clone ID: 700981542_FLI
gccgccaatttcttctcctgtcatctaagatctctccgcacaaacacttcgaacgacaccgttttaggcttcgtcggattccgatcttccttttttcttcctcaagtcatggccacactcaagagcgtctgcttcagaggatccacctttcccgtttgcccctccaatttcacgaacactagaaacaccaggagctcatgttggaggcctacacaagcagctgtgaagtccaatttccatctcccaatgcgcagttttgagttaaaaaataggacttctccagaggacataaaggctctgagattgataactgccattaaaactccatacctacctgatggtcgttttgatcttgaagcatatgatgacttggtgaatatgcagattggacaaggggctgaaggtgttattgttggtgggacaactggtgaaggccaattaatgagctgggaagagcacataatgcttattgctcatacagtcaactgttttggtgggaaaattaaggttattggaaatactggaagcaactccaccagggaagcaattcatgccactgagcagggttttgctgttggaatgcatgctgcccttcacataaacccttactatggcaaaacctccttggatggtatggttgctcactttcaaagtgtgctttccatgggacccacaataatctacaatgtgcctgcacggaccggtcaagacattcctccgcatgtaattcaaaccttagctgaaagtgttaacctggctggtgtcaaggagtgtgtgggaaatgaccgaatcaaacagtatacagatgatggaattgttgtgtggagtgggaatgatgatcaatgtcatgatgctagatggggttatggggctaccggagtggtatctgttgcgagcaacctggttcccggtttaatgcgagaactcatgtttggcggtgtaaaccctactctaaattctaaactcttgcctctgattgactggcttttccacatgccaaaccccattggtttgaacactgctcttgctcaacttggggtcatcagacccgtttttaggctaccttttgtacctctccctgtggacaaaaggatagagtttgccaatttggtgaaggaaattggtcgagagcattttgttggaaataaagttgttgaggttcttgatgatgatgactttttcttggttagtcgttattaagctacattgtaagatcgttgtatcctttctaggggtttgccaaatttaaaatccagatgagtctattgtagtgaactagttaatgatcatttagtttcttttt

SEQ ID NO: 10848 - DNA, 528 bp, Glycine max
  Clone ID: 700981811_FLI
gcctaattatgttcgtgcttgggcaaatatgggtatcagttatgcaaaccagggtatgtatgacgagtccattcgatattatgttcgagcacttgccatgaatccaaaagcagagaatgcatggcaatatttgagaatttcattgagctgtgcttctaggaatgacatgttggaagcttgtgatagtcgtaatttggaccttctccagaaggagtttccactacagtaagggtgcgtttgagtgaacagcttaatcaagcgcttagtgaataagtacttatcatataagcactattgtataagtttttttttttttaataattgaagaggatatagggttaacttcttttcatataaactgtgagctattttttttttttagttttcccagcaagttaattgaaataagttgaaaatagcttatggacacataagctaattttataggttctctcaaacacttacagaagtgcttgtgtcataataagctattgataagcattttcaaatgcatattaaattttgact

SEQ ID NO: 10849 - DNA, 1337 bp, Glycine max
  Clone ID: 700981844_FLI
gctgactggcggaacatcaaacagcaacataatcctcaactgggaaaatttctctgcacgacatgtctgatgaacgagcagtgcatcctgattgccggaatgctagtaacccttatcatgaatgtagtgattactgttttagagtaatagctgaagccaaaattaggtcacaacaacaggaatcagaagttggacaagctagtggtggaaacaactctaagcaagccatcccagatgaatcctatgtggaaaaggaaatacacaatggcagacccgatcttgaagaaaactctgatagtgatcctgaccagcctgctgtgcaggaagcagagcaagaggttgactacacaaaactttctgcgagacagaaaaagtggatggagttgagatccaagatgcaagaagcaaaaaagcgtaatcaaattgaaatagctgctgagaaaaagaggatggaagctccaaccgagtctaggggtgtttctaaacagaagtggctcgaggataggaagaaaaagattggaaaacttcttgatgcaaatggattggatatgacaaaggcatatatgcttgacacacaggaggcagcagaagaaaaatacaagaaatgggagaaggatcctgctccatttgggtgggacgtctttaatcagaagacattatacaatgcatacaaaaagcggaccaagaatgttgaagtcgatgtagaagaatataatagaatgaaagaagctgatccagagttttaccgtgatgcttcaagtctccagtatggaaaggcaccaaaaatctcagaggagaagattgataggatggtacgggagctaaaggatagggatgagaagcgcaactcttttagcaggagaagacgcttccatgaagagaaagatattgactcaatcaatgaccgtaatgagcatttcaacaagaagattgagcgagcctttggtaaatacacgctggagattaaaaataatcttgagcgaggaactgcattgcctgactaaggtacttatgtagtgatgtgttttatttcacactgtcctgatagtgataagtttcagtggtggattgcactttttagagtgctttttaatcatgtaatactatagtctaatattttgcaatgcacatggagcattgcggagtcatttcgaacttcaaacattatatgcttgcttgagatatgggttcttcttagaggtactctttccagtcattatgtagatatggaatttatacctccccacgtatatgtaagtctgagtttgatcggggttaggtttttttccctctcctttcatttgggatcgtgatctaatgcatttgggatttaattt

SEQ ID NO: 10850 - DNA, 928 bp, Glycine max
  Clone ID: 700981968_FLI
gcaaaaaaccaattcaagatgaagataaagtctcatttttccttctccctaatgtttcttataggcatagccattagccacacacatgtttctttagcagaatgtgacaatgtgaaggactattgccctacaattcctccccaaaagcaaaccatattcctcaatggcttcccctgcgagaacccaaataacacaattgcacatgatttcaagagcatggaactaagcaagccaggttcaagagacaagttaggttcattagttaaaattgttacagcttccaagtttccggggctcaacgcactcggcctcgcgattggtagaagtgacattgaagtggatggccttgtgaacctccacaatcatccaagagccactgagatgatctatgtcagccaaggtgatgtagtcgctgcgtttcttgacactcggaaccagctcttccagaagattctcagggctggtgatgtgtttgtgatccccaaagggttgtttcacttcttgctgaatcgtggtgcacaagttgcaactgtgttctctgtgtttaacagccaaaatcctgggtcaggaccactcacttccataccttctgacacgttggaatcggttcagaagatcaagaggaaggttgtctcactttctgagtcagaacttgatggtgttagtgatttgacttctgcagtgttggatatcatttacagttaactattaattaaagagtattatatcatgattcatgactttctgtaatttgttgcacggtactactatttatatcatgtgtttgtggtcttgtggctaatgtaatatcacaattgcatttcactttatagtttctagttttatgacaatgtaaggcactttattgtgtaggccattgcatcaattacattctggagagtcataccatcttggaaggactttaacc

SEQ ID NO: 10851 - DNA, 970 bp, Glycine max
  Clone ID: 700981983_FLI
gtttccattgccgcgacatctgaattcctccttgtcactcataatcaccaaatagaagccataaacaaatgaatgccatagcagcagaacaagtgctggagccatggcacaagctagacgacaaagtcgttttggtgacgggtgcttcctcggggctcgggcgagatttctgcatcgacctcgccaaagctggctgctgtgtcgtcgcggcagctcgtcgcctcgatcgcctcacttccctctgccacgaaatcaaccaccgatggccctcgaacgtcggaatccaccgcgcggtggcggtggagcttgatgtcgccgccgatggccccgccatcgacagggctgtgcagaaggcctgggacgcctttggccgcgttgattccttgattaacaacgctggtgtcagaggaagtgttaaatcacccttgaaattgtctgaagaggaatgggatcatgtcttcaagactaacctaactggttgttggttggtgtcaaaatatgtatgcaaacgcatgtgtgatatccagcttaagggatcaattattaatatttcttcagtttctggtttaaatcgggggcaattgcctggagctgctgcatatgcatcttcgaaggcaggggtaaacatgctgactaaggtcatggctatggaattggggatgcacaaaattagagtaaattccatatcccctggaattttcaaatctgaaataactgaaaatttattacaaaaagattggctgaatgatgtggtcaggaaaataatgcctttgagaagattaggtacttcagatccagcattaacatctctagctcgttatcttattcatgattcttctgagtacgtcacgggcaacaattttattgtcgattatggaggcaccttaccaggtgtaccaatttattcttctctgtaaattttggtacattatgcactaacgaaaagtaatactatgaattattccattac

SEQ ID NO: 10852 - DNA, 775 bp, Glycine max
  Clone ID: 700981986_FLI
ctccttcaccgtcgctctctccaacgatcacaacaacatcgtcatcccatggcaaacgccgcatctggtatggcagtccatgatgactgcaagttaaggtttttggagctgaagacaaagaggacacaccgtttcatagtttttaagattgaggagcagcagaagcaggtcattgtggagaagcttggtgagccagcccaaggctatgaagatttcactgccagccttcctgctgatgagtgccgttatgctgtttatgattttgagtatctgactgaagggaatgtccctaaaagcagaatttttttcattgcatggtcccctgacacatcaagggtgaggagcaagatgatctatgcaagctccaaagacagattcaagagggagctggatggaattcaagtagagctgcaagcaactgatcctactgagatgggtcttgatgtgttcaaaagccgggccaactaaaatgattatagaaaatagtaggctttctggtgggagcagcactccttaagccttagttactcatggaaaatatcctagtttgtgggatggtcaacttgggtagttatggtcccaaactctcaattttccaagttgtggcataaattctattgcaccttttaacaagctttgcttgttccagtgtgttttattatgatttgtgatttatacgaccttgcgtttgagtgccattttagtcgtcttatcccttactagttgaatttgtaactgtttgtgttatcagacaaaaaatggggtttcttcactt

SEQ ID NO: 10853 - DNA, 960 bp, Glycine max
  Clone ID: 700982320_FLI
cttgtctctctctctcctgaaggtaaggcagagaagagaagaagagaaggaaagaggcttgtccctggagaaaagaggaggcaaatacatggagaacgagggtgtaaacacggtggtggtggagcaacaacctgtggcatccacgtccaagtttccgttgagcttttgggaaaccacggtggcttcaacggtggcgctggttttcgcggtgggccttctcggcgtctacctcaccatgcccgattccgattacagcttcctcaaactccctcgtaccctccaagaccttcaactcctacgggataaccttgagagctatacaagtgactacactgcacaagtcttggtggggtactgcgtggtatatattttcatgcagactttcatgattccagggactgtgttcatgtcattgcttgctggagcactctttggagtctttaaaggtgtggctctggttgttttcactgccactgcaggagcttcttcatgctatttcctgtctaaacttattggacgacctattctgtcctctctctggcctgaaaagttgaaattcttccaaacccaggtagctaaaagaagaaagggtttgttgaactacatgctttttctaagactgactccgaccctgcccaacacatttattaattttgcttctccaattgtggatgtgccttatcatattttcttcttggcaactgttattgggctgatacctgctgcctatgtcacagtcaaggctgggttggctcttggagagttacaatccgtgggtgatctctatgatttcaactcaattgctactttgtttctcattggtgtagtttcagtcacacccacactaatgagcaagaacgaatcatagcatttcagaagccaagaatctttgtgaatgaaggaagcccttgttctcctgacaactaatatcagctcagtatttgtacagatctccaaaac

SEQ ID NO: 10854 - DNA, 871 bp, Glycine max
  Clone ID: 700982488_FLI
ctcatggtgttagcatgagtcccatcaaaggtacacaatccaatttgtgagcagatcttttttggctttgatgggactcatggtgttagcatgggtatcgagagtgtggtggataagaatgaaaaaaaatcatctggtggcattcgggatgctggttgttctgcatgtgagatggctgttatttggatgcagaaccagctgaggcagaatcagacagaagataggataatagactatgccaatgagctttgtgaaaaattgcctaacccaatgggaccatcatccgttgactgtggaaagctctcttcaatgcctattgtttcctttactattggtggaaaagtttttgacctttcccctgaggagtatatactgaaggtgggtgaaggtcctgaagcccaatgcattagtggctttactgctttggatgttcctcctcctcgtggtcctctatggatccttggagatgtcttcatggggcgctatcacaccatctttgattatggtaagttgagagtcggatttgctgaggcagcatagagaatgttctcatgtctctcagggcagcaaccgcacttttctagtagtttattttcggttcagaaaattggttataccaaacaatatattacatcatggaagcacagttgtgcttccatactgaatattttcaatcgttatctgcttatagtttgtatacctttgcaatcagaatgtgcctaaaattgtggttgtatatattaatatcctcacagtccctcccccaatgtattgaatagcttagcagatgaatgtggggtagtgtggctgttaggctatgtatgcttccttagttgaatggtgtgaatatgacttttgtgattccttattt

SEQ ID NO: 10855 - DNA, 1729 bp, Glycine max
  Clone ID: 700982534_FLI
atttgattggtgcggaagcaacccaatgcccccagagttttggatccttccatcttttcttcctatgcatccagctaagatgtggtgttactgtcgattggtatacatgcctatgtcttacttatatgggaagaggtttgtgggtccaatcacaccactcatcttacaattaagagaagagttgtttactcaaccttatgaaaaagttaattggaagaaagcgcgtcaccaatgtgcaaaggaagatctttactatccccatcctttgatacaagacctaatatgggatagtttatacatattcactgaaccgctacttactcgttggcctttcaacaagttgattagagaaaaggcccttcaagtaactatgaaacatattcattatgaagatgagactagtcgatacataaccattggttgtgtggaaaaggttttatgtatgcttgcttgttgggtggaagatccaaacggagatgctttcaagaagcatcttgcaagggtcccagattacttatgggtttctgaagatggaatgaccatgcagagttttggtagccaagaatgggatgctggctttgctgttcaagctttgcttgccactaacataattgaagaaattggtcctacgtttgcaaaaggacatgatttcatcaagaagtctcaggtgaaggataatccttttggagattttaaaagtatgcatcgtcatatttctaaagggtcttggacattctctgatcaagaccatggatggcaagtttctgattgcactgcagaaggtttaaagtgttgtctacttctatcaatgttgccaccagagattgtgggagaaaagatggaacctgaaagattatacgattcagtcaatgtcttgttgtcgcttcagagtaaaaaaggtggtttagcagcatgggagcctgcaggagctcaagagtggttagaattactcaatcccacagaattttttgcggacattgtagttgaacatgaatatgttgagtgcactggatctgcaatccaagctttagttttgttcaagaagctatatccaggacataggaagaaagagatagaaaatttcattaccaatgcagttcgattccttgaagatacacaaacagctgatggttcatggtatggaaattggggagtttgcttcacttatggctcttggtttgcacttggaggtctagcagctgctggtaagacttacaccaattgtgctgccattcgcaaagccgttaaatttctacttacaacacaaagagaggacggtggatggggagagagttatctttcaagcccaaaaaagatatatgtacctctagaaggaagccgatcaaatgttgtacatacagcatgggctcttatgggactaattcatgctggacaggcggatagagaccccatgcctcttcaccgtgctgcaaagttgctcattaattctcagttggaagagggtgattggccccaacaggaaatcacgggagtattcatgaaaaattgcatgttgcattatccaatgtacagagatatttatccaatgtgggctctagctgaatatcgaaggcgggttccattgccttccactgaagtttaatttagaatggtttgagcacgaaaaggcaaaggcattttcattaagattgaggcaaataagttgtgtgtaatcaagcttaatcaattttttcatattcctatgtttatttcctacatatattggtag

SEQ ID NO: 10856 - DNA, 1744 bp, Glycine max
  Clone ID: 700982626_FLI
aattggggcaaacacaaaccctaacatgcttctcacaccaaattaggttagctatgaagattgaagaggaattagtatagtgatgagtgttttcgacaagtgacaggtgattaaggaagtaggtgtctctgaactatgtttctaaaatgttttggccactcaagttcatcacagagacagtatccaacaataatagaagagctgtgccatcaattttctcttgccgatcttgggaaatcaaccaacaactttgatcaaaacagagttattgggcgtggagcatttagtacggtatacaaaggttgtctccaacataaagatggttctgattatacagtcgcattaaaacggtttcatgaaggatacagtgcagtgttcaagaaagaaatagagttgctctgccagcttcgccaccctaattgtgtttctcttattggattctgcaaccatgagaaagagaagattattgtctacgagtacatgtccaatggatctctagatagacacctactacgtgggaaactgtcatggaaaaaaagggtagagatttgcataggagtagcgtgtggattacactaccttcatgctggagccaagcgctccatctttcattgtatcctcagagccagtaccattcttttggatgaagacaaggagccaaaactcgcaggattcggccttagcatacagggacgcaatttaattcgaagaagccgaaacaaattaatgcagatcatattatgggtactcttggttacatgcctttggagtatgtcatgaatggttctgtcactgataaatgggatgttttctcatttggtttggttctgctacgagttgtgtgtggaatggattatttcataatggcagcagagaggaaacttatggagaagcctgttgaagagaatattgattcgaatatcaaaggaaagattgcaccggagtgttggcaagtctttatagatatcatggtcagatgcttggagtatgaaccagatgagcgaccagcaatgggtgaagtggaggtggaacttgagcatgctctgtcgctgcaggaacaagcagatatcacaaacactgatggtgattataacttattgtccaaaaccattattcccattgcccgtggtagtgaaatgaaagagtaatcctaaacagaagacagtgatacatactgaagaaatgtaggtgattaggacaactgaaattaaggtgatatattttataagaaaaaggattatacattgacacagcatatcatctcttgctgccaaattttgactatgagactgactgccaagacctcaccaatacttggaacaaacccaaaaaccagaactctacatattatgctacaattctgcaggactgccgccaaatgttggccaattctcagcatattttaattgttcattcaaagaaagaagcaaattgtgtagcacataggctctctagattagcttttactacttctgaaagatactggatggaggatgtttcatcccagctcagttttgatgtgcagcatgatttagggacaatttttgttcctgatacctcttaatgaatcatctcaaaaaaaaggtttggggggagggggatgtaaggataataaatcttagatcctattttgggctgaaattaacatgggaagggtaagatgcactagtggcaccaattgatatggattactatttatgcttaccatttgcaagaaatagaacaatacatctgtatatacgtt

SEQ ID NO: 10857 - DNA, 1504 bp, Glycine max
  Clone ID: 700982933_FLI
aggatagataggttctagcctttctgttatcattttcgaaagaatctgtagcagtgtaagtaccaaattgaaatggttagattttgtttagaaagcagttatgaacgaaactttgaagcttagaaaagcggttaggtagctaggttgagttccagatctggtagagaagttcatcatggcgccgttaccggcggagcaaaccggtgaatcagcgccgacggagttgcagagatccattccgacgccgtttctgaccaagacgtaccagctcgtcgatgatccctccgcggatgacctaatttcctggaacgaagacggcaccagcttcattgtatggcgacccgcggaatttgcaagggatttgcttcctaagtacttcaaacacaacaacttttccagtttcgtccgtcaacttaacacctatgggttccggaaggttgtccctgaccgttgggaattcgccaacgactgtttccggcgaggcgagagagctcttcttcgcgacatacagcgccggaaattactgccggttccgcctgcagccgcggcaccggcagcagtcacagccaatacggtgacggtggctgtggcagcaccggcggtgagaactgtgtctccaacgacttccggcgacgaacagccgccagcagttagaatcctccacaagcgctgtgaggaccgtgccggtgccggacgggaaggcgccgctggagcttttgcccgcgaaacatgtttcatcggctgatgacgccctgcatgtcggtggcgccgccggtgccgcggcgtgcgcgacggggaacgcggcggaagcagaggttccgaagctgtttggggtttcgattggactgaaacgatgtaggacagagtgcgaggccgaaccagaaggagaagatcagaatcagatgcaaacgcgagcacaaacacaatcacaatcgtcgcaagaaccagatcacggttcagatgtgaaatctgaaccgcttgatggtgatgattcggattatcaggatcatgaccctcattggttggagctatagggaaatgaaatgatgctcctcttcttcttgatctctctactaatttggtgaaatcacagtgcgccctcgctgcctgtactattagtgctgtgccgctgccattgggccggcacgtgacttggccatgtatttaactcgcggttggggtgaaaagtgcgaaacattgtactataaggaattatgtattcttctgattgctgggggttaaagaaagattatcatcgcgtcaaaatggagtaactgaagcaagggaaggacagacccctaaaagactcacgtctcggttttttatttcaaggaacatttgttggatacagcaaaatgtgtagatatttgtgtctgacatcattaaattttcgaatttgattcgtgtattgtaatgtttccatcctttgaaccaagtttgttcctaagcttcataattgtagcatgtatgttcttttaatgaaatgaaattctaatattatctt

SEQ ID NO: 10858 - DNA, 1100 bp, Glycine max
  Clone ID: 700982935_FLI
gtgggaatgataagagagcaagagttgatggaaaacagcaacaacaacaacaacaacaacaacgctactactactacaccgacgaatagcagcaacagcaacactaacgcgaacaccaacaccaacacgaccgaggaagaggtgagcagggataacggagaggaccagaaccaaaacctcggcagccacgaagggtcggagcccggaagcagcggtcggaggccacgtggcaggccagcggggtccaagaacaagcccaagccgcccatagtcataactaaggaaagccccaacgcgctccgaagccacgtcctggaaatcgcctccggcagcgatgtcgccgagagcatcgccgccttcgccaaccgccgccaccgtggcgtgtcggtcctcagcgggagtggcattgtagccaacgtcactctccgccagcccgccgcccccgccggcgtcataaccctccacgggaggttcgagatactctccctctcgggtgcctttttgccgtccccctcgccgtccggcgccaccggactgaccgtctacctagccggcgggcaggggcaggttgtcggcggcaacgtggcgggctctctcgtcgcctccggaccggtgatggtgatcgccgccactttcgctaatgccacttatgagaggttgcctctggaggatgatcaaggtgaggaggaaatgcaagtgcagcagcagcagcagcagcagcaacagcagcagcagcagcagcagcaacaacaatctcaaggtttgggggaacaggtttcaatgcctatgtataatttgcctcctaatttgctacacaatggtcagaacatgcctcatgatgtgttctggggagctccacctcgccctcctccttccttctgatcacccttgccaatatgatcatgtctttaatctctcactgacttgcgaattaagtactatgttaattaatttctcacggtttttcttgcaagcatagctagctagctagcaaggttagttattaggatggttttgttaatttgtgcttcttagagactcgagtcaagtagatgatgttcttatctttaatatactttgtagtactactggtttgttta

SEQ ID NO: 10859 - DNA, 1530 bp, Glycine max
  Clone ID: 700983042_FLI
cagggcgcaaggtgttgagtgtactcggcgtcgagatcggcgaagctgtttacgatgacgccgtgacctcttcttcgtctcaaacctcttcgttccttcgattcattccatttcttccaaaatggccaaagacccagttcgcgttctcgtcactggagccgcagggcaaattggatatgctcttgtccctatgattgctaggggagtgatgctgggtcctgaccagcccgtgatcctccacatgcttgacattcctccagcagcagagtcgttgaatggggttaaaatggaattggtggatgctgcattccctcttcttaaaggtgttgttgctacaaccgatgtggttgaggcatgcactggggtcaatattgcagtgatggttggtggattccctagaaaagaaggtatggagaggaaggatgtgatgactaagaacgtctccatttacaagtcccaggcttctgcccttgaaaagcatgctgctgccaactgcaaggttcttgttgttgctaacccagcaaacaccaatgcattgatcttgaaagaatttgctccatctattcccgagaaaaacatttcttgtttgactagattggaccacaatagggcactgggccaaatttctgagagactgaacattcaggtttctgatgtaaagaatgtcattatctggggcaatcactcatcaacccaatatcctgatgttaaccatgcaactgttggggagaagcccgtccgcgagcttatagctgatgatgcctggttgaatggtgaattcattactactgttcaacaacgtggtgctgcaattatcaaagctagaaagctttcaagtgcactatcagctgctagtgctgcttgtgaccatattagagattgggttcttggaactcctcagggcacctgggtgtcaatgggagtatattctgatggttcctacaatgttccagctggactgatctattcattccctgtcacttgtgccaatggggaatggacaatagttcaaggacttcccattgatgagttctcaaggaagaagttggacttgaccgcagaagagctttctgaggagaaggcattggcttactcatgcctaaattagagaccatcgctccttcttggctactgtccttgttagtaggttcccatggtttgcccacagaagtgtagcttcaattttgaataatgctccttctaagataccaaggaactatcactcgagagagtttgtctttcattggaattacttgtatttcaacatctaatccttttaggaggatagtatatttgagctttacagttttagtcatggaattagaccatgggccgcatattgaattttggatcagtcctctaattttatgtgttagtgccccttttttatggctagaactttttgctgtgtttgtggtggctgtacaagatttcttgatgtatgtgggatgcacaagcgtgcaaactcatacgtagagtattatgcactgctattacgcaataaggtcatcatggattatttttagctct

SEQ ID NO: 10860 - DNA, 1705 bp, Glycine max
  Clone ID: 700983044_FLI
ctctctctctctctgtatatatatatgcacgcaaatatatatgtgtatgaatctgcacttcatttcaaatcccaacaaaaaaccaaagtaatctaacaaagtaagcacaatgagggagatattgcacgtgcaaggtgggcaatgcgggaaccaaatcggttccaagttctgggaagtgatatgcgacgagcatggcatcgaccccaccggaaagtacaccggcgacgaggcctccgatctccaactggagaggatcaacgtctactacaatgaagcctccggcggaaggtacgttccccgggccgtcctcatggatctcgagcccggcaccatggacagcatcagatccggcccatacggcaagatcttccgccccgacaacttcgtcttcggccagtccggcgccggcaacaattgggccaagggccactacaccgaaggcgccgagttgatcgactctgtcctcgacgtcgttcgcaaagaagccgagaattgtgactgcttacaaggttttcaagtgtgtcactcacttggaggaggcacgggttctggcatgggaacactgttgatatcgaagatcagggaggagtacccggacagaatgatgctcacattctctgttttcccatccccaaaggtctctgacacggttgtggagccttacaatgctactttgtccgttcaccaactagtggagaatgcagatgagtgcatggttcttgacaatgaagcactctatgacatttgcttcaggaccttaaaactcaccactcctagttttggtgatctgaaccacctgatttctgcgacaatgagtggagtgacatgttgcttgaggttccccggacaactgaactccgacctgaggaagctagcagtgaacctgatcccattcccacgtctccacttcttcatggtggggtttgcacctctcacctcacgcgggtctcagcagtacgtgtccctcactgtccccgaactcacccagcaaatgtgggacgccaagaacatgatgtgtgccgccgatcctcgccacggccgatacctgacagcatcagccatgttcaggggaaagatgagcaccaaggaagtggatgagcaaatgatcaacgtgcaaaacaagaactcatcctacttcgttgagtggattcccaacaacgttaagtcaagtgtgtgtgacatccctcccaagaacttgaagatgtcgtgcactttcattggaaactccacctcaattcaggagatgttcagaagggtgagtgagcaattcactgcaatgtacaggcgcaaggccttcttgcactggtacaccggggaaggaatggacgaaatggagttcactgaggcagagagcaacatgaacgatttggtagcagagtaccagcaatatcaggatgctactgctgatgaggatgagtacgatgatgaggatgagtacgatgatgaggatgaggatggggagcatgctttcgaggaccagtaaattgttcatcactaccttgttttaattactaaatttgctgctagtagtcacgtatccaaggttttaaaacctgttgatatcacaaacaaatcctgttgatatggtcccaattgcgatcacaactgcggaaagtattttaaaaccttaatgtatctatgcctgtctctgtactttttttccattctacctatttctcctatattttagttttaattgagtatt

SEQ ID NO: 10861 - DNA, 1136 bp, Glycine max
  Clone ID: 700983262_FLI
gttgtaagagacctaacactgttggatatacttgaagtatcagcagcagcaccacaaaaattattcagaagaaagcactttgattgtggatagttcagatgtgaaaaatgatcttatgcctgcaatcatggtcaagggaaaagatgaattttctaaccattttacatcatcttttgatggaaatgcaagcttattgattgacaaggcacaacaggaaaaggctaatagtcatatgcagcctattggtggaccaaagctctctagctcaagcaagaaaagaacaagagttggtaacaaccaaaagtcaaggccaagagatagacagctgatcatggacaggatgaaggagttgagagaacttgtcccagaaggtggtaggtgtagtattgacaacctcttggaacgtaccataaagcacatgctgtacttgagaaagataacaagccaggctgagaaactgaaacgaattgctaatcgggcggttcccgagtgcaaaagacagaaagtcaatgctagccacccaggaaggagctgtgcatttgactttgaaagtgaagtatcctggcctatagtcatagaagatctggaatgctcagggcacatgctcatagagatgatatgcaacgagcatggactcttcttggagattgctcaggtgatccggaagctggatgtcatcatcttgaaagggatcttggaaaactgttccagcaacagttgggcttgtttcattgttgaggttccaagaggttttcacagaatggatgttctatgtcctttactgcatcttctgcagcttaggagaaaccctgtctcttgtaaaagctgaccctaccatgccagttctcagtttcaaactgcaacttctatttaaagaagttacaataatattcaagagggccttcttttgtgtaatgctgtaaatgattgtgttcatgccctcgttagtgtacttgctgcattttggtgttgattataagctagtacctaaatttatgtaaacaaaaaaaggacactttaggggtgctactggctgcggaacaatatgcctagcaggcagtagctatctttgaactcatttctggtgtggcattatcatcatgacctaaatagataactatgggagtgttagctag

SEQ ID NO: 10862 - DNA, 1236 bp, Glycine max
  Clone ID: 700983461_FLI
catcattcatggctccccaaaccatttccattcactaccacaccacccgcttcttacctcaacccgatgtcttcattcgcacttcccacggaacacgcattccagcccacgccggcattctggcttccatgtcccctgtttttgacaactttatagatcgcccacgtaagcatcggagctccgagagaattatccaaatccacggcgtcccctgcgacgccgtcaccgccttcgtcggattcctctactcctccaggtgcacggaggaggagatggacaagtacgggatgcaccttcttgcattgtcgcacgtgtacatggtgccgcagctgaagcagaggtgcatcaagggtttgacccaccgcttgaccacggagaacgtggtggacgtgcttcaactcgcgcgtctctgtgacgcgccggatctccatcttcgctgcatgaagctcctcgccaacaatttcaaagcggtggaagcaacggaggggtggaagttcctcgtcaaacacgacccctggctcgaactcgacattctccgcttcatcgacgaacacgaaaccaggaaaaagaaatcgaggaagtataggatggagcaggggctatacgcggagctgagcgaggcgatggagtgtttggagcacatatgctatgatgggtgtacccacgttggaccgtacgatgctgcggaggtgaagagggagaggacgccgtgtgggagattcgccacgtgccaggctcttcaggttctgatccgccactttgccacgtgcgagaagaaggtgcgcggcggctgcgtgcggtgcaagcgaatgtggcagctctttcgactccattcctatgtttgtcaccacaccgattcctcctgcaaggttcctttttgcaggcaatttcaattgagaatgcagcaagagaaacggaaagatgatgctaagtggaaactactagcgaggaaggtggcctcagccaaagtcatgtcttcattgtctctgccaaagaggaagcgagatgaagaaacaagagtgaatataaacaatcccgggattagaagttttaaattactatgaatattgtaatgaataatgatgtataggaaggacggtgtgtttcgtgttacatacttgatagagcagtttctacagggagagaatattctgcttttgttctgtgtaaaagcaggtttggatagtgtgaacaacttcttgtacctgaatggcaaattgttgagtcttagcttgg

SEQ ID NO: 10863 - DNA, 1033 bp, Glycine max
  Clone ID: 700983655_FLI
gtcgacgagggcatcaccggctaccgcgacgactctctggaaactgttcaccggaaccagattcagtacgggctccctctcaaagttgtatcttacaaggacctctacggatggactatggacgagatcgtgcgagtgattggtttgaaaaacaattgcactttctgcggcgtcttccgtcgacaggcccttgaccgaggtgcttctctcttgaaagtggacaaagtcgttactgggcacaatgccgatgatattgccgagaccgtcctcctcaacctcctccgaggagatgttgccagattgagtagatgcacctctataaccaccggtgaggatggccccattccccgatgcaaacctttcaagtatacttacgagaaggagattgtcatgtatgcttatttcaagaagctcgattacttttccaccgaatgcatttactctcctaatgcatatcgaggttttgctcgcgagttcatcaaagatttggagagaatcagacctagggccattctggacatcatcaaatcaggggagaatttcaggatttctactagtaccaagatgccagagcagggaacatgcgaacgctgcggttatatttctagtcagaaatggtgtaaagcttgtgttctgcttgatggactgaatagaggtttgcctaaactggggattggacgaagtcgtggcagtgttgcttctgataatggaaatgaaagtaaagtagaaaagagcatccagggcaaacaatgtacaactctagacttctgatttcccacatcacacctatcagcgagacgaggcttcctgttcctgaaattcagggtttaaagaaaagttgcactgtttccagattattactagtcaatttaatcatatatctttagctttatttctgtgggcaacggtcatgttgtcatttgtacaccaagtcggcttctcataatcaatggatactaatgctctggtggagagaaagtgagcgaagaaaaaaaaaaatagaaggaaataaatatttgaaattttgtggttg

SEQ ID NO: 10864 - DNA, 776 bp, Glycine max
  Clone ID: 700983756_FLI
gtttacgacgtgaagcacatgatgaggttctgtgacacgctctacggtaggttacggcgcgtcaagatcttcaccaccgcaaccgtccctccgaccactaccgcctcctcaagtccaacgttgacgctctcaacctcatccaggtcggcctcaccctcaccgacgccgccggcaacctccccgacctcgccggaaaccgctccatctgggaattcaacttccgtgacttcgacgtggcgcgtgacgcctacgctcccgactccatcgatcttctccgtcgtcagggcatcgatttcgcgcgtaacaccgccgacggcgtggattccacgtgcttcgcggagctgatgatgtcttcggggctcgtgtgcaacgacgccgtgagttgggtcacgttccacagcgcgtacgatttcggttacttggtgaagatcttgacgcgccgtaacctaccgacgaggttggaggaattcttgaaaaccgtgaaggtgttcttcggagataacgtttacgacgtgaagcacatgatgaggttctgtgacacgctctacggcggattggaccgcgttgcacggacgcttaacgtggaccgcgccgtagggaagtgccaccaggccgggtcagacagcttgctgacgtggcacgccttccagaagattgttgacatttattttgtaaaggaagagcaccgaaaacatgccggtgtattgtttggactataggcattctgttaattataataacataaaaataataaaaattcaattgattgattattt

SEQ ID NO: 10865 - DNA, 1687 bp, Glycine max
  Clone ID: 700983857_FLI
cagatacagtcagtcacaaacatctcatctccaactcaccagaccatgataattgatacatacaaacaattgcacttaactcattcattctcttctcttctcttctcttctcttctcttctcttcagattatagaagggatactgcttctccataaacctgcaatgcgatagattaccaggattagaggttagagaccaaaaatggtaaaatcaacatatgagaaattttcaaaggactttgtgatggggggagtagcagcaatcatatcaaagagtgcagcggcaccaattgagagagtgaagcttttattgcaaaaccaaggtgaaatgattaaaagaggacagctcaaaaaaccatacttgggtgtgtctgatggctttaagagggtcttcatggaagagggtttgattgccttttggagaggacaccaggccaatattatccgatatttccccacacaagcagtgctgcaggagcgactacatcactacttctgtatcatttagattatgcacgtactaggttgggcaccgatgcaatagagtgccgtgttaccagtcaacgccagtttaaaggactaattgatgtataccggaagaccttatcaagtgatggaattgctggcttgtacaggggatttgggatttcaatatggggaatcaccttgtatcgagggatgtactttgggatctatgacaccatgaagcctattgttttagttgggccttttgaggggaagtttcttgctagtttcttattaggttggagcatcacaactttttcaggggtttgtgcataccctttcgacacattgcgccggcgaatgatgctcacctctgggcatccaaacaagtactgtactgcaatacatgcatttcaagagattgttcgacaggagggtttccgagctctatttcgaggagttaccgcaaatatgcttcttggcatggcaggagctggggtgcttgctggatacgatcagctgaaccgtatctcatctagacacagtcactataatgagacaaaccaaagagttctgaaatgaatgcccgagtaggaaagaaatgcctaacctaaaagaggcatattcatcattttgaatgaatagtatgcctgttcatttcaaaagtttggtctgaaggaccataacataataaacgaacttttggacatgacagcggaaggtatttgttctggttcaataattaatcacatttaacgtgtccaaaagaatgttttttttttttttttctaaagggagttttgcattttgggaccttaaaagtcatactatggctgttcatttcaaaagtttggtctcaaggactataacacaataaacaaacttttgggcatggtgaccaaaggcatttgttctataaaccaaactatagttcgatctttgaacatggtaaacttgatttttaggtccttaaattaaattctcccttttttagtggcgatttttagaattggaatactctactgcctcattgtaaatttaactccccatttagaaaaaaataaataaataaataatttgcttggggcgagggttattggaaacgtttcaagactgcaaagcactcagccaacctgtctgtttctattaatgctgtatatatgaagtttacgatgtacagtttacatccccagtttcagttatattattaacatcattgcac

SEQ ID NO: 10866 - DNA, 1399 bp, Glycine max
  Clone ID: 700983863_FLI
acctcgccatgttcattactccgctatggattgcggttatcgtcggcgtcgtcgtgggctgggcgtggaagcccaaatgggcctttcaccccaaagacgctcttctcaagtttcgctctcctcgccctcccaatccccaaaacgacaccgcttttacctactccgccaccagttcctccgcgcgtgagaaagacgcgagtgggagtcctgtggtgacggaagacgatttgctgcatctgtggaagttggttgaggaaaaagacggagggcgggcatggattcagatgatggaccgttctaccccgaccatgacctatcaagcgtggcgtagggatcctgagagtggaccgccgcagtaccggagcagaacggtgttcgaagacgcgagtcctgagttggtgagggatttcttttgggatgatgagttcaggttgaagtgggatgacatgcttatacatgcttccaccatacaagagtgtgtcctcactggaacaatgatggtgcactgggtgcgcaagtttcccttcttttgcagtgacagagagtatataattgggaggcgaatttgggacgcaggacgaatttactactgtgtcactaagggagtaccttgcccctccatgccaaggcataataaacctaaacgagttgatttattttattcaagctggtgtattcgtgcagttaaatcaagaaaagatgaccagctgacttcatgtgaagtgttattgtttcatcacgaagatatgggaattccctgggaaattgctaagcttggagttcgacagggtatgtggggagctgtcaagaagtttgatccaggactacggacatatgagaaacaaagggtttctggtaccccattgtcaccctgtgcacgtgctgctaagatcaacactaaagtaaccatggactatgtgaggtctctggaaaacacgaccagtgacttgttggagactgaaaatcaggattcttctgacaaaccaggtggaaggaacatacctaagcttttaattgttggtggagccattgcccttgcctgcactcttgatcaaggactactgactaaggcagttatatttggagtagcccgaaggtttgcaaaaatgggaggaaggaggttgtgatacattatgctttttgctttgagaaattgccaggccagccaattccctctggcagtagaattagaaattgagatgtcacttcttgctttggggcaaatgtttattctggatctagttggcagccatggttcaagaagaatggtattattctttctccatttgtttgatctatgaggcggcttttaactggaaatagctacattgtatctttatgtcattaaaaaaagattgtcatgctgcaggaataacatcaatattcaggtttttctttt

SEQ ID NO: 10867 - DNA, 837 bp, Glycine max
  Clone ID: 700983879_FLI
agtgatttcagtgagtgatcggtgttcacttgatctcatcataatcgtcagcgtcaattgaagaagatgccgatcagaaacatcgccgtcggaaggcctgaagaggcgactcaccccgacacgttgaaggcggctttggctgagttcatctcaaccttcatcttcgtgttcgccggctcaggctccggcatcgcctacaacaagctcaccgacaacggcgctgccacccctgccggcctcatctccgcctccatcgcccatgcattcgccctcttcgtcgccgtctccgtcggcgccaacatctccggcggccacgtcaaccccgccgtcaccttcggcgccttcgtcggcggcaacatcaccttcctccgcggcatcgtctacgtcatcgcccagctcctcggctccatcgtcgcctccctcctcctggccttcgtcaccgcctccactgttccagcattcggactctccgctggagttggagttggcaacgccttggtgttggagatcgtgatgaccttcggtctggtgtacacggtctacgcaactgccattgaccccaagaagggtaatttgggaattattgctcccatcgccattggtttcattgtcggcgctaacattttgttgggtggggccttctctggagcggccatgaaccccgctgtgacatttgggcctgctgtcgtgagctggacctggaccaaccactggatctactgggccgggcctctcatcggtggtggaatcgctggccttgtttacgaggttgtctttatcagccacacccacgagcagcttcccaccactgactactagagggggggaaatgaaaat

SEQ ID NO: 10868 - DNA, 690 bp, Glycine max
  Clone ID: 700984068_FLI
attctggagaacaataatgatttgctgtttgatcttctaagccttcattttgtagaccttgtctgctctaaggaatgggcagaagctttggagtttgctcagaccaagttgagtccttttagtgtgaaggagcagaaatatatggaaaaaatagaaggttttatgtcccttcttgcttatgagaatccagtggaatgcccaatgtttcatctgattggcttagactatcggcaacaagttgtggatagtttgaatcaaactattctcgcacactttaaccttcccatccacactgccatggagcggcttatacaacagacctcagtagttagacaatgcttaagcctggaggatggggggcctccaccattttccttgaaggatattcttaaaagtcaatgaaaagcagttaaatatccactgggatgttgaggaatgaagcatgtgtacattgtgccttttttgccacataagggattggtgcatgcatgatttgatcactagtgtaaagttgtcttcgtatacttttgtataaattttttggtagcaggctatctagatctttcgggtcatattgcattctttaggtattagtgttccatgaaaatggagaaaattgcaattctaccggattaagataatattttctttctggggaatttgatctaattgtggccttaagatgtcgtc

SEQ ID NO: 10869 - DNA, 1227 bp, Glycine max
  Clone ID: 700984075_FLI
gcaagtcgaacggttgagacttgccactccaggtcagccaaatgggcttgttttctcctcctggacctccttgcagactctcgattagaaaccttccttcttaggcgcttcacatcaatagcgtttgtgctttgttcacaaggacctgcttcatcatcctcatcagatggctcacgtgaggaaccacttgtagtggtggtggccccttttacttgattatctctcgcgtttggtttattagcagacaatgggcaagtacgacaaatacgacgtcgaaaagcaccgcgatgccaatgtctccggcgacgatgcctttgccagactatacgcctccgtcgacgccgacatcgtggccttgcttcagaaagcagaaagtgcttctaaggagaaaggtaaggcatctgctgttgcgatcaacgcggagattcgtcgtactaaggctcggttgctggaggaggttcccaagttgcagagattggctgtgaaaaaggtaaaagggctttcgtcacaagagtttgctgcccgtaatgatttggttcttgcattgccagatagaatccaagcaatcccagatggggctcctcctgtgccaaaacaaactggaggctgggcagcttctgcctcccgtcctgaaattaagtttgattcagatgggcgatttgatgatgaatacttccaacaaagtgaacaatcaagtcaatttaggcaggaatatgaaatgcgtagaatgaaacaggaccaaggattggatgtgattgctgaaggattggatacattgaaaaatatggcacatgatatgaatgaggaactggatagacaagttccacttatggacgagattgacactaaggtggacaaggcatcctctgaccttaagaatacaaatgttagacttaaagacactgtgaaccagcttcgatccagtcgaaacttctgtattgatattgttttgttgattataattctgggaattgctgcctacttatacaacgtactaaagaaatgatatgtacaaaggctgatggatgttcgaatggtttgcctttacttgtattttgagaatatcgtctgattttattttttttatctctaccgttgtgaaaatttcctgcgaattgagaggcgtgcccttgtgctttataagcattcctgtgtatgcagtcatgtcagataccattagtatgttaaatagttgctgtgtattttatacacttgttgttttggtgt

SEQ ID NO: 10870 - DNA, 1362 bp, Glycine max
  Clone ID: 700984164_FLI
tgaatctcagaattctctaaaagagatctttttctgctctttgaagaaagaagggtctttgcttgattttggagatgtctctgctctcagatctcatcaaccttaacctctccgataccaccgagaaggtgatcgcagagtacatatggatcggtggatcaggaatggacctgaggagcaaagcaaggactctcccaggaccagttagcgacccttcagagcttcccaagtggaactatgatggttccagcacaggtcaagctcctggtgaagacagtgaagtgattttatacccacaagccattttcagggatccattcagaaggggtaacaatatcttggttatctgtgatgcctacactcctgctggagaacctattcccactaacaagaggcacgctgctgccaaggttttcagccatcctgatgttgttgctgaagtgccatggtacggtattgaacaagaatacaccttgttgcagaaagatatccaatggcctcttgggtggcctgttggtggtttccctggacctcagggtccatactactgtggtgttggcgctgacaaggcttttggccgtgacattgttgacgcacactacaaagcctgtatttatgctggcatcaacatcagtggaattaatggagaagtgatgcccggtcagtgggaattccaagttggaccttcagttggaatctcagctggtgatgagatttgggcagctcgttacatcttggagaggatcactgagattgctggtgtggtggtttcctttgaccccaagccaattaagggtgattggaatggtgctggtgctcacacaaactacagcaccaagtccatgagagaagatggtggctatgaagtgatcaaagcagcaattgacaagttggggaagaagcacaaggagcacattgctgcttatggagaaggcaacgaacgtcgtttgacaggacgccacgaaaccgctgacatcaacaccttcttatggggagttgcaaaccgtggagcttctgttagggttgggagagacacagagaaagcagggaagggatattttgaggacagaaggccagcttccaacatggacccatacgtggttacttccatgattgcagacacaaccattctgtggaagccatgagcaaaacctgcatgttttctcccttttggatggaaaggaacagttatgcttttcttagtaggatttggtctctctctctttttaccttttgattggtactatggttggtgccttgttggttggtgcaactaactggcaagggttgttcattgttttcttctattcctttccctcgttttccgattgttacaatgacaataatttaatggttattatc

SEQ ID NO: 10871 - DNA, 1989 bp, Glycine max
  Clone ID: 700984170_FLI
agcatttggtcacttgaagtcatcagattttctagcttatggaatcaaatctgtggcccaagatgtcttgcctgtgttgactgatgcattcgatggaaatcttttgagccttgagttcgataattttgctgaagtgcgcaaactctatgaaggtggagttacattgcctacaaactttcttagcaatatcactcctataccaataattaaggaactttttcgaactgatggcgaacagttcctcaagtatccaccacctaaagtgatgcaggtcgacaagtctgcatggatgactgatgaagaatttgcaagagaaacaattgctggtttgaatccaaatgtcatcaagattattgaggagttcccactaagtagcaagctagatactcaagcctatggtgatcatacctgtataataacaaaagagcatttggaacctaacttaggtggtctcactgttgagcaggctatccaaaacaagaagttgttcatcttagatcaccatgactatctcattccatatttgaggaaaataaatgcaaataccacaaagacttatgctacaagaaccatatttttcttgaaaaatgatggaactttgacgccattggccattgagttaagtaagccgcatcctcagggtgaagaatatggtcctgttagcgaagtctacgtgccttcgagtgaaggagttgaagcttacatttggttactggcaaaggcttatgttgttgtgaatgatgcatgctaccatcaaatcattagccattggctaaacactcatgcggttgttgagccattcgtcatagcgacaaacaggcatctgagcgtggttcaccctatttacaaacttctgtttcctcactatcgtgacaccatgaacattaattcacttgcccgcaaatccttggtcaatgcagacggtattatagagaaaacattcttgtggggtaggtactctttggaaatgtctgctgttatttacaaggattgggttttcaccgatcaagcattgcctaatgatcttgtcaagagaggagttgctgttaaggatccatctgctccccatggagttcgacttttgatcgaggactatccttatgcttctgatgggctagagatatgggatgctatcaagtcttgggtggaagaatatgtctcattctactacaagtcagatgaggaacttcaaaaagaccccgagctccaagcttggtggaaagaacttgtagaggtgggtcatggggatttgaaggataagccatggtggcaaaagatgcaaactcgtgaagagttggttgaagcttccgctaccctcatatggattgcttcagctcttcatgctgctgttaactttggacagtatccatatggaggtttaatcctgaataggccaactattagcaggagattcatgcctgagaaagggtctcctgaatatgatgcgttggctaagaaccctgagaaggagtttttgaagactattactggcaagaaagagaccctcattgaccttacaattatagaaattttatcaaggcacgcatctgatgagttctaccttgggcagagagatggtggtgactactggacttctgatgccgggccattagaggcctttaagaggtttggaaagaatcttgaagagattgaaaagaagcttatagagaagaacaatgatgagacattgagaaaccgctatgggccggctaaaatgccttacactttgctctatccttctagtgaggagggattgactttcagaggaattcccaacagtatctctatctaagggctctatggttgctgaagtactgtccctggctttaaataaatgtgaaatagaaggaatctgattccttcatcagttgtgtatgattaagttatgtatttggagtggctgaatgtacttgtatttgtcattaataaaccatgtttgtgtaatggaaaccaaaataataaatgcaatcatgcaggtttgaacttttt

SEQ ID NO: 10872 - DNA, 1890 bp, Glycine max
  Clone ID: 700984182_FLI
ggcgggaattgatgctacaaagtatggtcatagtcctgtgcacaaggccttagttttgaaggatcatggtgaactcaggaggatacttgctggcctcccacggctgcgtagcacggccgagattcgcactgaagcggtttcgattttagaggaagagaaggctgatgccatcgctgctgtgattgaccggcgtgatgtgcctaaccgtgatacccctcttcacttggctgtgaaattcggggatgaagtggccaccgagttgcttatggttgctggggcagattggagtttgcagaatgagcaagggtggagtgctcttcaggaagctatttgcagtagagaagagggtattgccaagataataattaagcattaccagcctctggcttgggcaaaatggtgcagacggttgcctcgcttggtagggaccatgcggaggatgagggacttctacatggagattacattccattttgagagttctgtgattcctttcatctcaaggatcgctccttcagacacatacaaaatttggaagaggggtgcaaatctaagggcagacatgactttggctggttttgatggtttcagaattcagagatcagatcagagcattcttttccttggtgatggttcggaagatgggaaagtcccacctgggtcactctgcatgatctcacacaaggaaaaggaggtactcaatgctctagacgatgctggctttccagcaaatgatgaggaggttcagcaagaagtggttgcaatgtctaaaacaaatatatttaggcccgggattgatgttacacaggcagttctgttgcctcagttgacttggaggcgacaggagaaaacagaaatggtagggccttggaaagctaaggtctatgatatgcacaatgtagttgtgagcataaaatctagaggagttcctggagccatgacagatgatgaactcttttcttcttgcaatgaaaatgaaacagagagtgaagagctcaatgatattttgactgaggatgaaagaaggcaattggaagatgcactaaggttggattcgacagacttgaacaatgagagtgatgaggtgatcattgggcatcgtcatagctgttatgaacatagagaaattcctattgaagaaggaaattataacaaaagtggagaaaataagctggaaaagaaaggatggtttggtggatggaggaaaaaggattctaaacctgaagctccaaagaagattgctccgccaagaagttctctctgcatagaagaaaaggtgagtgatttattgggggattctccttcaagaaatcagagtaagccaggaagacattctgttgagatagctgtgaagggtgatgagtcacggaggagaaaagatgccaaagcttcttctgcaaattctgatagcagaagtcgtcacaaggatggaaatcgtgaaaatgaatataagaaagggttgagacctattctttggctttccccaaactttccactaaaaactgaagaactcttgccattgcttgacattgttgcaaacaaagttaaagcaattcgacgtttaagagaactccttacaacgaaacttccaatgggaacttttcctgttaaggttgccatccctgtggttcccaccatcagagtattggttacttttacaaagtttgaagaactagagccagtagacgaatttgcaacaccaccatcaagcccatctgcagctgagcaagagagccctgcagtgcctcacttctcggcatcgtcttggtttcaatggataaaggctccttatcgctctagtacatctgctccaggatccagcagtaggatagaaaatattgaagacccttttgcaattccatctgactatacttgggttactgctgaagc

SEQ ID NO: 10873 - DNA, 863 bp, Glycine max
  Clone ID: 700984309_FLI
cagtccgttgttccgagcaaacaagggtatgtaccgaaccggaacccagaccgggctcggtccaaaccattccagcagttccaagaaagccgagaaccggaaagactagaaagcccaacgctcgtgtctggtcctcgatgtcgtctttgtgttcttcggtgacggccaagaaacagaagaaaaaggtcgaggcccaaaacggtggggcccagtctctgcgacggtgcagccactgccaggtgcaaaaaacgccacagtggagaaccggcccactagggcccaaaacactttgcaacgcttgtggagttcggttcaagtccggtcgactttttccagagtatagaccagcctgtagcccaactttttctgacgatattcactccaacagccatcgtaaagtgttggagatgagacgaaaaaaggagatagttgaatcggaccggattcaattgatcccaagttgttaatttttgttagactgaatttagatgcagttcattaagtatttctagtagagtagtattgtttttttccgttagaattaaagtttgacctcattaatatgcatataaaagtttgcataattgagataaaattataattctaacaaggctatctaaggatttatgtttttagattccaataggttatagatcagaaataggtcaacgaatcggtctgagctggtttggtatttgttccatagttagtgatttaaattagtgctagtcaggtaaggaagaactaagtgataacggacattaggagagcattgatagtttgtatcccattttcctagcgcagttgatttaattaatgagatgtagttaagttgaggaaaaaaaactaaattatttatgagg

SEQ ID NO: 10874 - DNA, 969 bp, Glycine max
  Clone ID: 700984336_FLI
cacttgtcactcgtcactctgccacttcttcgtcggtgtcaaactcacacaaactcagcattcaaaaccctcttcctgcgccaccgccggaaaatggaggcggtgggttcgagactcagccgcgcctcctcccgctacggcgcccccaccgtgttcagcggccccgtcagaaagtggaagaagaagtgggtccacgtcaccccctcttccttacccaacaacagctctcactctcacactaacaactccaccaccaccagcagcgcttcctctcgcctcctccttcgccgttggactcccgccaccgtcgacgacgccgccggagccgtctccgacgagcctccccgaagaaagttccgttacacccctgttgttgtcctagaagaacagaaaaagatgaatgttgtgaaggctgaacatgaacccacaattgagactgaccaattggctgctaggaagacaaatgtgactcatgagatgcagggaaaactgaacatgaatgaaatgttggaggaaaccaaggattcaaacattggtaatttagatcttggttcagacttccaaagcaacaccggtggaaacagccagaacagtgatgctcaattggaaaatagtatgtaatgggtggtccatgaacttggtatctgtaagtaggaaatcaagctgttaggcagtgaagtgttcattcaagaaatactaagctagtatatattacctgttatcaccgtacatcttaccattctatattgacttataatgtagttagccataatcttgtgtatagttagcacttaactagtgctgcctataggaatgataagtaactagttttgatcagcataggataatcagttgtattttgtgatggaacatatgcatgatgtgatgctactaaggagctgagtatatatttttaaatataaaagctcaatatgctcccaaaatctgaatgcttgaatgtttcatttc

SEQ ID NO: 10875 - DNA, 759 bp, Glycine max
  Clone ID: 700984468_FLI
cttcgcttctattttttggaaagaaatctgagaactctgtgaacaaagctaccaataagctttctgcagttggtgttgtggaggagttatttgaagagggttctgcaatgcttaccgaaaggctaggtaaggattttccgcttaataaaaattctggtattttccgttgtgcggtttgccaagtggaccaaccccctggtgatgatggtttatcagtgaactctgggccttttttctctccagcatctagtccattcctctgcacaaactgtcagaagaagaaagatgccatggaaggaaaaaggcctagcagagcctccattacagcatagtaattatctagtattacagtagtaacatagtaaatattagtataattttaccctggcagtgtgagcatgcttgattttacattttcggtggttattgtcatagacgtgtaagaaatgaggttgagaattgaggtaggcttagtagctgttttggaggttgctgcaagtttgactctggcttgtgctcagctgtaggactggctgacagaacaaacaagaaagttgtgtctggtagataaaaattctagtggaatctgctaacggcttgtatttgtaagtaaactgaagcttttgtggctgcctctctatcgagagtgcttcaatgctacagcccaaatgcatctgtatcttctaaacttgtgttgttatacaaatacaactacatgtctcgaatgtccctccgaattcgatgagtaagattcttgtg

SEQ ID NO: 10876 - DNA, 493 bp, Glycine max
  Clone ID: 700984519_FLI
gagacaggagtgctccaaatttggtactttggtgaatgtggtgatcccacgaccaccgtctgatggtgaacctgccgctggagttggaaaggtgtttttggagtacgttgatattgacggtgctacaaaagcccgtgccggattaaatggccgaaaatttgatggaaatcaagtagtagctgttttctatccagagaacaaatttgctcagggagattatgaaggttaattatgtggtgtttggattctatcttgattagcaaggataatcttttgtattattatcataaacttgtaagctagagttggtcatagtacagaaactgttctatttagatgcgagtagtaagagagacatgatgacaatttgttaaaatagttttaccggtctacatggatctgtgtggtcccttgagatattctctatttgcttgagtgaggtttgttttgaagtggacttctgcattaatcaaattaaagcttgttgctggtg

SEQ ID NO: 10877 - DNA, 1671 bp, Glycine max
  Clone ID: 700984573_FLI
ctcactctcttctccaatcccatttcaggcaaagtttgcctttgaaggaatcaagtaagtcttgtatgtggattttgtggtattgattttcaatatccgctttatggtttgagcttctattaagaaactgagatacgagctgatcacataggagtatccagtactctctcagatttcatgcctgccatgaaaaagaatcctgagctaacttgtattggttctgtattcaacatgttggggaaggagcttggagaacctgtagactttgaacttccagattcatttaataaatccaagccaatgcagtacacctatataaaacgcaatatatatctcactaagaaggtcaagagatcccggtttgatgatgatggcatattctgttcctgtactccttcccctggatctactagtgtatgtggtagagattgccactgtggaatgcttctgtctagctgttcatcaggctgtaaatgtgggagctcctgtctcaacaaaccatttcagaaccgtcctgtgaaaaaaatgaaattggtcaagaccgagaaatgtggttctggaattgtggcggatgaagatatcaagcttggggagtttgtcattgaatatgttggagaagtcattgatgacaaaacatgcgaggaaaggctttggaacatgaaacatagtggggaaacaaacttctacttatgtgaaatcaatcgagatatggtgatagatgcaacatacaagggaaacaaatcaagatacatcaatcatagttgctgccccaatactgagatgcagaaatggataattgatggtgaaacaagaattggcatatttgcaactcgtgacatacaaaagggcgagcatctgacttatgattaccagtttgttcaatttggtgcagatcaagattgccactgtggtgctgctgagtgtaggcgtaagttgggtgtccgacctaccaagtctaaactttcttcagatgctgcattaaaattagttgcatatcaggtttatcagaatggaggtttgcaaattggaagttctcgtgttgttgaccaaccaaagtgcttgcacaattgcattggtgaagttattaggataaaacatcttgaaaatgagaggtttggaattattaaacgatttgataagtattcccgaaaacattcgatcatgtttgaggatggttgtgttgaaatttatgacatgtcaaagagaggactttgaacttgtgagatagtgatgcaactgttgggtgcaggtgaaaggaattgaaaagctgaaaattggactcattattctttcattgcatgtgcataattcttgtagttgctgaggctcttatcaacagaatatgaagcggaatagctcaacacaactcttactgattgaagataataaattcctttttctactaacaaactgtattatcgtgtaaacaacattgttgttcaaggttctggaaataaaccttgtattttttaaaatcctgaaagtactgtaaaatgagaatcatcttgtaccattagctaggatgtgtagttgttgtttcaagtgtattcttttactttcttcctatttttctagtataaggttattgataaatgtgggagtttcgattaggaaaaacttgttttaatatgcaattaccctttgatcaatgctaaagacatgtaccctatg

SEQ ID NO: 10878 - DNA, 485 bp, Glycine max
  Clone ID: 700984605_FLI
gttttcagcaacgaaggaaagcagtaccgggtacctcctaattatcctgctcgcatccgtccatctgatgttattcagtttggttctgagaaggtttcgttccgtgttaaggtgacaagctctgttccaagagtctcagaaaatgaaagcacactagctttgcagggagtatgactgattctgctcaattgcaatttgtaagttatggaaaaattatacagcacaaatttgctattgtatagtactatctgcattgttttagggtggggtattataccacagtctagtcatttaagatctgatatgttacatgcctatatggacatttaagagggactcttgggtataaatttgttactccactccaatactttttgtgtatgacatttgtaatttgttagagttagatttataacatgacacacataaacttgcacgtgattaatgttgaatggagtaagcaatgcctagctatgaatttttgc

SEQ ID NO: 10879 - DNA, 854 bp, Glycine max
  Clone ID: 700984669_FLI
gagaaaagagaaaacaaagaagagagagatgggaactccagagacgtcaagggaaccatgtccagaccgcatcctggacgacataggcggcgcgttcggcatgggcgcggtgggtgggtccgccttccacttcctcaagggcctctacaacgcaccaaggggcgcgcgtgtcgtcgccgcgtcacaagcggtacgcctcaacgcgccgcgcgtgggcggaagcttcgccgtgtggggcggcctcttctccagcttcgactgcaccatggtctacctccgccagaaggaggacccctggaactccatcttcgccggcgccgccaccggcggcttcctctccatgcgccagggcctccccgccgccgcccgctccgctgcgttcggcggcgtccttctcgctctcatcgagggcgccggcatcatgctcaacaagttcctcagcgcgcagcagccgatgccgatgattgtcgatgagcctcttccgcctaacgggctaccgggccagccggttgcttcggcgccggacgctgcctcgcaatcgtcgtggttaggtggttggttcggcgatgggaagaaggatgaggcggcggcggaggctaccggaggaagcgagaccaaggttttagagagctttgatgcgcctcctgtgcccaatttcgagtacaagtgaaattggttaagaattaaagataatttatttttggggtttagggttttagttttctttttagggttgggaggttctttttgaatctttcttctcagtgattgactattattgtatcagcaagtatagtttcgatttgccttgttttctgttttcttatgatatatcatatatgctaatgcaagag

SEQ ID NO: 10880 - DNA, 552 bp, Glycine max
  Clone ID: 700984765_FLI
ggaggttatatcgtgaaccgtccaactctagccagaaggtttatcccagaagaaggaaccaaagaatatgatgagatggtgaaggatcctcaaaaggcatatctgagaacaatcacacccaagttcgagacccttattgacatttcagtgatagagatattgtcaaggcatgcttctgatgaggtctaccttggccaaagggataatccaaattggactacggattcaaaggcattggaagctttcaaaaagtttggaaacaaactggcagaaattgagggaaaaatcacacagaggaacaatgatccaagtctgaaaagccgacatgggccagttcagcttccatacacattgctccatcgttcaagtgaggaagggatgagtttcaaaggaattcccaacagtatctccatctaaaatgtgtgtgtggtttgcttatctattgtgcttttgaataaaatagacaatacttgtctatggttattattggctgtatgtctgtatttggatgctctcgatcggtttgcaagtaataagagtgttttcactgtc

SEQ ID NO: 10881 - DNA, 626 bp, Glycine max
  Clone ID: 700984931_FLI
gctagctttgctgtttgttccatccagcacattcagttctgcttgaatcactttgctgcaaatgtgtatgttgggctaccgagtgggaatgactggtttgaaaagcagacaagtgggacattggatatctcttgctcctcttcgatggattggttcttcggtggcttgcagtttcagcttgagcatcatttgtttccaaggctacctcggtgccaattgaggaacatttcgcctttggtcagtgacctttgcaagaagcataatttgccttataggagcttgtcattttgggaggccaatcagtggacaattaggaccctcaggactgctgccctacaggctagggacttgacaaaccctgcccctaagaatttgttgtgggaagctgttaatacccatggctgaggtatttggagtttatagagtttaggattttgtcaaggtcttttttttttgttttctcttgaaaaagaaaaaaaaaaatctcattgtgattttgctagccaccacttttccagtttgggctttgaatttaactttttgttgggtgtggtgtagaaatggatggtgatccagatgttactgcagttcatgtgcttttcatcaatacaaaattaatatcatgt

SEQ ID NO: 10882 - DNA, 1505 bp, Glycine max
  Clone ID: 700984979_FLI
tttgggagttaggttctgcacgctctgcttccagcgagtgttctttcttcgtttcaacaccttaatttgcacacgctgcttcttcagcttgagaaatggcacaagaaacctttctattcacatctgaatctgtaaacgagggtcaccccgacaagctgtgcgaccagatctctgatgcagtgctcgatgcgtgccttgaacaggaccctgacagcaaggttgcctgtgagacatgcaccaagaccaacatggtcatggtctttggagagatcacaaccaaggccaacgtagactatgagaagattgtccgtgacacatgccgcgaaattggattcatctctgatgatgttggtcttgatgctgacaaatgcaaggtgttggtcaacattgagcagcagagccctgatatcgcccagggtgtgcacggtcacttcaccaagcgcccagaggaggttggtgctggtgaccagggtcacatgtttggctatgccactgatgaaacccctgagtacatgcccctcagccatgtccttgcaaccaaactcggtgctcgcctcaccgaggttaggaaaaatggtacctgtgcttggctgaggccagatggcaagacacaagtaactgttgagtactacaatgacaatggtgccatggttccagttcgtgtccacactgtcctaatttccacccaacatgatgagactgtgagcaatgaccaaattgctgctgaccttaaagagcatgttatcaagcctgtcattcctgagaagtacctggatgagaagaccatcttccaccttaacccttctggccgttttgtcattggtggccctcatggtgatgctggtctcactggaagaaagatcatcattgatacctatggtgggtggggtgctcatggtggaggtgccttttcagggaaggaccctaccaaggttgacagaagtggtgcctatatcgtgaggcaggctgcaaagagtgttgtggcaaatggccttgccagaaggtgcattgtccaagtttcctatgccattggtgtccctgagcccttgtcagtgtttgtggacacttatggaactgggaagattcctgacaaggagattcttcaaattgtgaaggagaatttcgacttcagacctggaatgatcaccattaacttggaccttaagaggggtggccataggttcctcaagacagctgcttatggacactttggaagggatgaccctgacttcacctgggaagttgtgaagccactcaagtctgagaagcctcaagcttaagattgttgtgaagttaatcactcccttcaatggatgtcttgctaggtgtggatgaataatttgcgtgttccatgactactactacttcattcataggtctaatgtcatctcatcaatacttaaactgtttttttttttccttttctccttttactcacaatttattttttggttatgcaatgttaccgttttgatgcaatggaaattttatcagaattttgtccc

SEQ ID NO: 10883 - DNA, 1710 bp, Glycine max
  Clone ID: 700984982_FLI
ctctatcccaccaaagtcaattaattcatttttctgaatagccattcccagaatccaaacatggtcttttgaggttttggtccccgatcaccatgattcttttcagtttcacctccatcgttttaatcgcgtttggggcgacgctgttccagacggggcatgcgaagaagctatggagaagaatcgaagactggttccacgtgtaccagttcttcaaagtcccagaactcaacgacacgacgcagcacaaccacctatacaggaaggtctccctctacttacattccctaccttccatcgaagactctgacttcgccaacctcatcactggcaagaagcaaaacgacatcgtcctctgcctcggcccaaaccaaactatcgaggaccattttctcggagccacactcttctggttcaaccaaaccggaacctttcttctcaagatcagaaaggtggacaagcggagaatcctccgtccttaccttcagcacattcacgccgtcgccgacgaaatcgaccagcgagggaagcgcgacttgcttctcttcatgaacatcgccgacgacttccgacgctggagatccgttccgttcacgcatccttccacgttcgacaccgtcgccatggagccggatctcaaaagcaaagttaaatccgatctcgaatcgttcctcagagcgaagcagtactaccaccgcctcggccgcgtctggaaacggagcttcctcctctacggtccctccggcaccggaaaatcgagcttcgtcgccgccatggccaatttcctctcctacgacgtctacgacatcgacctctgcaaaatctccagcgattcggatctgaaatcgctcctcctgcaaacgacgccgaagtcggtggtggtgatcgaggacctggaccggttcctcgcggagaaaacggcaagaataagcgcgtcggggatactgaacttcatggacgcgcttctaacctcgtgttgcgctgaagagagggttatggtgttcacgatgaacacgaaggagcatgttgacccaaacctgcttcgaccgggtcgggtcgacgtgcatattcattttccgctttgtgatttttcggcgtttaagacgcttgcgagtagttaccttggggtgaaggagcataagttgtttcctcaggtgcaggagatttttcaaaacggggcgagtttgagtcccgctgaaatcggtgagttgatgatagcaaaccggaactcaccgagtcgggctattaaatcggttatcaccgccttgcaaacggacggtgatgggagggggtgcggcttgatcggacggcagacggaggacgatgaaatggatgaacctgacggggttgtgtgcggtgagactttccatacggttaaggatttgcggaaactgtacggttttttcagtttcagggttactagaagatcttcgtcgtccaatgcttccttgccccccgcaagcccattggaaaaagaataagcaatgttctcgattgcacttcattccgggggatatgccctttcaaaagaaagcaatttgggggcaagcttcttcttcttcttcttcttttttgttcatagccgaattagtcacagcatttattcattggaaagtgttggtaattgtcgtttttggagcgatttgcatgggtttgtaagtgtaaatctttagaaatagattccatatatgaaaacaatttgcgcaaaac

SEQ ID NO: 10884 - DNA, 1542 bp, Glycine max
  Clone ID: 700985202_FLI
gagaaaagaaccaatggatcactcagtttcagtttcatccaataagcctcttcatgttgtaatgttcccatggctagccatgggtcacgtatacccctgcttcgaggtttccaagatccttgcacaaaagggtcactatgtcactcttgtttccacccctaagataatagatcgcttgcccaaactccctcaaaccttatcaccatttgttaaactaaccaaattactcttatcgccccacatcgacaagaaccatctcccacaagatgctgactccacaatggacattccctccaacaaactctattacctcaaattggcctatgatgctctccaagaacctgtctttgaggttctcaaaacttcaaatcctgattgggttttctatgattttgcagcaagctggattccacagctagccaagaccctcaaaattcacagtgcctatttcagtccctgccctgcatggaccatatgcttctttgacacaccaaaacaacaacttggtgatgctgctgctgccaatagatcaaaccctgaagactactatggccctcccaagtgggttcctttccctacaaagattggtctaagaccctatgaggtgaggaagctcttagaagatatcaaggtcaacgagacaggtgcctcacctgtttttgatctcaacacagcaaattcaggttgtgacatgtttgtcatcagaagctccagagaccttgaacaagagtggttggattatcttgctgagttttaccacaagcctgtggttcctgtggggttgcttccaccgttaagaggctctgatgaggaggacaatagccccgattggcttcagatcaaggcatggctagatacacagaaagggtcatcagtggtgtacattgcatttgggagtgaggtgaaactgagccaagagaacctcaatgagttggctcttggaattgagctttcagggttgtctttcttctgggtcttgaggaagggctcggttgagtttttgcgagaagggtttgaggatcggaccaaagatcgaggtgttgtttggaaaacttgggcaccccagcctaagatattggctcatgcatcggttggtgggtgcttgactcattgtggttctggttcaatgatcgaaaatctcatctttggacacgttcttgtgatgttgcccttcttgctagaccaagctttatattcaagagtgatggaagagaagaaagtgggaattgagattccaaggaatgagcaagatgggtcgttcacaagaagctcagtggccaaggcattgagattggcaatggtggaagaggagggaagtgcttataggaacaatgctaaagagttgggcaagaaatttagcaacaaggagctcgatgaccaatacattgaagatttcattgcttcccttcacaatcacaagcatacataggagggattaggtggatatgagtatttgattatttgagttagtacaggtctttttacttttctaaaatttcacctgtttttttaaaataaattaagtatggttcaagttcaacc

SEQ ID NO: 10885 - DNA, 1081 bp, Glycine max
  Clone ID: 700985273_FLI
ggaccctgtgttgctaaaagactggatgcgaatgcaaattaagagcgacttgatactactagaaaatcagcttcctttctttgttcttaaacaactttacaacctcgctggtatgaatcaggaatttccctcctttcttcatatttctttcaactgcttgaagcgtgtgggatgtggaacatggtgcccaacagagtccccaaagcacttcaccgatcttatgagaactagcataatatcatcatcaaaatttgttcttagaaaagaagaagaatgcaaagtaataaaacatgtatacagtgcaggccaactgcgggaggcaggtcttaaattcaaggtcagtccaaatgaaaatgaatgcttacttgacttgacctattctagtgacggtgtgttgacaatgccaatcttgaatatagctgacgattcagaagtgttcttcaggaatatagtggcatttgaggaatgtcacctttcagatgatacaaacatcattactcaataccgaaagattctagattttcttatcaacactgaaaaagatgtgaatgtactagttgataagaaaattattgtcaattggatgggtgatgctaatgcagtggctacaatggttaacagtctgggctcaaatattgggatgccacgtttcaatccagtgtatttctctctctgcaatagcttaaatgatttctatgaaagtccttgcaacaagtacaaggctatcttcaaacacgattacttcaacactccttggaaaatagcatctacagttgctgcaattgtgcttcttttgctcacattgattcagactatatgttcaataaactcactgttttaattaaggtagctgaggatttgggccgttaacagggaagtggaagtcaattgggggaaggaaacttctgtaatgtgatttagtaccttgttgcttttctttcatcaaataattaaaattctactatccttcttaacattaattatttgttgcaatataacttttatttactctctatattgatctgtattaattttgtatacgctttatatatatagctacttattattattgttattgtgt

SEQ ID NO: 10886 - DNA, 1141 bp, Glycine max
  Clone ID: 700985454_FLI
ggaacaggggaggtgttgaactgttccgcggagaataatggggatctctttcatggtgttctaggggggcttggccaatttggcattataacccgggcaagaattgtcctagaaccagcacctaccatggtaaaatggattagagtgctgtactcagatttcacagcattcacaagagaccaagagaggttaatatctgcagaaaagacttttgactacattgaaggatttgtgataataaacagaactggtcttctaaataactggcgattatccttcaacccacgagacccggtccaagctagtcatttcaagtcggatggaagaactctcttctgccttgaaatggccaaatacttaaacgtggaagaaatcgatgcagcaaatcaggaagttgaggaacatttgtcccgtttaagctacatcccatcaactcttttttcaacagaagtcacatttgtagatttcttagacagggtgcacatatccgaggtcaagttgcgttcaaaaggcttgtgggatgttccacatccatggctcaatcttctaatacccaaaagccaaatactcaactttgcacaagtcgtcttcgggaacatcctatcagaaactagcaacggccccgtccttatctacccagtaaacaaatcaaagtgggacaacagaacttctgttgtgattccagaggaagatattttctacttagtggcatttcttacatctgcagttccatcttcaaatggaactgatggcctagaacacatactaagtcagaacaaaagaatattagaattctgtgaaagagcacaacttggagtgaagcagtatttgccccactacaacacacagcaagaatggagggcccattttggtcctcaatgggagacttttctgctgagaaagtccgtttatgatccattagcaatactcgcccctggccaacgtatatttcaaaaagcaataaccttctcatgaccacatttttattattaattattaaaaatctgaaaaaaaaaaagagaagaaaagtccttcatggcatgtgccaaaatgaaaaaaaaatgttatatgatccagacaggttttgacattgaccatacagaatgcaattgcaaaggaagaaggttcattgatagtagag

SEQ ID NO: 10887 - DNA, 1052 bp, Glycine max
  Clone ID: 700985478_FLI
gtgttaccaaagatagtgctggtgactatcaagactgtggtgcttcttcaatgcttctcatgggagaacctccctggtgtcctccttgccctgagagttctctgcattctgctaaccgaagcaatgctgtcatgcgctacaaggaaaaaaagaagacccggaagttcgagaagaaagtaagatatgcctctcgcaaggctagggctgatgtcagaaagcgtgtgaagggccgatttgtcaaagctggtgatgtctatgactatgaccctttgaaccaaaccagaagctactgagtgggcataaattttcttcacggggaagaaggttgtaagcaggcccttgtccaatgaaattgacagtgtaaaagctcaggagcaaagattgtgtgtccttcactgcaatggacattctcagttgcaatttcagccgacatgacagcatcatcacaaactgccccccttcaggcaatgtgtcatgaattttggttgcccttctgtttaacttggcaaaatcctgcttcttaatactaatctaatgcaaaattcttttttaagccctttggccttgatcttgctcatagtttgtcatattttatgtcaactcctcactgatcccgagtcacatgtacaagtgtgcctatgatggcatgataagtggctcaatttgataagttctagacaatcttctacactgttgtaggaatattttgtccctctctcttttgccatgtatagtgcagaatatacataaatgcagttagaggtgtaatgacccaacagttccttaggtatgacaaattgtaaatttgaaggttatttatgtatagaataggatgctgctattgctatttattttgatgacacaacattctatatttttggacatgtatccataaaagttttgtttgtattttatttgatttgattgccatggatacacttcaattgcatggcatatttacttcaattgtaattgtgagtcacttctaagaaaaagaaaccctattactgaagaacattgtgcattgtgtataagaaatcgatgagtaaaag

SEQ ID NO: 10888 - DNA, 1641 bp, Glycine max
  Clone ID: 700985536_FLI
gttatactatcgacgacattatggctgcttcattctcaagcatgctcattattccctcttccaaaataagctacgaagctagcttgggaggattaagcttccacaacttcctaacagcaaaatcaccacctctgaagcgaaaccaaaagtcaataaaagttgttacacgcgataaccactcacccctggtcgacgacctcatgatagaagtacaagaacatgaacatgaacatgcaacgctgcatcagaaagatctctcagaaatgtggcgccaaatccacggtgagaagaactgggaagggcttctagagcccatggaccctcttttgaggtcggaggtgatccgctacggcgagctggcgcaggcctgccacgacgccttcgactacgagccattctctaggtactgcggcacatgcaggttcgaggaggagaagttcttctcctccctgggcatgacccatcacggatacaaggtgacgcgctacatccacctcacggccaacaccgacttcctcctaaagtggttgattcactcaaagtggccaacggcgatggggagcaaggtgaactggggcggatatgtggcagtttcgaacgacgacacgagtcgctgcctcgggagaagagacatcgtgattgcatggcgggggacgaccacacacctggaaggggagaaggacctcaggtctagcctcacacctgtatcatccaagggcatcccgtgccacgatgatggggttaaggtcgacaatgggttcttagatatgtacacgggtaaagatgagacatcagaatactgccagcactcggcgagagatcacgttctaagggaggtgaagcggttgatggacatgtatagtgaggaggaagtgagcattacggtgacggggcatagtctggggagtgctttggcgattttgagcgcttatgatattgtcgaaaaggggttggacaggggtgtgccggtttcggtgatgtcgttttctggtcccgcggttgggaacaagtcttttcataaaaggttgaagaagcttgggataaaggtgttgagggtgatcaacgcgaatgattgggtgccctggttttctctttggttgcctccttttcaatactaccatgttggagtggaactcaagttggacaacaacaaatcaccgtttttgaaacacgatgtagactgtgcccataacttggaggttcttctgcatttgctcgacggataccatggagagcggggggaattcatgctagcgagtgatagggatcatgctctggtgaacaagggaggtgatttcctgaaagaaagttacttggttccaccaaactggtggcaagatgaaaacaagggcttgaagaggagctcagatggacgctgggtacagcctgagcgaacaattgaggtcgacggttacccttaagatatgcatgcagcatcaccttctcacccaactgggtctccatctttttcatttgatatatatatatatatatgaattaattaatatatattattggaggaggagaatgcatgtgtgttgcagttattatagtactatatattgatatacaagtgtgtaaggattattattatgcatgtttatggtaagggttgccgcctttatgttctgttttttgcgt

SEQ ID NO: 10889 - DNA, 1691 bp, Glycine max
  Clone ID: 700985611_FLI
cttcactttattttttttccaattcccttcactcctaaacttttttttaggagggaagggaggggcaatggagatgcacacacaacctcataagaaacaccattttggtgtacaacattgttgtcttattagcctcttcatcttcaccttcttcactactacaaccacccaagcttttgattatgctgatgccctttcaaagagtcttctctactttgaagcacaacgctctgggaggataccttacaatcagcgtgtcacttggcgtgaccattctggcctcactgatggcctagaagaaggggtggacttggtgggaggatactatgatgcaggggatcatgtgaaatttggtttaccaatggcattcaccatcacaatgctctcatggagtgccatagagtataggcaacaaattgaagatgcaggtgaactagaacacacaatggaggcaatcaaatggggcactgattatttcatcaaagctcacactagcccaaatgtcctatgggctgaggtgggtgatggtgacactgaccattattgttggcaacggccagaggacatgacaacttcacggcgagcatttaagatagacgagaataaccctggttcagatctggccggagagactgcagcagccatggcagctgcttccattctgttcaggaaaacaaacccacattactctcacttgcttctacatcatgccctgcagttgtttgagttcggggacaagtataggggaaattatgatgctagtgtcggagtggtaaagagctactatgcgtcggtgagtggatacatggatgagttgctgtgggctgccacgtggctgtacaaggccaccgacaacaaaatgtatcttcagtacgttatttccaatgctcatacctttggtgggactggttggtccatttcagaattcatctgggatgttaagtatgctggccttcaactcatggtctctaagttattaagcgaagaaaaacacaagaagcatagggatatacttgaacaatacaaatcaaaagcagagtactatatttgttcatgtctcaacaaaaacaatgatagcaataacgtggaacgtaccccagctggattaatctatgtccggcagtggaacaacatgcagtacgtttcaacagcagcatttttgctctcaatatactctgatttccttcaaagcacaaatcaaaagctcaattgccatgggggcacagtggaccatgaagaaattcttaattttgctaagtcacaggctgattacattttggggtccaacccaatgaacatgagctatttagttgggtatggccctaactaccctaaaagggtgcaccatagaggggcatccattgtgtcatacaaaaagaataaagggttcatagggtgcactcaagggtatgataattggtatggtagccaggcacctaatcctaatgttctggttggggctttggttggagggcctgatgggaaagacaattttgaggacagaaggaacaattttatgcagactgaggcgtgcacatataatactgccccattagttggtgtttttgcaaagttcttgcatatagaaaaccaaaaactggttcatgattgtaattcacatttggttgcctccttcaaatgatatagtccttcaaataatatagtgaattaatacagtatatgtttctcat

SEQ ID NO: 10890 - DNA, 1662 bp, Glycine max
  Clone ID: 700985623_FLI
atcttttataattttattcgaattcaaatataataccaaaaccgatccttgtttggccattggctctctacgtactagcggtttgaaacatttgagactcaaagagtaagttatatatatatatatatagagagagagagagatagagagaagaaattggagatagacatggggcatcactcttgctgcaacaagcagaaggtcaaaagagggttatggtcacctgaagaagatgaaaagctcatcaactatatcacaacttatggacatggttgctggagctcagtcccaaaacttgcaggcctgcagaggtgtggaaagagttgcagattaagatggataaattatcttagacctgatttgaaacggggaagcttcactcctcaagaagctgcactcattatagaacttcatagtattctaggaaacaggtgggctcagatagccaagcacctacctggaagaacagataatgaggtgaagaacttttggaattcaagcataaagaagaagctgctttctcatgatgttgttccttctttagccacattttctgatcatattcacggtcctcccaatggttccatggaaagtttcttccctttaactgacaaccctatcctaaactcccatcatcacttagaccagctattccttcccatcatcccatccccaatcctccaagcctttgatcatcatcaccataataatgatatcaagattgacataaacaaattttttaataataatgccaatttcctacaatattttcagaatccaatgccggaaacagtgcctccaatatccaatactactattccatctttgtatgaagaagatgcatggtcttctttggggtgtgtacctattcaccttaatccaaatcaagaaaatcaaatcatgatcaccaaaagtgatcatactaccccacacttgattgttgagaaattcatcaatccaagtacatggcagcagcagcagcactctgtggaagtggaaccccccattttgccaaaagtctgtgagagcattgaggattatgtctgtagcatcccatattcttcttctgttaattcacaagaccaacatgtggaagctgttgcgtgtttcacacctgttatttgtccacaagatcaagtggagtacattgatgccctcatcatgtcatcattgccatcctcaacaacaacatcttcatcagtagtatcattcttccaagcagacaaatagtcacaaaacctatcattccttcaagttaattggttgtcgtcatgagcattggttactatatcatataataggttaattttatgtgtatataattgagtagtgggagagagtactctatttatatttgtgataagcagaattaattccatgcattttaagggggggagaacatgcatatgcatttaatttttctcttgaattttggaataagagggtgagtagatgctcctatcggcaaacctctgagccttgctagttcaggctcgatcttccactgaacgatgtttgctgaagttccataaatatgtacgtctaggttctttcacatgtttgtcgaccaaaagtacgtatccgtgtatgattattgtttctttgtgaagtgctgtatgttgtataacaatcatacgatgcatagttgtgcactttaagttg

SEQ ID NO: 10891 - DNA, 1446 bp, Glycine max
  Clone ID: 700985657_FLI
cttttttctctttctctctttgaaactctgtgagaaaccttaactttgtaattgcaatggctgatgcttctgtggccccaccacctccactgaaagatgagcttgacattgtgatccccaccataaggaaccttgactttcttgagatgtggaggccattctttcagccttaccatttgatcattgttcaagatggtgaccccaccaaaaccatcaaggttcctcctggctttgactatgagctctacaaccgtaatgacatcaacaagcttttgggtccaagggcttcttgcatctccttcaaggactccgcgtgtcgctgcttcggctacatggtgtccaagaagaagtacatcttcaccattgatgatgactgctttgttgccaatgatccatctggaaaagcgatcaatgcactcgagcagcatattaaaaaccttttgtgtccatccactcccttgttcttcaataccctttatgaccccttcagagaaggtgcagattttgttcgtggataccctttcagtcttcgtgaaggtgtgccaactgctatctcccatggactttggctcaacatcccagactatgatgctccaacacagcttgtgaagcctctcgagagaaacactaggtatgtggacgctgttctgaccataccaaagggcactttattccctttgtgtggaatgaacttggcattcgaccgtgatctcattggaccagcaatgtactttggtctcatgggagatggtcaaccaattggacgctacgatgatatgtgggctggctggtgctgcaaggtgatcactgatcatttggggctaggagtcaagactggtctgccctatatctatcacagcaaggccagtaacccatttgttaacctgaggaaagagtacaaaggcatattctggcaggaagacatcattccattcttccagaatgttgttcttccaaaagaatgcaccactgttcagaagtgctacattgagctctccaagcaagtcaaggaaaagctctcaaagatagatccttacttcgacaagctggctgatgcaatggtcacttggattgaagcttgggatgagcttaaccctgaaggagcatctcaggccaatggcaaagcataaaccaaccttggttataacaaccactcatgagctagaagtggaactatttatatactgtacttttttttttcagtatttcttctcaatgtttgcagcattgttagctataattctatttttttttttaatcttcatgctttgagcttagaaagaataaactacaatggtcttggtcgttgttttcttgtgatttttgtcccttagtagacatctgcaggaccatatcacttgcaggcactgagtttcatgtgaaacaagtgttataggaagaatattaatgtatgattcattacagattaatagtgatcgaattttc

SEQ ID NO: 10892 - DNA, 1012 bp, Glycine max
  Clone ID: 700985662_FLI
ccccatttttgttggaagcagaagccatggaaaccaacacactcccaaaccagcagacaccaaaaaccaaaaggcaaatcttcatactctcaggtcaaagcaacatggccggtcgtggcggggttatcagggacgctaacaaccgtaagcggtgggacggcgtggttccgccggagagccgctccgatccatccatcctccgcctctccgccaccctccaatgggaacccgcgaacgagcccctccacgtcgacattgactccagaaaggcttgcggcgtgggccccggcatggtcttcgcgaacgcgctgctgcggcggcgcgtggtggtgggcgagctgggtctggtcccctgcgccgtgggcggcaccgccatgaaggagtgggcgcgtggggaggaactgtacgagaacatggtgaagagggccaaggaaagcgtgaaggagcgcgagaatagcagcgagatcaaagcggtgctgtggttccaaggtgaaagcgacgcgatcaacgaggaagacgctgcagcttacaaggtcaacatggagaccctcatccacaatgttcgtcaagacctcaatttgccatctcttcccatcattcaggttgcattagcctcagggtccgattacatagagaaagtgagagaagcacaaaaggcaattgatcttccaaacgtgatttgtgtggacgcgaagggattgcaattgatggaagataatcttcacttaaccaccgagtctcaaattcagttgggtcacaagctggctgaggcctatcttacccattttcatgcctgaactactgggaaattaagctccccaatttgaacccactttttccaagttcatttctggtttttaatgtaccgttagtgattctgttgccatgtgtgtgagctggtttctgcttgtatcaaataacttcttgtttgcaatgtgcaaacattattggctgtttagtataacttggttgagtcccgctgtgccgacagtggcagaataattgcaattct

SEQ ID NO: 10893 - DNA, 1178 bp, Glycine max
  Clone ID: 700985723_FLI
gcttcttaagtatgtcaataagcatgatccttcagacaagtaccaccttctaagattgtatgattacttctattatagagaacatttgttaatagtatgtgaactacttaaagccaacttatatgagtttcacaaatttaatcgagaatcagggggtgaagtgtatttcacgatgccaaggttgcagtcaattaccattcagtgtttggaagcacttcagtttttgcacagtcttggactaatacattgtgacttgaagccggagaatattttggttaagagctatagcagatgtgaggttaaggtcattgatctcggaagtagctgttttgagacagatcacctttgctcgtatgttcagtccaggtcttatcgtgctcctgaggttattttggggcttccatatgacaagaagattgacatctggtcacttggatgcatcttggcagaactttgtactggcaatgttctcttccaaaatgattcccctgcgacattacttgctcgggtgattgggatcattggcccaattgatcaaggtttgcttgctaaaggacgggatacatataagtacttcacaaaaaatcatatgctttatgaacggaatcaggaaagcaacaggttagaatacctgattcctaaaaagacttcattgaggcatagattaccgatgggggaccaaggcttcatcgactttgttgctcatttgcttgaggttaactcgaagaagcggccttctgcatccgaggcgctgaagcacccatggttgtcatacccttatgagccaatatcatcttgaagtatgtggaggttttctctcttggtgatagtgtcaatattttaccctaagctgggtaagttaaatcgttgaaagggaaaggcacaccaccatacatggttgccgcttttcattatctattttagagatgatatggaaagaggagttgtgcactttcacattcctgcatgatgatgcattgaaaggagtttggtttttattggtaatacttgtctttcccatcaatgatgtaatttagcatgtaagatgtaatgttatgttgttgatttctttgctttgtttggtcttttgttgaaaagggaatccttgaaatattgcttgtacatgatgtgggataattcatttagtcttcagtagtatttttagcatgtttggttac

SEQ ID NO: 10894 - DNA, 868 bp, Glycine max
  Clone ID: 700985727_FLI
ctgttactacttaaccacatattttggtgcatcttttctttttccctcacacaattcatcatggctgaaattgaataccatgcaaaatccaatactaacactcaacccctaaagctctttggcatcaacattagcaagtccccagaagatcaaactcatgaagcaggttcgaattctgagcctttcagttcaagaaagtacgagtgtcagtactgttgcagagaatttgcaaactcacaggcactaggagggcatcaaaacgcgcacaagaaagaaagacagctcttgaaacgtgcccaaatgcaagctgctcgtggttttgtttcttcacagattcacaacacaatcatatcaagcttctcaccacagtctcagccacctttgtcgtggttatgcacaccacatggtggtgcatatcattcaggagctgcctttgtggcttctggaagacgaatctatgttgcagcagctggtgcctccatcactgatggccatggtcaccgccaccctctgccgcagttcggtggcttcaacgggggtgaaggtagtggtggtggtcgtgaacgagggttaggtttggatttgcatcttagcctgtgagttttgtgaatcagttttttcattcaatttagcaccaaatgtgtagcagcttttctattttttttttcttttttctttttatcaccatgttgttggtgtgtctctgctataaagattgaacctgacaagtcactttagtgaatctcttctcggtcatattttttttcttcaggtactcaaacataaaatcttccttaaaagtatcgacttgttaatagcaacctttgtactctgaattgtatgtgaatgtaaattttatttaataagt

SEQ ID NO: 10895 - DNA, 792 bp, Glycine max
  Clone ID: 700986073_FLI
agcaacgccgtcgtatccttgtcgacgtggcagaggggcttaactaccttcaccacggttgggaccaggttgttattcacagggacatcaaatcgagcaacattttgttggacgccgacatgagagggagattaggggactttggtttggccaagctttacacgcacggggaggttcccaccaccacacgtgtggtggggacgttgggctacttggcgccggagctggccacggttgcagcgccgacttcggcgagtgacgtgtacagcttcggggtggtgctgctggaggtggcgtgcgggaggcggccgattgagacgtcggtggcggaggaggaggtggtgctcattgattgggtgagggagctgtacgccaagggttgcgcgcgcgaggctgcggatgcgtggattagaggggagtacgatgagggagatgtggagatggtgttgaagcttgggttggcttgttgccaccctgatcctcagaggagaccccccatgaaggaggtcgttgcgcttctcctcggagaggagccgcaggaggcccccggaaaagtcttgtccgatttggttcgcggcggcaaggatatggatgagactgcgcccttgcaaccctcccctcctcctgtttgagtttttttttttttgcacgagtttgagatttttttcactgtacatattagacttatttttttttttcctcgttgtgaatggattttgctagattgcggtttgatttgatgtgtatttgtttgttttgctttttattattggatttcttatagtttcaatc

SEQ ID NO: 10896 - DNA, 1511 bp, Glycine max
  Clone ID: 700986090_FLI
tgataccagaactcatgagaaagatgctgagggcaagatctctcataaattccatattcttcggaacccaagttttttttgtggttctggaaggtacatatgtggcaaacatgttgatcagaagcaaacagatggtgaatccagcaatcacacaattatggttcccaaagcttcaactctttggcctgacgtatttgacatggataagcctgttgtctttacatatgaagagattttctccactactgatggtttctctgattcaagtctacttgggcatggaacatatggttctgtttattatagcctcctccgtgatcaggaagttgctattaaaagaatgacagctactaaaaccaaagagtttatgttagagatgaaagttttttgcaaggttcatcatgctaatctggtagaattgattggctatgcagctagtcatgaggagcttttcctagtatatgaatatgctcagaagggttcactcaaaagccatttgcatgatcctcaaaataagggtcactccccgctttcttggatcatgagggttcagattgcaattgatgctgctaggggccttgaatacatacatgagcacacaaaaactcattatgttcaccgtgatatcaagacaagtaacattttacttgatgcttcctttagagcaaaaatttcagattttgggttagcgaaacttgttgggaaagcaaatgagggagaaatttcaactaccagagttgttggtacatatggatatcttgctccggaatatttgagtgatggtcttgcgaccactaaaaatgatgtctacgcatttggtgttgtcctttttgagatcatatcaggaaaagaggccatcatccgatcagaaggcacaatgtcaaaaaatgctgatagacgttcactggcatccataatgctgggagctcttaggaattcgcctgattctatgagcatgtcaagcttgagagaatatattgatccaaatatgatggatctgtatccccatgattgtgtatttaagttggccatgttggcaaagcaatgtgtggatgaggaccccatcttacgacctgatatgagacaagttgtgatatccctttcacagattctgctgtcttcagttgagtgggaagcaactctagctgggaatagccaggttttcagtggccttgttcagggaagatagttacatagaaggatagattcttttttcttttttatctgtatcctgttctatacctttttcgttggttgcttgatagtgatggatccataggaactgggacatggtggtgggtcaatatctatttttggccatttgttttccttaatgctttattatgagctataccttgattttgtttagctgcattctaatatgtcgaaattttttggtgtaatgtagagtgtgttatgacggagctaaagaagaaggattttattgctctgtgatttgtattggtataagttgtaattcgaatttaatctatgcatgtttatattctttg

SEQ ID NO: 10897 - DNA, 711 bp, Glycine max
  Clone ID: 700986123_FLI
aatgagacctcctattgttcatagagatttgaagtctccaaatcttttggttgatgattcatacactgttaaggtatgtgattttggcctttcacgtacaaaggcaaacacatttctttcatctaaaaccgctgccggaactcctgaatggatggcacctgaagtcattcgaggagaactgtcaagcgaaaaatgtgatgtattcagctttggtgtaatcttgtgggaactagtgaccctgcaacagccatggagacaattaaatccttcacaggttgttgcagctgttggttttatgggcaaaaggctagagattccagggcatgtgaatcctcaagtggctgccttgattgagctctgctgggccacggaacactggagacgaccttctttctcctatgttatgaaatgtttgcagcaaataattgctgatgctaaagggtgaacaagtttaccctgataatcttcaacctgtatacagacaagaaacagcaatattgaacagaaaaataaatgggattccagtttattcaggaaattgctgaagaattacaatataccgttttatagagtaacctacgaatttttgttgtatatgctatttatataatcattactcacattgtcatatatattactatttgctttggatgtacctataataatcgtatgacactgggattctaatttatacatataagaattattttt

SEQ ID NO: 10898 - DNA, 1797 bp, Glycine max
  Clone ID: 700986140_FLI
ctgcagccttagagccaaaagaaggtggtgcttatctggaactcctattcaaaatactattgatgatttgtatagctactttaggttcctaaagtatgatccttatgctgtatacaaatcattctacaatacaataaaagttccaatatccaaaagtactattcaaggttacaagaaacttcaagcagttttaagggccataatgctacgtcgtacaaaaggaactttgcttgatgggaagccaataatcaatttgcctcccaagacaattgagctaagtaaggtggatttttcgattgaggagcgagcattctacaccaaattggaatcagactcgcgtcttcaatttaaggcatatgctgctgctgggacagtgagccaaaactatgctaatattcttttaatgcttttacgtctccgacaggcttgtgaccacccgcttcttgttaaagattttgattctgatcctgttgggaaagattctgttgaaatggcaaaaaatcttccaagggatatgctgattaatctttttaattgtttggaagcaacatttgccatatgtcttgtttgcaatgatcctcctgaagagcctgttattacgatgtgtggccatgtcttctgttatcaatgtgtatcagaatatttgactggtgatgataacatgtacccttcagttaattgtaaagaactaattggcgacgatcttgttttctccaaagctactttgagaagttgcatctctgatgatggtggcagtcttagttcagcaaattcacatctttgtgattattcactagtgcagcagcgtgactacacttcatctaaaatcaaagctgttcttgaggttctgcagtcaaattgtaaattgaagatttctagttctgacttactgaactcctctggaggttgtagagattcaccgtcttcggataatttatatgttgaagactgtgattcagatgttagggttacaaaacacacaataaagtattcagagtccacaactgaaggaccaataaaggctatagttttttcccagtggactagcatgttggacttagttgagacatcattgagacaatttagtatacagtaccggagacttgatggtaggatgactctgggtgcgagggacaaagctgttaaggatttcaatactgaacctgagattgctgttatgctgatgtcactaaaagcaggaaaccttggtttgaatatggttgctgcatgtcatgttatacttttggatctttggtggaatccaacaactgaagatcaagctattgatcgagctcacagaattgggcaaactcgtcctgttactgtgacacggatcactataaaagatacagttgaagataggatactggctcttcaggaagataagagaaaaatggttgcatctgcttttggggaagaccatgctggcggtactggaactcgcctcacagtagatgatctgaagtatcttttcatggtctagactctagaccactccttgcttgttctccccatttgaagttttgggcggtttggcatggagttaggagttaggacttaggatggttcttaaggagggtatggctgttttttcagtgcctgctgacatcggttgcacaagttggcaggcgaggccaggcttgcttgatccaagtcgtaacttgatctgttttgaagtccacaagggcatttttgtcctccaaactgctatatagctgaaggctgtgtctgtaaatatactaattaaattatatggtttatgaaaatatgtccttgcgcaactgccctttctgttgt

SEQ ID NO: 10899 - DNA, 1936 bp, Glycine max
  Clone ID: 700986164_FLI
tcccttgatagttaatagttctttgtgttggggagaggatgtgaggttaaaacaatgggtgtggagaagttgagcttattatcgacgacgaacctcgccgtgttagctcaagcgaacaacaaatgcagtagcaggaagcacgtgtgttggagatcatccacgacgccgtttcatctgcagcggaagccgatctcatggtctgtgttgtgcggtttcatgctatttgggttgggcctcatttctctcttgacgggccacatggtctctgatctcgaatggtactctcaccgtcgctctctctactctacaatggatgggagctatcgtgcgccaatcgatgtttggaaatcccagtattctaaatattactacggatgcagtgtaaggggacgcgcttatgctcctgctgtgcctgagtggatgtcgaatggctacttgcttattggtactagtggaggattgaaccaacaaagaactgggataacagatgctgttgttgttgcacgaattcttaatgccacactagtagtacctgagttggatcatcattcttattggaaagatgacagcgacttcatccatattttcgatgtcgattggttcatttcttatctcgcaaaagatgttactattgtcaaaagagttcctgataagttcatgcggtcaatggagaaaccaccatatacaatgcgcgtcccgaggaaatcagagcctgattattatcttgatcaagttttgcctatacttttgagacgacaggttgttcaattgacaaaatttgactacagacttgcaaataaccttgacaatgagctacagaaactacgttgccgcgttaattttcatgctttgagatttacaaaacctatacaagaacttggtcaaataattgttatgagaatgcaaaagatggcgcggcgtttcatagcagtgcatttgaggtttgaaccagatatgctagcattttcaggttgttattttggtgggggagaaaaggagagacgcgagcttggtgaaatcagaaaaaggtggacaacattacctgatttgagcccagatggagaacggaagcgagggaaatgtcctcttactcctcatgaagtgggtttgatgctgcaggcacttggcttttcaaaagatacatacctctatgttgcgtcaggagaagtatatggaggggaagaaactatgcagcctctcagagatctttttcccaacatctatacaaaggagatgctagctgaggaagagctgaaacctttccttccattctcttcccgccttgctgctattgactacattgtttgtgatgaaagtgatgtatttgttactaacaacaatggtaacatggccaagattcttgcaggtcgaaggagatatatgggtcacaaaagaacaattagaccaaatgcaaagaagcttagcacgatattggcaggaaggcatcaaatggactgggatacctttgccaaaaaggttaagtcatgccagagaggattcatgggagagccagatgagatgagacctggtcgaggtgaatttcatgaatttccaagttcttgcgtgtgcaagagaccatatgtggatgaagaactcagcaaagaggtatatcgttccccaaaactcgttgcaattaaccttactgcaaaagcttattcctcctcgaatggaattagaagaggcaggacatgaagttaacttgaaccatgaggttatcgggagggggggaatcaagagttatctcgctctgttaatgccaacggaacgtcaattgaaaattgaataatatggtaatgtgtccattttcacacgattgatctttgtaaatcatcaggggaaaagttcttaggtgggtggctcagttaaggtcctaaggacgtcagtgcgttgcaaaatgtagatatatatatatatataaatatatgcttgttagctt

SEQ ID NO: 10900 - DNA, 1413 bp, Glycine max
  Clone ID: 700986168_FLI
gcagtttcattccttgcaactgtacctttgggagaattattctttttccatatgatcctgatacgaaagggtatcacaacttacgagtatgttgttgccatgagaactctaagtgaaccacctgggccttcagttgatgggggtgaacagcagagtctaccatcgtctcctactagttcagctgtcactgcaatgagtggaagaagctccgttggaatgagtatacagtacaaaggtgcctggtgtacaccgccaaggatctttatggaccacccggatgaaattataccacatttggagccgggacgcctaccatccactgttgatccagatgccgtacaaccacctgacaaagggagaaaaatgaaccagcgccctgtgcgtataagtgcatggaaacttgcaaaattggattctaatgaggcaactaaggcagctgctaaggccagagcatcatcgtctgtgcttcgtccaattagttctcgacctcatgcgtatgatgttgatcatgtatccagtagcaatgtgagtggaagaagcagcccaatcagcaatcaaggatttcatataaaaaatgatacagtggggacatcaaggttatctccttccaagagctcgtaccctcctagtcaagcaagcaaggatgacatagatgcatcatgtcaacacagtatgagtaactttagcagtccacgagtctccaaccttactccttcaccaatgcagaggccaggtttgaacagagaccatttcaaccccatgtatcaacaaccatcgggaaaccagtctccttcgtcagctaaaggaagtgaagggaacataaatccagttcacgacaatgtgccacgtgtaccaatgagaagcaacaccttagctgtttcagataatagaagatcgtcagtgttttgggatcaagcagctggacgctttgtctcgtcctcatcaagaggtcccggaacagaattattgtacacgggccgttctatattttttggcagccccgttgtgaatgaacagccaagtacaggaacaagaagtagcagttcagtagtagctggtattccggatagagattcttctacattaagggattttcagcaaggtagatcacataggggtggccagcttcctgtgtttgttcctggttgtggttatgcccagcaaaacaagtttccttagattgcctccttgttacggcaactgttttttatccttttttattttattttttttaaatttcctaaactttttaaatgtccgtctttttacttcatcgtttcccccttatgacggtatgagtgcattcgcctttccatctgtataggctaatgaatggatcacgaccttttactgtacaaaattattgaccactatctttgcattttaagtttgaatatgaacgtgaatattcag

SEQ ID NO: 10901 - DNA, 1395 bp, Glycine max
  Clone ID: 700986509_FLI
cgaacactgggagatgcaagcaaagattctgatttgcccaggaatgcaaatgagagaatgaaggcaatggagcaaacattgatgaaaggaaggcaaattcaaaatgattgtgctgctgctgtgaagaagcttagggctatgctccactcaacagaggagcagcttcatgtgcacaagaagcagaccttgttcttaacacagttgacagcaaaaacattgcctaaaggtctccactgtcttccgttgcgccttacaactgagtattatagcttgaatacttctcagcaacaactccccaaccaacagaagttagaaaaccctagactataccattatgcaatattctcagataacatattggcaacagctgttgttgtgaattctactgttgcccatgctaaggacacctcaaatcatgttttccacattgttactgataggctcaattatgcggcaatgaggatgtggtttttggtgaatccaccaaaaaaggcaaccattcaagttcagaacattgaagactttacatggttgaattcaagttacagtccagttcttaagcagttgggttctccttctatggtagatttttactttaagactcatcgggcaagttctgattcaaacttaaagtttcggaatcctaagtatttatccatattgaaccacctccgattctacctgcctgagatctttccaaagctcaacaaagtgctgttcttggatgatgatatagttgtgcagaaggatctgactggtctttggtcaattgatttgaagggcaatgttaatggtgctgtagaaacttgtggagaacgtttccatcgttttgatcgctatctcaacttctcaaatcctcatatcgcaaagaattttgaccctcgtgcatgtggatgggcatacggcatgaatgtttttgatttggtccaatggaagaggcaaaacatcactgaggtgtaccacaattggcagaagctgaatcatgatagacaactatggaagttaggaactctgccgccgggtcttataacattctggaaacgcactttccaactgaaccgatcttggcatgtcctgggtcttggctacaaccccaatatcaaccaaaaagaaattgaacgggctgctgttatacactacaatggaaacatgaaaccgtggcttgagataagttttcccaagttccgaggttattggacaaagtatgttgactatgatcttgtgtatttgcgagaatgcaacatcaatccataatagatggatctcgtggcatgtgtagggcttgtaatttatattaaagcattatgacaatttttttatagattttcaaagtcaggttttaatttgggcatctctgtacttgtaaatgaaatgtgtctgtgttgtttcctttgt

SEQ ID NO: 10902 - DNA, 1627 bp, Glycine max
  Clone ID: 700986559_FLI
ctgtattatttccttcttcagcttagctcaaccacttccacttcaacaatcaacatggcttcatcactcgcaaccatactcgtcgccttgccccaaaccccgcaatgccgtagcaccttccgatccgatccacccaaactatccctaaccctaaaacccaaggccactgttacatgtaaggccaccctgtccactaccctggagactagcatccagcagcagcagcagcaagatgaccaaaaacaaaagcccgtggccgaggtgtggcgcaagatccacggggaggacaactgggccgggcttctggacccgatggacccggttatgcgaggcgagctgacccgctacggcgagatggcccaggcctgctacgacgcattcgacttcgacccgtactccaaatactgcggcagctgcaggttccccttgcccgaattcttcgactccctgggcatgaccaacgtgggctacaccatgacgcggtacctctacgccaccgccaacatcaacctcccgaacttcttccgcaagtcacgctggcctcacaagatgtggagcaagcacgccaactgggcgggcttcatcgccgtctccgacgatgaaaccagcaagcgcctcggccgcagagacatcgttatctcgtggcgaggcaccgtcacccacgtggagtgggtggcggatttgctgaatttcctgaaaccgatctcccctgacattccctgttcagacaggaaagtcaaggtagaggccggtttcttggatctgtacacggacagggagccagggtgcgggtactgtaagtactctgcgagggaacaggttttgggagaggtgaagcggttgatggagaagtatgcggacgaggaggttagtgttacgatagccggacatagccttgggagtgcgatggcgatattgagtgcctttgatattgttgaaactggggtgaatgtggggaaggatgggagaaaagcgcatgtttcggtgttttcgttttcggggccgagggtggggaatgttaggtttaaggagaggttggagggggagcttgggattaaggtgctgagggtgcataatgctcatgacatggtgccacagtcgccggggttgattttcaacgaggattcgccgcagtggttgctgaagctggtggaggggtggtttccgtggtgttacttgcacgttggagaggagttgcagttggaccataagaaatccccgtttctcaaccctgacggggatgcttcctgcgcccataacttggaggctcacttgcacttgctagatggataccatgggaagaatcgtggatttgagcgaacaagtgagagggaccttgctctggtgaacaaggactgtgacttcttgaaagatgagcattcggtgccaccacggtggaggcaagacttgaacaaaaacatggtcaggactgaagatggacgctgggtgctcgctgatcgtccactagctcaagatccacatgaagatattgatcatcatctcggagagctaggcctcgcttcttctcatactcacactcataattgaatggattcattgcatcttttggagactatcttggagtatttttgcacgagcaccacgcttataaaaacaaaatcaattt

SEQ ID NO: 10903 - DNA, 1485 bp, Glycine max
  Clone ID: 700986621_FLI
tgctattgaagcttatacagatgtgattaaacgagatatggctgatgaatcatcaattgcggtggctgtgaacaatcttgtttcactgaaaggtccaaaagatgtttctgatagcctaaggaaacttgatcgattaaaagacaaggagaatcaaagctttcgactagctcctggactagacttgaaactttcagcaaaagaaaaggaagcaatatatgcaaatagggttcttttacttcttcatgccaataagaatgagcaggcacgagaacttgtttctgcattaccagacatgtttccagaaagtgtcataccaatatttctgcaagctgccctcttggttagagagaacaaagctggaagggctgaggaaatactagcacagtttgctagtaagttccctgataagtccaaagttgttcacttagcccgggctcaggtagctgctgctgctggccacccacatattgcggccgattctctgactaagatatcggatatccaacacatgcctgctactgttgccacccttgtgtctttaaaagaacgagctggtgacattgatggtgcagctgctgtgcttgacaatgcaactaaatggtggtccaatgctatgactgaggacaataagctcaatactataacgcaagaggctgctttgttcaagctgaggcatgggaaggaagaggaagctgctcaactctatgagcagctcgtcaaaagccagggtagcatagaagcactagttgggctggtaacaacagttgcccgcatggatgttgctaaggcagagctttatgaaaagcaactgaatgctctacctggtttaaagggaattgatgtggacagcttggagcgtacttctggagtgaaacaagttgatgctcctcgtgttggtgtcgctgaaacatatgaggaaggaaagaataaaacaaaatctaagaaaaagagaaagagaaagccaaggtatcctaaaggttttgaccctgcaaatccaggtcctcccccagatccagaaaggtggcttcccaagagggagagatcaacatataggcccaagaggaaggacaaaagagctgctcaagtgagagggtctcaaggtgctgtagttagagataagcatgatactggtgcctcatctaacagttcaaatctaaatcaaaccagggaacctccaaaggagctgcgcagaatgcagtttccgagcaaaccaagccttcatccaagtcaagaaagaaatcgaggaattaaataggatcatggtttttgatgaacttttttatttgacaatttgttaatgctgttttcaatgactaagatgagggtccatacatacactgtggtctgtgggttctaattcaaaaccgtcagttttggttcaaggaatgagtatatctgttagatgcaagcatcaatgtgcaagtttgtcgtgcgtagtttgtttgagtttatgggaatcattgaaatatcacctttctgttgctg

SEQ ID NO: 10904 - DNA, 1662 bp, Glycine max
  Clone ID: 700986653_FLI
gtttcccaagagcttcctgaagtttcagacaaaaaccttcctaaaaccaagcgagttgcatcccttgacatctttcgcggtctcactgttgcgccaaagagtcataactggtggtaaaactgctattggcctggatttacatgtctgatatcgttaatatcagcatgtctctatatctgattagttaatgatcttggttgatgatgctggagagcaatggccaatgattggtcatgcaccatggaatggctgcaaccttgctgattttgtcatgcctttctttctgttcattgtggggatggccattcctcttgctctcaagagaataccaaatagacttctagctgtaaaaaaggtgatagttagaacactcaaactcctcttctggggtttgctattgcaaggtggtttctctcatgctccggacaatctaacatatggagttgacatgaaacacataaggtggtgtggcattcttcagagaattgctctagcatatttggttgtagcactggtggagatattttcaagaagtacacaggctcgagatccagaacccacccacctctcaatattcaacttgtactattggcattggctggttggggcatgtatacttgtcgtttacttagctttactttatggaattcatgttccagactggggattcactgtccataacccagacagcatatacaatggcacaactttaactgtgacttgtggtgttagagggaaacttgatcccccttgtaatgctgtgggatatattgaccgagaggtgcttggaattaatcacatgtataagcgtccagcatggaggagatctgaagcttgcaccgagaattccccatatgaaggtccttttaaaaaaaatgctccttcatggtgttatgcgccttttgagccagaaggcattttaagttcaatatctgctatcctctccacaatcattggattgcattttggacatgtactcatacacttacaggatcatccttctaggctgaagcactggcttctcctaggcttagctctccttacttcaggacttattcttcacttcactcatgccattcctttgaataaacaattgtacacgctgagctatgtttgtgtaacatctggagcagcagcattacttttttcagccttctatattacggttgatatttggggtttgacattcttgttcttgcctttgaaatggattggcatgaatgccatgcttgtttatgtcatggcagctgagggaatctttgctggattcattaatgggtggtattatggtgaccctcataacacgctgatctattggatccaaaaacatgtctttattaaggtttggcattcaacgagagtaggcatcctgttgtatgtgatcttggcggagatcctattctgggctgttgttgcaggcattttgcaccgtttgggcatatattggaaactttgaattttttttaaaaaccatctcttgtcattattattaattttttaagtgtgtatccgttctgttgctgtatattcaacttggcgaatggctgcagagccatttcggttagcaaaataggttgttgttgttatgggtatcattcgctaaaaaatgtaaaggacaaagacataaactagcttgacaaaagttaagtgcagttccccatg

SEQ ID NO: 10905 - DNA, 1335 bp, Glycine max
  Clone ID: 700986706_FLI
gtaacccaatcacatggagccttcaaagaacaacgcccaatcgaaagaagacgacaccgtggcgctgaggaggaagcgggcgcggcgcgtgagcttcgcggacaacgaaatcacctccgtccacgtcttccgccgcgacgacgacgacgattccacttcctctccctccgaacccccttcttcctccgatccctccatcctagggtttttccgcgacctcgcctccgacagcgacgatgacgaacaaccgaaactcgaagacgaagccgaagccgccgcaaactccttcctccgccctgtcggatccccctcccctggcggcagcatcaccgccgactatgatgacgatgatgattttggcggtccggtgtcggcacatttcgtccgaccggatcggctatcggactccggtgttttggaagacatcacgatggactcgacggctttctcactgcactaccagagtcttgctggctcagactccggcgacatcaagacgcgccagttcgtcaggcttggaactccaagctctcagggaagttacatggagctcacggaggcgacaaagaggcctgccgaagtggtactcgacgcaaatagtgccggcaaagactccaacgacatgagcattgaggtagaccaccaaatgagttttggctatgacataccctctcctgcgtttgatgctgctgctgcaattttggcagaaggagcacctaaggaatcaccacatcacagcttggagggttcggttatttcaccagtcactcaccttcaccagatacagccttctgattcttcaatcaaggaaaataaagagtttaatgttgtcaagagcaggaggaagtgggtcacctcttttttaattgtaaaaggattatgcccctgtggtgggaatccatggggtgggtcagggctgtaggacctcttccagcttccccagcaagccatttagctcaattttgtgaaggatttggtgttaatataaatcaaagcagatggtgtggatggtgggtggctctaactagtaccatatggcaccataggaatatcttgatctttcaaggaaaaccttttgatcactctaaagtcatggaggaggctatgtttacagcttggtcttggataaaagctagagagaaaggtttcaacagtagcttcaaccattggtcctctaatatatcggggtcctttggttaacctatgtggtgatgttctattgatgggttagtttgggtttttgggaggcagcaccagaggtgctttgtattttctttgttcagtaccacttgtactgttttatttaatcaataatataatatatatttcgccttc

SEQ ID NO: 10906 - DNA, 1210 bp, Glycine max
  Clone ID: 700986825_FLI
cggcgccggggagtccatggtggagcacgccgatttgaaggacggcggcggagacgccgtgagctggcagattgggcggtgtaagacggagattctgcagcacccgctgtacgagcagctgctgtcggcgcacgtggcgtgcctccggatcgccacgccggtggaccagctgccgaggatcgacgcgcagctggcgcagtcgcagaatgtggtcgcgaaatacgcagtgttcggacacaacaacatcgtcgccgatgacaaagaactcgaccagttcatgtcgcactatgttttgttgctctgttccttcaaagaacaattgcaacagcatgtccgggtccatgcaatggaagcagtaatggcttgttgggagttagagcaatcattgcagagtctaacaggagtttcacctggagaaggtacaggggcaacaatgtctgatgatgagaatgaccaagtagatagtgatgccaatctcttcgattgtagttttgatggggcagatagcatggggtttggtcctcttgttcctacagagagcgagaggtccctcatggagcgagtaagacaagaattaaagcatgaactgaaacagggttataaggagaaaattgttgacataagagaggaaattttgcgcaagagaagagcagggaaacttcctggtgacacaacttctgttcttaaagcttggtggcaatcacattccaagtggccttaccctaccgaagaggataaggcaaggttggtgcaagaaactgggttgcaattaaagcagattaataactggtttatcaatcaaaggaagaggaattggcacagcaatccttcaacttctactgccttgaagagcaagcgcaaaaggtgataactgatgatcgttgcatgaaattcaactctttgtcctttggtcaatcatggaaagacaatgagaaagaaccacattttgtttctgatgggccagggttaaagcagatcaaggagctaatattggtttacttatgcttaaaggccagcaaatagttcatatagtatttgtgatgctacataattaggaagttcaattaagaatcatataccaacagagaattatgatttttgttcatgttttattgctttgtgaaatatagtatatggtagcgaagggggttatgggtgtacagtaataagctgtgcattttttttcccttacaatcatactcttgttttt

SEQ ID NO: 10907 - DNA, 382 bp, Glycine max
  Clone ID: 700992681_FLI
gagaatgtactaaaccgattgatgtctcatcagtttggttgggtttttaacactccagttgatgttgttaaattgaacattccggattattttactgtcatcaagcatccaatggatttgggtactgtgaagaagagaataacctctggcgaatattcaaatcccatggattttgctgctgatgtgcggctgactttcgaaaatgcaatgttttataatccagctggcaatgatgtacacacatggcagagacccttagtaaattttttgaaacaaggtggaaggccatagagaagaaaattcctgctattgatagtgtcgcatctgagccttcaagacctactcacgtggaaacagaaatttctgatcgagttcctccccc

SEQ ID NO: 10908 - DNA, 777 bp, Glycine max
  Clone ID: 700992940_FLI
tgcttttgcaatgcacgaacaacgttttgttggcaacatgaacaaggttcaaacttggcggcttgtgctgggtgaagtagccaatatatctggctgggattgcttaaccacaagggtggagtctgaactagtagagaaaattgcaatggacatattacaaaagttggactctattacaagcgggggcctagaaagacgcatagcaacgtacaagcaaatggcacagcaaaagctagaaaagtcactgaagacgagtaacatgagagacatggaagacttgatcacgacactgctccaacttggggagctgaaattggagaaggccatgcgcactgatgattcgagcgtttgggatgacctaatggcaacgtacgagcgtgtattgcagcttaaacaggacaagtggatgcgaacgtttaataccaaagacatggaggacttagtagctacaaggcagcatgttatgcagattcagagggagcaatccaatcgtaagatcgggttccgcggtatatagacgcagatttaagttgaatagattttgggtagtgtgtgctaattatgatttatcaataatattcataatcatatgtatcagaattctcaaatgcatgtaaccgtaacaaattgtggccatacatcatagaattcaaagtagaggagaggagtgacattcatttgaggatacatatgattaaaattgataaaagaaaccaaggacggatgcagaaaattttagttgtggaggcaatatcatatatataacttagtgaggac

SEQ ID NO: 10909 - DNA, 1023 bp, Glycine max
  Clone ID: 700993015_FLI
gtcaagggaagaataacgcaatacaacacaacgcactcactctacctctgatcccagacagaagagggtggagtttttgtcatactccctcaatttttagcaagtcaaaacatcagaagaatcattttctttttttaatttttgaaattaacgttcaggcgaagatgaagggtaagacttgcgagctttgtgatcaacaagcttctctctattgtccctccgattccgcatttctctgctccgactgcgacgccgccgtgcacgccgccaactttctcgtagctcgtcacctccgtcgcctcctctgctccaaatgcaaccgtttcgccggatttcacatctcctccggcgctatatcccgccacctctcgtccacctgcagctcttgctccccggagaatccttccgctgactactccgattctctcccttcctcttctacctgcgtctccagttccgagtcttgctccacgaagcagattaaggcggagaagaagaggagttggtcgggttcctccgtgaccgacgacgcatctccggcggcgaagaagcggcagaggagtggaggatcggaggaggtgtttgagaaatggagcagagagatagggttagggttagggttaggggtaaacggaaatcgcgtggcgtcgaacgctctgagtgtgtgcctgggaaagtggaggtggcttccgttcagggtggctgctgcgacgtcgttttggttggggctgagattttgtggggacagagggctggcctcgtgtcagaatctggcgaggttggaggcaatatccggagtgccagttaagctgattctggccgcacatggcgacctggcacgtgtcttcacgcaccgccgcgaattgcaggaaggatggggcgagtcctagctagctccaatgtgtaatcgtctcattagccaaaccaaatgcctggatttcaaattttacttttgtttcctttgcttttcgcttctaccaatccttgttcattaatgtgtttaccaattggatcaacatattc

SEQ ID NO: 10910 - DNA, 1036 bp, Glycine max
  Clone ID: 700993034_FLI
gttgaacaagggtttctctgtctgcttcttcactttctctcgtttcaatcgaaaccaaaacaaaatcatgggcagaaaattcttcgttggtggcaactggaaatgcaatgggaccactgaggaggtaaagaagattgttactactttgaatgaggctaaagtccctggagaagatgtcgtagaagttgttgtgagccctccttttgtgttccttcctgttgtaaaaagtttgctgcgccctgatttccatgtttcggcacaaaactgttgggttcgcaaaggtggtgcttataccggtgaggttagtgctgaaatgcttgttaatttgggaattccttgggttattattggtcactctgaacggaggcagcttttaaatgaatcaaatgagtttgtgggagataaagttgcctatgcacttcaacaaggtctaaaagttattgcatgcattggggagactctcgaacagcgtgaagctggtacaacaacggctgttgtttctgagcaaacaaaagcaattgcagctaaaatatcaaattgggacaatgtcgttttggcctacgagccagtttgggccattggaacaggaaaggttgctactcctgctcaggctcaagaggtccatgctgatttgaggaaatgggttcatgacaatgtgagtgctgaagttgctgcatctgtaagaattatctatggaggttctgtaaatggaggaaactgcaaagaattggccgcacagcccgatgttgatggatttttggttggtggtgcctccctgaagccggagttcgtggacatcataaatgctgccactgtgaagaagaattgaaattcgtagttaggaactgatataatgctgcctttcaagctgcttcggaaattgctgtttttgagttttggatctgtgctttgtggccaatgttttgaactctgtttagtactgaataaacacgctttcctttgagatctcatccataggcgatcaattggattttgattaaatttctgaatgcaaaaatagtgtaactaccataac

SEQ ID NO: 10911 - DNA, 2050 bp, Glycine max
  Clone ID: 700996404_FLI
ggaacagggtaaactcaaacaaaaccaaccaaagtaccaaacaagaccagaaggctttgtatatctacctatctgtctaagccattcatcaaagctcaactggaccagatgatgtaggctcttagatccgagtgatgaaagttggatatttgatatcagtatcacaaaattattcagtgtgaagcaatatggggaacacgtgtgttggtcctagcatttcaaaaaatggttttgttcaatcagtttctgcggcgatttggcggtcccaattgcctgaaggttcagtgtctaatagagaatctgtaaaagaggaagcaactagtgtgcccgaatcgcccttgcctgtccaaaacaagcctcctgagcagataactatgccgaaacaagaagccaaacaagagggaaaatcagaaatagaaccggaaaaggaacaggataagaagaaacagaagaaacgtggttcagtgaagagagtttctagcgcagggcttcgtgttgattctgtgttgcaaagagagaccgataatttcaaggagttcttcactcttgggagaaaacttggacagggtcagttcgggacaacgttcttgtgcgtggaaaaggcaacagggctggagtgcgcctgcaaatctattgcaaagaggaagctcgtcaccgatgatgatgtcgaggatgtgagaagagaaattcagataatgcaccacttggccgggcatcctaatgttatatccatcaaaggtgcatatgaggatgccgtggctgttcatgttgtgatggaattatgtgcaggtggagagcttttcgataggattattcagcgtggccattataccgagagacaggcagccaagcttactaagactatagttggcgttgtggaagcttgccattctcttggtgtgatgcacagagaccttaaacctgagaattttctctttgtcaatcagcacgaggattcccttctcaaaaccattgactttggattatctgtcttctttaagccaggtgatatatttaatgatgtggtgggcagcccatactatgttgccccggatgttttgcgaaagcgttatggtcctgaggcagatgtttggagtgctggtgttatcctttacattcttttgagtggagtacctccattttgggctgaaaacgaacaaggaatatttgaacaagttctgcgtggtgatcttgacttttcttctgatccctggccttcaatttctgaaagtgcaaaagatttagtaagaaaaatgcttgttcgcgaccctagaaggcggttgactgcacatcaagtattatgtcatccttggattcaagttgatggtgtagctcctgacaagccacttgattctgccgtattaagtcgcttgaagcaattttctgctatgaacaagctcaaaaaaatggcccttataattattgcagagagcttatctgaagaagaaatagctggcttaaaagaaatgttcaagatgatagatgcagataacagtggtcaaatcacttttgaagaacttaaagctggtttgaaaagagtcggcgctaatcttaaggagtctgaaatttatgatttaatgcaagcagctgatgttgataacagtgggacaattgattacggcgagttccttgctgcaacgttgcaccgcaacaaaattgaaagagaagataatctatttgcagccttttcttactttgataaagatggaagtggctatattactcaggaagaacttcaacaggcttgtgatgagtttggcataaaagatgtccgtttggaagagataatcaaggaaattgatgaagataatgatggacgcatagattacaatgagtttgtggctatgatgcagaaaggaaatcttccagcggttggtaagaagggcctagaaaatagcttcagcgttaagttcagggaagcattaaaattgtagttttcattgtcatcattgagttttttttttttttggtgctctttattaccacacatccctccttttcactttgaaggttcaagattttattcatagtgcaaagtgtttgcatgggg

SEQ ID NO: 10912 - DNA, 904 bp, Glycine max
  Clone ID: 700998455_FLI
ggaggacgtgattctgtctgccgggtttgggatatacgaagtaaaatgcagattcatgctctttcaggtcatgataacactgtctgttctgtgtttacgcggccaacggatccccaagttgttacaggttctcatgacactaccatcaagatgtgggaccttagatatggtaaaacaatgtcaactcttacaaaccataaaaaatctgttcgagcaatggcccagcatcccaaagagcaagcttttgcatctgcttcagctgacaatattaaaaagttcacccttccaaaaggagaattttgccacaatatgctctctcaacagaaaactatcatcaatgcaatggctgtcaatgaggagggtgtgatggttactggaggcgacaatggcagcatgtggttctgggattggaagagtggtcacaatttccagcaatcccaaacaattgtccagcctggttcattggacagtgaagctggtatttatgcttgtacctatgatcttactggttcgaggctcataacctgcgaagctgacaagacgataaaaatgtggaaagaagatgagagtgccactccagaaacccatccccttaacttcaggcctcctaaagacatccgtcgattctagacatgctcctcatttatctcaggcaacttattctgctaatacagagtgggtatgtgctatctggagggcttggtgtaaatttacttgttgggagattcacagttctcttcttagcaggcttttatcatcatttttgtatcacgagaaatgttaggaaaatactctcaaatactcttttgaacacaatctttcttattgattgaaaatcacaaattggtggatgctacatatttaacgaacctccttattttgtattttctgataattttcaact

SEQ ID NO: 10913 - DNA, 678 bp, Glycine max
  Clone ID: 701004429_FLI
ccctcttagtcccaattttctagggttttattcattttccgatggcttctgcagatgttgagtaccgttgctttgtcggtgggctcgcttgggccactgacgaccatgccctcgagagagccttctctcagtacggcgaaatcgttgaaacgaagattatcaacgatcgtgagactggcagatccaggggttttggatttgtgaccttcgcctcggagcagtccatgaaagatgcgatcggagcgatgaatggacagaacttggacggccgtaacatcactgtcaatgaagctcagtcccgcggtggcggcggcggcggcggaggaggaggatacaatcgtggtggcggtggatatggtggtcgtagtggcggtggcggtggtggataccgtagccgtgacggtggttatggcggtggctatggtggtggtggtggtggtggttatggcggtggcagagaccgtggttactctcgtggtggtgatggtggtgatggaggctggagaaactaaggcttgatgtcgtcaattagggtttatgattatgccccgtatttttagttgttgtggtttgagttcgagtttctttatggtttcgtgttaccgtggttcttgtttttgaccaatatatctggttgtttatagttgatttagtgaaatgataatcagtaattggagt

SEQ ID NO: 10914 - DNA, 695 bp, Glycine max
  Clone ID: 701010766_FLI
ggctgttctaacagcagaagaagctagactctccaatgggctcatgggtactgcaaaattggtggctaaatacaggccaggcatgccaattctttctgtggttgttcccgagcttaagaccgatacctttgactgggcatgcagtgatgaggcccctgcaagacatagccttatattccgcgggttggttcccgtattgagtgcagcttctgctagagcttctcatgctgaaacaactgaagaagcaatagaattcgccatgcaacatgccaagtccaagggtctctgccacaacggggattcggttgtggcacttcatcgtgtgggcactgcttctgtcatcaagatcttgactgtgaaatgatcaccccattacagggaattcttctgctgtttttggcaaattttttagatggtgcaaaagaggtctcgttatacctcttcatatctacattggatgcaaacttcaatcaaaagcatttatcaggatgggttacctgtttttcacatatcttatattactgttttttttttttttgttacatttgccttatcattgtggcgagcagccacctgctttcatttgttaagattttgtatgaggcttttggtgaaccaaaaaactagccacttctggattttgaattctacggtctaaagttgttttaattgagaagtgtatgccttttcgtagc

SEQ ID NO: 10915 - DNA, 2355 bp, Glycine max
  Clone ID: 701011035_FLI
tgtttctcaatttttcctttccttttcgtttcccttcctactttttcttttatcacatccaattaatgttccatatcctgtgtgcataaattatgttcaagtaacatttctgttattgttttcataaagtttgattaaaatttgtgttgtaggtgtatggccagaatctccgagctttagagatgaggggatgggacctataccatcaaggtggaaaggaacttgtcaacatgatcacaccggcttccgttgtaacaggaagctgataggagcaaggtacttcaacaaaggttatatggcccatgctggagctgatgcaaaatttaaccgttcactgaacacagcacgagactatgagggtcatggatctcacacactatcaacaataggaggaacctttgttcctggggcaaatgtattcggcttgggaaatggaactgccgaaggtggttctcctagggcccgtgttgctacttacaaggtgtgctggccaccaattgatggcaatgagtgctttgatgctgatatcatggcagcctttgacatggccatacatgatggtgttgatgttctttccctctctcttggagggaatgctacggattactttgatgatggcctttcgatcggggcctttcatgctaacatgaaaggcatccctgtcatatgctctgcagggaattacggaccaacacctgcaactgtttttaatgttgcaccttggatactaacagttggtgcaagcaccttggacagacagtttgatagcgttgttgaactccacaatggacagcgcttcatggtttgatttgatttgtgttattcataaccgcttaaatatcatctgttaatttactcatgatccacacgaattacttactttactcactctagaggagctaattccgtttcccactcaaatatttcatccttggttatcagggagcaagcctttctaaagctatgccggaagacaagctttacccactcatcaatgctgcagatgcaaaagcggctaataaaccagttgaaaacgctactctctgtatgcgaggaacaattgaccctgagaaggcgaggggcaaaatattagtttgccttagaggtgtcactgcaagagtggaaaagagcctggttgctttggaggccggtgcagcagggatgattctttgtaatgatgagcttagtggcaatgagcttattgctgatcctcatctcctgcctgcatcacaaattaattataaagatggtcttgctgtctatgccttcatgaattcaaccaagaatccgttaggatatatttatccacccaagaccaagttgcagataaagcctgctccagccatggcagctttctcttctagagggcccaacacagtcacaccggagatcctcaagcctgatgtcattgctcctggtgtgaacattattgctgcctactcagaaggggttagcccaacaaatctgggatttgataagcgcagggttccttttatcaccatgtctggaacatccatgtcttgtcctcatgtggctggagttgttggccttctcaagactctccaccctgactggagtccagcagttattaaatctgcattaatgacaactgctaggacaagggacaacactggcaagccaatgcttgatggggggaatgatgctaaggcaacgccatttgcctatggatctggtcacatcagaccaaaccgtgccatggatcccgggttggtgtatgacttaaccaacaatgattacctaaactttctttgtttctctatctataatcagagtcaaatagagatgttcaatggtgctcgttatcgttgtcccgatataataaacattctggatttcaactaccctacaataacaataccaaaactctacggctcagttagtgtgacacggagggtgaaaaatgttgggccaccaggcacttatactgcaagactcaaagtaccagcacgtctttccatatctgtggagcctaatgtgttgaaatttgacaacattggtgaagagaagagctttaagttgacagtggaagttacaagaccaggtgagactactgcatttggaggtataacttggtcagatggcaaacgtcaagtgaggagtccaattgtagttgggggggttagagggtagatcattatcaagtgataacacataattaattaggatgacgtcttttttttttttctttttctggtttatattattgggagattgggaaaagggaaatgcataacttaaaatggttggttttgtcattttctattgattagttactctcacttggaagaaccacaatctgtcaatttgagaacaaaataaataaaattttatatt

SEQ ID NO: 10916 - DNA, 2205 bp, Glycine max
  Clone ID: 701011172_FLI
ctcatatatcatggctacctccatggtgaagcttatgcttttctctgctctcatactcttgtccttgcaagcagttgtgtctgtaacaccactgcattttcaacatccactagaccctttaaccaaacaagagataagtcttgtccaaaccatagtccaaaacaagtacccaagctcaagtaacaggttgagcttccactacattggactcgacgaacctgaaaaggatgccatcctcaaatgggaatccatcaaaccaactgttataactgtccctcgcaaagccttggccattgttataatcaacagccaaacccacgagatcttaattgatctaaaggcaaggcgcattgtctccgacaatattcactccgggaatggcttccctaccctttccgttgatgaacaagtcgttgccatagagctgccactgaaatacggtccattcattgagtcagtgaacaagagagggctgaacctctctgaggtggtgtgttccacattcacaatggggtggtttggagaaaccaaggacagaaggacagtgagagtggaatgcttcatgaaagaaagcagccccaatatctgggtgaggcctatcagtggactcacaatggtggttgaccttgaactcatgaagatcgttcagtatcacgacggtggcattataccagtaccaactgccgacaacactgaataccgcttttcacatcagaacccaccattcggtccaagacaacatagtctagcaacccatcaaccacagggtccaggcttccaaatcaacggacacagtattagttgggccaactggaagttccatattggatttgatccacgtgccggaattgtaatatcactggcatccatttatgatttggagaagcacaaatctcgtagagtgttatacaaaggttacatttctgagctgtttgtgccataccaagacccaacagatgatttttactataagactttctttgatgctggagagtttgggtttggtctctccacggtctcattggtgcccaaccgtgattgcccatcgaatgctcagttcctagatacatatgttcacgctgctgatggtactccgttactcatcaagaacgcaatctgtgtctttgaacaatatggcagcatcatgtggcgtcacaccgaaacaggcattcccaatgaatcgttcgaagaaacgagaacggaagtcaacttagtggtaagaactgttgttaccgtgggcaactacgataacatcattgattgggagtttaaaacaagtggctcaatcaaaccctcgattgctctctcgggtatattggaaattaagggagtggatattaagcacaagagtgagatcaagagcgatcaacatggtatcttggtgtcggcaaacagcattggtgtttaccacgaccacttctacatttaccatcttgaccttgacattgatggtgttgccaactcttttgagaagacaagtttgaagactgtaagagtgacagatggaagttcgaagaggaaaagctattggacaactgaggttgaaactgccaagactgaaaatgatgcaaagataatacttgggttgagccctggtgagctttcagtggtgaatcctaacaagaaaacctctgttggaaatgatgtgggataccgtttgattccagcaatcccagctcatcctcttctcacagatgacgattatccacaaatacgtggcgcttttaccaatttcaatgtgtgggtcactccatacaataggactgagaagtgggctggtggactctacgttgatcacagccatggagatgatactttagccgtttggaccaaaaagaatagagacattaacaacaaggacattgtgctgtggcacgttgtgggaattcatcatgttccagcacaggaagacttccccataatgccattattgagcactgcattcgagctcaggccaaccaatttcttcgagaggaatccggttcttaaaacactttctcccccggatgtccaatggcctggttgccccaagtaaaactagctagccagccatttccattatattagtgtgcttcgagtgctacaactagatgtgttccttggataatgtgaaatgcgatctgcttattgcatgtgcaagaataatgatttgatatgtattgcttattattatatcaatgagaagtttacttgaacttgacaccg

SEQ ID NO: 10917 - DNA, 3758 bp, Glycine max
  Clone ID: 701011201_FLI
tgaaactgacgaggtgtatgcacagatgacccttcaacctgtaaacaaatatgagaaagaagcaatactggcatcagacatgggtctcaaacaaaaccgtcaacccactgagttcttttgcaaaactcttacagctagtgacactagcactcatggtggattttctgtgccacgtagagcagctgagaaaatattcccacctttggattattcaatgcaacctccagctcaggagcttgttgccaaggatttgcacgacaatacatgggcatttagacatatttatcggggacaaccaaagaggcatctattgactactggatggagtgtatttgtcagcactaaaagactgtttgccggagattctgttctttttatcagagatgaaaaacagcatcttcttttaggtataaggcgtgctaatagacagcaaccagcactctcttcgtcagtgatatccagtgacagcatgcatattggcattcttgctgctgctgctcatgctgctgcaaataacagcccattcactatattttacaatccaagggctagcccctctgaatttgttgttccattagccaagtataacaaagtcacgtacacccaagtttctcttggaatgagatttagaatgatgtttgaaactgaggagtctggggtacgcagatatatggggacaatcactgggatcaatgacttggatcctgtccgatggaaaagctcacagtggcgcaatattcaggttggatgggatgaatcaacagctggtgaacgccccagtagagtttcaatctgggaaattgaaccagtggtgactcctttctacatttgtccacctccattttttaggccaaagttcccccggcaaccaggaatgccagatgatgagtcagatatggaaaatgctttcaaaagagcagtgccctggcttggagatgactttggcatgaaggatgcctcaagttcaatatttcctggtttcagtttagtgcaatggatgagcatgcagcagaataaccagctcactgctgctcaatcaggatgtttcccatcaatgcttccatttaatacccttcagggtaaccttagcactgatgacccttccaagttattgagctttcaagctcctgtcctctctaccccaagtcttcaattaaacaaacctaatctaccaaatcaaatcaaccagttgcaacagtctccagtgtcatggcctcagcagcaacagttgcagcaacaacaacagctgcagcagcagcaacagcaacaacaacagcagcagcagcagctacagcagcaacaacagcagcagctacagtcattgttgcaagtaccaatgaaccatctccagcagcagagggaacaacaactgcctgaaccacaaaatctgccattgtggcagcaactgcctcagcagctaggacagcagcctcagaaacaacagtcaagtcaacatgctactattatgaataatggggtagtcgcctctaaccagattacaaatcagttttcacaacaaccaatggcatatggtcaacttcagcaacaacagttactctcaggaggtatccagtcagctactaagaatacattgccattgacatccttaccacaagactcacaatttcagcaacagatagatcagcaagctagcctcttacagaggcagcaacaacaacagcagacacaattgcaacaatctccattgcagttgttgcagcaaaacctgccacagagagcaccacaacaacccccagccactcaaatgttacagcaaaatccctctgagcaacaactccacctgcagttgctacagaaattgcagcagcagcagcagcatcaacaacgactactttccacgtctaccccacttttgctgtctcagcttctacaacaacaaaatactcaccaacaaaaccagcaattaccgcagcccctgccgcctatatctcagcatcaacctcaacaactaggcaataacgcattctcaacagagaagcttctcaacagcaacaacttatcttcatctcttatgcaatcacagaagctttcaatgaaccatccccagaatacacagaaatcacttaccatcactagagctccctctacactaactgagggagatgccccatcatgctcaacctctccatctactaataactgccaggtgactcccccaaacctcctgaaaagaaatcagcaattaccagccacattaaggggaagtttgatagttgagcccactagtaatctgatacaggagcttcacagtaagcctgacacgcagatcaaacaggagtttctcaatgtaaaaggacctgaccagttgaagtataaagggacaattactgatcaactagaagcttcttctggaacatcttactgtcttgatcctcctggtaatgtccagcagaacttgccactttccaacttctgcatggaaggggatgtccaatcacacccaagaaatagtttaccatttgactccaatctggatggtctaacccctgatactatgcttctaacggggtatgactctcaaaaagatcttcaaaatttgttgtctaactatggtggtgctccaagagagattgaaactgagctgtcaactgctgacatcagctcacagtcgtttggagtgccaaacatgcctttcaagccaggttgctcaagtgatgttggcatcaatgatactggggttttaaataataataatggcttgcgggctaaccaaactccacgaatgcgaacatatactaaggttcaaaagcgtggctctgttggaagatgtattgatgttacccgttacaagggatatgatgaactccggcatgatttggctagaatgtttgggattgaagggcagctagaagatcctctaaggactgattggaaattagtatatgtggatcatgaaaatgacattcttcttgttggtgatgacccttgggatgaatttgtaagctgtgtccagagcataaagatattgtcatctgcagaagtgcagcaaatgagcttggatggggatttaggtggtaatgttccaatccccaatcaagcttacagtgggacagacagtggcaatgcatggaggggacagtatgaagataactcagctgcctcctttaataggtaatgatgtcaaatgctgacgcttaagagagatcaacttgtgcatttcaagtggtggtggagaaccaacttcttaacctaacaaaacttctggttggtgcttctcaaatggaaagtacacattcattacaaatgatgcagtttattggggattgtattagaggtggactggacccataactgcatcctagttctcttcaccacaccacttttgatggtgagaaagtttagatcctcaaatgtagcaagagcagtttcccttacactattaatgctacagatcctataacttcggaatcagcttttcttgtggttgtttgattaggatttctttttcattttttgcaagggacaacagaatagggcagctagtgtataatatgatcgttctgatataaacattaatttttacttatctcttgtaaatcttgtcatggttaaagttgtatacggaagtttggtgtctaagtgattgcccagagcctgagacaacgaagaatgcatgccaattctagctcttgtataaagtgcctacgatgtttccacggtgtccattatggatgaagaaaaactcagtttctttttaaactcttcaattttggaattaatgtgcttcaattacaatt

SEQ ID NO: 10918 - DNA, 1034 bp, Glycine max
  Clone ID: 701043082_FLI
aaagaggagaaggtatagactatagagagagagagagagagagatctgatccggagcgatgagtgagagtgagaagcagagagtaacggggaaggtgaagtggttcgatgaccagaagggttttggcttcataaccaccgacgacagcggcgaggaattcttcgtccaccagtcctccatccgatccgacggcttccgcagcctcgccctcggcgagtccgtcgagttccttattgactccgatcccgaaggccgcaccaaggccgtcgacgtcaccggccctgacgaatcgccagtccagggcacccgcggtggcggaggaggaggaagaggaagctatggtggaggtggcggaagaggtggctatggtggtggcggacgcggcggaagaggtggatatggaggaggcggcggaggctatgggggaggtggctatggcggaggcggtggttatggtggaggtggcggcggcggcggcggagggggatgctataagtgtggcgagactggtcacatagctagggactgcagcccaaggtgggggtggcggtggaaggtacggcggtggtgggggtggcggcggaagctgctacaactgtggggagtccgggcattttgccagggactgcccttccagtgctcgttgatacaatagtacgggggtctggccttgcttttgtgttctgtggttcttttgttttcttttttctaaatctgaatattaccctttagaaatagggttagctagggtgtggcttctttgcgttttcttttttcttttttcgggtttacattataagcaattagctcttggatttattggtttgctttttgggcttagggaaatgagagttttggtgaggttctgaaaccatcgactaaatactctgtttcctgtcgtgaacgtaatatgctctgccttaccttattttgttgaaatctttgaatatatcatggtatcatggtcctgctgttcggatggatggttgtgtatattttgaatatattgtgcaggaaatattgatttgttgtcg

SEQ ID NO: 10919 - DNA, 1002 bp, Glycine max
  Clone ID: 701043114_FLI
gaaaaaagtgacaagaagtgaagagaatgcgggttgtttgttgttccaattcaggcgtgagtgctttccctagttgtcttagattccctccactgatcgcaatttcaacaacaccctcttcgatccgctttctaaattctccacccctccgttccactgcttcgtgtaatttccattcaacatctctctctccaatcttcaatcttcaatcttcaatcgcgactattctaacataatacgatttcttcgtttgtgtttggttgcgcagcgcaacacgttacaataatggcttcgaagaattctcaacaagacacgcgcttagcgagaatcgcctctgcaatccgagtcatccccgactttcctaagccaggaattttgtttcaggacataaccacgctgcttcttgatacaaaggctttcaaagacaccattgacttgtttgttgagaggtacagagatcaaaacatcaatgttgtcgcaggagttgaagctagaggctttatatttggtccacccattgcattagctattggagcaaaatttgtccccatgaggaaacccaataaattgcctggggaggttatctcagaagagtattctttggagtatggaacagacaaaatggagatgcatgtaggggctgtacaacctggagaacgagccttaatcatagatgatcttattgccactgggggaacgttaggtgctgcaattaagcttctagaacgtgttggggtgcatgttgtggagtgtgcttgtgtgattgaattgccagagttaaaggggcgggaaaggttgggagacaagtcgctatttgtcttgattaatgggggagcctgatcttttttccaagtgattgtgtttttattagctggctcttgttaggagctttattgatgactgcttagatttccttaagatatattttgatgctgcggaaacggaaagcgtgctttgtttgagcgcgctcagttctgctcaattattattattattattatc

SEQ ID NO: 10920 - DNA, 3020 bp, Glycine max
  Clone ID: 701058042_FLI
atttattgaaagttgaaagaaaacataaggcaatggattgggtatgagatggtgaaatccgggaataggaatatggaatcaaccgcaaaagttcacccttccaatgatcctgaactcgatcccgactcttacgccctcgagaagttcagactatacgaaaccagagcgaggttttacctgatcggtagtgatcggaacaagaggttcttccgggtgttgaaaatcgatcggtcagaggcgtctgatctgaatatcagccaagaccccgtgctgtattctccccaggaaatcaagagcttgcttcagcggattgctgaaggtaacagggccactggcggcctcacttttgtcgctaaggttttcgggattgccggctgcatcaagtttctcgagtcctactatttgattctcgttaccaagcgcagacaaattggttctatttgtggccatgcaatctatagcatcaaggagagccaattgatagcgattccgcatgtttcaattcaatctgatttagcccactctaagactgagctcaggtacaaaaagcttttgtctagtgtcgatttgaccaacgattttttctttagttacacttaccctataatgcaaagtttgcaaaagaacgtctcctccagctccagtcaagagggagggatgccatatgataatatatttgtttggaatgcctatttgacacaagcaatcagatcaagatgcaataacaccatttggaccatagctttagttcatggtcattttaggcaggtttgtcattcatcaatatcttagagtctatatctcaccacaccaccgttgaatcttttctgaattcaatggcttggcttactgcttaatcgtatgataatggcctgattcgtctatcaatttttgggagggacttcagtgtttccttgatttctagacgatcaagacattttgcagggacgcgggaaggattgaaggaggaggagcaacaaaccaggtacttgaaaaggggtgtgaatgatcgggggagggttgctaatgatgttgagacagagcagattgtccttgatgaagaatcaggctcttgcaagggaaagatgagttcagttgtgcaaatgcgtggatcaataccacttttctggtcacaagaagcatcaagatttagccccaagcctgatataattttgcagaggtatgatccaacataccaagcaacaaaattgcattttgaagacctagctaagagatatggcaatccaattattgttctgaatttgattaagacagttgagaagcggcctcgagaaatgatgttgaggcgtgaatttgcaaatgctgttgggtatctgaaccaaattctaccagtggagaaccatcttagatttattcactgggattttcacaagtttgcaaagagtctgccaatgttttggcagttttaggagctgtagcaagtgaagcgcttgatttaactggtttttactacagtggtaaacccagcatcattaagagagccaacaagagcaatcaaacaagcacagggagggatacttcactgagagatctgagagctagttctgtggatcttgtgaggattgggaacagtaatgaaatgctaaattctgtggttaatcaagacaaagagactgacatgaaccataagaataaaaaagataattttggtagtgatgcaccacattttcagagtggagttctccgtactaactgcattgactgcttggaccgtacaaatgttgcccagtatgcatatggtcttcaagctttaggacgccagctccatgcaatgggtttgactgatgttccaaaagtggatcctgatagtagtattgctgcagctctaatggatatgtatcaaagtatgggagatgctcttgcccagcaatacggtggctctgctgctcacaatactgtgtttccagagaggcagggaaagtggaaagcaacaacacaatcaagagaatttttaaaatccataaaacgatactatagcaatgcttacacagatggtgaaaaacaagatgcaataaacttgtttttaggttacttccaaccacaggaagggaaacctgcgctctgggagctggattcagattattatctccatgtatctgggattggggatgatctaattcctgagaagtgttctgaaccaaatctcagttcttctggaagaggtggaatgatattcacgcctataccagcttgcagagaagacttctctcgcataaagttgacatcatttgacaagttaattgaaaagacctgtagtacaattaaaaatgtaagactatgccgtgagccggatcagagaccaggtggggtttctggaaacagtggtgtagcacctgatgcagctgagatacagctcaaaagcccaaattggcttttcggccagagaaagtatgaagagggttcctctgctgcaaaagttgcttcttgtgaatctgacgttgaaggatctcatgctaatggcttttgtgacttgaattggctttcctctggcaatgctatgaatgaagaagatgttttccaaaggtaccttacaatgacctcagcaaatgaggccaacggttggtatggaggtagtctccttggtgatcaagatgaaaacagtgagatatatgaacattatgcagagttatgtcagggacctgccttggaacttttccaaaatgaccctgatagggagcaacactatgcagatgctttaagcacgagttcatatgaaattgttaatgatgctgccgttgcagcagaaatggaagcaactctaaaggagtatgaccaagttggtgctgaccttgggatcattcccaaatcttgtaaattctttgctgatgatccgagctggctgacgagatggttaactggggacgaaaaagtaccaaggatatgatgggacattattttgacatgtgtaatttgaacacttatttctgtactattttaactcgcagctccttatacgaaagtcattgttctaagttttctaatcaattgcctggccttag

SEQ ID NO: 10921 - DNA, 966 bp, Glycine max
  Clone ID: 701058096_FLI
gatttttggcatgctgtttggccaaacactcccattccaagttcattgcgagatcttctaaagcctggccctgcaagtgttgaaatcgatgatcaccctatgcaaattgaagaaacacagtacccgaaaaccttcttctataaagaagaccttcatccaggcaaaacaatgaaagtacaattcagcaagcctccctttcaacaaccatggggtgttggtacatggttaaaggaaattaaagacactactaaagaaggatatagttttgaagagctatgcatcaagaaagaagccattgagggagaagagaagttttgtgcaaaatccttgggaacagtaattggttttgccatttcaaagctgggaaagaacattcaagtactttcaagttcctttgtcaataagcaagaccaatacactgtggaaggagtgcagaatcttggagacaaagcagtgatgtgtcataggctaaatttcagaactgcagtattttactgccatgaagtccgtgaaacaacagctttcatggttccattggtggctggtgatggaaccaaaactcaggcacttgctatttgccactcaaatacttctggaatgaatcatcaaatgcttcatcaacttatgggagttgatcctggaactaaccctgtttgccatttccttggaagcaaggccattttatgggtacccaatttatctgtggacactgcctatcagaccaacattgttgcttaattagtccatgcatcttgagcaccatgagaatgagattgtgtataaaataaattatcatgtgctgtgtgttgtgcaagtactaccttctctagctagattgctagagctagaatttcaacctacctatgtgtactgataagatctgcttccctacttaaagagagcatcatcctgtgatcagtgtgcttcgtattctctctctctatatatatatggtaaaaagtggtt

SEQ ID NO: 10922 - DNA, 1474 bp, Glycine max
  Clone ID: 701058121_FLI
atttgtcaagagatggaacctaagcataataaccttagcaaggaggctgcttccaataatggtgatggcaatagaattggaaacgattcaaatgaaatggggtggttagaagttgtaagttctttagttgatgattatgatgccactacaagtcacagattggaagaatgtgaaacatacttgattgagttggaaacttcagaggctccaaaagtttgtcatgttcaaggcgatgcattaaattataaagatagtcttcaatcagaattggttgctggttcttctagtactggtgacaatactagtgatgtcgaagatgatattggtgcaaagaatgcaggtagccaatatagtcatgtatgcaggattgatctgcttgaggaaatcattgatgaggcaaaaactaacaagaaaatgttgttttcatcaatggaatctcttatcaacttaatgagagaagtggaacttcaggagaaagctgcagagcaggctaatatggaagctgctactggagggtctaatattctggccaggatagaagagtacaaaactatggtggtgcaagctaacgaagcgaatgacatgcattctggagaagtttatggggaaaaagcaattctcacaactgaactgaaggaacttcaatcacgcttgctcggcttgtctgatgaaagggacaggtctcttgcaattctcgatgagatccgccacattcttgaagtgcgactagctgcagcagaagaactgaggaaagcagctgagcaactaaagctggaaaaggaggaatctgcacggaaggctcttgttgaacaggagagactggtggagaaggtagtacacgaatcacaaagactacagcaggaggcagaggagaattcaaagttacaggagttcctaattgatcgtgggcgggttgttgatatgttgcaaggagaaatctctgttatatgtcaggatattaagcttctaaaagagaaatttgatgcaaatcttccactgagtaaatccttcacctcaagccagactagttgcaagttagcttcatcaggatcttcccacaaaacattggcatctgatgcaggttccgagcatagtgagtcatctgaaatacggaagacaagccggacagcctcaattgaaagcctttcttccaagagtgggcacgacgaggaagaaaaatccaaagctgatcacaatgctcttcttgatgatgggtggtatattttgtcggactgaattccggagtttactgactatttgttctgctgagagtggaaaaacataggagttaatgctatattgtttatacaacaaaataaaaccttagaatccttggatgattttgctttatgtttcagtagcatactagcatgcatacaatttttatatacgttctcgaggttgggttctcattgttttccagattttgtatagaaaacgtcacagggaattactagattacttctttctcttc

SEQ ID NO: 10923 - DNA, 1073 bp, Glycine max
  Clone ID: 701058294_FLI
aaatttagagtcgtaaaaatctaaatatcgaatttttaaagattacatgtaattaattttgattttgcttgtaacatgttctttttaaaaataaataaaggtgatttattttagcaattttgttctctgatatctatatatattttcgcgtgactctgtaggaaaatgaggttgaagagggtagtgagggtaccagctataagcttgaagatggctgatattccaccagatgattattcttggaggaaatatggacagaaaccaattaaaggatcgcctcatccaaggtacatcaaatactatgttactactatataactaatttaatttaaattatttttctttttgcaaagtttattcgtcttggactatcgttagtttatttggtataattggtaattgctagtttgtttatatagataaatattaaatttattagtagagtggatcgaatcccgtaacattttttttctttaaaatcatccaatttaccttatatgtctctcacttgatttcaaaatttaaagtggacccaattaatttgtttcttttatgctgtttctgagtacctattgaatctgaggagtggtcatgggtgttaattttttggttttgggaatgataattgcaggggttactacaagtgcagtagtgtgagagggtgtccagcgcgaaaacatgtggaaagagctttggatgatccagctatgctggtggtaacatacgagggagagcacaatcacactgtctctgctgccgatgctactaatctcattctagaatcgtcttgaaattcgtagccaaaatcatcttttttccgtgacaaggtttagaaacgcaagccatcatttaatcaacgttacaagttttcaacggggtgcaattatggcgtgttgaattgaattgcaactttactactctagtcagtcaggggggcattaaaatctccaaagaaattagtagtgggtgttgttccctttccctgtacactattggattcttttttatctttatttttttttttctcgttctcttcaaggctaaatggaacattgtgaatccgttgcatcatt

SEQ ID NO: 10924 - DNA, 1138 bp, Glycine max
  Clone ID: 701058303_FLI
ccttcctttattctctcctcttaaacctttcacttcaagcttcaagttttcaagctacccacccactgctcatactcacacccaatgaagatccagtgcgacgtgtgcaacaaacacgaggcctccgtcttctgcacagccgacgaagccgccctctgcgacggctgcgaccaccgtgtccaccatgccaacaaactcgcctccaaacaccaacgcttctctcttctccgcccttctcataaacaacaccctctctgcgatatttgccaggagagaagagccttcacgttctgtcagcaagacagagcgattctctgcaaagagtgtgacgtgtcaattcactctgccaacgaacacacccttaagcacgataggttccttctcactggtgttaaactcgcagcttctgccatgcttcgttcatcacaaactacctctgattcaaactcaaccccttctcttcttaacgtttcacatcaaactactccacttcatcttctccaccaccaccaccaccaacaacaacaacaacaaggttgctgttgaaggaactggttcaacgagtgctagcagcatatcagagtatttgatagagactcttcctgggtggcaagttgaggactttctcgattcatattttgttccctttggtttctgtaagaatgatgaagtgttgccacggttggatgctgacgtggaggggcatatgggttcgttttcaaccgagaacatggggatctgggttcctcaagcgccaccacctcttgtgtgttcttcacaaatggatcgggtgatagttcaaagtgagaccaacatcaaaggtagcagcatatcgaggttgaaggatgatactttcactgttccacagattagtcctccctccaattccaagagagccagatttctatggtagaaacaatcctctttgttttgttttgttttgtgccttctctctttttgttaccctggtttgtagcttactcttgcccttgttttcgatttggttctgtttgactttttttcttcttctttttcttggttctcctccctctttccctaccgggctgtgctttgaagtattgataaatttgtgcacctactagtgattgtaaatataaaccttttcaaatacatgttt

SEQ ID NO: 10925 - DNA, 1586 bp, Glycine max
  Clone ID: 701058357_FLI
aaattacttggaggttacaaacagggaaacgggatagtctgtggttgttgtgatatagagataagcccttcacagtttgaagcccatgctggaatggctgctaggcgtcaaccttaccgacacatatatacttccaatggattaacacttcatgacatagctctatcgttggcaaatggtcaaaaccttaccacgggagacagtgatgatatgtgtgcagtatgtggagatggaggagatttgattctttgcaatggatgccccagggcatttcatgcagcctgcttgggtttacagtgtgttccagacagtggttggcaatgtctaaattgtatagataatgctggtaatggaagagaatcttctattgtgaggccaatcatgatacgattgacacgcgttgataaaacaccagaagttgaaatgggaggatgtgttgtttgcagggaacatgatttcagtgttgctaaatttgatgaacgaacagtaataatttgtgaccagtgtgagaaggagtatcatgttggctgcttgcgggacatggggctatgtgagttggaagagctgcccaaggataagtggttttgttgtgatgactgcaatcgaatatatgctgctctacagaattcagtttctgctggagcagaaattataccagcttccttttcagaactaataatcaggaagcatgaggacaagggattatgtacctatggggccatgaatgatatccagtggagaattttaagtggaaaaagtcgttatcctgaacatttaccattgctttcacgagctgctgcaattttccgagaatgttttgatcccatagttgccatttctggtcgtgatctgattcctgttatggtctacgggagaaatatttctggccaagagtttgggggaatgtattgcattgttttaattgtgaattatgttgtagtatctgctgggcttcttaggatttttggccgtaatgttgctgagcttccacttgttgccacaagcagagcacatcaaggaaaaggttattttcaagtgttgttctcttgcatagagaggttgctgtcttctctaaacgtggaaaagttggtgcttcctgcagccggggatgctgaatcaatttggactaagaaattgggcttccgaaagatgagtgaagatcagttatccaaacatctcagagaggtgcagctaacactcttcaataaaacttcaatgctggagaagacagtgcagctggctatagaatgaattttatctggtgttgtaactaatttttggctatttattcatttttttagcattttcctcactgtaacgttgctgcgatgttcatgctgccgtattgttcttttcttaattttttgtttcccacgtagtatgggtggttgtggcttggtcttggttccagccagccatgtctctttttgtacaatgtaggataaaaaggcgtaaaaaatagggaacatggcctagaaggaagtagaggagttccaaagagccagcatgctgaccaattttattttttttaattagcatgcatgttggatatataaaatcctactgtattgatttttttttcctcc

SEQ ID NO: 10926 - DNA, 2292 bp, Glycine max
  Clone ID: 701058512_FLI
gcttcagtcatgtctctctctgcattctcattccctctccatctgagacaaacaacaccaccttctgatcctaaaacatcatcaacccctttgcctttgtcttctcactcccattggggtgcagatctgctcacacaatcccaacgcaaactcaaccaggtgaaaagaaggccacatggggtatgtgcatcactatcagaaatgggggagtattattctcagaaacctcctactccactgttggacaccataaactatccaattcacatgaagaatttggctaccaagaaactgaaacaacttgcggatgagctgcgttctgatgttattttccatgtttctagaactgggggtcatttgggatctagccttggtgttgtagaactcactattgcccttcactatgttttcaatgctcctaaggacaaaattttgtgggatgttggtcatcagtcttatcctcataagatactcactggtagaagggataagatgcataccatgaggcagacagatggattggccgggtttacaaaacgatctgagagtgattatgattgttttggcactggtcacagctccacaacaatatcagcaggactgggaatggctgttgggagggatctgaagggagacaagaataatgtagttgctgttatcggtgatggtgctatgacggctggtcaagcttatgaagccatgaacaacgctggatatcttgattccgacatgattgttattctaaatgacaacaagcaggtctccctaccaactgctaatctcgatggtcccataccacctgtaggtgctttgagtagtgctctcagtaagttacaatcaaacagacctcttagagaactcagagaggttgctaagggagtcactaaacaaattggtggcccaatgcatgagttagctgcaaaagttgatgaatatgcgcgtggcatgatcagcggttctggatcaacactatttgaagagcttggactttactacataggtcctgttgatggtcataatatagatgatcttgtgtccattctaaatgaagttaaaagtactaaaacaactggtcctgtgctgctccatgttgtcactgaaaaaggccatggatatccatatgcagaaagagcagcagacaagtaccatggagttactaagtttgatccagcaactggaaaacaattcaaatccaatgctgccacccagtcatacacaacatactttgcagaggctttaattgctgaagcggaagctgacaaagacattgtcggaatccatgctgcaatgggaggtggaactggcatgaatctcttccttcgccgtttcccaacaagatgctttgatgtggggatagcagaacagcatgctgttacatttgcggctggtctggcttgtgaaggccttaagcctttttgtgcaatttactcatcatttatgcagagagcttatgaccaggtggtgcatgatgtcgatttgcagaagctgcctgtaagattcgcaatggaccgagccggattagttggagcagatggtcccacacactgcggtgcatttgatgtcacttttatggcatgcctccctaacatggtggtgatggctccttctgatgaagcagagctttttcacatggttgcaactgcagctgccattgatgatcgacccagttgtttccgatacccgaggggaaatggtattggtgttgagctaccactagggaataaaggcattcctcttgagattgggaagggtaggatactaattgaaggagaaagagtggccttgttgggctatggatcagctgttcagagctgtctggctgctgcttccttgttggaacatcatggcttgcgcgcaacagtggcggatgcacgtttctgcaagccattggaccgttcccttattcgcagccttgcccaatcgcacgaggttttgatcactgtggaagaagggtcaataggaggattcggatctcatgttgttcagttcatggcccttgatggccttcttgatgggaaattaaagtggaggccaattgttcttcctgattgttacattgaccatggatcaccggttgaccaattgagtgcagctggtcttacaccatctcacatagcagcaacagttttcaatctacttggacaaacaagagaggcactagaggtcatgacataaaacaaatgcaaaggggttcaatttttgttccctgcaatgtacaaagtagcgtgattcacccagtgtaatacaaatgtgtttgttaaaaaataatagaaatggaaaatgcagattgac

SEQ ID NO: 10927 - DNA, 402 bp, Glycine max
  Clone ID: 700987162_FLI
ctgccccggactggaatgggcctatgaggagatgaagcgacttcgtcaggaagacttgtctgctggagagacatgttacagctctgaaagttaatttgcttttcagggatttggttggtgtttgatagtgtgtttggatgccattcagaggagatcaaagttaatataactagcttttgcgtcacctttacaaatttgacatgaaaatatgctgatacgtacattcagaaagcgtatccagacatgcactgtatctgtattgtatgaataaatgtacaattgaaataaaactactatgtagtgtatggggatgttttactattttagcatcttggatgcccttgtttatggaaacaattatgtacgattattaatgtgatatgctgtgattgttgatgtttt

SEQ ID NO: 10928 - DNA, 2324 bp, Glycine max
  Clone ID: 700987170_FLI
gaaagaaggaagtcccttcctttctaaatggatcagctaacaacttgctccaatttccaaagctagacaaggaaagaatgaagaacagttaagctcagaatctggaaccatcacttgccttgattttgcaccaaaatatacccatgaaggtgcagttctctattgttgcacttgttctattaggctccacactgtgtctttctggcctaattgtagctgacttgaactctgaccaacaagctctcttggagtttgcttcaagtgtcccacatgccccaaggctcaactggaagaaagattctgtttcaatttgcacctcatgggttggtgtgacatgcaactcaaacggcacacgtgtcgttggccttcaccttccaggaatgggattaatcggtaccattccagagaacagcataggaaaactagatgctcttagggtcctgagtcttcattccaatggccttataggaagtcttccttctaacattctctccattccttcactccaatttgcataccttcagcacaatggcttctctggcattattccttctcctgtgacccctaaactcatggcattggacatttcctttaacaacttttctggcagcattccaccagcttttcagaaccttagaagactcacttggttgtatctccaaaacaattctatatctggagctattcctgacttcaaccttccaagtctcaagcatttgaacttgagcaataataacttgaatggctcaattccaaattccataaagacatttccttacacttcttttgtaggaaattctctcttatgtggtccacctctcaatcattgctctacaatctccccttctccatctcctgccactgattaccagcccctcactccaccaaccacacaaaaccaaaatgctacacaccataagaaaaactttggcctagctactatacttgctctagtcattggggtcattgccttcatctctttaatagttgtagtgatctgtgtgttctgtttgaagaagaagaaaaacagcaaaagcagtggcatactgaaaggaaaggcttcttgtgctgggaagactgaggtttcaaagagttttgggagtggagtgcaaggggctgaaaagaacaagctctttttctttgaaggttcctctcatagctttgaccttgaggatttgctgaaggcttcagctgaagttcttggaaaaggaagctatggaacagcatacaaggctgttttggaggagggaacaacagtggtagttaaaaggttgaaggaagttgtggttggaaagaaggagtttgagcagcagttggagattgtggggagagttggaagccaccccaatgtgatgcccctaagggcttattactactccaaagatgagaaacttctggtttacaactacatgccaggtggcagcttgtttttcttgttgcatggaaacaggggagcaggaagaaccccactagactgggactccagagtgaagattttgctaggagctgccaagggaatagctttcatccactcagaggggggtccaaagttcgcacatggcaacatcaagtcaacaaacgtgctcataaaccaagaactcgacggctgcatctccgacgtgggattgcctcctttaatgaacactccagcaaccatgtcaagagccaatggctacagagctccagaagtcactgactcaaagaagatcactcacaagtccgatgtctacagcttcggggtgctgctgctagaaatgctgacagggaagacccctctgaggtatcctggctatgaggatgtggttgatcttccaaggtgggtgaggtctgttgtcagagaggaatggactgcagaagtgtttgatgaggagcttctgagagggcaatatgttgaagaggagatggttcagatgcttcagattgcattggcatgtgtggctaaggggcctgatcaaaggcctagaatggatcaagttgttagaatgttggaggagattaagcatcctgagttgaagaactaccacaggcaatcctctgagtctgagtctaatgtgcagacaccaacaccatgatcacgatgagatgcatttgatgggagactaataaaattttctctgcagaatggggtttgtcatcattaggctcatattgtgttttgcttgcatgccctcaaccaaataagcatgtttcattgtaaaatactactaatgatgatgtttttttatttgtgttggccataaaaggcttcttttcatgtttcacattattttgttgcgttatgacacttttagctattggctaattgctattcagttggtggaaat

SEQ ID NO: 10929 - DNA, 1678 bp, Glycine max
  Clone ID: 700987224_FLI
atgaaaacccaaagtgcttctctcctctgtctttttctctctcttgctatccttttggctagtggcactgctgcaagtgcaactccaagaagcgcagtgccaagccaccatgtttcaacattcaacagaagcctttttccttccacttttctctttggaattggttcttctgcttaccaggcagaaggagcagcaagtgtagatgggagaggaccaagcatatgggacacctacactagacagcatactgaaaagatttgggatcatagcaccggtgacatgggagctgatttttatcatcgatacaagggtgacataaaaatagcgaaagaaattgggctggactctttcagattctctatctcatggtcaagaatattcccaaagggcaagggagcagttaacccccttggggttaaattctacaacaatgtcatcgatgagatcctagcaaatggtttaaaaccttttgtcactctttttcattgggactttccacaagctcttgaagatgagtatggaggattccgtagtcctaaagtagtggcggattttcgtggctacgcaaacttctgcttcaagacctttggagacagagtcaaatattgggtcactttgaatgaacccttatcatttagtctcaatggctacaatggtggcacctttgcaccaggtagatgttctaaatacgttgccaattgtagtgctggcgattcatccactgaaccctatatcgttggacactacttattacttgctcatgaatctgctgccacattatacaagacaaaatatcaggctcgtcaaaaaggacaaattgggatcactaatccaacacactactttttgccaaaatctcaaagtgctgcagattacaaggcagcaagtagagctctggacttcttctttggttggtattctgatccggttttctatggtgactatccggagagtatgaaatcttcagtaggttctaggctcccaaaattcacaaaagctgaatctgaaggtctaaaaaattccatagattttcttggtgtgaattactacaccacttattatgcggaacatgctgaacctgtcagtgccaaccgaaccttctacacagacatactagccagtctcagtacggaaaggaatggtctacatgttggaaccccgactgatttgaattggctctttatctttccaaagggaattcatcttcttatggcacacataaaggataaatacaagaatcttcctatttacatcactgaaaatggcatggctgaatcaaggaatgactcaataccagtcaatgaagcccgcaaggatagtataaggattagataccatgatggccatcttaaattccttcttcaagcgatcaaggaaggtgttaatttgaagggctattatgcatggtcattttcggacagttttgaatgggatgctggttacacagttcgattcgggctcatatatgtggattacaagaacaacttgaaaagataccccaagttctctgctttttggttgcaaaagttccttctcaagtgatctgaatttagtgttcctttgacatgtctagtgtttttcttgtttatttccctagatttcatcgtatatcacttgtgttggatgtaatcaagagatcattttatcaaataaataatgccaaatggcatgtcgaagt

SEQ ID NO: 10930 - DNA, 1614 bp, Glycine max
  Clone ID: 700987283_FLI
gagaaattttcataaggaaaaaggaagcagaagtgaagatcgaaacggtgaagaagcctaacagcagcaaagagcgttagagctgatcgcttgagataaggtcaatttgcagttgcacgcttcccaattcgcacacccatatcacatcacatctttctccacacgcaacgcaacctttttataatcaatcatcctcactcgcatttgaagacgcagcaatctttcccgtgaaaagggaccatggaggcaaattcaggtgccagcgaccgaatttcgagaatcgccggccacctccgcccccagagagaggatgatgtttgtttgaagcgtagcgattgccgtgcaaaaggtggggtctccggattcaaggtggccatattgggtgccgcaggaggcatagggcaacctctggcgatgttgatgaagatgaatccactcgtttcacttctccacctctacgatgttgttaacacccctggcgtcacttctgatataagtcacatggacaccggcgctgttgttcgaggatttttggggcagcagcagcttgaggatgcacttataggcatggacttggtgatcatccctgctggtgttcctcgtaaacctggaatgacaagagatgatctcttcaatataaatgctggaattgttaaaacattgtgtgaagcaattgcaaagtgctgtcctaaagccattgtcaatgtgataagcaatccagttaactccacagtcccgattgcagccgaagttttcaaaagagctggtacttacgatcccaagagacttttgggagtcactatgcttgatgttgttagagccaatacgtttgtggcagaagttctgggtgttgatccaagggatgtggatgtcccagttgttgggggacatgctggaatcacaattttacctcttctttctcagattaaacctccttgctctttcaccccaaaagaaattgagtacctgactggtcgcatacaaaacggtggaactgaagttgttgaggccaaagctggagctggttctgcaacactatcaatggcatatgctgctgttaaatttgcagatgcatgccttcatgccctgagaggagatgctggcatcattgaatgtgcatatgttgcttcacaggtgactgaactcccattctttgcatcaaaagtacgacttggccgagttggggtggaggaaattcttcctcttggtcccctgaatgattatgagagggagagtttggaaaaggccaagaaagagttagcagcaagcattgagaagggcatttctttcatcagaaaatgagtagttgatgatagtacgtcccgaaaataaatggttagattgtgctgtgtccattgtgagatcatatagatttataattagttatgtgatatgtatgaatatcgagttctatctagaaacatgtaaatgtaataattggaataccgaattccatttattattccgtctcgagttatccccgtgaagtttgagtttgagtctaaaaatcaattcagatttttgtattatctatagacgaatataaacctgcccaattgagcatgatatttaagttcagtaataaaaatgttaattatcacttcattttcacct

SEQ ID NO: 10931 - DNA, 1227 bp, Glycine max
  Clone ID: 700987455_FLI
ccgaataacccaatgtatcatcatcctctgaattcaactcgctcgcacatgggaatttattgaccagcatcaaccagatctgtgactgtgttcgattgggtaccaactattattcagtgctgcagctactactgtggcacaacattaagcttttagttgaatcagataggctgtcagtaacgtaaaagtaatccctgtgccccagccatggctgcaccgtttttctcaacgccctttcagccttatgtttatcagagtccgcaagatgcaattataccttttcagattttagggggtgaagctcaagtggttcagataatgttgaagccacaagaaaaaatcatcgcaaagcctggttctatgtgctttatgtctggatccgttgaaatggaaaatgcctaccttccagaaaatgaagtaggcatatggcagtggttatttggcaaaactataactagcattgtacttcgcaattctggaccaagtgatggatttgttggaattgctgcaccttattttgcaagaattcttccgattgatttggcaatgttcaatggagagattttgtgtcagccagatgcttttctttgctctgtcaatgatgtgaaggttagcaacatagttgatcaaaggggacggaatgctgttgctagtgctgagggattcttgaggcaaaagctatctggccaagggcttgcattcatattagctgggggatctgttgtacagaaaaatcttgagatcggtgaagttctagctgttgatgtttcttccattgttgctgtgacaagtgcagtcaatatccaaataaaatataatggtcctgcaagaaggacaatgtttgggggtgacaatgctgtcacagccgttctaacaggaccaggcattgtgttcatacaaagtttaccttttcatcgattctctcaacgaattgctagggcggtgacatcacccaacatgagggaaaatcccaagtttttcatacagattgcagttttcttttttctggcgtatgttgtcattgtatcttcgttaatattaacagatgtatgaaattcagtttggtttttctttagtagtttttacttttctcttatcttaccatatgtagtacaggaatgagggagagggggtggggttcagattttttgttggcagatctttatgccaattaaaaaaacatcctagtaatgtcattatgtctatcaataaaataggatttatttg

SEQ ID NO: 10932 - DNA, 107 bp, Glycine max
  Clone ID: 700987493_FLI
gcgattgccatgccacataaagtacaaattcaaaatgcattcttgttttaaaatttcgcaaagcagctctgatttctagaagaataaggtggaaacttaattggggt

SEQ ID NO: 10933 - DNA, 3237 bp, Glycine max
  Clone ID: 700987649_FLI
ctctctctctctctctctctgagctcgtcgaattcgaaatctgatctccaacgattgatctcggtagaggctagtgcactctccaatctgcaaaaatgcctctcagactcgaaatcaagcgcaagcttgcgcaaagatcagagagagtgaaatgtgtggatctgcatccaacagagccatggattctggcgagtttatactctggaactgtctgcatctggaactaccaatctcagaccatggccaaatcttttgaggttaccgagttaccagttagatcggccaagtttattgcacgcaaacagtgggttgttgctggagcagatgatatgtttattcgtgtatataattacaacacaatggataaagtcaaagtatttgaagcacatactgattacattaggtgtgtggcagttcatcctacccttccttatgtgctttcatcatctgatgatatgctcataaagctctgggattgggaaaaaggctggatctgtacccagatatttgaaggccattctcattatgtcatgcaagtaacatttaatcccaaagacacaaacacctttgctagtgcatctcttgatcggacaataaagatttggaatcttggctctcctgatcctaattttactttggatgctcatcagaaaggagtgaattgtgttgattattttacaggtggtgacaaaccatatctaatcactggttctgatgatcacactgctaaggtatgggattatcagaccaaaagttgtgtccagaccctagaaggtcacacacacaatgtatctgctgtatgctttcatcctgaacttcctataatcattactggttctgaggatggcacagtacgcatatggcactccacaacttataggcttgagaacacattaaactatggtcttgaaagagtctgggctattggatacttgaagagttctcgtcgggttgtgattggctatgatgaaggaacaattatggtcaaacttggtcgagaagttcctgtggctagcatggacaacagcgggaaaattatttggtctaagcataatgaaattcagactgtcaatataaaaagtgtaggagcagatgtagaggttgctgacggagaaaggttacctttagctgttaaggagttgggtacctgcgatctctaccctcaaaatttaaagcacaatccaaatgggaggtttgttgttgtgtgtggagatggtgagtacattatatacactgcattggcatggagaaataggtcatttggttcagcactggaatttgtttggtcttctgagggagaatatgctgtcagagaaagtacatcaaagattaaaattttcagcaaaaatttccaggaaaagaggagtgtccgaccaacattttcagctgaaagaatatttggtggcactctactggcgatgtgctccaacgatttcatctgcttttatgactgggctgaatgcaggttgatctatcgcattgatgtcaatgtgaaaaacctctactgggctgacagtggtgatctagtaacaattgctagcgatacatcattctacattctgaagtacaatcgtgatgttgttgtatcacatttagatagtggaagacctgtagatgatgaaggtgttgaagatgcttttgagctcttacatgaaatgaatgaacgtgtcagaacaggcatctgggttggggattgctttatctacaacaattcctcttggagacttaattactgtgttggtggtgaggtaactacgatgtttcatttggaccgccccatgtacttgttgggatatcttgcaaaccaaagtcgtgtttatttgattgacaaagagtttaatgttatgggatacacactgcttttaagcttgattgagtacaagacacttgtgatgcgtggtgatttggaaagggccaatgaaattctaccatcaatccccaaagagcatcataacagtgtggctcattttctggaatcacgaggtatgatagaagatgcccttgaagtagctactgaccctgactacagatttgatctagcaatacagcttggaaaactagatgttgcaaagagtattgcaatagaattgcagagcgagcctaaatggaagcaattgggagaattagctatgtctactggaaagttagaaatggctgaggaatgtttgaagtatgcaatggatttgagtggcttgttactgctatattcttctttaggagatgctgaaggaatatcaaaacttgcaatccttgccaaggagcaagggaaaaacaatgttgcattcctttgcttatttatgttgggtaaattagaagactgccttcaactgttggtagaaagcaatcgaattccagaggcagctttaatggctcgatcttatctcccaagtaaggtctcagagatagtggcaatttggagaaaagacctcaataaggtcaatccaaaagctgctgaatcattggctaatcctgaagaatatccaaatttgtttgaagattggcaagttgcactagctgtcgaatctaaagctgtggaaacaaggaatgtgtaccctcctgcggagcagtacgtcaaccatgctgacaaatcacacattacccttgttgaagcttttagaagcatgcagattgaggaaggagaggagcatctggagaatggggactctactcatgagttgactgaacgaaatggagaagagcactacacagaggagcaggaggaacagaatggagaggaaggaagccaagaggaggcagttgtagtggatgcagattctacagatggtgcagtactcgttaatggtaacgaggctgacgaagagtgggtgcttgcgccacatcactaggtcccatcaagacagttggttccagcttctgggatttctatctgaggtcttctcaaggtgccacgaagagattttatggactggttgtttgtttcctggtgttgtggttttgtagtgccctgaattttgtcattttgcgcgtggtatgaacaatattccttagggtcagttacaatttactagagtttatatatagcacattcttttggggcttttacctcaatatactcgtgccattgtgaatgtagaaaagcggaactagggacgggtgcctgtttaaattttagatagttatttttttttaatattttttcttgatcatttttttaatttttatattttcctggattgtaaacatggatggttaatagagaaaataatgattcttccc

SEQ ID NO: 10934 - DNA, 1068 bp, Glycine max
  Clone ID: 700987791_FLI
attaattgcaagaatggcacttcgttgcttggtgatgtccctttctgttctcttcactcttggtcttgcgagagaaagccatgccagagacgaagatttttggcatgctgtttggccaaacactcccattccaagttcattgcgagatcttctaaagcctggccctgcaagtgttgaaatcgatgatcaccctatgcaaattgaagaaacacagtacccgaaaaccttcttctataaagaagaccttcatccaggcaaaacaatgaaagtacaattcagcaagcctccctttcaacaaccatggggtgttggtacatggttaaaggaaattaaagacactactaaagaaggatatagttttgaagagctatgcatcaagaaagaagccattgagggagaagaaaagttttgtgcaaaatccttgggaacagtaattggttttgccatttcaaagctgggaaagaacattcaagtactttcaagttcctttgtcaataagcaagaccaatacactgtggaaggagtgcagaatcttggagacaaagcagtgatgtgtcataggctaaatttcagaactgcagtattttactgccatgaagtccgtgaaacaacagctttcatggttccattggtggctggtgatggaaccaaaactcaggcacttgctatttgccactcaaatacttctggaatgaatcatcaaatgcttcatcaacttatgggagttgatcctggaactaaccctgtttgccatttccttggaagcaaggccattttatgggtacccaatttatctgtggacactgcctatcagaccaacattgttgcttaattagtccatgcatcttgagcaccatgagaatgagattgtgtataaaataaattatcatgtgctgtgtgttgtgcaagtactaccttctctagctagattgctagagctagaatttcaacctacctatgtgtactgataagatctgcttccctacttaaagagagcatcatcctgtgatcagtgtgcttcgtattctctctctctatatatatatggtaaaaagtggttatctcgtg

SEQ ID NO: 10935 - DNA, 1640 bp, Glycine max
  Clone ID: 700988163_FLI
atttcttcccatcctttcttccttcaccactttgaacttgaacttagttgggggacttggctgagttagactgttatgtttaaattgtagtcatggtggtgtttttggctgtgaatttgctcatatgtgctaattatgtgttcttgtttgatgttactctacagaagttaaaatggcccaagaaactttcctattcacatctgaatcagtgaacgaggggcaccctgacaagctctgtgaccagatctccgatgctgtgctcgatgcatgcttggagcaggaccctgacagcaaggttgcctgtgaaacctgcaccaagaccaacatggtgatggttttcggagagatcacaaccaaggccaacgtggactatgagaagattgtgcgtgacacatgcaggaacattggttttgtctctgatgatgttggtcttgatgctgacaactgcaaggtcctcgtcaacattgagcaacagagtcctgatattgctcaaggtgtgcacggccacctcacaaagaggcctgaggagattggtgctggtgaccaaggtcatatgttcggctatgccactgacgagactcccgagctcatgcccttgagccatgtccttgccacgaagctcggtgccaagctcaccgaggttcggaagaacgggacatgcccttggctgagacctgatggcaagacccaagtcactgttgagtactacaatgacaagggtgccatggttccaatccgcgtccacactgtgctcatctccacacagcatgatgagactgtcacaaatgatgagattgcagctgatcttaaagaacacgtgattaagcctgtgattcctgagaagtaccttgatgagaagaccattttccatttgaacccttctggcaggtttgtcattggagggccgcatggcgatgctggtctcaccggccgcaagatcatcatcgacacctatggaggatggggtgcacatggtggtggtgccttctctgggaaggatcctaccaaggttgataggagtggtgcctacattgtgaggcaagctgcaaagagcattgttgcaaatggacttgctaggagggcaattgtgcaagtttcctatgccattggtgtgcctgagcccttgtctgtgtttgttgacacttatggcactgggaagatccctgacaaggaaatcctcagcattgtgaaggagagttttgacttcaggcctggcatgatctccatcaaccttgatctcaagaggggtggaaatggcaggttcttgaagactgctgcatatggacactttggcagagatgaccctgacttcacatgggaagtggtgaagccactcaagggggagaaggtacctgcttaactaaaaggggttccaacactcttggcaagggacttttgcactactactggcttcttattatctgattgctaaaattttctctatgtttccttccctcttactcaattctgtttttttttttctgtatttttttatgaatttcccccttttttttgtgtacttgtatgtgttctttcagaacatatatattttatatgatgaaacaaaaaaaaatgttctctcaagatttatgctagaaatatgtaataatctcaaattatagagagtatacaattttact

SEQ ID NO: 10936 - DNA, 972 bp, Glycine max
  Clone ID: 700988181_FLI
ataaaatccttgaatcaccaatgttcagtaatagacctctgttaccatatgaagaatggaatattgatttcacagaattgactgttggaactcgtgttggaattgggttcttcggagaagtttttcgtggcatatggaatggcacagatgttgcaatcaaggttttcctagagcaagatttaactactgaaaacatggaagatttctgcaatgagatatccattcttagtcggcttcgacatcctaatgttattttatttcttggtgcctgcacaaggcccccacgcttgtcaatggtgactgaatacatggagatgggatctttgttttacttgattcatgtgagcggtcaaaagaagaagcttagctggcggagaagactaaagatgttgcaggatatatgccgtggcctgatgcacatacatcgtatgaagattattcaccgtgatgtgaaaagtgcaaattgccttgtggacaagcattggatagtgaaaatatgtgattttggactttcaagaatagtaacagaatcccccacgagagattcctcgtcagctggaaccccagaatggatggctcctgaactaattcgaaatgaaccattcactgaaaagtgtgatatctttagctttggggtgataatatgggagctctgcaccttgaataggccttgggaaggcgtacctccggagagggtggtttataccgttgctaatgagggtgctcgattggatattcctgatggcccgctaggcaggctgatttcagagtgttgggcggaaccacatgaacggccaagttgtgaggagattctctctcgattggtggacatcgagtactcaatgtgttgatgccagtgtttttatcttttgtacatagtgaactttgggtagagttgtaactttgtgctttcggctgatgtgtaaactatgaatttttgttccttatctgaaaacatatatatttgaagtc

SEQ ID NO: 10937 - DNA, 1082 bp, Glycine max
  Clone ID: 700988184_FLI
cgcggcagcatgtgggggtataagagatttttcaaacgggctcaactcgaggcgtcaactttcctcaaggatgactgcttgaagataactgcactgttggtgttgtggtgtcttccattgattgttccaagttaaacacaatacaggttcccgaatccgatattggggcacatttcgggatgctgttagagaatgaggagggatcagatgttactttctctgtcggtggagaaaggtttcatgcacataagcttgttttggctgctcgatcaactgcatttgaaaccgagttttttaatgggatggaggaggatgatcatgatgtagttgttactgacatggaaccaaaagttttcaaggctttgcttcattttatttatagagacactctaatagatgatgaagagctctttatgtcacgttcatcattcttgccttcggtatctgaatcatttgctgcaaagttgttagctgctgcagaaaagtatggtttgccaagacttaaactgatgtgcgagtctgtactttgcaaagacatctccatagattctgttgcctatattctggctcttgctgatcgttatcgtgctacagaattgaagtctgtctgtctacaattttctgctgaaaaccttgtcgctgtgatgcaatctgatggttttgagtatcttaaggaaaattgtcccttgctgcaatcagaactgctaaagactgtggcaggatgcgaggaggaatttagtggagaaggaaagtgtcgaagtgtgtgggcccaattttctgatggtggtgacaccaatgataggagtgtaagacaacaaacctgggaaaatggtgttgaaagaagtcaaagcttatgggttcacctttctgatggtgttaacaacaatgataggagtccagggcaagaaacctgacaaggtaaggtacaccatcatttgtctgttaggcttaaatggtagattaaaagctactgcagggataagattaaccaattgtgcggactggcaaaaggttagaaatgcaaacaatgtaaagaacgaaggctgagatactgcctccattgtaataatattatgtcttat

SEQ ID NO: 10938 - DNA, 1260 bp, Glycine max
  Clone ID: 700988241_FLI
aatgaataggattcacagcagatatagcaaagctcacactaacatcaatttatgataacaacctcaaaatcaagttatcagtgtgtcaccctgacttttcaaaaacaattatttgttgcttcatatttcactgtgatttcataatagattttcactcatcttacttgactccaaacattctatatatctagtgcctccacgcatctctaccctcaaatcttcaccacacaacactacctcaagtactcaactaaagcttcattcattcatcgtgtcgtgttgtgttctttgcaaccatgcttcttagaacagcgtcctctttctctctcttcaacgccaacggcgaccatatactactcccttcctctgttcgctactctcagggcaaacacttggttccatgcgctaccaagaactccaataaccggcccttaaccggcgtcgtatttgaaccctttgaagaggtcaagaaggagctcgaccttgttcccactgtcccacaagcttcccttgctcgccagaagtacaccgatgagtctgaggctactatcaacgaacagatcaatgtggagtacaatgtttcgtacgtttatcatgcgatgtttgcctacttcgatagggacaatgttgcgctcaagggtcttgccaagtttttcaaggagtcaagcgaggaggaaagggagcatgctgagaaattgatggaatatcagaacaagcgaggtggaaaggtgaagttacaatctatagtgatgcctcttactgagtttgaccatgaggaaaagggagatgcgctatatgcaatggaacttgccctgtcgttggagaagctgacaaatgaaaagctgcttaacttgcacagtgttgcctcaaagaacaatgatgtgcaattggcagattttattgaaagcgagtttttgggtgaacaggtggaagccataaaaaaaatctctgaatacgttgctcaactcagaagagttggcaaaggacatggtgtgtggcactttgatcagatgctactccatgaggaaggagttgctgcttgattaacattttttttctacctctcgttcgtgcatctagttagttattcggattagtattttcaggtcttttaatgctagagatgaacaaagtggatatggagtaatattggtcatttgtatgtcgtgttttttttagtaatattggagtaatatggaatttgcgtattggactaatatggaattgacgtattgttggagtaatatggaattgaaactc

SEQ ID NO: 10939 - DNA, 1679 bp, Glycine max
  Clone ID: 700988605_FLI
aattcactgagatctcatatccctccacagcttgtgcactttgacaaactgcaggtatttgatgtgtcttccaacgatttttttggaaacatcccatcatttataatctctttgccttcccttcagtacctaaacttggcctcaaaccatctaagtggtaacctatcagtgaatatggcatgtagttcttcactaacatttgtggatatctcacacaaccttctggttggaaaattgccatcctgctttggttcaatgtcttcaaaggccaaagtgctatattctgggaactgtttgtcaaccaaaaataggttgaatgatcaacaacatccattttctttttgcaagagagagggggctttggctgttaagcctccagctaaaaacctgaagaaggaatcaaatttgggtacaaaactagggctaatgcttggaataattgtaggaattgtagtaattggaggacttctggttctactcgttgtgtgcatcattaggaagtccaaagcagaaagatcacctcataaaatggacaaatctgttgctaataaatattctaccagtgtatctcctagaccaattggtacaagacatattcctcaggcaatgaagcaagctgcagttggactgccaccataccgtatcttcacatcagaggaaattgaagatgcaactaacaactttgacccatcaaatttaatagaagagggatcacagggacagctatataaaggttggctcagagatggttcagtggtccttgttaattgtgtaaaaataaagcagaaaggtttgccccacagcatcatgcagcaagtagaggtattacacaatttgaggcacaggcatatggtgagtgttctaggacactgtgtcattactgaacaggagcatccacaaacaacaagcacagtcttcattgtgtttgagtacatctcaaatgtgtcattgagggatcaactttcagatgggaggaagagggaaatgctgaaatggccacaaagaatggcaatgagcataggcattgcaagaggagttcaattcttacacacaggagttgctcctggaatatatggcaacaacttaaagattgagaacattctgttggatgatagtctcaatgcaaaagtcagtagatacaacattccattaccatccaagagtgcacataatgaacaaaatgccaccaatcacattagcagcacaaacaatacagaaaaggaagatatctatcagttgggtgttattctacttgaagttattactggaaaacaaattacatcctcgagtgaaatagaggagctgaaggaagagctggagaatggttcaccagaagcaacatcagtaatcagaagtgccattgaccctacactgaggggaacttatgcatatgaatcaatgaagactgcagttcagatcaccataaactgtctctccaaggtttctagccagcgcccttcaatagaggatgttctttggaatttgcagtatgcaatgcaagttcaagagtcctggaccagcagtggaaacctcagcacaaaattgtaaaccacacttgtcaataaaaaaaatgcttgcttatatttccatatgttcattatcataatgaataaaatgttgatgtacatatgtaatttctttcataaggccccaaaacacaatttggttcgcatttttcc

SEQ ID NO: 10940 - DNA, 1226 bp, Glycine max
  Clone ID: 700988637_FLI
caagacccaactgaggaatggtactacaagactttctttgatgctggtgaatttgcattcggtaaatctatggtttctttggtgcctttggaagattgtccaccacacgcacagttcctagatgcatattttgctgcaactgatggtagcccacaacacttggagaatgcaatttgtgtgtttgaacaatacggtggtatcagttggcgtcacactgaaacaggccttgatgagatatttacagaagtcagaacagatgtgagtctaattgttagatcaattgttaccgtcggcaactacgacaatatagtagattgggagttcaagacaagtggttcaatcaagccctcgatatcactatcaggcattttggaagttaagccagtggacattactcacacagaccaaataaaggaagaccaacatggcacattggtctcagcaaacagcattggtgtttaccatgaccatttctacatattccatcttgattttgacattgatggtgtggaaaattcctttgtgaagaccagtctcaagactctacaagtcacagacaacagttccaagagaaagagctattggacaactagtaatgaagttgttaagactgaatctgatgcaaagacaaaactagggttcagtccagctgagatagtaattgtgaaccctaataagaagacttccactggaaatgaagtagggtaccgtttggtttcaaatgcagcggttcatcctcttctcacagatgatgattaccctcaaacacgtggtgctttcaccagttacaatgtttgggttacaccttacaacaagactgagaaatgggctggtggactttatgttgatcagagccgtggagatgatactttggctgtttggactaagcagaatagggggattgagaacaaggatattgtgatgtggtacgtggtgggaatccaccatgttccgtgccaggaagattttccaataatgcccttgttgagcaccggatttgaattgaggccaactaatttctttgagagaaatccagtccttaagaccctttctcctggcattgttaaatttccaggttgtgagaaaccctagatttgcttttgagctttgtcactttaagtacaatattgttgatcgatagatccggagaaacattatctttttactaatatcggtcatatgtgctaaggtgagaaaataataattttgaataatgattcctctat

SEQ ID NO: 10941 - DNA, 1061 bp, Glycine max
  Clone ID: 700988809_FLI
gatagactcaattatgcagcgatgaggatgtggtttttggggaatccaccaggcaaggcaaccattcaagttcaaaacattgaagactttacatggttgaatgcaagttacagtcccgttcttaaacagttgggttcccaatccatgattgattattacttcaaggctcatcgagcagcctctgattcaaatctgaagtttcggaatccaaagtatttgtctatcttgaaccacctccgattctatctgcctgagatctttccaaagctcaacaaagtgttgtttttggatgatgatatagttgtgcagaaggatctgactgatctgtggtcaattgatttgaaaggcaacgtaaatggtgctgtagaaacttgtggagaaagttttcaccgatttgatcgctatctcaacttctcaaatcctcttattgcgaagaattttgacccacatgcttgtgggtgggcatatggtatgaatgtctttgatttagcagaatggaagaggcaaaacatcacaggggtgtaccacaactggcagaatctgaatcatgatagacaactatggaagttaggaacactgccaccgggtctcataacattctggaaacgcactttccctctgaaccgatcttggcacatcttaggtcttggctacaaccccaatgtcaaccaaagagatatcgagcagtctgctgttgtacactataatgggaacatgaaaccttggcttgagataagtattcccaagttccgaagttactggacgaagtatgttgactacgatcatgtgtatttgagagaatgcaacatcaatccgtagataggtcgtttttgtacgtttaaccattgaagttttcttagcatttgcttagttgtggtgcaccttttaggtctgcaattccatctgagtagggcttctatattttttaaagctttacaattccttttgtatacgtgttcctgtttttacattgttattttttggacttgcaacccttgatcacaaacctgcagagaatgctaactgtacttgtaaatgaaatgaagaggctagttcttttt

SEQ ID NO: 10942 - DNA, 1067 bp, Glycine max
  Clone ID: 700988826_FLI
ggactctaaaaatttccacaaccaacgaagataaacaaccatagtggttttctctttttttttctttttcctacgttgtgaccaggttgttcactttagctgcgaaagtgtttgtttggctcagtttgttgaattcgctggcagctacagctatgatcatcaacagcaccccttttcctctatgatcgattcgattccgtagagtgagaaatcagatcagaataatcatcgatgggtaatttgttcgtgaagaagcccaaggtaacagacgtcgataaagcaattctcgctctcaagacccagagacgcaaactcgcccaatatcaacagaagctagatgctgttattgaagcagaaaagcaagctgcacgagacttgattcgtgaaaagaagaaggacagggccttgttagcactaaagaaaaaaaagacacaagaagaattgttgaagcaagttgatgcttggcttataaatgttgagcaacaattagcagatattgaactggctagcaagcagaaggctgtgtttgaaagtttgaaagctggtaatgatgcaatgaaagccatacaaagtgagataaacattgaagatgttcagaaacttatggatgacactgctgaagctaaagcttatcaagatgaaattaatgaaataatgggggagaagttatcagcagaagacgaggaggagattttagcggaatttgaggacttggaaatccagcttacagtccaagatcttcccgaagttcctccctcagttcatgaagaaattgaagaaaagttggaccttcctgatgtcccaaccaaagcaccagttaccagtgatgctgaagtatctacaaaaggaaaagttatggaggaaccgttggcagcttgaagaacattgcgactagaaacatgtcaattgctttgcaaaccaaggcatacaatctgactgtttttgcctgtattcttacaaattatgttgcaaaattggtgcagttactggagtttgattggttttactatttgcagagacattgaatttgtacagatttgcatgtataataatacatcagttttaac

SEQ ID NO: 10943 - DNA, 378 bp, Glycine max
  Clone ID: 700988939_FLI
caagcgtttacgtatcatgaaaggaaaggaagctattggactggcaccaagagccgtggagaaatgcaagaacaggagctagactagtagttaccagtccaaaatctgctccatcatcattagcggtgcctagttgacttagtaactgaagcaaggttaagctgcagcagacacagagggagagagcagggtgttaaaaaatatagttaagtaaatctgtgtatcattatggtttgttatataatatatatttcaaacaaagttgtgagatgtcgtaagtataaattatgaacacaaacgataatgactctaaattatgttgcaagactttcttatttctttacttgtgtgcttgcataataataagtttattaattt

SEQ ID NO: 10944 - DNA, 1421 bp, Glycine max
  Clone ID: 700989034_FLI
caaggtttagacctgcgaacgggtttgtttactttaagacaaatcaaagcagcgacaaacaactttgatgttgccaataagattggagaaggaggttttggtcctgtgtacaagggatgtttctcagatggaacactaatagctgtcaaacaactttcttctaaatcaaggcaagggaatcgtgagtttttaaatgagataggcatgatttctgctctgcagcatcctcatcttgttaaactctatggatgttgtgtggagggagatcaactattgttggtatatgaatatatggaaaacaatagtcttgctcgcgctctatttggcgccgaagaacaccaaataaaattggactggacaacaagatacaagatttgtgttggtattgctagaggtttggcatacctccatgaagaatcaagattgaagattgttcatagggacattaaggcaactaatgtgttgcttgatcaagatctcaatccaaaaatatcagactttggtttggccaagcttgatgaagaggacaacactcatattagcacccgaatagctgggacatttggatatatggctccagaatatgccatgcatggttacttgactgataaagcagacgtctatagctttggaattgttgctttggaaatcataaacggaaggagcaatactattcaccgacaaaaagaagaatcattctctgttcttgaatgggcacatctgttgagagagaaaggagatataatggatctagttgatagaagattaggtttagagttcaacaaagaggaggcgctagtgatgatcaaggtagctctcttatgcactaatgtgactgcagcacttaggccaaccatgtcatcggtggtcagcatgctagaaggaaaaattgttgttgatgaagagttttctggagagacaactgaggtattggatgagaagaaaatggagaaaatgagattgtattaccaagagctgagtaactcaaaggaagaaccatggacagcttcatctacttctgtagcagatctttatcctgtgggcctagattcttcttacttggagaagagagattaaagactttggagaaaagctgctttaattttgtattaattattttgttgtgagtttatgtgcaaaattcatttctttcttgtaaatctatttgtgattgtttgaacgtgtgcaaatgtatgcatcagtagctttggttttttattttttatttttatgtttaattatttaccaagttttaaggagtttgttgttaggttgtctgattgttatgtgtgagtaacttagcagcttaagcttagttgctgaagtttagctagttagttgttattttcagtttttcagttttttaacttaatctatttaagcaatatctgatgcaatcaataaaagtgtgcatttttgtt

SEQ ID NO: 10945 - DNA, 1220 bp, Glycine max
  Clone ID: 700989075_FLI
ttcggctacaaagtcaaaatcacattttcctttggttcctacttccctgttttgtattttctcatttaccacacactcaggaccctttctctattctcttctgcatcaccattcaccgctgagagaacatcacaacacaacaaacaaaggagcctctcggtttccaatgtgaagagagcgaacatggctctaatcgctgccaggattctcggttccaattcgaggccggcggtcgcgctccaccgctggcagtggctggcgtactcctccgcctccgcggcggtggcggagccggagaccacggaggtgaaggactacgccgattaccggcgctccctgtacggacagatcacgcacaaggcgctcctcgtcgacgccgttggcacgctcgtcctcccttcgcagcccatggctcagatatatagaaagattggggagaagtatggagtggagtattcggaggatgagatactgttcagatacagaagagcgtatggtcagccttggggaaaatctcgtctcagatatgttaatgatggtaggcctttttggcaatacatagttagttattccactggctgttcagatcctcaatattttgaagaactttataactattatacaacggacaaggcatggcacctcaatgatactggtgcagaagaagtattcagagctcttagaaaatcaggtgtgaaattagctgttgtgtcaaactttgacactagattaagacctctcttgcgggcattaaattgtgacaattggtttgatgcagtagcagtgtcagctgaggttgcagcagagaaaccaaatccaactatatttctcaaagcatgtgaattattggatgtaaaacccgaggatgctgttcatgttggggatgaccgcagaaatgatatatggggtgccagggatgctggctgtgatgcttggctttggggaagcgatgttcactcctttaaggaggtagcacagaggattggggttcaggtctgaaagatgatctctttacaataagtttgatgttatgtatagagtcctttaggctttagctgtaaggctgtacatgttctgctcccttttacaatgtatgtatatatgtatgaaaaagatgtgaacctataaaaaccattaataggtgtaggtaggagcttttgtttttccattgatccgtgttttctacgaagtttattttaaaattataaataaaacaaatg

SEQ ID NO: 10946 - DNA, 1077 bp, Glycine max
  Clone ID: 700989095_FLI
cttggtatctggggaggcaagggacaaggaaaatctttccaatgtgagcttgtctttgccaagatgggaatcaaccccatcatgatgagtgctggagagttggaaagtggaaatgcaggagagccagcaaaactgatcaggcagagataccgtgaagccgcagacttgatcaagaagggaaagatgtgtgctctcttcatcaacgatcttgatgcaggagctggtcgtcttggtggaaccacccaatacactgtcaacaaccagatggtgaatgccaccctcatgaacattgctgataaccccaccaatgtgcagcttcctggtatgtataacaaggaagagaatccccgtgtgcccatcatcgtcaccggtaacgatttctccacactctatgcgcctctcatccgtgatgggcgtatggagaagttctactgggcaccaacaagggatgaccgcattggtgtctgcactggaatttttcgcaccgattcaattcctgaacaggacgttgtcaagattgttgacaccttccctggccaatccattgatttctttggtgcactgagggccagagtatatgatgacgaagtgaggaagtggatttctggtgttggtgttgacggcattgggaagaagcttgtgaactcaaaagatggacctccaacctttgagcagcccaagatgactctggagaagctcttgacgtatggtaacatgcttgtccaagaacaagagaatgtcaagagagtccaattggctgacaagtacttgaacgaggctgcacttggaaatgctaacgaggatgctattaacaggggaactttcttccaatcttgaattggaggcaaagcaaacttggcaagtaaatatttctgttcctgaaggttgtgctgatccaagtgctagaagttgtgatgggacttgcgtgtaacattcttagaattctcaatgtcttaggtgcaaagagaagatgccaagtttgagatgattttactatatttttcatattggactgtcttcctctataattttgagttaaagtgtccacttaaattgaatttggtgccttttcctttt

SEQ ID NO: 10947 - DNA, 1332 bp, Glycine max
  Clone ID: 700989491_FLI
cttgctcactgtgattgctggctccgctgagagggctccaactctgtaaatcaatcatctttatgctcttctccactcttaaatgtacaatacatctcactatataagagtggagaagagcataaagatgattgatttatccgaggcgaagagaagagaaaaattaagatggaggggaaggagcaggatgtgtcgctgggagcgaacaagttcccggagagacagccgattgggacggcggcgcagagccaagacgacggcaaggactaccaggagccggcgccggcgccactggttgacccgacggagtttacgtcatggtccttttacagagcagggatagcagagtttgtggccacttttctgtttctatacatcactgtcttaaccgtcatgggagtcgccggggctaagtctaagtgcagtaccgttgggattcaaggaatcgcttgggccttcggtggcatgatcttcgccctcgtttactgcaccgctggcatctcagggggacacataaacccggcggtgacatttgggctgtttttggcgaggaagttgtcgttgcccagggcgattttctacattgtaatgcaatgcttgggtgctatttgtggcgctggcgtggtgaagggtttcgaggggaaaacaaaatacggtacgttgaatggtggtgccaactttgttgcccctggttacaccaagggtgatggtcttggtgctgagattgttggcactttcgtccttgtttacaccgttttctccgccaccgatgccaaacgtaacgccagagactctcacgtccccattttggcacctttgcctattgggttcgcggtgttcttggttcacttggcaaccatccctatcaccggcactggtatcaaccctgctcgtagtcttggtgctgctatcatcttcaacaaggaccttggttgggatgatcactggatcttctgggtgggacctttcattggtgctgcacttgcagcactctaccaccaggtcgtaatcagggccattcccttcaagtccaagtgattcaatcaaaccgttcatgcttaatcaagttgggaacaacaaaaaaaatcaaaacaatgtttctgggtttcggtttcatttcatcaagatgatctgtttatcttttttttttaattttaatttaaagtctttgtattttgtatgtaaagatgtaaaattatgattattaggtggtgcatgtgttgcgtcatgggccaatgttatcctctgcttttaagttggaagaggcccagctcacgtgtgatgtacggctgtgattgtgtaatttgcaaaatcaaaaataacccccgagtc

SEQ ID NO: 10948 - DNA, 1152 bp, Glycine max
  Clone ID: 700989634_FLI
gacatctcgagtgtgaagtttgtatgactaaacatttgcaggtggtccgataacggcccaataattggtggctcgataggcccaacaacaattgctaagataggtattgattatgaaaatggtggaacatcctaatatagtcaatctcattgaggtgattgatgatccagagtcggatgacttctacatggtacttgaatatgtggaaagcaaatgggtgtgcgagggtacaggtcatccttgtgcattaggtgaagagactgctaggaaatacttgcgtgatatagtctcaggattaacatatctccatgctcataatatagtgcatggggatataaaacctgataatctgttgattactcgtcatggcactgtaaaaataggggatttcagtgtcagccaggcatttgaggatggcaatgacgaacttcgtcgatcacctggcactccagttttcactgcaccagaatgttgtttaggtcttacttatcatggtaaagcttctgacacgtgggcagtaggagttactttgtactgtatgattttgggtgaatacccatttcttggagacacacttcaagacacatatgacaaaatagtcaatgatcctttagttctgccagaggacattaacccccagttaaagaatttaatagaaggattactatgcaaagacccagaactaaggatgacattgggcgatgttgctgagcatatctgggttattggagacgatgggccaattcccgggtacttatgttggtgcaaacgtaagagcatggttactgaagattctgatgggagcgatatacttgattgacccacactgattctaagttggatttcttatgtacagtgaaaaggcccattaatttttccccacggagacatgttatgattgtagagggagtttccaaagaatccttgggaattaagaaaatacagctcatgttgccaacgataagtagtcaactaagtcatgtttatttttgtgttgaggagcattttgtgtcttctacggacttagaggtcttgtatatacagctctttcgcatagaatgagttttttttgtttgttttttttatttctcaaacacgtgccgaattgtgttcagttcatactctttatacattccttggagtgtttttgtt

SEQ ID NO: 10949 - DNA, 1638 bp, Glycine max
  Clone ID: 700989702_FLI
ggaatttgctagggagactttggcaggtgtcaacccatatagcatccaattggttaaggaatggcctttaacaagtaaactagacccgcaaatctatggtccacaggaatcaacaataactagggaagtcattgagccacaaattatcacttatggaacaattgaagaggcccttaaagaaaagaagttgttcatgctggattaccatgatttattcttaccatatgtaagcaaagtgagaaaaattaagggcaccacattatatggatcacgaacattattcttcctcactgatcaagggatattaaagccattagctattgagctcactagaccacctatggatggaaatccacaatggaaacaagtcttccaaccttcttgtgattcaaccaatctctggctttggaggcttgctaaagctcatgttctggcccatgattctggttatcatgaacttataagtcattggttgaggactcactgtgtcgtggaaccttttgtaattgcaacacataggcaacttagttccatgcatccaatttatagattattacatcctcatttgagatataccatgcagattaattcccttgcacgtgaggcacttattagtgcaaatggggtcattgaaatttcattccttactaataaatattcaatggaattaagctctgtggcatacgatcaactttggcaatttgattcgcaagcacttcccaatgatcttatttccaggggaatggctgtggcagatcctaatgcaccacatggcctaaagctaacaattgaagattatccttttgccaatgatggtcttctcatatgggatgccatcaaacaatgggtcaccgactatgtcaaccattactatccaaccccaagcatcatagaatctgaccaagagctccaagcatggtggaaagaaatcaaaacagtgggtcatggagacaaatctgaagaaccatggtggccaaatcttaacacatcaaaagatcttattgacatcataaccacaatagcttgggtagcatctggtcatcatgcagctgtgaacttttctcaatatgcttatggaggctatttccctaaccgacccacaattgcaagaaacaaaatgccaacagaagacccttctgaagaagaatggggaaattttctaaacaaacctgagcaaactcttttggagtgtttcccatcacaaattcaagcaacattagtgatggtagtcttgaacttattgtcagatcattcacttgatgaacagtacattgggaaatacatggagccatcatgggctgagaatccaactataaaggtagcctttgaaaggtttaataggagattgaaggagattgaaggtattatagactcaaggaatggaaatagtaatttgaagaacagacatggagctggaataatgccttatgagttattgaagccattttcagggcctggagtcactggaaaaggggttccatatagcatatctatttaaagtttggtaatttaattaaggccaaattagaacaatttatttttattgttatgtgcctcatagggtcctaaataataaaatataatggcacaatgtattcttcatattttacattttatgtacacggattatgttatggc

SEQ ID NO: 10950 - DNA, 1089 bp, Glycine max
  Clone ID: 700989812_FLI
gaagcaatgaatggtgttagacatcttcttgttcggaaatctatcccaaatggactagtttttgttggagaattgccttatggatctaacagtggtttcagcccaaaaatggatcacctggtgtgtttcctacctggtacacttgcaattggtgccactaaaggccttacaaagaaacaggcaatggaaaacaatatgcttaactttgaagacctagaaaatttgaagctagcagaagatctgactaaaacatgctttgaaatgtatgcagtaacttcaactggtcttgctcctgaaattgcttactttcatactgaggaattttctgaagaaggtcatgatggaggaaataagagctcggaatttgttaatgacatcataataaaacctgctgaccgtcataatcttttgagacctgagaccgtggagtcattgtttgttttgtaccgtatcacagaagatccaaaatatcgggaatggggttggcaaatctttgaagcttttgaaaatcacacaaaggttgatactggtggatattgttctctggacgatgtaactagtgttcctcctcatagaagagacaaaatggagactttctttctaggagaaacacttaagtatttctacttgctttttgcggacagctctcttattcctctggataaatttgtttttaacacagaagcacatcctataccaatcaatttgaagaaatgagtataatcatcaaaggcattcaacagagttattagaaatacggattctgtcaccctggtctcacaaagtgagatgcttctttgaagtcagtctagcatctcttacactgaccaagagcacttctggttatgtataagattagctgggttctcagtgataataaataactgtgaaatattgtttgaatcatccaatacatcagcaaacacattttagagaccgccaattgattatgactcattttcttggatttataaccagccctatctaaatgggattgtaaattttgtttcaagtcatggacaaagagcagcttttgtaatcgaattgtatgattttccaatatgtttttggatgcttagcatttttgtg

SEQ ID NO: 10951 - DNA, 289 bp, Glycine max
  Clone ID: 700989818_FLI
accgattctctcacccagttcaaatgatgcatcaaagcatcaactagacaaaaagtgcagtgtttgtcaggaggagtatgaatcagatgatgagctggggagattgaagtgtgaccacagctatcattttcagtgtataaaacaatggcttgtgcataaaaatttctgcccagtttgtaagcaagaagttgtggttcgacactaagtggcactatcctcaacgttttttacccttaaattggtgtatagtttttcatatgcaatataagcaatcttcattacatatttt

SEQ ID NO: 10952 - DNA, 1787 bp, Glycine max
  Clone ID: 700989873_FLI
cagctatctagcttgttctcttttattttttttcggttcaccggcggcatggggaactgcaacgcctgcgttcgagtcgatgacgtggcagactcaaaccgcggcaaaaagaataagaaaaccaaaccgaacccctacgcggaggaagagatacgctccggcgttccgatccgtgtgctgaaggacgtgacgtcacggagcctcatcggcgacaagtacgtgataggccgggagctaggtcgtggcgagttcgggataacgtacctctgcacggaccgcgaaacgaagcaggagctcgcgtgcaagtcgatctcgaagcggaagctgagaaccgcgatcgacgtggaggacgtgcggcgagaggtggcgatcatgtcgacgctgccggagcacgctaacgtggtgaagctgaaggcgacttacgaggacgaagagaacgttcatctcgttatggagctctgcgccggcggggagctcttcgaccggatcgtcgcgcgggggcactacagcgagcgtgccgccgcgaacgtggcgaggaccattgctgaggttgttaggatgtgtcacgccaatggtgttatgcatcgagaccttaaacctgagaattttctctttgcgaataagaaggagaattctgttctcaaggctattgactttggactctccgtgtttttcaagccaggggagaggttttcggagattgtggggagtccttactacatggcgccggaggtattgaaaaggaattatgggccagaggtggatgtgtggagtgctggggtgattctttatattttgttgtgtggagttcctccgttttgggcagaggacgaacgaggggtggctttggcaatattgaggggagtgattgacttcaagagagaaccgtggcctcagatttcagatagtgctaagagtcttgtgcgccagatgttggagcatgatcctaagaagcgcttgacggctgaacaggtgcttgagcattcctggttacaaaatgcaaagaaagcttcaaatgttccattaggagatattgtgagaacaaggcttaggcaattctctttgatgaatagattaaaaaagagagcacttcgggtaattgcagagcatttgtctgttgaagaggtagaaataatcaaagacatgtttacattgatggacacaaacaaagatggcaaagtaacatatgaggagctgaaggttgggttacggaaggttggttcacaattggctgagccagagataaagatgctgatggaagtggctgatgttgatgggaatggagtacttgactatggagagtttgtagccgtgacaattcacttgcaaagaatggagaatgatgagcatttccgcaaagcattcatgtattttgacaaagatgggagtgggtatatcgagttaggtgagctggagaaagcattaacagatgagtcgggagatactgatactgctgtattgaatgacatcatgcgtgaagttgacactgacagggatggtcgtatcagttatgaagagtttgtggccatgatgaaaactggaactgactggagaaaagcatctaggcagtattcaagggagagattcaagagcttgagcataaatttgatgaaggatggctcacttcagcttcatgatgatattagtggtcaagctgtagtggtttgagtccgaaattgtaatcttagtgctcactcagtttctcatcttccttcaccacttaatatgcttgaaaacatggtttctttactctccctgaaagcaaacaacaagtttagtgttggagc

SEQ ID NO: 10953 - DNA, 690 bp, Glycine max
  Clone ID: 700990264_FLI
gtatgtgattgttgtgactcgttcttcttcgtcgttatcttcttcttttgttgtttgtgtgtttgttttttctctcacctgaaaatgtcttgctgcggtggtaactgtggttgcggaagcgcctgcaagtgcggcaacggctgcggaggctgcaagatgtacccagacttgagctacaccgagtcaaccaccaccgagaccttggtcatgggagtggcaccagttaaggctcaattcgagagtgctgaaatgggtgttcccgctgagaacgatggctgcaaatgtggagctaactgcacctgcaacccctgcacttgcaagtgaggtgttggagagctaaagcttcaagcagaaatggcccttagaaataatgataaaaactatatgtagtttcaaaacttcaaaattatgtagtatgtattatgttgcactctggtgttttgtgtctaaacaaacacccttagaataaagtggtcatttcttgcccttgagcaagttcaagtgttttggacttgtgatgggtgtgttaaggtcatggttgccttttttttatatatatatatatatataaatgtttggtaattggtcgcttctgtataaagttcggctagttaatctgaattatgaatctctgcttataatattaaactagtactattgctggaataaagtgtctagtttttctgtttg

SEQ ID NO: 10954 - DNA, 1606 bp, Glycine max
  Clone ID: 700990392_FLI
atacaccacaccacacctggctttctctttatcattcgttccttcctttcttcgcattgacaaaccctaacatagcatcatcctaaggcacatgcttctccccctgaatactttgtcctccaggggaacacaacttataaagacgatctatatttaaggaagaggacagggatgcgtcggtggctttgttgcacatgtcaggtggaagagtcttacccatcaaatgaaaatgagcacctgaaaagcccaaggaattatggagatggaaatcaaaaaggctcaaaggtgtcagctcctgtcaagcctgaaacacaaaaggcacctccacctattgaagctccagccttatctttagatgagctgaaggagaagacagacaactttggttcaaaggcattaataggtgaaggatcgtatggaagggtgtattatgcaaccttaaacaatggaaaagcagtggctgtgaaaaagcttgatgtttcatctgaacctgaatcaaataatgagtttttgacccaggtttccatggtctcaagattgaagaatggcaattttgttgagttgcatggttactgtgttgaaggaaatcttcgtgtacttgcatatgagtttgctactatgggctctcttcatgacatattgcacggtagaaagggagttcaaggtgctcaaccaggaccaactcttgattggatacagcgagttagaattgcagttgatgctgctcggggattggaatatttacatgagaaagttcaaccaccgattatacacagggatatcagatcaagtaatgtgctaatctttgaagattacaaggccaagatagccgactttaacctttctaatcaggcccctgacatggctgcacgccttcattcaactcgtgtattgggaacttttgggtatcatgctccagaatatgcaatgactgggcagttgactcaaaaaagtgatgtctatagttttggtgtggttcttcttgagcttcttactggcagaaaacctgttgaccataccatgcctagaggacagcagagtcttgtcacatgggctactccaagattaagtgaagataaagtgaaacagtgcgttgacccaaaactgaagggagaatacccccctaaaggggttgctaagcttgcagctgttgcggcgctgtgcgtgcagtatgaagctgagtttaggccaaatatgagcattgttgttaaagcactccaaccacttctgaagtctcccgctcctgctgctccagaaagttgaagcaaataaaatcgcttagatgtctgcatcgtctgcacagttcgattcagttatctccagatttcatcaaatactgcggatatatctatacatctatatttttttaaaatttttgtttgagattggatgtgtaggattgaattggcttgtttcttgttgtcattgttaaattccatgtatttatttcatcgcacttgtagtgccgagtctgctgacacccattgagccataatgcaacaataggtttgggttgtgtgggtaaatgttgtttgtcacttaacgttaatgccctccatattctttatttgtttcttgctatcaaactgagctgatacttcccctg

SEQ ID NO: 10955 - DNA, 3078 bp, Glycine max
  Clone ID: 700990773_FLI
gttttcgctcagcatgcattccaagatgattatcctaagttgaatgagcagctgaaggagattggtataaagatagttgagaagtgccaagggttgcctctagccttagaaacagttggatgccttctacacacaaagccatctgtttcacaatgggtaggtgtattggaatacaagatatgggagttgccgatagaagacagtaaaatcatccctgctttattgttgagctattaccatcttccttcttatctcaagagatgtttcgcttattgtgccttattccccaaagatcacgagttttacaaggagagcttaattcagttatgggtggctgaaaattttgtacaatgctctcaacagagtaattctcaagaagaaattggtgaacaatacttcaatgatctattatcaaggtccttctttcaacgatccagtagagaaaagtgttttgtcatgcatgaccttctcaatgatttggcaaaatatgtttgtggggacatctgtttcaggttagaagttgataaaccagacagtatatcaaaagtccgtcatttttcatttgtaccccaatacgatcaatattttgatgtgcacgggagtttatatcatgctaaaatgctacggacatttatgcccatgcctgcaccagcaagtcgtatatttacttggggttgtacgggactagtagatgagttgttctccaagtttaagtttttacgcatcttatctttgtttcattgtgacctgaaagagatgcctgactctgtaggcaatcttaagcatcttcgttcgttagacctttgctatactgacataaaaaaactacctgattcaacgtgttttctctgtaacttgcaagtcttgaagctgaattgttgtcaccgtttggaggagctaccctcaaatttgcataaactcaccaatttgcgctgtcttgaatttatgtacactaaagtgagaaagatgccaatgcattttggaaaactgaagaatcttcaggtgttgagttcgttttatgttggaatgggcagcgacaactgcagtattcaacagctaggggaactcaatcttcatggaaggctatcaattgaggagctgcaaaatattgtgaatcccttggatgcattggccgcagatttgaaaaataaaactcatcttctggatctagagttaaaatggaatgagcaccagaaccttgatgattcaataaaagaaagacaagtacttgagaatctgcaaccttcaagacatttggagaaattgtcaatcgggaactacggtggtactcaatttcctagttggttattggataattcattatgtaatgtggtgtggttaagcttgaagaactgtaaatattgcctatgtttgcctccccttggacttttgccacttctgaaggagcttttaattggagggcttgatgggattgtgagtattaatgctgatttttacggtagtagctcttgttcatttacatccttggaatctttggagttctacgatatgaaggaatgggaagaatgggaatgtaaaggtgtgacaggttcttttccacgtcttcaacgtctttctataatgcgttgtcccaagctgaaagggcacttgccagagcaactatgtcatttaaattatctaaagatttctgggtgcaaacaacttgtaccttctgctctcagtgcccctgatattcatcaattatacctaggagactgtggagagctgcaaattgatcatccgacaactttgaaagagcttaccattgaaggtcagaacgtggaggcagccttactggaacagattgggcgcaattattcttgttcaaataacaatattcccatgcacagttgctatgatttccttctaagcttggacatcaatggtggctgcgactctctaacgacctttccgctagatatgttcccaatactcagggatcttggtatcagggagtgtcctaatctacagaggatttcacaggggcaggctcataatcatctcaagtttctgggtatcacaaattgcccccaattagaatcattgcctgaaggaatgcatgtcctccttccatctcttctatctctcctcgtaattgattgtccaaaagttgaaatgtttcccgaaggaggtttgccatcaaatttagaaaaaatatgtctctattgtggtagttacaaacttatctccttattgaaaagtgccttgggagccaatcactctctatttagcttagatattggaggagtggatgttgagtgtcttcctgaggaaggtgtactgccacactctcttgttactttacagatcaggtactgtccagatctaaaaagactggactacaaagggctctgccacctctcctctctcaagtcattgcttcttaaagactgccccaggctccaatgcttaccagaggagggtctgcccaaatccatttcagctttgtggatttggggggactgtccgttgctcaaacaacgatgccgggaacccgaaggcgaagactggccaaagattgctcacattcaacacgtgtcgttcctagattgaaagagctgtcaatcaggagctatgttagtacaggatttccaaattggtttggactttgaagattaatcaatattgggggagcaatagtttgtacgtcaaaagtatcatcagaatactgaaggcagaaattccagccactgaatgcctccaaattgtctagctttggataaggaaactaggaaattggcgaaggtcgtcaaactcaaattttctttggtccatggaaaagatacattgctcgatgaccaatgacctactggtgcctctgaaagtccttgagtgaaggtggttaatgagatgcagattaaatacttgctatcctgggagatgcatgcttattctaaattgttttaaacattagtttatgtacagctaaatttgtaacaggattatgggcattgcttttattgggaattcactgacttgttaattccagaggttacatcatgcaagtacatttctaaaatttcaaatttgttttcttcttaaactaatgatcgtgaaattcatgatacttttaacttc

SEQ ID NO: 10956 - DNA, 1066 bp, Glycine max
  Clone ID: 700990943_FLI
gtgctccttctccattttctatctatcgtcaacgttagtgctttgtttaggtgaactaattcggagaccttgcaagacttcatcaatggctgtcaaagtttatattgtgtactactccatgtatgggcatgttgagaaactagcagaagaaataaagaaaggggcttcctctgtggaaggtgttgaggccaagttatggcaggtacctgagacactgctggatgaggtgcttggtaagatgagtgcaccacccaagagtgacgtaccagtcattacccccaatgaactatccgaggctgatggctttgtattcggcttcccaacaaggtttggaatgatggctgctcagtttaaagcctttctagatgctactggaggcttatggagagcacaacagcttgcaggcaagcctgctggcctcttctacagcaccggttcacaaggtggtggacaagagactacagcactcactgctatcactcaactggttcatcatggaatgatattcgttccaatcggttacacattcggtgccggcatgtttgagatggagaaagtgaaaggtggaagtccatatggtgctggaacttacgccggtgatggctcaagacagccaagtgagcttgagttacaacaagcattccaccaagggaagtacattgctggcatcacaaagaagctcaagcaagctgcataatgttgccttgccttcatattagatcatactattattattaaaccataccacaatattgcttgaaaatcattgtccaatttttagacttgaaatatattgagtttttttttcctgtgcttgcaagtattttttttttctttctaatcttggtaaaggaaatgctttgtatgagtgttacatgttgcagtggatgttgcaatttgttgaatgaggaaagtttgtgtctagtcctttagtgttaggcggaaacagtacttgttcctatcttttgtattgcccctttaagcacataaacattgcaacgaccagtttgagtagagaatcggctttattattctctcgtatataataaagatggcgtgtttgaag

SEQ ID NO: 10957 - DNA, 824 bp, Glycine max
  Clone ID: 700991095_FLI
atggcaatggcaacccaagcctctctcttaaccccacccctctccggtctcaaagccagcgaccgcgcctccgtgccatggaagcaaaactccagcctctccttctccagcccgaagcccctcaagttctccagaacaatcagagcagcagccgccgacgagaccacagaggcaccagcaaaagtagaggctgcaccggtcgggttcaccccaccagaacttgacccaaacaccccttccccgatcttcgggggcagcaccggcgggctcctgcgcaaggcacaggtggaggagttttatgtcattacgtgggactcacccaaagaacagatctttgaaatgcccactggcggcgccgctatcatgagggagggtcctaaccttctcaagttggccaggaaggagcagtgcttggctcttgggactaggctcaggtccaagtacaagatcaagtaccagttctacagggtcttccctaatggggaggttcagtatttgcaccctaaggatggtgtttaccctgagaaggtcaacgccggacgccaaggggtgggtcaaaacttcaggtctattggtaagaatgttagtcctattgaggtcaagttcactggcaagcagccctatgatttgtgagcacacaactctatcttcatcatcatcatcccccgtgcttcctttatatgctatatattctcatgtgatatcatgtacctattgtcaattttattatgccacaaatattgcttaaactctgtaccttaattttacacttctttttcgctattttggtgattattatttgtgccaactgcatggtttggatt

SEQ ID NO: 10958 - DNA, 551 bp, Glycine max
  Clone ID: 700991287_FLI
aaaaccggtagtacaaaaggtgcggctattctgaaggactgggagaagtatttatcactattttggcagctggttccacctagtgaagaggatacccctgaggcaaatgccaagtatgacacaactacggcagatcaggtcacttatcagtctgcttagggtgacgatgcaaggttacattacattgattacgccaggctatggagccattgttgtatccctgatttgtacaggaattggagaagctatcaataaggtggaaatgctagccaaaatatggggattaaactatcccttgaaaccatggtcgctgcattgattctcaagatcatttttgccagcagtacgatgcaccccgtatacatccatctaaagcattagcattctcttttgtatagccatgtgaaagcaaaactgtatataaaatgcagttgattcgaatctgattgggatttttgtggacggtgaaaataaattagttggggcttgatatgcctagtcatcttttctctcctctgattaatgaaaaaatattgttttctccttgcacg

SEQ ID NO: 10959 - DNA, 2551 bp, Glycine max
  Clone ID: 700991377_FLI
gaagaaggaagctgtagataatggggtggcggttgaaggtggagatggtcttgctgaaggtgaagaagttcaggacttgaagaatgaaactgtaaataatgggatggaaactgagggtggaaatggtgttgctgaaggcgaagtttggaccttgaagaatggcgttataaatagtggggtggcaattgctgatgggagtgctgctgctgaagatggagaggtttcaggctcaaagaatgaagttaacggggtggcatttgctgatgggaatggtgttactgaacatggagaagtttggggatcaaagaatgaagctgtaaataatgaggtggcaattgttgatgggaatggtgttgcttacggtggagaagttcatggctcaaagaatggagctgtaaataatgaggtggtcattgcagatgggaatggtgttactgaaggtcaagaggatcactgcttgaagaatgaaactgttaataatgtagtggcaaatgcagatgaagggaactctggtgcagttgagtgttttcaaacatacaagaggcgcaagcatgcaaagtcaagttcagaatttaaagtccaggagaacagcagaaaacatatgggagctgcaagtcaactgttggcggtgaagaaaccatttgatttagctgttggcaacacttcaaaagatcattcacatgaccattgggggaatgttgtactaaagcatttatatcattcattaggcaatgacaatggtggcatgaagtggtgtataagggaagcactcatgagctgtcctaaaattagttgtgcccctacaatgaaggaaactcttaaaattgtcaaagatggtcaggagtgctctccgcaattagaaagtttgttttatagattacagagtgaagctaatggacatgaaaatgttgtgcacaacggattttctagtgagtcaaatggccgtgatacaactgaggggtgtcagcgtgtgttccgcgatatcttagcctctgaaaagttcagttcattatgtaaagtgctacttgaaaatttccaaggaacgaaacctgaaactgtatttgactttagtttgataaactcaaggatgaaagggcaagcttatgaacaatcgcctacacttttcctatctgatgttcaacaggtttggcgaaagcttcaaagtactggaaatcagattgttgctatggccaggagtctctccaacatgtcaaaagcttccttctgtgagcaggtgggaatttcagcgcagagttcctttgaagatgaaaaggaagtgctctgtaaccaggaatccatctctcacatgaaaccagagcagacagtagaatgtgttgcattcagacttggcacttgctggcattgtggagacaaagcagatgggacagactgtttggtttgtgattcatgtgaggagatgtatcatctgtcctgtattgagcctgctgtgaaggaaataccctacaaaagctggttctgtgccaattgtactgctaatggaattggatgtcgacacaagaattgtgtggtgtgtgaacggttgaatgccctgaagaccctggatgatattgttggtgaggaaaacatccctacaaatgaggaaacactgaatgaattagaagagaattcaaattgtacttatgatgggattcaaatttccacagataggagaaactcatccgactgcaaaatttgtaaaatggcggtggatggtgaaaaagtaaaaatctgtggtcactctttttgccctagtaaatactaccatgtaagttgtttgtcaagtaagcagctaaagtcatatggtcactgttggtattgcccttcttgtatatgccaagtttgcctcaccgacaaagatgacaataagattgtactctgtgatgcctgtgatcatgcataccacgtctactgtatgaaacctccacaaaattctattccgaaagggaaatggttctgcataaaatgtgaggcagggatacaggcaatacgccaggcaagaaaggcatatgagagtaacaaagggaaagttggtcagaatgattcaaagccaaatgaagatattgacaagaaatggaacaaaaagcgaggacgggaattagacaatgttggaggaatgatggacatgcttataactgctgcaaatactctgaattctgaagaggacttaaatgcaatgctgattgactcaaagaaagcattaacatgagggcgtgtgtactaactgctaatacctaatgttttctatttcctgcatttgtttaagtctttagataactgattttgttaccgttggagagaaaggattatagaggccaaggagcaaaaagcatcaatagaaaaaaaactgtgataagtgaagtatgggatattttgcaggccagatactgatgcaatatgtggttgatatgaaatttaataggttgctttgctccctgcagtatataatgttttggattgtcatgattacttaagcgaagacttcaaattagaataatatcgatttccaatttgtggataatcaaaagggatgatgttttaccctttagatttc

SEQ ID NO: 10960 - DNA, 1707 bp, Glycine max
  Clone ID: 700991608_FLI
cagagtccatgtttgtagaataaaggaaatggacgaaaatgagtcccttgagcttttcagttggcatgcttttagacaagcacatccaagagaagacttgattaaactctcaatggacatagttgcttactgtggaggactaccactagctcttgaagtccttggatcttacttatgtgagaggacaaaagaagaatgggaaagtgtgttggcaaaactaaggaaaattcccaatgaccaagtacaagagaaacttagaataagctatgatgatttagattgtgaggaaaagaatatattccttgacatatgttttttctttattggcaaggatagagtcaatgttacagagatattaaaaggttgtgatctgcatgctgaaattggaataacaatcctggttgaaaggagcctcataaagcttgaaaagaattacaagatcaaaatgcacaatttgctacgtgacatgggaagagaaattgttcgtcaaagttctctagaggaacctgagaagcgtagtcgattgtgggttcaccaagaagtgcttgatttgttgttagaacatactggaacaaaagcaattgagggcttggctttgaagttacaaagaactagtggacttcacttcaatactaaagcatttgagaaaatgaagaaattgagacttttgcaacttgatcatgtacaacttgttggagattatgagtatcttaacaaaaacctaagatggctttgtttgcaaggatttcctctacaacacataccagaaaacttgtaccaggaaaatctaatttctattgaattaaaatatagtaatattagactagtatggaaggagccacagttgctgcagaggctaaagatcctcaatcttagccattcaaggaacttgatgcacacccctgatttttcaaaactaccaaatcttgcaaaactcaatctcaaagattgtccaagattgtctgaggtgcaccaatccattggagacctaaataatcttcttgtgataaatttgatggactgtacaagtctaagcaatcttccgaggaggatctatcagttgaaatctttgcaaactctcatcttttctggttgttcaaagattgacatgttggaagaagatatagtgcagatggaatccttgactacactgattgcaaaagatacagccgtaaaagaaatgcctcaatcaattgtaaggttaaaaaacattgtttatatatccctctgtggacttgaaggattagcacgtgatgtttttccttctctcatatggtcttggatgtcaccaacagcaaatctcagatcttgtactcactcatttgggagcatgtcaacttctctaacctccatggatattcatcataataatttgggtgacatgttgccaatgcttgttagactttcaaaacttcgaagtattttagtgcagtgcgactctaagtttcaattaacccaaaaattaagtaaagttatggatgacttatgtcaagtaaaatttacagaattggaaagaacatcatatgaatcacaaatttcagagaatgccatggaatcttatttgattggaatgggacgctatgaccaagtcatcaatatgcttagcaagagcatatcagaggttctttcttactcaatatttgtttacctcagctttattattcatcttgtaattaagagaacatgctataatatttattttagctt

SEQ ID NO: 10961 - DNA, 665 bp, Glycine max
  Clone ID: 700991692_FLI
cttgtctcatcctataaatcagagcctgtaagcaaaaccaagtttcacaaacttaagattcatctccttgtcctacaaaacatggttccaaccccccaactcaagtatgttcttctcctcttttattgtacttttgcctttaacttgttatccactcctgcctgtgccctcaacataggagctgaaaccactggagtcgctgtctctgtgagcaaagagtgcagtagacaatgcgagtcaagtttctgctcagttcctccattattgagatatggcaagtactgtggacttttgtatagtggatgccctggggaaagaccttgtgatggccttgacgcttgttgtatgaagcatgatcaatgtgtgtcagccaaaaacaatgactacctaagccaagagtgcagtcaaacattcataaactgtatgaataactttaagaactcgagggctcctacattcaaaggaaacacgtgcgatgcggatgatgttattgaagttatacatgttgtgatggaagctgctttactggctggaagagttctccacaagccatagagagtaatgttgtctgccactcaagtctcaagaaagaaaatgattcttcttcctattgttttgagtaattctcttaccaaattaatcaaactccaatgctttatttattc

SEQ ID NO: 10962 - DNA, 950 bp, Glycine max
  Clone ID: 700991695_FLI
gtgaaggtaaaggtaaaggaaagtgagtggaagccaggggcaatccgatagaaaagggttttatttctttttcccttcaattattttcttttcctgtctttgttgttcagttccgttgttgtgttgtgtgctgcaacacaatcggtggtctgagaaatcttgtttgtgttgggtttgttatggctcggagagcagaggaagagtacgattacctgttcaaggttgtactgatcggtgattccggtgttggaaaatccaatcttctgtcccgattcactcgcaacgagttttgcctcgaatccaagtccaccattggagtcgaattcgccactcgcactcttcaggtggagggaagaactgtgaaagctcaaatatgggataccgccggacaggaacgatacagagcaattaccagtgcatactacaggggtgcccttggagctcttctagtctacgatgtaactaaaccaaccacattcgaaaacgtcagccgatggctgaaggagctaagggatcatgccgatgctaacattgtcatcatgttgatagggaacaagaccgatctcaagcatctcagagctgttgccaccgaggatgcccagggttattccgagaaggaaggcctttctttcatcgagacttctgctctcgaagcaactaatgttgagaaggctttccagactattcttgcagagatataccgcattatcagtaagaaatcactctcttccaatgagcctgcatctgccaatattaaagaaggcatgactatcactgttgggggaccccaatccaacacaagcaagccttcttgctgtacatcatcttgaaaccccgccttatacttcctacttgctcagtatcattcttttttcttaacttatctggatttcttcttatgattggttgtgcctgctcattgcaaaccttatattattcatattgttgtc

SEQ ID NO: 10963 - DNA, 1591 bp, Glycine max
  Clone ID: 700991711_FLI
caaaactcagtttccaattcaccaaactcacaatggttgatctagattggcaaacaaagatggttcactccaacatcatgcctccaatgtcccccaaactctctctcccggatcataacattccaatcccaactttgcaactcccccttcgccaaaacgacatcaccgcagcgtcgtctcctatctgcgctgcatacgacaactaccttcgtctccctgagctcagagccctctgggcctccaaggacttccccaattgggccaacgagcccatcttaaagcccgccttacacgccctcgaaatcaccttccgcttactcgcaaccgttttctccgacccgagaccgtacatcaacaaacgcgagtggacccgacgcgtcgagtctctcgccacggcccaaatccagatcatagccatgttatgcgaagacgaagaagaaaaccccgagacacgtggcaaggcacccgtgactgacattaacggctttaccggtcaaagcagaagctacagcgaggaaagcctgctcccgcgcctcgccacgtggcagaaatccaaggacgtggcgcagaggattctcaattcggtggactacgagatggggaggtgcacctacaccttaggtttaggagaggcgaatatcgcgggaaagaagatatttctcttcgacgcggtttgcaggccgagggagattcactcgttggagacgacgccgtttgatgattacgtggggaaccacgagaacaagacgctgcacgccacgcagcagatcgccgagtgttggacgcgctcggtgaagaagctgctggagagagtaacggagtcggtggagaaaaaggcgttggagaaggccgcgagtagtgccatgcggtggagcggatctggaagttgttaacggaggttggggacatgaacctcatgatggatccagaggatttcttgaggctgaagaaggagttagggatgatgagaactgcgggcgaaacggtggcgttttgcttcaggtcgagggagcttgtggaggtggcgagggtgtgtaggaatctgagggagaaggtgccggagatattggaggtggaggtggaccccaagggtgggcccgggatgatggaggcggcgatgaaggtttactcggagaaagagaaagggaaggttcatgttttgcaggggatgcaggggattgaggtggcgatgaagaggttcttctacgcgtataagcaggttgtgacggttatgatggggagctccgaggccgataatgggttcaccaagatattccttgaacccacttatttccctagcttggatgctgccaagacctttcttggttattacaaccaaaattaattcttttattcacttcaattccatcttactcacacaaagaaacaaaaaggattgaattttgtaaacaaatctttgtctgtaaaaatatatttatttgacttctttttggatcatattctttcgatcatatccccgcttttgaattttaaaagtggtggtgttttaaaatgcattacagcaaacaccttttttctttcaatgtgatttagctttcaaagctgtggcagttgtgctacagatggtggt

SEQ ID NO: 10964 - DNA, 853 bp, Glycine max
  Clone ID: 700991734_FLI
gttttctctacactgcccttcctcgcaacccttcttatcccctggctcgcgcgctcaaacctcacaacacaacacaacgcgcactctctctttttctctctgttttttgttctctcttcgcttaaaccctatcgttcttctcgttttcgccgattctcgccatgccgaaagctaaatccgacgccaaagccgccgatagcaggttgaagcggaagggcgctggtgctgggaggaagcaatcgaagaaagctgctaaggaccctaacaagccgaagagacctccaagcgctttcttcgttttcatgtccgagttcagagagcagttcaagaaggagcatcctaacaacaaatccgtcgctgttgtcggcaaagctggtggtgaaaaatggaaatcgctatctgatgctgaaaaggcccctttcgttgctactgctgagaagaagaaacaggagtatgagaaaactatttcggcttacaataagcaattggagggaaagaattcagaggaagacgagtctgacaagtcaaagtctgaagtcaatgatgacgaggaagatgaggaggaggatgatgatgagtaaagatggtgatacatgatgaagcgtaggtggatgcgggaaaagaaaattgttttgcatagttgttgggtttagaatttcataggatggttccctacccacatccttttctgataattagtttctgaatttttattttgtcctccctcagtaggtttagattagtgcacaatcgttattagggtttaatatcatgatcctgtacttaaagtcaatgttatgatacgtttctattctattctcgaagaaattccactgcctctttcaatttctac

SEQ ID NO: 10965 - DNA, 1832 bp, Glycine max
  Clone ID: 700991832_FLI
gagcaacttggcgtgcaggaaccggagtcgtgaactcgttctgcgatcgtcatcaccgaccatcatcgctttttcttctttactttctcatcagagtctctcactgtgccaaaacacgatttttgtattgtacctttcttttgagttctgcgcttttcgatcttaagaagacataaaaaggagcaacaacatgttggagaagatcgggttgccgtcaaagccttcgctgcgagggaacaattgggtggtcgacgcctcacactgccagggatgttcctctcagttcaccttcatcaatcgcaagcatcactgtaggaggtgtgggggaatcttttgcggcagttgtactcgacaaagaatggttttacgcggacaaggtgattcacctgtgcgtatttgtgaaccttgtaagaagctagaagaggcagcacggtttgaattgcgacatggacgcagacctgggagaggaagcttgaaatcagcacctagagatgaagatgaagttttgaaccagattcttggtcaaaccagtgacaaagttcctagtggacagagatctgttggcgttgcatcttcttcgagtaattccaattttgatgaagacatacaaaaaattgtctcaaatgacaagcctaatgttttgggaattgatttgggatccaccactcctgatgagttacgtaagcaagctttggaggagaaaaagaagcataaaattctgaaaggagaggggaaatctgacgaggcattgagagcttttaagagagggaaggagcttgagaggcaggctgatgctttggaaattcagttaagaaagtctcataagaagagtttgccttctggaaacttgtctgacgtgcttaacaaaggcattcctgcagagtctgacagaaaaacaaagtcactttctcatgttggtagagaaaagaatgatcttacttccgaacttagagatctgggatggtctgatatggatctacataaggaagacaaaaagtcatcaaacttgagtttggagggtgaactctcatcaataattggagaagtctttacaaaatctggtgaacaaaagggcagcaagattgataagtcccaagttgttgctctgaaaaaaaatgctctaatgctgaagcgtgagggtaagcttgcagaagccaaagaggaattaaaaagagctaaaattttagaaaagcaactggaagaacaggaactccttgctgaagctgaagattctgaggatgagctatcagcattaattcgtggcatggatgatggtaaagaattaccaaatctgcatgatcgtgggcatgattttgattttgaacgccttttggccatttctgatgaccttgatggtaattttgaagtgaccgaagaggatatgatggatcctgaaatagctggtgctttggaatcattaggttggactgaacctgaaaatacatcttccaagtctcaaacatttgacaaagaacatttgcttagtgaaattcgatttcttaaaagagaggctcttaatcaaaagcgagcaggtaatactgaagaagcaatggcattcctgaaaaaggcaaagttattagaaaggagtcttaacagctctgaacctgaagactataattccgtgtcacaaaaatccactgctataaggaaaagtgtgagttctgaagttgctggtaagggatcagattccattcatgagagaaatactagtgccactaataatgtttcttccacagtggctccaaaaagcagattgatgattcagagagaacttttgagtttgaaaaagaaggctctcacattgagaagggaagggaaaatgaatgaagcag

SEQ ID NO: 10966 - DNA, 621 bp, Glycine max
  Clone ID: 700992220_FLI
aaggaaagctgttgacaatgaatccaacctccaccatcttattttgtccaaggcagcaaccaatgctgtgatggaaacagttgatcccgacattactgccacatgcaaggacctaggagctgtaaaaaaggtttatcagcttgctctattatgcacaaagaggcagccagctgataggccaacaatgcacgaagtgacacgtgtactcggaagtctcgtgccatcaagcatcccaccaaagcaactagctgacctaccacctgcttcaaatccatctgccaaagtgccatgctacgtggatgagtatgcaaacctcaaaaccccacacttagtaaactgcccctcaatgagcacttcagatgctcaactcttcctcaagtttggagaagtaatctctcaaaacagtgagtgagtgagaggattttgaaatgaaaatcaatttcaagaatcatgtatattatttaaaaaccaaaaaagagaagcaaaaaaatggattaggggtaatagttaatgtaaatgtttataaaaagtttttagtactagttttttatggttggttcatttgaacaggaaagatatgtatcatcatcatcatcacaatttgaaaggtgaagtaaaccc

SEQ ID NO: 10967 - DNA, 2277 bp, Glycine max
  Clone ID: 700992271_FLI
ggcagagtcgtgcagtctagatgacaatggtacagaggcaatggccatcatcaaaaaattagactccatgaatctggctaatgtcttggtagcaaggaaaaatgctagtgacacagacaattactactacagtaaccacttcatcatccttcatgaccttctgagagagcttgcaatttatcaaagcactcaagaaccagcggaagagagaaaaagattgattattgagataaatcaaaataaacctcattggtggcttggggagaagtcaaaattgcttaagccccaacaggccactgcccaaacattgtctatatcaactggtgagttatattttttcaaaaaatggtaatatgaatgttgtgatcaactggtgagttatattttttcaaaaaatggaagagtcatctcttccacaactaatgccatatggggtgtatttgcagatgaaaattgctgttcagattggccccaaatacaactagctcaagttgaggttctgatttttaatcttcgaactaaacagtattcctttccagatttcatggaagaaatgaacaaacttaaagttctgattgtcacaaattacagtttctatccttctgaaataaacaactttgagctacttggctctttatccaaccttaaaagaatcagactagagcggatttctgtcccttcctttgttgcaatgaagaatcttaaaaagttatccctctacctgtgtaatataaaacaggcttttgaaaacaatgacatgctaatttcatacatttttccaaatcttgaagagttgaatattgactatagcaaagatatggtgggattgcctaaggggctctgtgatatcatctccctaaagaagctcagtattactaattgccacaaactctctgcactgccgcgagaatttgggaagttggagaatttggaactcctaaggctgaattcctgtactgatttggaagggttaccagattctattggaaggctttcaaatctacgacttcttgacatctcaaattgcataagccttcctaatttaccagaggactttggtaatctgtttaacctacaaaatctctacatgacaagttgtgcgaggtgtgaattgccaccctcaatcgccaatcttgagaatttaaaggaggtggtatgtgatgaagagacggctgcatcatgggaagatttcaaacctatgcttcccaatctaaagatagatgttcctcaagttgatgttaacttgaattggcttcatacaatttcctcctaatacttgcttcatgcagttcaggttgtctttccaagaagtcaatgaaagaactaaatacacttttcacattggattggattgtggtaaacggaaacgtcccttattaatcagtgctgaaggggaatctctgttaaggaactcatcaaacacaaaacctttatgaatcccaagttcaacaacgaaattctaaatgttgtgattagcagatatccatccttttatatatccatcaatttgttgggtgtcaactcactaccatgcctgaagtatctactggtatagcataactgagcaagaattctggggtctcattcaaatcttcattctagtagcgatgtgcttgtttctatgtaaaaagctggaatattttggaacatataatgccattgagtgttttagggacctatgtatttttattcccgaagaccagatgatctcaatcatgctggtgcaacagagaaaatttatgaacaggtcaaacatggatgattttgttgttacaaggtatggtggaggttcttaaatagtttgatgcattgtgtgataaatcttgtaaagaaacttatatttgaaaaacaggtaaggattccgatcaatggcagtgcaagagaaaatttatgaacagacaactgaacatggctgattttcctgttacaaggtatggtggggaaaggctcgtaacttgatgagctatgtgtgataatcttttaaagccacttatcattacaaacaggaaagttagctctgctaaatttgttagacttttaggcatgggagcagcaggcaaatgaatgctcatgaagaaagaagcttctaaccttgtgtggaaaaatccttgtgtggaaatggagtagaagcaaatagaaaggaaggaaatgactaattggatcaagatatcaaatttctactgcttgtgagaggagaaataggaagtcattttcatgagatccacctgaaaatacttcccttttaattagtacaaatatttttatatatataaaaat

SEQ ID NO: 10968 - DNA, 809 bp, Glycine max
  Clone ID: 700992363_FLI
ggtggagatgggtttagtggcaccttactctgctggaacatgtcttccttcccttcaacgccttccaaccctgcaagcccaaaaatggaacaacttctcagcacctcttagttgccaccgccaagtgaaatgtgctgtccaagtccaaccacaagtagcaccacgaattacacctgatgagagcctgcaggtgaagagaagaactctcataggccttctagcatttgatgctgtccttgcttattcttcattgcaagcagcaccagcagctgaaaatccgtgtgaatttcaagtggcaccttcaggccttgccttctgtgacaaacttgtgggagctggtcctcaagcagtgaagggacagcttattaaggcgcattatgtggggagattggagaatgggaaagttttcgatagcagctacaatcgtggcaagccactaacctttcgcgtcggtgttggagaggtcattaaaggttgggatgaaggcattataggaggtgatggagttccccccatgcttgcaggagggaaacgtacactgaagattcctccagaacttggatatggctcaagaggggctggttgtaggggaggttcatgtatcattcctcctgattcggtattattgtttgacgtggagttcgttagcaaagcatgatttacaaagccgtgagctggcaaattgccttcttttttgtttggagtttggagcttacatttcatatagtagaaattttataatttaatatcaaagtaaaaattacttgataaatgcatgactaagtaataaacatgctatgttgttgatt

SEQ ID NO: 10969 - DNA, 930 bp, Glycine max
  Clone ID: 700992413_FLI
agcaaataaaattgctcttctcagcgtgactgttggattacagaatgttggtcggcattatgaaacatgggaggcagggatcactggtccagttttgctccatggtcttgaccaaggacagaaagatttgacgtggaacaagtggtcatataaggttggcctaagaggagaggctatgaatttggtatctcccaatggagtctcgtctgttgactgggtccaagagtcacaagctactcaaagccggtcacaattaaaatggtacaaggcatattttgatgcacccgggggaaaggaaccactggctttggaccttgaaagcatgggtaagggtcaagtatggataaacgggcagagcatagggagatattggatggcttatgcaaagggtgactgtaattcttgcacttattctgggacctttcggcctgtaaagtgccaacttggctgtggacaacccactcaacgatggtatcacgttccaaggtcctggctgaagccaacaaagaacttgatagtagtgtttgaagaattaggtggaaatccttggaaaatatctttggtaaagagagtggcacatactccggcagttcatgggcagtgacccagttcagagaaccaaagaacctgaataagaatctatgtctactgtgaattttgtggctttcgttggaacgaaggtagcttcgaaacaataaagttatctacttcgcaatatgaagtgtttctgttagttctatggttcctactcctagcacctctttttcttatagaaatggaccaccgtgattggtacaaaagatgtacctagatgattttatattcttttcgacacgtgaaccaatctacttggagagtacttgtgaatgaagtgattgtaaggcccccaattcataggatcatggatccccctccccccttgtgcaatat

SEQ ID NO: 10970 - DNA, 1219 bp, Glycine max
  Clone ID: 700992481_FLI
caaaaagaacaagtccaatccttgcaaaggtgcaccaacagcatttacaattgatacaagttcatccataagggtgaaaggactaacaatccagaatagccaacagatgcattttactatatcacgatgtgattctgttagaattactggcgtgaaagtgtcagcacctggagacagcccaaacactgatggaattcatattagtgaatcaacaaatgtcataatccaagacagcaaaattggaacaggggatgattgcatatcaattgtcaatgctagctctaatatcaaaatgaagagaatttattgtggaccaggacatggaatcagcattggaagtctagggaaagacaactcaacaggcatagtcacgaaagtgattttggatacagcagttcttagggagactaccaacggtctcagaattaagacttggcagggaggttctggatatgttcgaggggtgcgttttcagaatgtgagggtggaaaatgtatccaaccccattattatagaccaattttactgtgattctccaaccaattgtgaaaatcaggcatcagcagtggagataagcgaggtgatgtaccagaacataagtggcactacaatgagtgctaaggccattaaatttgactgcagtgactcagtcccatgcagcaaactagtccttagcaacgttgacttagagaaacaagatggctctgttgaaacatattgccactcagcacaaggctttccctatggtgtggttcacccttctgctgattgccttagttcaagtgacaaaacatctcaaattgaagagtcaactatagaggaagaagatattcgtcacactgaactataagtttgatttctaaagatgaattatactatttataacccttttattaatatgattttatatcaaatggggtaagagtaagatgcttgttttatgtcacacttaatcagtagtagtagtcatatgttgttggaggaggcttgagatgagtcagagacaaatcaagggaagtattggttattaaataattagacattacaacaaaattgatacgagagaattggcaattctagcatattccatcagcatcgatgaaacaaaagtgacatcgattttataatattgattgagattttattttaatatagtgttgtgtttgaaatttgtgtcactactattcgttactattaatgtattttggatttaattttt

SEQ ID NO: 10971 - DNA, 1712 bp, Glycine max
  Clone ID: 700992585_FLI
ctaaaacatctcaatgggttcttcttctattacaacatcgcccgcaaccatgaccatggctgcgatcgtgctcctgttcacggtctttgccgtttcctccgccctagacatgtcgataatctcgtacgacagcgcccacgcggacaaggccgccacgttgcgcaccgaggaggagctgatgtccatgtacgagcagtggctcgtgaagcacgggaaggtgtacaacgcgctcggcgagaaggagaagcgcttccagatcttcaaggacaacctgcgattcatcgacgaccacaactccgcggaggaccgaacctacaagctcggactgaaccggttcgctgatctcaccaacgaggaatacagggccaagtacttgggaaccaagatcgatcccaaccggaggctcggaaagaccccgagcaaccgctacgcgccacgtgtcggcgacaaattgcctgattccgttgattggaggaaggaaggtgctgttcctcctgtcaaagaccaaggaggctgtgggagctgttgggcattctcagcaatcggtgcagtagaaggaataaataagatagtaacaggcgaactgatttcgttatcagaacaagaattggtggattgtgatactggatataaccaaggatgcaatggaggacttatggactatgcatttgagttcataatcaacaatggcggcattgattctgatgaggattacccataccgtggtgttgatggtagatgcgacacatataggaaaaatgctaaagtcgtttctattgatgactacgaagatgttcctgcctatgatgagttagccttgaaaaaggccgttgcaaatcagcccgtgagcgttgctattgaaggagggggcagggaatttcaattatatgtatctggtgtattcacggggagatgtggcacagcactagatcatggtgtcgtggctgttgggtatggaacagctaaaggtcatgattattggatcgtaaggaattcatggggttctagctggggagaggatggctacatcagattagaaagaaatcttgctaacagcagatcaggcaagtgtggaattgcaattgagccatcttatccccttaagaatggtccaaatccccctaatcctggaccatcacccccttcacctgtgaagccgccaaatgtctgtgacaactactacagctgtgctgatagtgctacttgttgctgtatttttgagttcggaaatgcttgcttcgagtggggttgctgtcctcttgagggtgcttcctgctgtgatgaccactacagttgctgccctgcagactatcccatctgcaacacttacgctggaacttgtctcaggagcaagaacaacccctttggagtgaaggcattaaggcgtactccagcgaaaccccattggaccttcggacgtaagaacaaggtcagcagtgcttaagcagtttaaggaaatgtgaacgtgcagaaggagccaatgatgaagtaaaagggaagacgaaggactaaagcaccagctggatgcacttcccccttcttcacataatgctgcacgtaacataaagatctttaccattttattatgatacaaaatagataatgttctgtatcaaatttcagtcagacattggctctgtacatagggttatattatcgatgcactgtatttgtattcaaattccaaatggcgaacatatttgattgctgtt

SEQ ID NO: 10972 - DNA, 1600 bp, Glycine max
  Clone ID: 700992605_FLI
gaagacagccacaggcacagcatgttattgatggcttcctcactcaccaaccaccaaaccacaccgtcgcacccattccatcgctgattcctccaatggcttccactaccaccactttctctctttctctccgcaccaaccaacaaactccattccccaaaccctctttcttctccaataacaaccatctgcatttcaactctaataattgggcctgggcctctgtttccactgctcgcaagtcaaggatatgcgtcacttcctctcaagttttggattccttagcagcaaaatccgaacccgctcttcccaccaccgtcgaagtcgatttgggtaatcggagctatcccatttacatcggatccgggttactaaaccaacccgactatctccagaggcatgtgcatggaaagagggtcctagttgtaactaacaaaacggttgcgccactttatctagacaaggttgttgatgctttgacaagtggaaaccccaatgtttctgtggagagtgtaattttacctgatggtgagcagtacaaggacatggatactcttatgaaagtctttgacaaggccattgagttgcgactagaccggcgttgtacgtttgtcgctcttggtggtggtgtgattggcgacatgtgtggctgtgctgctgctttgttcctacgtggtgttaattttattcagattcctaccactgtgatggcccaggtcgattcttcagttggtggcaaaactgggatcaatcaccgccttgggaagaacctgattggtgccttttaccaacctcagtgtgtgctaatagacacggacacattaaatacgttgccggatagggaactggcatcagggcttgcagaggttataaagtatgggctcattagggatgcagagttttttgagtggcaagagaaaaatatgcacttattactggcaagagatcctagtgcaatggcatatgctataaagcgatcttgtgaaaacaaggctgaggttgtgtccttagatgagaaggaaagtggactgagggcaacattgaacttgggtcatacatttggtcatgcaatagaaactggggttggctatgggcagtggcttcatggagaggctgttgcagctggcacggtaatggctgttgacatgtcatatcgcctaggttggattgatgattctctagtgaagagagttggagacattttaaaacaggctaagttacctaaagcccctcctgagaccgtgactgtggacatgtttaaatctgtcatggcagtggataagaaggtagcagatgggttgctaaggcttatccttctaaagggtcctctaggcaattgcgttttcacaggggattatgacagaaaggctctagacgatacgcttcgtgcattctgtaaatcctgatctttgtgctccatgtttctattgcagctttatccaattccttttagtgagtttttgtatgttgtgataacctcacttgtatttttcttatgtactttggatgccaaccatggtccccattatatacgcaagagtctattacaaagttgtattattagaaattgaggcatgatcaataattatcatttgagcat

SEQ ID NO: 10973 - DNA, 1550 bp, Glycine max
  Clone ID: 700993053_FLI
cttcttctacgctctctctgcaaaagatgccttccaaggacaaaatcgcttacttctacgacggtgatgtcggtagtgtatactttggggcgaagcatccaatgaagccccaccggctttgcatgactcatcatcttgttctctcatacgatcttcataagaagatggagatttaccgtccacacaaggcttatcctgttgagcttgcccagtttcattcagctgattatgttgagtttttgaacaggattacacctgacactcagcacttgttcttgaaggaactgacaaaatataatcttggagaagactgccctgtatttgacaacttatttgaattttgtcagatttatgctggtggaactatagatgctgcacgtcgattaaacaatcaattgtgtgatattgctataaactgggccggtggactacatcatgctaagaaatgcgaggcatctggattttgttacatcaatgacttggttttaggaatcttggagcttcttaaatatcatgctcgtgttttgtatattgatatagatgtgcaccatggtgatggtgtagaagaagccttctacttcactgacagggtgatgactgtcagttttcacaagtacggagatttgttcttcccaggtactggcgatgctaaggaaataggagaaagagaaggaaagttttatgccataaatgtcccattgaaggatggaatagatgacagtagcttcactcgacttttcaagactattatttccaaagtacttgaaacatatcaacctggtgcaatagttctccagtgtggagcagactcgcttgctggcgatcgcttgggttgcttcaatctctctattgatggtcacgctgaatgtgttagcttcgtaaagagattcaatttgccattgctggtcactggaggtggggggtacacaaaagaaaatgttgctcgatgttggactgttgaaacaggagttcttctagatacagagcttccaaatgagattccggaaaatgattatattaaatattttgcaccagaattttctttgaagattccaaatgggcagatagaaaatttgaatagtaaatcatatcttagcaccattaaaatgcaagtcttggaaaatcttcgttgcatccaacatgctccaagtgtacagatgcaggaggtccctccggacttctacattccagagttcgatgaagatgagcagaaccctgatgaacgccttgatcagcacactcaagacaagcacattcagcgcgatgatgaatactatgacggtgacaatgacaatgatcaaatggatgtttcatgaagttagcacttgcaatgttgccttttggttggggagtgaccatttaagagagaaggaaaatgtaattagacaaacgcctagatgtatcaacaaagcggtagtactagcccaagaaacttgtatattttgtaagatttttattattttatatatatatatatatatatatatatatatatatatatatatatatatatatatttgctcaaaagtacattattccggtcttccctt

SEQ ID NO: 10974 - DNA, 1639 bp, Glycine max
  Clone ID: 700993317_FLI
tgcaattgaagttgaagtcttgcccttctctcttcaactccaaacacaagacatcatcatccatggctgcctccgtctccactgtcggagctgtcaacagagctcttttgaacctgaatgggtctggacctggggtttcagctcccagttcatccttctttgggagcagcttgaagaaggttattggctcaagggtccccaacacaaagatttcctctggaagcttcaagattgttgctgtagaagagaagaaagagattgaagagacccagcagaccgacaaggacagatggaagggtcttgcctatgatatctcagacgaccaacaggacatcacaagaggaaagggtttggttgactcccttttccaagctccacaggatgctggaactcactatgctgtcatgagctcctacgagtaccttagcactggacttcgccagtacttggacaacaacatggatggattttacattgctccagcttttatggacaaacttgttgttcacattaccaagaacttcatgaccctgcccaacatcaaggttcctctcattcttggtatctggggaggcaagggacaaggaaaatctttccaatgtgagcttgtctttgccaagatgggaatcaaccccatcatgatgagtgctggagagttggaaagtggaaatgcaggagagccagcaaaactgatcaggcagagataccgtgaagccgcagacttgatcaagaagggaaagatgtgtgctctcttcatcaacgatcttgatgcaggagctggtcgtcttggtggaaccacccaatacactgtcaacaaccagatggtgaatgccaccctcatgaacattgctgataaccccaccaatgtgcagcttcctggtatgtataacaaggaagagaatccccgtgtgcccatcatcgtcaccggtaacgatttctccacactctatgcgcctctcatccgtgatgggcgtatggagaagttctactgggcaccaacaagggatgaccgcattggtgtctgcactggaatttttcgcaccgattcaattcctgaacaggacgttgtcaagattgttgacaccttccctggccaatccattgatttctttggtgcactgagggccagagtatatgatgacgaagtgaggaagtggatttctggtgttggtgttgacggcattgggaagaagcttgtgaactcaaaagatggacctccaacctttgagcagcccaagatgactctggagaagctcttgacgtatggtaacatgcttgtccaagaacaagagaatgtcaagagagtccaattggctgacaagtacttgaacgaggctgcacttggaaatgctaacgaggatgctattaacaggggaactttcttccaatcttgaattggaggcaaagcaaacttggcaagtaaatatttctgttcctgaaggttgtgctgatccaagtgctagaagttgtgatgggacttgcgtgtaacattcttagaattctcaatgtcttaggtgcaaagagaagatgccaagtttgagatgattttactatatttttcatattggactgtcttcctctataattttgagttaaagtgtccacttaaattgaatttggtgccttttccttttgtcct

SEQ ID NO: 10975 - DNA, 1536 bp, Glycine max
  Clone ID: 700993386_FLI
aacaaaagcccgtggccgaggtgtggcgcaagatccacggggaggacaactgggccgggcttctggacccgatggacccggttatgcgaggcgagctgacccgctacggcgagatggcccaggcctgctacgacgcattcgacttcgacccgtactccaaatactgcggcagctgcaggttccccttgcccgaattcttcgactccctgggcatgaccaacgtgggctacaccatgacgcggtacctctacgccaccgccaacatcaacctcccgaacttcttccgcaagtcacgctggcctcacaagatgtggagcaagcacgccaactgggcgggcttcatcgccgtctccgacgatgaaaccagcaagcgcctcggccgcagagacatcgttatctcgtggcgaggcaccgtcacccacgtggagtgggtggcggatttgctgaatttcctgaaaccgatctcccctgacattccctgttcagacaggaaagtcaaggtagaggccggtttcttggatctgtacacggacagggagccagggtgcgggtactgtaagtactctgcgagggaacaggttttgggagaggtgaagcggttgatggagaagtatgcggacgaggaggttagtgttacgatagccggacatagccttgggagtgcgatggcgatattgagtgcctttgatattgttgaaactggggtgaatgtggggaaggatgggagaaaagcgcatgtttcggtgttttcgttttcggggccgagggtggggaatgttaggtttaaggagaggttggagggggagcttgggattaaggtgctgagggtgcataatgctcatgacatggtgccacagtcgccggggttgattttcaacgaggattcgccgcagtggttgctgaagctggtggaggggtggtttccgtggtgttacttgcacgttggagaggagttgcagttggaccataagaaatccccgtttctcaaccctgacggggatgcttcctgcgcccataacttggaggctcacttgcacttgctagatggataccatgggaagaatcgtggatttgagcgaacaagtgagagggaccttgctctggtgaacaaggactgtgacttcttgaaagatgagcattcggtgccaccacggtggaggcaagacttgaacaaaaacatggtcaggactgaagatggacgctgggtgctcgctgatcgtccactagctcaagatccacatgaagatattgatcatcatctcggagagctaggcctcgcttcttctcatactcacactcataattgaatggattcattgcatcttttggagactatcttggagtatttttgcacgagcaccacgcttataaaaacaaaatcaatttaaaagttggaatggtattcaaataactcaacttataaatattgttatggactttattgttaaaaaatataatatagttattaagataaatatgctaacagatgtaaacattagagttattggtttatctatataaagataagtttagcgg

SEQ ID NO: 10976 - DNA, 1309 bp, Glycine max
  Clone ID: 700993427_FLI
ctcctcagaatgctgtagagccgaccatgacaagccgggattcattgcctttaaagcataactgtcctggtcatagagatacacagacccgactactgattcctagcaaaccaactagagagttttcccttgatatggaggatttggacatatcgtggactgatcttgttttgaaagggagaattggatcaggttcttttggaactgtacatcatgcagagtggaatggctcggaggttgctgtgaaaattctgatggaacaagacttcaaaggtgaacgcttcaaggaattcctgagggaggttgcaataatgaaaggcttacggcatccaaacattgttttacttatgggtgcagtcactaagcctcctaatttatcaattgtcacggaatatttgtcaaggggtagcttgtacaggctgttgcataaacctggcgctacagagatgttggatgagagacgtaggcttagtatggcttatgatgtggctaagggaatgaattatcttcataaacgcaatcctcccattgttcatagagatctgaaatctccaaaccttcttgttgacaagaaatatacagtgaaggttggtgattttgggctttcccgactaaaggcaaatacatttctctcatccaagtcagctgctgggactcctgagtggatggctccagaagttcttcgtgacgagccatccaatgagaagtcagatgtttacagctttggtgtcatcttgtgggagatcgcaacattgcaacagccttggagtaatttgaatccaccacaggttgtggcagctgttggctttaagggaaaaagacttgagataccacgtgatttaaatcctcaattagcctctataattgagtcttgttgggccaatgaaccctggaaacgcccttctttttcaagtataatggattctttgaaagtattgctcaagccccctatgcctcaacctggtcgtccaagcatgtcattactgacctgaatggttggaatcatagttgttattcatgcacatactacaggattttattagttttgatgtctaacaggaatacactgtttcaatagtcccagaggcacagttgtacatttctgttctaattcggagtaagaatacccattttcaacgcaaagccaggatactccatctttattccaacaaaatattgtttagttaggtgatactatattttgtgaagaaatgtataatttttttcatccataaatttgtatgaaaaattattctcattgtaattataatcagttaatgataagcagctttaacggtcttggctactt

SEQ ID NO: 10977 - DNA, 878 bp, Glycine max
  Clone ID: 700993477_FLI
cttggcttttgcagcaatggagatcaacccccatctctaattcaagagcaaatgccactctcaacaatcaggatacggacaaggcaaactggggatggagttggttggaacgttggatggcagctaagccatgggagagtagattaatggaacaaacccatcatgctaatgccacagagaagacccctcctcctccgccaaagaaatgtgttgactcctcaaattcaaaaacatcagaaccatgcaatgtcaaaatcagaaagaacaatgtcagcacaaggatctctgctagacctccccttatttggcaagctaatcatttgtcctcaagtccaagttccgagtttcactatgatgagagctctaattcatcctcaatatgcacttctacaacgccaatatctgggagtgctgcattgccctgtgacaggacagaggatactaacaacacaaggcctagttacatgaacctcaccgagtcaaccaaggcgaagcagaaaaccaacaaccatcaatacaatagatctcataggcagcagtccatggatgagttccagtttctcaaaagaacagcggttttctctaatggtgcttctgacccttcaaccaacttctgtaggcctctttacctaccaacctacatggataagaggtcacagtgaaagggtcttgattcaattgattgatcctctctgttgtatttattttcaagaagttcaacacttcaacatcttgttgttcaatggtctgttaattgaattacaactgtagcagtggtgtttgtgctttccctaagcaattctactttagggggatttgtataatcaattgttaatttttcatgggtatcatgatatatcaagagaactgcaaggcct

SEQ ID NO: 10978 - DNA, 1124 bp, Glycine max
  Clone ID: 700993668_FLI
ggcatagatacatggaaaaaggaaacaattatgaaaaaggaagcagctaagatgttggaatcagattcttctcctggttatgtttctgaagaagactataagtctctaccagctggttcagctgatccacgagatgaggaggtccctttactaaagaacatctattggaaagaattattagtcctagcgtatgtctgggtggcttttctcattgttcagattattaagacatacactaaaacttgctccatactgtactgggttcttaattccttgcaggtgcctattgcaatctcggttacgctttatgaagccatatgcttgtgcaatggaactagagtgattgcatcaaagggaaaggaaaatacagattggatgaagcttcacaagatctgcctttactgttcctgtggaataatagctggtatagttagtggattgctaggtctaggtggtggcttcattttgggaccactctttctagagttgggaattcctcctcaggttgctagtgctacatcaacttttgctatggttttctcttcctccatgtcagtggtgcaatattaccttctagaacgcttcccagtaccctatgcttcttactttattttggttgcaaccatagctgcattaactggccagcatgtggtgagaaagataattgctatcttcggtcgagcatccatcatcatctttgtactagcattcaccatttttttgagcgcgatcagtttaggtggagtgggaattgagaacatggttgagaagatggaaaataatgagtatatgggatttgcaaatatctgccattaatcttaggtacatacagaagtggaagttttctatagataacatttcccagaccggtgatgtggtcccctttgttcctttgagaaattctagtaacacaatgatactttgttgaacacattttttattattagttaaaatttattaaaaactataaattaagtggattttacttcttatttaatgagtccactcataattttgcagttttttaacaaatttcaactagtaatagagattgtgttaaaaaaaagtgtgtagtactcttgtcactttttgttcaagtaaataaataatatcttttccctctg

SEQ ID NO: 10979 - DNA, 1633 bp, Glycine max
  Clone ID: 700993872_FLI
tgaagttgaagtcttgcccttctctcttcaactccaaacacaagacatcatcatccatggctgcctccgtctccactgtcggagctgtcaacagagctcttttgaacctgaatgggtctggacctggggtttcagctcccagttcatccttctttgggagcagcttgaagaaggttattggctcaagggtccccaacacaaagatttcctctggaagcttcaagattgttgctgtagaagagaagaaagagattgaagagacccagcagaccgacaaggacagatggaagggtcttgcctatgatatctcagacgaccaacaggacatcacaagaggaaagggtttggttgactcccttttccaagctccacaggatgctggaactcactatgctgtcatgagctcctacgagtaccttagcactggacttcgccagtacttggacaacaacatggatggattttacattgctccagcttttatggacaaacttgttgttcacattaccaagaacttcatgaccctgcccaacatcaaggttcctctcattcttggtatctggggaggcaagggacaaggaaaatctttccaatgtgagcttgtctttgccaagatgggaatcaaccccatcatgatgagtgctggagagttggaaagtggaaatgcaggagagccagcaaaactgatcaggcagagataccgtgaagccgcagacttgatcaagaagggaaagatgtgtgctctcttcatcaacgatcttgatgcaggagctggtcgtcttggtggaaccacccaatacactgtcaacaaccagatggtgaatgccaccctcatgaacattgctgataaccccaccaatgtgcagcttcctggtatgtataacaaggaagagaatccccgtgtgcccatcatcgtcaccggtaacgatttctccacactctatgcgcctctcatccgtgatgggcgtatggagaagttctactgggcaccaacaagggatgaccgcattggtgtctgcactggaatttttcgcaccgattcaattcctgaacaggacgttgtcaagattgttgacaccttccctggccaatccattgatttctttggtgcactgagggccagagtatatgatgacgaagtgaggaagtggatttctggtgttggtgttgacggcattgggaagaagcttgtgaactcaaaagatggacctccaacctttgagcagcccaagatgactctggagaagctcttgacgtatggtaacatgcttgtccaagaacaagagaatgtcaagagagtccaattggctgacaagtacttgaacgaggctgcacttggaaatgctaacgaggatgctattaacaggggaactttcttccaatcttgaattggaggcaaagcaaacttggcaagtaaatatttctgttcctgaaggttgtgctgatccaagtgctagaagttgtgatgggacttgcgtgtaacattcttagaattctcaatgtcttaggtgcaaagagaagatgccaagtttgagatgattttactatatttttcatattggactgtcttcctctataattttgagttaaagtgtccacttaaattgaatttggtgccttttccttttgtcct

SEQ ID NO: 10980 - DNA, 938 bp, Glycine max
  Clone ID: 700993947_FLI
cacacttcttctttcatcattcatcgcctttcaccacgcacgcagatcctttattcctataatccttccttcgctctctccaaatttcgactctttcgatcagatccgcgacacccaccccaccaaaaccttgcgcaacccatccatgacgcttggctcaggaggatccagtgtcgttgttcctaggaacttcagattgctggaggagcttgaacgtggtgaaaaaggaattggagatggcacagttagctatggaatggatgatggtgatgacatttacatgcgctcttggactggcacgattattggcccccataatactgtacatgaaggaagaatttatcaactgaagctgttttgtgataaagactacccagaaaagccccctagtgttcggtttcattcacggatcaacatgacttgtgttaatcatgaaactggagtggttgaaccaaagaaatttggtcttcttgcaaattggcaaagagagtacaccatggaggacatactgacccagctgaagaaggaaatggccgctcctcataaccggaagcttgtccaacctccagaaggtacctacttttagcacccaagatggtatagatgttggatcgaattgcatatttgctgtatgcaatatatagtgtgtaatgctttgtggatccatccttctgaattctagaacatataggggaatgccccgaaaagcttcatgtttctatctccatggcttcagagttgttttgttgtctttgttaactgtgttaaagggactgtttgattaaaatagtgtgtgtcaaatatttcgaaaactcttttaagtagtactttcccttctaattacaaaggtgctttcaattttagtctcgcttcttattgcattgctttctttctgtcttgtaagtaagctgaagccaaatggaaaattggtaatggac

SEQ ID NO: 10981 - DNA, 576 bp, Glycine max
  Clone ID: 700994155_FLI
ctgctctaaacctctgttttggtgctatgaaattgcatgttggggactggttgtactatatggtggtactgccttcttcttgaggagaaaggcagccacaattcttgacgagggaaattttagtggtcgaaatctagggttggaaatgctggaagcgagccccctggaagtcacaccagaggtggaaaggcgtgttaatgaagggtttaaggcatggatgggtccatcccttctttcttctgatgaagaagatgaacctgacagctatgatgaggcacctcattcaacacatactaacttaaacaggcaaagactctgaactggataaattcagtgtgaaacatcatcttttccagccttcatgccttaaaagaatgctgtatggtatggaaatcagttttggacaaaaatgttgacatgtatcatatgacaaaagcaaatgttgattaaagaaggatggatttgatgctcaactttgaactacgatttcatctggtctggtccaataggtacagtttgtgtagtttagcttgtgaataataattaaattgggaatgaccaagctttgcctttcct

SEQ ID NO: 10982 - DNA, 1945 bp, Glycine max
  Clone ID: 700994269_FLI
actgtggatcatagcgtagacctttgtccatcttcaatgttctgttcctaaaaccacaccatattctgccacctctttctaactcccccaagaaaagttcctttttcccctttccccttctcttttcttcttcaaggtcaactccgtttactataaataatgaccactcttcttcaacttcaataatactcacctttgaatggattcttcttcttcttctccaaacaacaacaaccaccacaagctgggtttccaacctgccaggtctcgatcacgtcttgccatggcttcacctgccaacacctccgagcctaagatcgtcaccggcacagccggttacatcctcgaagacgttccgcatttcactgattacattcccaatctcccaacataccctaatcctttgcaagacaaccctgcttattcagttgttaagcagtattttgtgcatgttgatgacagcgttcctcaaaaggtcgttgttcacaaagatggtgcaagaggggtacattttaggcgtgctgggcctcgtcaaaaggtgtactttgaagcagatgaagttcaggctgctattgttacttgtgggggtctgtgtcctgggctcaacactgtcattagggaattagtgtgtggcttacaccatatgtatggggtgaagaaagttcttggaatcaatggaggatataggggtttctatgctcgcaatacaatcactttaacccctaaaagtgtgaatgatatacataagcgtgggggaactgtcctcggaacatcacgaggtggacatgacaccaaaaagatagttgacagtattcaagatcggggaatcaatcaggtttatataattggaggagatggaactcagaagggtgcatctgcaatttttgaggaagtcagaaagcgtggtctcaaagtttcagttgtaggtatccccaaaaccatagataatgatattccagttattgataagtcttttggctttgacactgctgttgaggaggctcaacgagctataaatgcagcacatgttgaagctgaaagtgtagaaaatggcataggtgttgtcaagttgatgggtagaaacagcggatttattgcaatgtatgctactcttgcgagtcgagacgtggattgttgcttaattccagagtcacccttttaccttgaaggtcctggtggactctatgaatatatagagaaaagactaaaagaaaatgggcacatggttattgttattgctgaaggagcaggacaggaacttgtttctgagagtgtgcagtccatgagcaaacaagatgcttctggaaacaagctttttcaagatgttggcctatggatatcccaaaagattagggatcattttgctgcacagaagacactgcccataactctcaaatacatagatccaacctatatgatccgagctattccaagcaatgcctctgacaacgtgtactgcacacttcttgctcaaagtgcagttcatggagcaatggcaggttacactggctatacaagtggacttgtgaatggaagacaaacttatatacccttctatagaatcactgagagacagaaccacgtagtgataactgatagaatgtgggctaggcttttatcttcaacaaatcaacccagctttttggatgccaagggtgacaatgaagagaaggaggaagaagaagcattgaatcagttaccggatggacattgtgccaaagacacttctttggctagcaaagaaatcaacagcagcatttatccaacagcttgctagttattattgttattatttgtcattacgtgagatcctctatcatgcgttacacgtaatagtacataagagctgtcttttttgcccttgtttgtcaatcaataatatggctgtggaacacagccttacacaatgaactttattagtttgaattattaattactaattatt

SEQ ID NO: 10983 - DNA, 1879 bp, Glycine max
  Clone ID: 700994349_FLI
cgttttcttcttcgtattttcactttttggtcgcatattaataatcggagacgagaagtgtagttttagtgggagaaggaagaagattgacagagagagagaggaaggagcgcgaaaagactaaattgaccttggatcttcgtctttcctctctctccgattcgtttttcgttggtcttctaaaagcttcttccaccatgaacagcaaggccaacgtttccaaagagctcaacgccaagcacaagaagatactggaaggacttcttaaattaccagagaatagggaatgtgctgactgcaaagctaaaggtccaagatgggctagtgtaaatcttggcatctttatatgcatgcagtgttcaggaatacatcgaagtttgggggtacatatatcaaaggttcgttctgcaaccctggacacttggcttccagagcaagttgcattcattcaatcaatgggaaacgagaaagcaaattgtttctgggaagcagaattacctccaaattatgatagagttggaattgagaatttcattcgtgcaaagtatgatgaaaagagatgggttccaagagatgggaattcaaaaacaccttctggatttcgggaagagaaaagtccttcacattggcagaggcctgtggagagaagtggttatgccgctgtttctgaaaataaatttgaggaaaggaagaaaatccaaccatcaactgcaattcctgccgcaagaattaatgttcctgctcctcccagagcacctgagcaggtaactcctattaccaaacctcagcatgtggagaaagtggaatcagtagcaccacaaccacaagctccccaaccactagctgaaacatcaaagcaggctacagacacagttaaaaataaccctcctaaagttgactatgccacagaccttttcaacatgttgtctatggatggccccaatgaaaatggctctgaggcagctggtacaactactgatgataatcactgggcaggtttccagtctgctgcagaggtgtcaacagctgagaagactagtcccctgaaagcagctgatagtactccaggttctgcatctggaattgaggatcttttcaaagatttacatcctgtgacaccaagtttgactccagaaaaaccacagaaagatgtgaaaaatgatatcatgagcctctttgagaagggcaatatggtgtctccattttctatgcatcaacagcagcttgccatgctagcacagcaacagtctcttctaatggcttctgcagctaaatcttctggtggggatcctaggtatcctgctagcatacaacaacctagacccaatgttcctatccaaagttggccagctactggctattcaattcctggagtaatgcccatgggtggtcagggagagttgcaaaaacttgtgcagggtcagactaggaacatgaccccagcacattttgcagggagttctgttcaatatccaccatccagtttctatggtatgggacaagttcctcctccagttaacggtatgacaatgggagtgagtaaacctcagtcaggagctcctgcagtgtcatctaccacttcacagtctgcgaaggattatgatttttcctccttaacacagggaatgtttatgaaacagtgattgatcttttttgttgggcaatgccagctatgtcatatactaccatagaagattagttaaaattacagcaggtgcgctttcttttctcatttttcccttgacctgtccttgtggtgtaatccatttgtagagctagttcaggttttttctcgttcattttaggtgattgcttcatttgtatccgtagttgtattcactatttatttatgcacaataaaattagtgatatttattat

SEQ ID NO: 10984 - DNA, 1447 bp, Glycine max
  Clone ID: 700994508_FLI
ggaacacaaagtagccacaacaactgaaggacaatccataagatgtaaagcggcaatttgtcgcaaagcaggtgaaccactgagtattgaggagatcattgtggcgccaccaatgcctggtgaagctcgcattcgtattatatgctcctctctctgtcaaaccgatatcagttttcggaacatgcagatgtatcttctgtgttttgaaggaccatcctgccatttatccaagaattctgggtcacgaggcaataggggttgtggaaagtgtaggagaggatgtaactgaagttacaaaaggagatgtggttgttccaattttcttacctgattgtggggagtgtatcgattgcaaatcaagcaagagcaacctttgttcaaagtttccatttgaggtgtctccctggatgcctagatatgccacttctagattcacagatttaaaaggagagatcatacatcatttcttgtctgtttctagttttagcgagtacactgtggtcgacattgcccatctaatcaagattgatccggcaataccacccaacagggcatgcctcatcagctgtggtatatcagcagggataggtgctgcttggagagcagcaggtgtggagccagggtctacagtagctatttttgggctggggagtattggattagcagtatggtgtccatttagctctgttttctttccgtattttgtgattgattatattgaaatgctcattgcaagcaattggtatcataggttgctgagggagctagactttgtggagcaactaagattataggtgtggatgtcaacccagaaagatatgaaatcggaaaaaggtttggactcacggactttgtccattctggagaatgtgaaaataaatctgtgagccaggttatcatagagatgactggtgggggagcagattattgctttgaatgtgttggtatggcatcattgatgcacgaggcatatgcttcttgtagaaagggttgggggaaaacaatagttttgggagtggacaagccaggatccaagttgaaccttagctgtagtgaggtcctagttagtgggaagagcctcaggggatgtttatttggaggactcaaacctaagtctcatgtacccattctccttaaacgctacatggacaaggaactgaatttggacgagtttgtcacacatgagatggagttcaaggatatcaataaagcttttgatctattgattgaaggacagtgtcttcgatgtgtgatttggatggacaaatgaacctattcctgtacaattaacagttactttaatcccttggattatgatatcaataattaaaatattggatacttttttttttttgtatttggagagaacatattcaatgtaaaagcagttgatgccgcaaagtaattatgtcaaataaattgatggtgaccatcaatgcttcaaagt

SEQ ID NO: 10985 - DNA, 667 bp, Glycine max
  Clone ID: 700994567_FLI
caactcaacttcgaactcaaatcaagcaatcaatttcaaatccaaaaatggggagctccacaaccttctgtgccttcttcctcgtgtgtacgatcttgtccgtccacgtggcgcaatcctcatcctccaccctcgacctggacacctttttcctccctctcaaatccggctgccgcggatccgtcgccgagtgcagcctcctcgccggcgacgacgacaccgagtttctgatggagtcggagagcaaccggcgcattctagcaggaaggagctacataagctacggtgcgctgagaaggaacactgtcccttgctcccgacgtggcgcctcctactacaattgccgccctggcgctcaggccaacccctacagccgtggatgcagtgctatcacccgatgcaggcgttgaaaaagttattcttctcttttaatttcatttttttttatatatatatatttttgtaattgatgaaaattgtcatgccactacatatatacaagtagagaagagaaagaagacaagtagagatgaataaaatccaattgccgccgtttgtatctgtatctgtattgtaatttaatttaatcttaggtacacataatattattattattattatgatttggttgtgccaaaattattatcatggattgatttgttttttt

SEQ ID NO: 10986 - DNA, 974 bp, Glycine max
  Clone ID: 700994583_FLI
cacaaacacaacctctctccctctcgattttaacaaccaactgccaaataattaataatacaataacctaaataaaccgaactctggttaatcattgtgacacgttattttaatttttggtagaaagtaaacaacaaaaaattaaatttgattgttgcttattaaagagagggggagggagacaagatacaccaaagtcgtcgctcatggaagacttactcggccttttaaggattcacatcaagcgcggtgtcaacctcgccgttcgtgatgtcaatactagcgatccatacgtcgtcgttaagatgggcaagcagaagctgaagactcgtgtgattaaaaaggatgttaatcctgagtggaaggaagatcttacgctttctgttacagatccaattcatccatttatactgacagtgtatgactatgacactttcagcaaggatgacaaaatgggagatgcagaatgtgacatctcagcatacatagaagccttaaagatgaacttagaagacctccccagtggtactataatcacaagaatacaaccaagcaggcaaaactgtctggcggaggaaagttgcatcacttatagcaatggcaaagttatccaagatcttgtccttagattgcgacacgtggaaagcggtgaagtggaaatccaattgcaatggattaatcttcctggctccaagggtttatgatttctttatcatatgcatgcattcaactttcaagcaggggtgggttttatatatcaagtacgcgtaacaaatattaccgactctacgtgtctacctatatttattttatttatttatttgcagttcattagttggcttcaattgtttgttctgttgatcgagctagcctgtcagcaggcaaatgtatcgtgttgttgactgatgcaagagaagctttttctgttatttcttgcatattttttcaagttcaaaaagtcatatttaatcatc

SEQ ID NO: 10987 - DNA, 908 bp, Glycine max
  Clone ID: 700994639_FLI
ttgttgcgcgcccctcccattgttcgtaggcaacttcaacctcaccaaaggaactaagaatttcattgaggctagagaaagtggtgatcaatatgtcaaagaatccaaaagttttctttgatattctaattggaaagatgaaagctggacgagtagtgatggagttgtttgccgatgcaaccccaaaaacagctgaaaacttcagggctctctgcactggggaaaaggggattggacgatctgggaaacctttacactacaaaggttctgtatttcatcgtattattccagaatttatgtgtcagggaggagatttcacaagagggaatgggaccgggggtgagtcaatctacggttccaaatttgaagatgagaatttcaatttgaggcataccggtcctggtattctctccatggcaaatgctggagctcatactaatggttctcagttcttcatatgtactacaaagacaccatggcttgatgggaaacatgttgtgtttggaaaagttgttgatggatacagcgttgtgcaggagatggagaaagtgggttcaggaagtggcaggacatctgaaccggtagtaatagaagattgtggccagattgtagagaagtgagtcttgatacaacgatgtttcgagacatgtttgttgctattcaatgcaaatcactagtattataataagtgatttgtgtaactaggagtcaattgtccagtattaatgtaactctcaaatttgtactcctaaatctgcttttacatttgttccaactaaaaatgcgtagctgtctgtagttggtcagagattacgttgatagaattgtggaagcaataggctcgaatatctgtagttgattggtaaattagaatgaataaggatgaagcactacatatttgcaattat

SEQ ID NO: 10988 - DNA, 640 bp, Glycine max
  Clone ID: 700994709_FLI
gtctgctccaacaactggtggtgtgaagaagcctcatcgttatcgccctggaactgttgctcttcgtgagattaggaaataccagaagagcactgagctcctaatcaggaagcttcctttccagaggttggttcgtgaaattgcccaggatttcaagactgatctgcgtttccagagccatgctgtgcttgcattgcaagaggctgctgaggcataccttgttgggctctttgaggacactaacttgtgtgccattcacgccaagcgtgtgactattatgcccaaggatattcagctggcaagaaggattcgtggtgagcgtgcttgagttggtgcgttctgtgtttgtgaagatggattgttggtggctgcggatggtgttttgttactaagttttctttttgttgaagcctataggttattagggaaaaataggtgtttacttggtagtcatattaattgtcattggcaaatactgcctaagacactgtgaaggtctggttgttagaaatttggcatgtatttgatttttttggatcctttatttctcgttttatttctggttgtgcagccactttgggaattgtattggacaactttctgttgccgtctaatctagttgaagctagcttatcgtgtc

SEQ ID NO: 10989 - DNA, 961 bp, Glycine max
  Clone ID: 700994793_FLI
tttctccctgccttgtttcagttctttctttggtcactcactgctctctaacctagttccacatttttccactcaccaagtctctatctttcatctcatatttctcttcattcacatcacttctctgatctgtctcttcactctctttgacccagatcaaattttttaccttttgttcttctctctttctctccgttaatgctttgcttcaaaccattctcagaaaaaccaatgcttccatctgggtctaccctctttctggatttttgttatctgattttgtaaaatgggttgttttttatatgcagaaatttgattcaatataggagatttcttacagagaaattttagtacattttgacaacaagggcttttggcaatgggcagaggcagaggaaaagggaagaagcaatctgttattgctgaggatcctggaagtggtgaagaggataaagtcccagcttatagaagaaggggaagaccagtgaagccactaacagatgaaattgaagaagtggaagtaactgaaataattgagaaagacgaggagaatgtgaaaggcaatggttctacggatgatttgaaaactcaggctatcacagttaataaaagaaaaaggaagagatctacacaggttaaagagaagatagatcccttgaaagaggacaatggcatcctagcaaagtcaggccctgaagattcaataaagactactggattccgacagaatggtagccggcgtaagaacaagcctcaccgtgctgctgaagctggggtagattgcaagtgagcaaggttctcatgatatttctgttttaagccctcggaatagatggagtttgttatcacaagacagggattgtttgattgtgtaaggcttgttatgtttgcttgttattactcattttgcttttgtgactttcatgtgctatttctgattttaattttgagtattcatagc

SEQ ID NO: 10990 - DNA, 1533 bp, Glycine max
  Clone ID: 700995187_FLI
caagtttgctcgttacagcaagtttgaagagtgtggcagattaagaaatagagatctgcttagttctgccaatgtaatgtgtgctctaagttttgaccgtgatgaggatcacattgcagcaggaggagtttcaaagaaaatcaagattttcgaccttaatgctattgcaagcgattctgttgacatccagtacccagtaattgagatgtcaaataaatcaaagcttagttgtgtgtgctggaacacttacattaaaaatcatctggcatctactgactatgatggtgcagttcagatgtgggatgcagacacgggtcagccattgtctcaatacatggagcaccaaaagagagcttggtctgttcacttttctctgtcagacccaaaaatgtttgctagtggaagtgatgactgctctgtcaaactgtggagtatcagcgagagaaattctctgggaaccatctggaaacctgccaatatatgctgtgttcagttctctgcttactcaacaaatcttctattttttggatcagctgattacaaggtttatggttatgatcttcgtcacactagaatcccttggtgcacattagctggtcatggcaaagctgttagctatgtaaaatttatagattctgaagcagttgtctctgcttccactgacaactctttaaagctttgggacctgaacaaaaccagctcttctggtttgtcatctgatgcttgtgccatgacctttaaaggtcatagtaatgaaaagaatttcgtgggattatctgttttggatggatacattgcatgtggttcagaatctaatgaggtgtactgttatcacaaatcactgcctgtgccaattgctactcataaatttgagtcaattgatcacatttctggtcatctaaatagtggtgataataatggacagtttgtttctagtgtttgctggagaaagaaatctaacatgcttgttgctgccaactcagttggaattgtgaaactattgcagatggtctgacacaaaagagaaaatatttggttaacatttaagcctgaaaagctattcatttcctgactcgataatattttgatttagtatacctgtcagaagactagttctttattcaggcttcaatgattaatagggtataaagcttaaatgggttcaccatttggcattgcttctgaggcaagcatcaatgtacaattgtgaaccaaagtaagctgaacaagaaatgtacatagcatgtacaaatgtaggcttttgaactgaagcactgatgaagctggagcatgcaagtctctctcaaatgcggtattgcacgctactagtggttttctctaatgtctgatccattacttctgtatatagcacgccctcctaagcagagatacatactaattacctttactttcagatcacttttagtttctcggaaaagtacaggagatgatctatgctttgcatttactttgacatatattaactgttgtagttaatatgatggttcaaatattaattttacgctttcattt

SEQ ID NO: 10991 - DNA, 1418 bp, Glycine max
  Clone ID: 700995361_FLI
tacaaaggttgctgtaggagataagattgcagtagtgctaagtgctaacacctgcagtgaacaatggcctctgcatcagcatctctgctcaagtcttcacttgttcttgacaagtctgagtgggtgaagggacaaacccttcgccaaccttctgcatcagttgtgagatgcaaccccaccaccccatcaggcctcaccatcagagctggttcctatgctgatgagctcgttaagaccgcgaaaacagtggcttcaccagggaggggtattttggccatggatgagtccaatgctacctgtgggaagcgtttggcttcaattgggctagagaacactgaagctaaccgccaggcataccgtaccctcctcgtgacagttccaggccttggtcagtacatctctggtgccattctctttgaggaaacactctaccaatccacaactgatggcaggaagattgttgacgtgctgcttgagcaaaacattgttcctggtattaaagtcgacaagggtttggtgccccttgcaggttccaacgacgagtcatggtgccaaggtttggatggtctagcctctcgctcagctgcatactacgagcaaggtgcccgtttcgccaaatggcgtactgttgtgagcatccccaacggtccctctgctctggcagttaaggaagcagcctggggtctggctcgctatgctgcaattgctcaggacaatgggttggtcccaattgtggagccagagatcttgcttgatggggagcatggtattgatagaacttttgaagtagcccaaaaggtctgggcagaggttttcttctaccttgctgagaacaatgtcctttttgagggtattctccttaagcctagcatggttacacctggagccgagtccaaggacaaggccagtcctcagacagttgctgattacaccctcaagctccttcacaggagaattccccctgctgtccctggaattatgtttttgtctggtggacagtctgaggttgaagctaccctcaatttgaatgccatgaaccaatctccaaacccgtggcacgtgtcattctcgtatgccagagccctccaaaacactgccttgaagacatggggaggccgcccagagaacgtgaaggcagcacaagatgcactcgcattccgtgccaagtccaactcactcgctcagcttgggaagtacactggtgagggtgaatccgaggaagccaagaaggagttgttcgtcaaaagctactcctactaagatgtttgcagtgaatatgatacttgttaggcagcaacaccagcagttacagtaggtgttgacggacgatgaagtggaagactaatttgtctaaaatgtaatgtttttatagtcttggagactatttttgtttatggttaaatgcacctttacagctt

SEQ ID NO: 10992 - DNA, 1619 bp, Glycine max
  Clone ID: 700995421_FLI
ggaagaaaacaccaccgtcccgatgaacttggaaatccaaagggatcaaaggcaacaacttcccgagctgattgatccctggaataacgatgaagtgcttgcgctcttgaggatcagatctagcatggaaagttggttcccagaactcacttgggaacatgtctcaaggaagctagcagagcttggatataagaggagtgcagagaagtgcaaggagaagtttgaagaagagagtagatatttcaacaacattaattacggcaagaataataataataataataatagtagcaattatcggtttcttagtgagcttgaacagctttatcaccaagggggtagtggtgatcatcatcttgaaaatacgactcagccaccactgcagaaacaagacaagatgggccaccatgcattggagttggaagtagaaggggattctagaaacgttgttgacgcattggtgacaaaacaaaacgagcaaagcgacgaggcactagcagtggaaaagatcacaaaggaccgcaagaggaagaggcctgataggtttgagatgttcaagtgtttttgtgagagcattgtgcacaagataatggctcagcaagaagagatgcacaacaagctccttgaggacatgatgaagagagatgacgagaagttcactagagaggaagcttggaagaagcaagagattgagaagatgaacaaggagcttgagatgatggcacgtgagcaagctattgcaggtgatagacaagccaacattatccaaatccttaacaaattctcagccacttcgtcccctgcaagccacaccctcaagaaggtaaacaatgattcaaacctaaacatccacattacacaaaaccctaatccttcacaaacagaaaaccctaccttaagtgttgcacaagacacattacaagtgattccttctacttcttctacttcaactccagctcttccccagaaccctagttcttattctctaaatatccagaataataataataatattccagtagagacaaattcggttttgaataaagggaatgagaaagacgatgttgggagaaggtggccaaaggatgaagtgttgacactgataaacctgaggtgcaccagtgtgaacaacaacaacaatgaggagaaggaagggaacaacaaggtccctctttgggagagaatctcacaagggatgttggagttgggatacaagaggagtgcaaagaggtgcaaagagaagtgggagaacataaacaagtacttcaggaaaaccaaggatgttaacaagaagaggtcccttgactcgaggacttgtccctactttcaccaattgagcagtctctataatcaaggaaaacccgttctgcaatctgaaagccacttgaatagtccacctaatcagaatcccgagcaagtgacaccagatcaaacaacacaagctcacgagtcttcttctcaggtggggtctggtggtggtttcagtgtgcagcagcagcaggttgatcatggaggtgagaaaaccttgatgcaagtaccttctttggatttcgatcagttttaattcattgatttgtccatgttctgtcacataataagaagtgtagcacttttttttg

SEQ ID NO: 10993 - DNA, 1755 bp, Glycine max
  Clone ID: 700995510_FLI
atgagaatcacctaacatcggaccttaaaataagagaaagagaacaacgaagaagttgttgtgtcttaagaaagagagagatggcggcggagataccgtgctgtggaacaaagttttcactgtacgttttggtgatcataggtttggtctgcttcgcgggactaatggctggtctcactctcggactcatgtctttgggactcgtcgacctcgaagttctcatcaaatctggtcgtcctcaggatcgcatccacgcttcgaaaatttatccggttgttaagaaccagcatcttctgctttgcacgcttttaattggaaactccttagccatggaggctcttcccatttttcttgattcactggtgcatcccgctgcggcaatcttgatttcggtcacgctcatcctcatgtttggagagatattgccccaagcaatttgtacaagatatggattgacggttggagccacgctggctccacttgttcgggttcttcttatagttttcttcccgctttcttatcctatcagcaaggttcttgattggatgttgggtaaaggacatgctgcccttttaaagagggcagagctcaagacttttgtgaattttcatggaaatgaggctggtaaaggaggagatttaactcatgacgagacaaccatcataactggtgcacttgaattgacagaaaagactgcaaaagatgccatgactcccatatcaaaggcattttcccttgatctggatgcaactctaaatttggagacactgaattcaataatgacaattggtcatagtagagttccagtttatgcaggagaaaaaaccaatattattggacttgttctggttaaaaatctctttatggttgattcaaaggctgcagttcccctaagaaaaatgctcatcagaaaaattcctcgtgtttcagagaacatgcctctgtacgatatactgaacgaatttcagaagggtcacagtcatattgcagttgtgtatagggacctaaatgataaaaatgaagccccaaaaaaagttaaagatggggaactacttgatcttaaggacaagcgtaagaataaaggagagaagacatccttggataaaggtgagaaattggagtcgcattattctttgactacagatggtgctcagcaagcaaagaaaagtccaccagcaactcctgcttttaaaaagcgacatagaggttgttcatattgcatcctggaccttgataattctcccctgccagtgtttcctcccaatgaagtggttgttggtgttattacaatggaggatgtcattgaagagcttcttcaggaggagatactagatgaaactgatgaatatgtcaatatccataacaagataaaagttaacatgaatgcttctaaggagaaggctcctgatgcaaatatgttgctgccttcacaagcagttcaaggacacacaccaactaattcaatttctacagctacttctgcaacgggctcacctaccacaattgatctaatctcagaaagtgagtcactaaggaatcgataattcataaggaataagagaaagacataggtttgtgtttctgttgaaaaggcagagcagtatatagcttcttgtaaaaaattccctgtatgatattatgttaataaattaatatagaggaacactgcggtagcgtgtggcttgccagacaaaacagaatgattcattttggtttcacttttaatgaaagtgtaatcaaaatttttcacttttt

SEQ ID NO: 10994 - DNA, 1266 bp, Glycine max
  Clone ID: 700995516_FLI
gcgagtgagtgtggcgttccggagaatatggaatggcagcggtgagtgagagtgaggtggtgcactctgtttggggatttgggaagttccatgacaagttcaatccattcctttcgcatgcatttctctcaaccttagagcactctgcttccgctgtcagggaaactggatgcatacaacaccacatcgttgccaaagccaacaacaccaccattctcgccgttgtcccactctatgttaaaacccattcctacggctaatgcttaccattcttatggatacaactattaccccaagttacagtcttgtgtccccttcgcacctgtaactgttccaaggatcttacttcgtaacacctccttcaaacatcaaattttctccgcaatcaaggaacttactctcacctcccagctttcatcattacatgttacttttccctctgaaaatgagtgccacaagctcactgaaaaaggcttcctgcccaggattggaatgcagtaccactggaaaaaccgtaactacaaaaatcttgatgacttcttgatggacatgaagcaaagtaaaagaaaaaatatacgtcaagagtgcaaaaaggttacaaacattgatatgtgcaggttttttcaacagatctcagcccagaacttgattatgaaacgcctccggggttatttaataaaggctaggcactgggattccttctacactttttacaggaacacaactgataacaaatggggcactcctcacctgacaagggaattttttcatgagctgggagcaaaaatgggagataatgtgctacttgtggtggctgaagaaggggatgaactagttgctggagccctaaatcttattggaggagatactttgtttgggcgcctatgggggtgtcagccacgaagttactaccaggcaattgaagcagctattgaactcaatcttaaaacagtagaggcaggagctcagggtgaacacaagattcagcggtgatatcttcctgtgactacttttagctgccattaccttattgataataatttatattttagtagaaatgtatgtacagctgaagtaatgaatacgttggccatttggttcgaagatgaatggtccatgtgtttgtattgctagagtaattctgtggtagttgtgttctgtgttaccagtgaattaaatacgaacatctccaatcgtccaactgcgatagaattgctgaactcattttgtttgactctataacaccatattaaatttaagaattcc

SEQ ID NO: 10995 - DNA, 1085 bp, Glycine max
  Clone ID: 700995613_FLI
ggtactgccactttccctattcctggtacacccaattttcacattgcaatgtacaagggatggagctccgagcaagttcccttgtatgcaggtgctacccagaagcacgtttttccgttcaacaatgggaaaacattgccgtcaaagtgggaagatgctgagaggtggattatcagccctgtttcggcagatacagagtcagtcatcatcaatgcccctccaagaggacaagtttggtgggttcaaagacgttggcaccaatgtgtcccgtgctgctttaaggagggacatggtgacccagatgatcccacagggtagctcatgctcctctcctaatctgaggccttctttctctgcctccaccctatcaaccttgcctgtcacagaattgcagactgttggttcctctattagggatatgcaggtagatgaacacgttactgtgacaagatggtccaagaaacatagggccctattcactggaagaggctcagagcaagccaaagttggaaaaaaggagaactaagtactcaatcgtcaacttgggatgtttctgaaacgtcaaagcctgcctcaaagacaagaggtgaggaacccaaaatctctgcatgggagaacttgcaaaaggcaaaagcggaagcagcaatacggaagctagagttgatttaagttactgagacaaaagcaatggtgactgagatgaaacgtcgattttgattagagtatgatacggagaatatctaaggtgcaggctgtattattactcttgggagcacaagaaatgacaaatagtgcccccacctgacttttttttgcagcaaaactatcatgacattatagtatttctttaggaattgcttttctctttgatatattttatcaataattgctattttgacatattattaagtgttctaaaacttgttattgtatgccaggaaataaatgatcattccaaagttcaaagatttcacgaagatttgcatcacttgttaggtttcttgaaaaacgaaaagagagatgttttgagaagaaaatttgtgtcaacctgaagattattaatagcatgcactgtctttctgctc

SEQ ID NO: 10996 - DNA, 1765 bp, Glycine max
  Clone ID: 700995727_FLI
cttttaaaacccccacttctccctcccctctctcctcataacatttcaaagctggctaccctcttcttccccaccatcacaccaaccaaacctcactctccctgccatggtcatgggagcctttcgccacttcgaaccggtttccaaatgcagcaccgaaaaccggtttaaccaaaccgtggcctcggacttggacggcaccctcctggtgtcccctagcgcctttccttactacatgctcgtcgccatcgaagccggcagcttcctccgtggccttgtcctccttggatccgtccctttcgtgtacttcacgtacatattcttctccgagaccgcggccatcaagtccctgattttcattgccttcgcgggcctgaaggttaaggacattgagatggtcgcgtcctcggtgctgcccaagttctacaccgaggacgtgcaccccgagagctggagagtcttcaactccttcgggaagcgttacattgtcactgctagtcctagggtgatggtggagccgtttgttaagacgtttcttggggctgataaggtgcttgggactgagcttgaggccacgaaatcggggaggttcactgggtttgttaaggagcctggtgtgcttgttggggagcacaagaaagtggctgttgtgaaggagtttcagggtaatttacctgacttgggactaggagatagtaaaagtgattatgacttcatgtcaatttgcaaggaagggtacatggtgccaaggactaagtgtgaaccactaccaagaaacaaacttttaagtccaattatttttcatgagggtaggtttgttcaaaggccaactcctctagcagccctcttgaccttcctatggttgccaattggcatcatactctccatcttaagggtctaccttaacatccctttgcctgaaagaattgcttggtataactataagctattaggaatcagagttattgtgaagggtacccctccaccacccccaaagaagggtcaaagtggtgtcctatttgtttgtaaccaccgcacagttttagaccctgtggttactgcagttgcacttggaagaaaaattagctgtgtcacatatagcataagcaaattcactgaaataatttcaccaattaaagctgtggcactctcaagggaaagagagaaagatgctgccaatatcaagagactacttgaggaaggggacttggtgatttgccctgaaggcacaacttgtagagagcctttcctcttgaggttcagtgcactatttgctgaactcactgataggattgtcccagttgctattaacacaaagcaaagtgtgttctacggaaccacggtttgcggacacaagttgttggacccgtactttgtgttcatgaatccaatgccaacatatgagatcactttcttgaaccagcttcccaaggagctcacatgcagtggagggaaatcagctattgaagttgcaaactacattcaaagggttcttgcagggactttgggatttgagtgcacaaatttgactaggaagagcaaatatgccatgcttgcaggcacagatgggacagttccatctaaggagaaggcttgaaaagggagagaaattaagttctcccttttgattattctgtattggtgcccaatgtgtttccaaaacacttagaattatgatagaaataaaatctgatcactggctggaaaaaaattacagtttatgtatattttgttgttctgatatatacaaatcataactactatt

SEQ ID NO: 10997 - DNA, 1296 bp, Glycine max
  Clone ID: 700995752_FLI
gtgaaaatcccaaagctcttggaaggttgaggtcagcgtgtgagaaagctaagaggatactctcttcaagttctcaaaccactattgagcttgattctttatgtgggggggttgatttacatgcaaatttttcaagggccttgttcgaggaattgaacaaggacttgttcatgaagtgtatggagacggtggagaagtgcctcaaggaggcaaggattgctaaaagtcaagttcatgagtttgttcttgtaggagggtctactagaattccaaaggtgcagcaacttttgaaggacatgttcagtgttaatggtaacaaggagctttgcaaaagcatcaaccctgatgaggccgtggcgtatggtgcggcggttcaggcggcgattttgagtggcgaaggagacaagaaggtggaggatttgttgctgctggatgtgatgccgcttagtcttggaattgagactgatggtggtgagatgtcagtgttgattcccaagaacaccatgatccccaccaagagggagagtgttttctccacgttttctgataatcaaacaagcgttttgatcaaagttttcgaaggggagcgagcgaagacagaggataacttccttcttgggaagtttgagctttctggtttcactccatcgccaaggggagttccacagatcaatgttgggtttgatgttgatgttgatggcattgtggaagtcactgctagagataggagcacggggctgaagaagaagatcacgatcagcaacaagcatgggaggttgagtcctgaagagatgaggagaatggtgagagatgcagtgaggtataaggcagaggatgaggaggtgaggaacaaggtgaggataaaaaacttgcttgagaattatgcttttgaaatgagggacagagtgaagaaccttgagaaggttgtggaggagaccatagaatggcttgacagaaaccaattggctgaaactgatgagtttgagtacaagaggcaggagttggaagaaaaggttttgaagtttatgtaatggtaattcttggtagaacaagtttaatgttgagttgagtccgaagcaatgtaaaatagttccagcttcgttactcaatctagcagtctgagtgttatgactggtttatgcttatgcctaaaatcagtaaaatgtgaaagtgcctagtatggatgcaaggaatgttgtgtttattaattattacagtacctttgtgatatgatggtgcttatggaatggactactcatatttcataaatcataatccattactgattagttttct

SEQ ID NO: 10998 - DNA, 2238 bp, Glycine max
  Clone ID: 700995857_FLI
ctgctgagcagtttcttacattgagggcctttggcactccagcaattgtgctcgcattagctgcgcaaggcacctttcgtggatttttagatacgaagacacctctatatgctgttgatatttaatagctttcattctgctatggaaattgagtgacaaagtgctgctaatcccttccgaattttatgggagaaaatttttcagctatctgaaatctggactttggctgtgtttataactgtgatgctgtcaacatctgtggcagctcagcagggccctataccacctatggcaggtcatcaaatttgcatgcaagtttggttgtctgtttctttgctcaatgatgcttacaccaagaattgaagcaggcgatgtgggaccttgcaacacccctcccttcacaaatgcctgtcagaacaaacaagcctaccagaacaggcgattgaccaagatgggatataggctttgatatcatgttaaatcttatcttaaaaccaattgacattaagtgaagttgaccaacaaatatataagttacaccccaggaattgaggcagacgatgtgggaccgtccagcagggggcattccattttacatgataagcttgatacttttccatttcccaagatactgaaatggtattagtaagaaataagaattcaaatattgtaccatatcctccaatgtggcccaaaaagaaacatttggcaaagattggaagaattgactctgtatcatgcagtttcaaatggtacagatgatatgatctattatttgaagatatgaaacaaactaactatttcaaaattattaggtctttgaaattatgttagaactcacggtcacggtgttatgaaaaacagaaattcaatataacagtgttatttaatatgaaagatagcagaaagctagtacaggaattgagaatgacaaccagagtctgtgactccttctccagagaaatattcccctaaacaaccaccattcccccttcccttttttctctctcctcacctccttacatactccatcccctaacagaatttgttagaatctactatgccacgtcatgtaactaactcgcactccctaatcctattttctttctcctagaataaactttccatatagtgggcctatgtgactcctcaccaatatgaatatcagtattattcaccggtgtcctatcaaattaatttggctgaaacttactgtatcgtgttaaaatgacatttcttttacaggcacttcttgcctgtaattactccctgggaaattatgagcaagcaagccttgtcatatttagagtgatgcagattggtttaggagcaggaatcactttgtcaatgatcttattctttgggtttggagcattttctagtttatttagcacagattctgaagttctggatgttgctcggtcaggtatatggtttgttgctggatctcaaccagtgaatgctttggcatttgttattgatgggatttattacggggtatcagactttggttatgctgcttactcgatgttggactagtttcttcaactttccttctggtggtggctccagtagggcttcctggagtctggactggattgtttatcttcatggctttgcgtgttctagctggactttggatgtgaagtatttaattcatttggaaggttgagcagcaaaagtgggccttgggatacattctggtataaagatggagcagaagattgaccaacatgcattcaaggtcatgtgttcagtagtactcagaagttccaacattcactcctcaggttaaaaagccattttcataatgattagatcagaacatgattctcaagatctctaatatgagtgcactaaatccatgcaaagagaatccagtatcactgcaggactacagtaaattattgaaatgccgcagccaattactgctaaccgattgtcaaaatcttgctgattcaagtagagattgaatgaccaatagaacagagagggagaaaattattgaatgaccagcctacagcctagaggctagtctttttggccctttggttttttgttggaaatttgtatttattaggaaattgcacaattttgtattttttcattgctaaaggtagctacaatgcaagtaagagtaggtactctgatttgtccattgttgctattcaagttaggtgtgtactgtgtggtatttacaatttttttttaatagttattgcttaatatattaaagat

SEQ ID NO: 10999 - DNA, 909 bp, Glycine max
  Clone ID: 700996004_FLI
gccatgatgcaattgggggaaggactatgtaaactgagaaagatggaattctcaaatgggccgtttcaaaagtttgagaaagacatttcagctgttctagattttatctaccagactcagatagaattagctgcatgtagtgaggatatgtgtgttgcaatggatcgatcagaaaggtcttaccaacttctaggggaatatgcttcagggcagcgtgtgtatgatctagaactttgtagtgatgcatcagtgtacattgtgttctgccctcaaggctctaataatggtggtgccaccgaagccccaagggtgaagcttccaacgcttaaggctaccacagaacatcttgtggcctatgaataaaagtgaacatcatttaaggccaaagaccaatgctatagataaaaccacatgcaaaatttgttcttgtgcagttgtcacataatagaaccctaattaaattaaaagcagtaacaaatcacaatatgtcaaaccttatgttttgcaatgatttcataaaggatttttgtcaacacgagtgaagatactcaacaccctagactgcacaaaatgtgtatttgtgtatttatgcagtctggaaacagactgaagaggggagtttagggtgggtttgggataactgtaaaatttaattatttcaataatcaattatatatttataatttattattgttataattggttataatcataacattttcgggaatttctgcccatttttcttataatttagcatacctctttcttcccattctaggtttagacaacctttgtaagaactaaaaacatctgtatatattacattacagtttactctcatgacttagttaattttcaatttttcactttatatgataaataagatttgaatatgttttttatccctgt

SEQ ID NO: 11000 - DNA, 2248 bp, Glycine max
  Clone ID: 700996069_FLI
gaagaaagaaaagtgtgaagatgaggataattttatggataatggcacaaccatcgggacaacgactgggagaaagcggggccagaagagaagaagggtgcttctttcagattcagattatgcatcttctggatcatctgattttgagtttaccatatctgaagaagagagagaacaggtgagagaagccaagagattgtgtggaaatttgagaaataacttgaggagttcatcccatccaataaataaagaggctggtgtccatgaggatcaacatcgacagcgcaagcctccagctcggaagggtaaggaaaagatagaagaacctcagggaagaaagggtaaggaaaaggtggaggatttaaaaagtgagaagggaaagcaaacatgtggaatttgtctatctgaagaagataaaagaagagtaaggggagtactaaattgttgcactcacttcttttgttttgcttgcattatggagtgggcaaggtggaatctcgctgccctttgtgtaaacagagattcaaaacaatcagcaagcctgcacggtcaacgacagggattgatttaagagaagtggtgatacaagttccagaacgtgaccaggtttatcagcccctctgaagaagaactaaggagctatattgatccatatgaatatgttatgtgttcagagtgtcatcaaggtggagatgatggcctcatgctactctgtgatatctgtgattcccctgcacacacatattgtgttggtttggggcgggaagttcctgaaggtaattggtattgtgatggatgtagaccagttgctttgggatcttcaagctcccaagttcaagaaggtgtggctgatccaagggtatcggtccagagccatcctattagaccaccccctgctctacatgtacgagaaagtatagacctcaacttgatttcatcaccccgtgcggcttttaatcaaggttttgggcatcttccttcttcaagatttagtggcagaagtgttgaaggagcttctcccgtatctggaggggcaccaactttatcagagagacgctggatacaccgtcagattcaacaactactttcaatagataggatggcttcttcacctggcagaaccaatggtgtttcagctaccagttcaactagtaacttatatagctctcaaattgatcaaagtaggggaactgccaccctgcatgcaaggacacaggatgtgggaacatcataccacacattttttgacgagagattatgcaacaattcctctccattaatgcagaatggggcattatggcctggacttatggggacaaccccagtaccagattgtgaactagctcatcagttcagtagatcaaacattgttcctgatagtggcttatcccctgctatcagagaagaaagtaactttcacattgcaaaggagcaattgcagtcaatggttaaaagccacttgaagaacttgtctcaaaatattgatttaggtaagtattgtttttcttctaccagttacagattttgttttttctaccacttcttttttcattcatcatacggggagggagggatttttgcgacatttgggactcaaaacacataaagtgggtccttccccaacctttagagacacggtacatgtctatgaaaccacaaggcccggatcattacaaaaattgaggacaggctttcttgtctgtgaagagaaccttcgtagaggtacctgtgcgttaatccttttctaatcaagccttggaataattttccaacatgatatctaatagggaaattgcatcatggttccattgaagtgttttttgctcattttactgcagtcataaaaaaaattcaaaatgccttttatcttttttattcaggccacaatactatcaaggatatcgcaaggagttctatgcacaccatactagcagcttgtgatcttgagcacctgaagagtgaagtttgcactgtgcctcctccatctgcctgtccgcatatggagctaatagctagtgggcaaacgagtctgattaaaggttgctgctcatcttgctttgattcttttgtaggagatgtggtgaagagggttttggacacaagagtttcgtcacagtggttacgattaggtctttagggataaaatcattgtaatgtgtccaaagacacaccttttttgttagttcagaaagacaagaacatttcatttacttgtttatacatatcatcatatgaatatgatttcact

SEQ ID NO: 11001 - DNA, 1914 bp, Glycine max
  Clone ID: 700996114_FLI
gaggtttttaggctgctatttgattttgctgtttcaccaaggtttttgagtggcaaaggtgggataatggaggagaatgttggggacattccttctgtttacaggtgggaattgaccaatagggctgttcatgctgctgctagaggaggaaatctgaagattttggaggagcttcttgccaattgctctgatgttttggcttatagagatgctgatggatctactgttttacatgcagctgctggcagagggcaagttgaggtaattaaatatcttacatcatcctttgacatgatcaactccacagaccatcagggtaacactgctttgcatgtggcttcttccaggggccaattaccaacagctgaagctctagtctcagcatttccctcacttatgtctctgagaaacaactctggagaaacttttctccacagggctgtgtccggttttaaatctcatgcattcagaagattggacaagcaggttgaacttttgagaaacatgctgagtgggaagaactttcatgtggcagacattatcaatgtcaagaacaatgatggaagaactgctcttcacatggccatcataggcaacattcacactgatcttgtgcagctcctgatgactgccccatctataaatgtgaatatatgtgatgttgatggcatgaccccactagattaccttaggcaacaccccaaatctgcatcatcagatatactaatcaaaaagttgatctcagctgggggaatgtttggctgccaaggccatagttcaagaaaagcaatagcatcacacttgagaatgcaaagcattggaagcagtccagggacatcattcagagtctcagacactgagatgtttttgtacactggcattgagaatgtgtcagatgctagtggtgatcatggaagtggaggaatgagttcatcttcatctgaacacattccatacgatctgaatgccactgagaatcgcgtaccaatcgcagccaaaaggcctagtactgtgaaccatgcagcagcaagtttgaagagagttcttctgtggcctagggtgaaggacaagaaatctgaagggttcaaaaagtcttctacaacagatgagggttcagtggactcatgccggaagcggaataacagctttgatgaaactccaaccccacttagacaaagattttctaggccatcttcacttcccaacaacaaaagaactctttctgtcaggagtcagcaatcaagtccaaatgccaagaagaggtttgcttcaggaccagtgcatggagtcatacaatccatgccacatgcaaatgtttctggcagatcaaggtctagttccttttcaaagtcgtcaatttcttcacctagatcaatagacaagcaaaagggcattttcattgacaatgacattgccggaccatcttgctcaagtcaaccatcaccaccacctgatgatgatgaatcaccaaagttggtaaagagaacttctgttggaaggaagttgagggaccattatttctgttttggtgcacctggcattaatgtcaaaaactcagttcacaggcagcaagaaagccagagttacaaggctcatgttgttgcagtggcttaatgggatgagcttatataggtaattctcctgaccaggctaattcaacaaataagggatgaagctgattcatcaactttaaactttactgttaagggtcccttgggggttccttagttgcaagcttttatagattatattttgttacttaaggattagctcatcctcaacttcacttgttaatggtaaaatgctgttaaaatatgattatcatattagcatcaaattaactcaatttggtgcttagtaatgtaagaattagtgttgccaatgtactgattaaaccttttggattaagcagtc

SEQ ID NO: 11002 - DNA, 1731 bp, Glycine max
  Clone ID: 700996181_FLI
tatcttagtccaccaaaatcttataagtagtgccaagccaaaccaaccacacctacaacgcacctttctttctcttttccctttttcttaggcacaccacacacccactcaaataatagaaactgagatgaatcctgatcagtttcagaagaacagcatgttcgtagaaacccctgaagatggtggcaaaaacttcgacgatgatggacgagtcaaaagaactggtacatggataactgcgagtgcccatatcataacggcagtgataggttctggagtgttgtcacttgcatgggcaattgcacaaatgggttgggtggcaggccctgcggttctctttgccttctctttcatcacatacttcacctccactcttcttgccgactgttatcgttcacctgaccctgttcatggcaagcgaaactacacctattcagatgttgtcagatccgtgttaggaggtaggaaatttcagctgtgtggattagctcagtacataaatcttgtcggtgtaactatcggttacacgataacggcttcaattagtatggtggcggtgaagaggtccaactgttttcacaaacatggtcatcatgataagtgctacacgtcaaacaaccctttcatgatcctctttgcctgcattcaaatcgtgcttagtcaaataccaaatttccataagctttggtggctctccattgttgcagcagttatgtcttttgcttattcttccattggccttgggctctccgtagctaaagtggcaggtggtggagaacctgtacggacaaccttaacgggggtgcaagttggggtggacgttacgggatccgagaaggtctggaggacgtttcaagctattggtgatattgccttcgcttacgcttattctaacgtgctcattgagatacaggataccctgaaatcgagccctccagaaaacaaggtcatgaaaagagcaagtttgattggcatcttgactacaaccttgttctatgtgctatgtggctgcctaggttatgcagcatttggaaacgacgcaccaggaaatttcctcacagggttcggtttctacgagcccttttggctaatagactttgctaacatctgcatagccgtacacttggttggagcatatcaggtcttctgtcagcccatatttgggttcgtagagaactggggtaaggaaaggtggcccaatagccattttgtaaatggagaacacgctttaaagttttcactatttggaaccttccctgtgaactttttcagggtggtatggagaacaacatatgtcatcatcactgctttgatagctatgatgtttccattcttcaatgacttcctaggcctgattggttcactgtcattttggccattaacggtttacttccccatagagatgtacattaagcagtcaaagatgcaaaagttttccttcacttggacatggctcaagatattgagctgggcttgcttgatcgtttctattatctcagctgctggctccatccaaggcctcgctcaagatctcaagaaatatcagcccttcaaagcccagcaataattaaatttgttccaaagtgttctaaattgctttcttccctaagtcactttgttttaataagtttcagcatgttcatggataatgtattgttatcaagtgcttatgaaagaaagaatatagcacacagctgcattgtataaaatgtcaagaacaattctaagatt

SEQ ID NO: 11003 - DNA, 3099 bp, Glycine max
  Clone ID: 700996273_FLI
gttcgactcgatgcagggacggttttcaccaccacaactgtgtttaagatcctgcaggaacctattaggaccttccctcagagtatgatatctctttcacaagcgctggtgtcacttgggaggttggataggtacatgtctagcagggaattgatggattcggttgagagagaagaagggtgtggtggacacactgctgtggaggtcaaggatggaaccttcagctgggatgatgatggccaacttaaagacttgaaaaatattaacttgaagattaataagggggagcttacagcaattgttgggactgtaggctcagggaagtcttctctccttgcttcaattcttggcgagatgcacaaaatttctgggaaggttcaagtttgtgggagtactgcttatgttgcacaaacatcttggattcaaaatgggaccatcgaagagaacattatctttggtttaccaatgaacagacagaagtacaatgaagttgttagagtttgtagcttggagaaggacttggaaatgatggaacatggggaccagacagagattggagagcgcggaatcaacctaagtgggggtcagaagcagcgcatacagcttgccagggctgtgtatcaagactctgatatatatcttcttgatgatgtttttagtgctgttgatgcacacactggcactgaaatattcaaggaatgcgtgaggggggctctgaaaggcaagaccgttattcttgttacacaccaagtagacttcctacataatgtggatcttatagtggtgatgagggacggaatgatagtccaatcggggaagtacgatgatctacttgcgtctggaatggattttagtgctcttgttgcagcacatgacacctctatggaactagtggagcaaggtgcagtcatgactggggaaaatttgaacaagccattgaaatcaccaaaggcagcttcgaataacagagaagccaatggtgaaagcaactctcttgaccagcccaagtctggcaaggaaggttctaaactcatcaaagaggaggagagagagactggaaaagttagcttacatatctataaactctactgcactgaggcttttgggtggtggggcattatagcagtaatctctctttctgtgttgtggcaagcatcaatgatggcaagtgattattggctggcatatgaaacatcagaagagcgtgctcagttgttcaatccttccatgtttatttccatctacgcgattattgcggtagtttcagttgttttaattgtgctaagatcctactctgtcacagtcctggggttaaagacagcacagattttcttctctcaaattctccacagcatcttgcatgcccccatgtctttctttgacaccacgccatctgggagaattctaagcagggcatccactgatcaaaccaatgttgatgtctttatccccttgttcatcaattttgtggtggctatgtacattacagtgatcagcatcttcataatcacgtgtcaaaattcttggccaacagctttcttgttaattcctcttgcttggttaaacatttggtaccggggttattttcttgcttcatctcgcgagttaactcgtctggattcaattacaaaagcaccagtgattcaccatttctctgaaagcatttccggggtcatgacaattcgcgcattcagaaagcagaaggaattttgcggagaaaacattaaacgggtgaatgctaatttgagaatggatttccacaacttcagttccaatgcgtggttgggtttccgcttagaattgcttggaagcttagttttttgcctttctgcaatgttcatgatcatgttacccagcagtatcataaagccagaaaatgttggtttgtctctctcatatggcttgtcattaaatgccgtgatgttctgggctatatacatgagctgtttcattgaaaacaaaatggtatctgttgagaggatcaaacagttcacaaatattccatcggaagcttcatggaacattaaggatcgcctgcctcctgcaaattggcccggggaaggccatgttgatatcaaagacttgcaggtcagatatcgtccaaacactcctttggttcttaaaggcatcaccctaagcatcaacggaggggaaaagattggagttgttggtcgaacaggaagtggaaaatcaactttaattcaagttttcttcaggctggtggaacctacaggaggaaaaataatcattgacggcattgacatatccgccttggggcttcatgatcttaggtcacggtttggtatcatccctcaggagcctgtcctttttgaaggaaccgtcagaagtaacattgatccaactggacagtacacagatgaagagatatggaagagtttggaacgttgtcaactaaaagatgcagtggcttctaagcctgagaaacttgacacttcagtggttgataatggagataactggagtgtggggcagaggcagttgctttgtttagggagggttatgcttaagcaaagcaggctgttgtttatggatgaggcaacagcttctgttgattcccaaaccgatgctgttattcagaagatcatcagagaggactttgcagctcgtaccatcatcagcattgctcatagaataccaacagtaatggactgtgatagagttctagttgtagatgcagggcgggccaaagaatttgattcaccagccaacttgctccaaaggccatctctctttggggcattagttcaagagtatgccaaccgttccagtggcctataagaaagttccatgcatgtgtctctctcagccattcagacaataacagaaaaccaaacttaggctaagccttttaagttttgattgatcttccaagtgccacgagaaaggagaaaggcattttactttagagaggtgcaattaccatcctgcataattgctgtttggacaagtgaagaatgagcaaaccttgtgaatggtttttctaattacctctggcttaagtagctctagtatacaaacaaaatatagccttttttaggtcctaatttatataacacagtgcccagtgtacaattacac

SEQ ID NO: 11004 - DNA, 867 bp, Glycine max
  Clone ID: 700996279_FLI
ctcacaacaatattgtttcatcactcagatcccttaaagatgacaacagcagaagaaacttcaaacttggatctcatacgccaacacctattaggggaaaatatcatctcagactcctcctttttctccaatctccttcatcatcctatgaaacttgaagcaccctcatcaccagaatttgatttcacctcatatatctcagacaacacaagctttttcactttccttgaaggctatgatttgatggcagacatgaaatttgttgattcagacaacaccatcccttcaaaggaggttaagaaatgcaatatttctcctgaaccattggtgtcatcaaaagagaagccaaagaagttagaatacgataaggcaaagcgttataggggagttagaagaaggccttggggaaaatttgctgctgaaatccgtgaccctacaaggaaagggacaagggtttggcttggaacctttgacagtgaaattgatgcagctaaggcctatgattgtgctgctttcaagatgagggggcagaaggctattctgaacttccctcttgaggctggactgtctgatcctaagcctaacagttgtggcaggaaaaggagaagagagagccatgatcatgaattggagctgccacaagtccaagttcatcatggtgtttcctgagaaaaagtgagaagatataataatagatttagttgttttgtgagtagcattaagtttgttgcctagaaaaataaggttgctttgccttttagtttgtacgtagaagcaaggctaatgtgaaatgtctatatgaatctatgcaaaaagcatgttacgaaagttttactaactttgaggagttttaaaaaaatattaatc

SEQ ID NO: 11005 - DNA, 1608 bp, Glycine max
  Clone ID: 700996295_FLI
ggaacaataggcggcagtttacatcccccagtaacttccatgctgatggggtgaatgacttatttagctctcaggctgtaatagaaaacacacgagcaaatgaaattttgaaacaggcccctttcttgataccatttacaagcagggttaaaatattctcttctcaactagctgctgttaggcaaaggcatggacctcaagctgtattttctagaaatcgattcaggatacaacgagatcatattttggaagatgcttacaatcaaatgagtcagttgacagaagatagtcttcgaggatcgattcgtgtgacttttgtcaatgaatttggagttgaagaggctggaattgatggtggtggaatattcaaagatttcatggagaacatcacacgtgctgcctttgatgtgcaatatggattatttaaggaaacagcggatcacctgctttatcctaatcctggatctggaatgatacatgaacaacatttccaatttttccacttccttggtactcttctcgcaaaggctatgtttgaagggattctggttgatataccatttgctacatttttcttgagcaaattgaaacaaaagcacaactatttgaatgacttgccttccttggacccagaattatatcgtcatctcatttttcttaagcattataagggtgacatttcggagttggaactatactttgttatagtaaataatgaatatggagaacaaacagaggaggaactgcttcccggaggaaggaacctacgtgtcactaatgagaatgtcattacttttatccaccttgtagccaatcaccgcttgaattttcagatacgccaacaaagttcacatttcttgaggggatttcagcaacttatgcagaaggattggattgacatgtttaatgaacatgaacttcagcttctgatatcaggttcacttgacagcttggatattgatgatctgcggctgcataccaactatgcaggaggctatcataatgagcattttgttatggagatgttttgggaagttctcaaaggcttttcattggaaaacaggaagaaatttttgaagtttgtgacaggttgctctcgtgggcctttgcttggtttccgatatcttgaacctatgttttgcatacaaagggcttccggtaatgccgttgaagaatcacttgaccgattaccaacatcggctacttgtatgaatctactaaagcttccgccttatacaagcaaggagcaattggaaaccaaattactgtatgccataaatgctgatgctggctttgatttaagttaaaaggaggcagtggaatttacgatatctgtagatttgaaggcggtagaaaatgactcacaaatgaccattgtcagtggaatgggaaacgacaaataatctgatggatagaattgaataaaaatatcctgtgtgcgagtgtatgtatatatattcttattcaatcttcattctcaatttgtctcttttctaaatgtacatatctaaattgtgaattattttgtaaagttcactctttggcagggtttttcctgattattttggatgattattataacaaaactcaacagggaggttgtaattt

SEQ ID NO: 11006 - DNA, 1247 bp, Glycine max
  Clone ID: 700996317_FLI
aggaaatccaagttgggatgggaccagcaggtgagttgcgttacccttcgtacccagagcaaaatgggacatggaaattcccaggaattggtgctttccaatgctatgacaaggtatatatatttatgttttttttttccttctccttgttgtagtcctttatatataattgtcttaggatttgtttggataaataaatttcttcatgaacaaagaggagaaaacaaggtaaaatgtgttctaaacctctaatacttaattatgctatggtgcagtatatgttgagtagcttaaaagctgctgctgaagctcacggtaagcctgaatggggaagcacaggccctactgatgctggccactataacaactggccagaagacactcaatttttccgcaaagaaggtggtggatgggatggtccatatggtgagtttttcctcacttggtactctcagatgctgttggaacatggtgacaggattctctcatcagccacgtcgatctttgacaacactggagttaagatctcagtgaaggttgccggcattcactggcactatggtacaaggtctcacgccccagaactcactgcagggtattacaacacccgattccgtgatggctacctccccattgctcaaatgctggcgcgccacggtgccatctttaacttcacctgtatcgagatgcgcgatcacgagcagccacaagaggccctttgtgcacctgagaagctggtgaagcaagtggctctggcaacgcagaaggcacaggttccacttgccggcgaaaacgcgctgccacggtacgacgagtatgcacatgagcagatcataagggcatcacaattggatgttgatggtgagtctggtgatagagagatgtgtgccttcacatacctgaggatgaatccgcatttgtttgaaccaaataactggaggaagtttgtggggtttgtgaagaagatgaaagaagggaagagtgcacacaagtgttgggaagaggtggagagggaagctgagcattttgtgcatgttacacagcctcttgtgcaagaggctgcagtgctgatgcactgagaattgttgaacatccttgtggtaatagggcttaggaataagtcacaaggaggctgtgtgaaagttttagtgaaccaacagcccaggtttgtggctttgaagatgtaaaattttgtattatattgttttgtattgtatgcacctaaaacttctatttgtgaccctttt

SEQ ID NO: 11007 - DNA, 889 bp, Glycine max
  Clone ID: 700996332_FLI
ctgcgtttaagtacttctctgctgtgtttgagtctctggagcctaatttggccgcggactcgccggagaggtttcaggtggagagtcttcttctcgggcggcgaatcgcggcggtcattggggggcccgggtcggtgaggagggagagtatggaggacaaagagcagtggagggttctgatggagcgtgctggttttgaatcagtgagtctaagccattatgcaattagtcaagctaagatacttctctggaattacagttacagttctctgttttcgctggtggaatctacaccaccggggtttttgtctctggcttggaaggatgttcctctcttgaccgtctcctcttggcgttagttaatgggttcgacttggttgattgttattggaaagggtttccacctggtccttttttccctggtgtggaacaactaattattattattattattattatttgtcgatatgccatggatgatcgatcatgttgtgctatgctagcctcttcaattactgaagttatgcagaagatttgatatgtgaattggctggcactacaagaaattgaggtttttgggagaattgccacctttagcagcagtttggtcctctactagttccacacctccttacttttgtttttttagttgatttttctatttcttatcagcgttttttttttcttctagtggcaatgatgttattattagcttcaagaattggctaggcaaactgtgacaatgaaaatagggagaaatgggatggagaaaagctttctttctcattgcttctagtcattgtgatttgtgactctgtaaattggattttgttgtatggatttaaattggtctgaatgaatgaaatgaatatcaaaggatttttatctt

SEQ ID NO: 11008 - DNA, 601 bp, Glycine max
  Clone ID: 700996391_FLI
ggcagcacttggtgggaatcgtgatgtgacaggaagccagaacagcgttgagatcgatgctctagctcgctttgctgttgaagaacacaacaaaaaacagaatgcccttttggagtttgaaaaggtggtaactgcgaaacagcaagtggtttctggtaccttgtacaccatcactttggaggcaaaagatggtgggcaaaagaaggtttatgaagccaaagtttgggagaagtcatggttgaacttcaaggaggtgcaagagttcaagcttgttggagatgcacctgcatagtctagtgcttaattaggttgctgaagagtgaagaatgagacagcctggttcgaaggggaaaagcctaaggatatatcaaaggatcctatatgtataaaataaatgttgcttttttaccttcggtattgatatctgaagtctaatttgacatcctatatatgaatatatgatctatgtgtttctttctctccctacctctctctcttttaaagattcaaatttggttttactttttagccattgtaagtgtattaacatcaatacttaaatctatatctatatctacattataatctatatctatattat

SEQ ID NO: 11009 - DNA, 964 bp, Glycine max
  Clone ID: 700996541_FLI
ggtttactgtgcaggtatttgatggacacggagggaagagcgctgcacaatttgttcgtgatcatctgccacgggtgattgttgaggatgctgacttccctttggaattagagaaggtagtcacaaggtcatttttggagattgatgcagagtttgcaagatcatgttctaccgagtcttccctgtcttctggtacaactgcactgactgcaattatatttggaaggtctttactggttgccaatgctggagactgccgcgctgtattgtcccgtggtggaggggctatagaaatgtccaaagatcacaggccattgtgtattaaagaaaggaagaggattgagtctctaggtggatacatagatgacggttacctgaacggccagttaggagtgactcgtgcactaggtgactggcatcttgaaggaatgaaagaaatgaatggaaagggtggaccattgagtgctgagccagaacttaaattgatgacattaacaaaagaagatgaatttttgataattgggagtgatggaatctgggatgtttttcgcagccaaaatgctgtagactttgctcgaaggaggcttcaagagcacaatgatgtgaagcagtgttgcaaggagataataggggaagcaataaagagaggagcaacagacaacttgacagtggtgatgatatgtttccactcagaaccaccacctcctatggttgtagaaaggcctagagtcagaagaagtatatctgctgaggggcttcaaaatctcaagtgcttgctagaaggataaaacattcttctctgcaacacaaatgattctttttttgaggtgagattatgtacataaattcatccgtcacactaaaaatgtcattctacttcctgttgttgctgatccctgaggggatggagtaaggaacacaccaagatggcaaattcaaataaatttcataccatcttataatt

SEQ ID NO: 11010 - DNA, 1593 bp, Glycine max
  Clone ID: 700996583_FLI
gccgaaaggaggggttaatgggcaacctaaccttgtcaccatttctgctacatcaaacataagtgaaagtcaaaacaacactgcacggtcctctattcatcaatcatttcctccttgtcctaccttcacacaggatgattatcattcatttcttcaggtgtcctccacattttcaagtcttattgtctctaccttgctacaaaaccctgcagcccatgctgcagcaagttttgctgctacattttggccctatgcaaatgcagaaacttccgcagattctcccatgtgcactccagattttccatcaagacaaattggctcgcctccaagtgtgacagctattgcagctgctacagtagctgccgcaaccgcatggtgggctgcccatggactgcttcctttgtgtgctccgctccatacagcttttgcctgtcctcctgcatcagcgattgcagttccattaatgaatattgatgaatcaccacaaaaaacagaacaagaagagattaaaccacaaaattcttctctgcaagatcagatactggatccagaacactcagaagctcaacattcagctcctaagtccccagctgttttttcatccaaatctgaggagaggggagatgccaatttaaatacttcaccaaaggctactaatcatgagacgaatcaggtcatttctgagaaccccgattccaacaaaatgaagggcagaaaacctgtagaccgttcctcatgtggttccaacacaacctctagcagtgaagagaccgagttactactgaaggatgagaaagaaaaggaagagcccaaaacacctgatgcaaacattttagataccgagcttagtaatcgtcgtagtagaagcattaacaaccttactgattcttggaaggaggtctctgaagaggggcgtcttgcctttcaggctctattctccagagaggtgttgccacaaagcttttcacctactcatgatttgataaatgaggataatcagatagacagcatcaaggataacgaccaaaacacagactacaaagatgaagaccttgaaagcaagaaatgcagttctaattgtgatggggtgcagaaaaatctgctatttgtcaaagataacaatgaggaggagggactgctaatcataggtcttggaccaggaaagctaaagactcgtccaacagggtttaaaccttacaaaagatgttcggtagaggccaatgaaaacaggatcggaacagcctgcaaccaaggtgaagaaaaaggtcctaagagaatacgcttgaatggggaggcttcaacttgatgcttgatatatccatgcaaccacacaaagaaaatctctagttttgcatatattatttcttagtttccttgttcattgtctgtattgcttattttctaattctgcagctcacgaaacttgtcgtgtaggtgtgtgtaccatattaaattattacattacactctttttactttcttggactgatgctactgcatttgaaaactctgctaaaatggacctagacaagaaacattaagtactgttttagcattgatcatttaagtaatttaatgatccttcattcagtc

SEQ ID NO: 11011 - DNA, 980 bp, Glycine max
  Clone ID: 700996928_FLI
cggaaacatgtcagcggtggttgctggttcctcctcttcattctctgccaccttcacccccataaggagcccctccttaaaaaactctcaactctctcattccaaggcactcacttcacctcaatgccagaaaacatctttacaagggctctcacttcatgaagccaaaaggggtgtttcagaatccttcctagttgagaacaacaatggttcctccattgctggaaggagacttgagatcacagcacgaactgctggggcttcaaagacaattgaggtggaggttgacaagccacttggcctcaccttaggccaaaagtctggtggtggtgttgtcatcactgctgttgatggtggtgggaatgcagcaagagcagggttaaaggcaggggaccaagtcctttacactagcagtttctttggggatgaattgtggcctgcggataagcttggatttactaaaaccgccatccaagcaaagccggactctgtctactttgttgtcagcaggggtgctgaagtagacgttaaaaagctcacaaagcgacctgctcctcctcgatttggaagaaaactgaccgagactcaaaaggcgagagctactcacatttgccttgattgtggatacatatacaccttacagaaaccttttgatgagcagccggacacatacgggtgtcctcaatgtcaagcaccaaagaagaggtttgctcgttatgatgttaacactggaaaagctattggtgggggcttgcctccaattggagttattattggactcctggctggtgtaggggcagttggagctttgcttgtttatggtctttagtaacatttttttaattccacgacatgttaattttgtttattttctgtcctccaaagttgtccaatattggagcttgtgtctcagaaaaactccttggatgctcatgtcaaagttgaatgaagctttctatatgagattcaaaataaatttc

SEQ ID NO: 11012 - DNA, 2698 bp, Glycine max
  Clone ID: 700997024_FLI
gaattatcgtgatggagttgatgaagggaatgatgtggattctatagattttgataccctgatcaagaatcttgaggatttgactaaaggcaatgatacatcaatcccagagtttgactatcagcaaaagaggcgtgttggctataaagcaataaagagcccttcatctgtggtggtaatagttgatggcacatatgcattgcatgcaaaactgcggtctttactggatattcgagttgctgtggttggtggtgttcattttagcctgctttctaaagttcgctatgacattggagattcttgttcactggattaccttattgatagcatttttccattatttaggaaacacattgagccagatcttcatcatgcacagatcagaattaataacagctttgtctcatcattcagagaggcagtctacaaggttaaatgcagaagtaagatggacattcaggttctgcttttcaaggaaatgaagcccaaacagacaattttatcgaaatgtaccttagaccaccttcagctagtgaagaagcaaggataaatgattggatcaaagtgcggcagtctggaattagatattatttatcacttggtgaccagaggattgttgacaagaatttcattatcaggcctaaagctgaatttgaggttggtcgaatgacattgggcggattattggctcttgggtacattgttgtggttagttataagcgtgcctccacaactgttaataatggcaaggtttcaatgtcttttgaaaccattgatgttcttggtgagacattcatggtgatgagaggaactaatagaaagactgttggaacagaagcattaaggatgggcattaatggaccttggattactaaatcatatctggaaatgattcttgaaagaaaaggtgtacctcgtcttagtacaccaccacttgtgtctaatacaactgtgcctggtagtcaagaaaccgtgatcgctgcgccaaagccaattcgtgttacccctaaccttgttaccgggcttgatgatttacctcagccgtggactcgatctccaacaaaatctaaaatggaacctgttgtggctgaatggcatttcatatcttcagattcttccctgcctgacaactcagtcctagatccttcatctttcagggatagtgttaggcttgctccaatgcctgattcatttgacttggataggggattgcttttggcagttcaagcaatacaagcattgttggagaataaaggtgtcccagtcatagttggaatcggaggtccaagtgggtctgggaagactagtttggctcataaaatggcaaacataattggttgtgaagtagtttcactggaaagctattataaacaagtaaaggattttaaatatgatgacttcagcgcacttgatttatccttgctatcaaagaatattgatgacataagaaatggtcaaagaacaaaagtacctatatttgacttggaaagtggtgctcggagtggcttcaaggaacttgaagtttctgaagattgtggagtgattatatttgaaggcatctatgctctgcatcctgatattcgaatatcccttgacttgtggattgctgttgttggaggtgttcattcacatttgatctcacgtgttcaaagggataagagtagagtggggtgttttatttcccaaaatgagatcatgatgacagtgtttcctatgttccagcagctcattgaacctcatcttgttcatgcacatcttaaaattcgaaatgactttgaccctgtgctttctcctgagagttcattatttgtattaaagagtaacaaaaaattcggtgcagaaatttattgatatttatataaggcttcctgggatcccttctaatgggcagttgagagatagtgattgtattcgagtcagaatatgtgaaggcagatttgcattgctgatacgagagcctatcaaagaagggaactttatcattcagcctaaagtggattttgatattggcattagtacggttgctggtcttcttaatcttgggtatcaagcagttgcttatattgaagcgtctgcattcatctatcaggatggaaagattttaattgaggttgatcatctacaagatgtccctggcccatacattcagataaagggtgtcaataaagatgcagtggcagcagcaggttcaatgcttaaattggatggttcatatactactaagagttatcttgaaataattttggaaagactaccagcaatagaaagaacttctggtgggattcattctcagcaatcagcaaggctgctggagattgttgagtttattcaatctcagggatgtagctctgcttcagaatcctcatcaagtagggtagtctctccaattgaaggggttattgaggagatgcaatcaaggattagaaggcttgaaagatggctagcgataaatacggttctatggacatttctgatgtctgccctcgttggttattcactgtatcaaaggaagcgtcaataatgatctttggaaattttcaggatcatgcattgccgttcttgtttagttaccttcgtataccgatcccaattttttaactggccactccataaactaactacagaaactaatcccttgagagtaggttgcattatacattgcggttcgtcatttcaatggttaactgttaattcatcc

SEQ ID NO: 11013 - DNA, 705 bp, Glycine max
  Clone ID: 700997186_FLI
atggagcttgcaggcatttctttaacttatttgtagtatattggatgatttatttaatttgcttatgcactcttcagggtaggcacgaatgcaagccccccttatctcttcaacttcaatgttgacgtaattttaagaattgttttactgaccaaagataactcattaaagctttcaatcatgttagaaaaactgaagtcatatcttcaaaacgatgcttctgaatttcatacacgtttaccaattttaattcgaaacttgtgcacaggtaagaaaccaagcaatagtgaagtggatcagctagtgaatcttgcagaaaaatacactcttgcaaaccatctattttggggcttgtggggacttatttcgagtcatgtcaatacaattgactttgactacaaggagtatgcgaggcagagatttcagcaatactggttgaagaagcctactttattggactcaccaagtatcgtttcccaagatgggattgccaatggtgtgaaccattgacatggatgcttcttatgtatttagcatgttcagcttggtatgtgttgactaatatatagaaaggcatgatgtgatgcataaaatttgtaaataatatataactaaaaatgtgtgatttgagaatttttacaacagttatgttagtaatccctccttttgtgataagttgaggaatggaagtgagaattcctagtt

SEQ ID NO: 11014 - DNA, 938 bp, Glycine max
  Clone ID: 700997216_FLI
cagcttggtcgcagtgtagcactattggaagaattctagatcagggtcactgtggttcttgttgggcatttggtgctgttgaatcattgtcagatcgcttttgcattcattttgatgttaatatctctctctctgttaatgaccttcttgcatgctgtggctttctgtgtggatctggctgtgatggaggatatcccttatatgcatggcgatacttagcccaccatggtgttgtcactgaagagtgtgacccatattttgatcaaattggctgttctcatcctggttgtgagccagcttatcggactcccaagtgtgttaaaaagtgtgtaagtggaaaccaagtttggaagaagtcaaagcactatagtgttagtgcatacagagtcaactctgatccccatgatatcatggcggaagtttacaagaatgggccagttgaagttgcatttaccgtttatgaggattttgcttactacaaatcaggagtttacaaacacatcactggttatgaactaggtggtcatgcagtaaagctaattgggtggggaacaactgatgatggggaggactattggcttctcgcaaatcagtggaacagagaatggggagatgatggttacttcaagatccgaagagggacaaacgaatgtgggattgaagaggatgtaacagctggtttgccttccaccaaaaacctcgtcagagaggtgactgatatggatgctgacgctgctgtttcattctgaatgtaaatatattacctttccaattatattctgtatgggtattgtaattgaaaaatcagcactagatgttgcctgtagtccgaacctctgctttaaggggaacaatctaaattatgattacgatgttcaaagatgttaagcttttgttgtttatctgttatacgaaataatggattaattgctatagtt

SEQ ID NO: 11015 - DNA, 459 bp, Glycine max
  Clone ID: 700997484_FLI
gacagaggcaaatcgcaggttcgtgcgtgaatctaatcaaagtttctcattaacttctgcgttagattcacgcacaaacttgtcatttcccttttcttaaccttttttttttccttttccgtcaaaactttgtttgttacattcgacttcgaattcagattcagatttctctgtttagtgctcctcaaaccgatgacgccgcggcttgttagcttctggctccgctacggtatggcatcttccatattgcacccattttgttcttttttttttctttctttcttttccctaaattttccatgtcaatattatgtaattctgtaaggagatttttttaaatgtaaagccatgcctccatagctattttttttattggaggtaattcgttcgaactggactattatgagtgacaaacaaaactttttctctaaatatgcaatgcaattctactccaatatg

SEQ ID NO: 11016 - DNA, 883 bp, Glycine max
  Clone ID: 700997703_FLI
cggggatgtcagtgataagccttgtgtcactggctaatgctggcttctcagagattagagggaagcatttgaactattcaaagttttggaatgctaatccctctgcagaaaagcaggtcaagttgtctagcaaagctggcatgcttttgctgtacactcctgcttttcttgctggccttgcatccttctggatctttcctcatcaaggcctcagatccaccctccttcagtctgcagttaccctgcatttcttcaagagggtctttgaggttgtgtttattcacaaatatagtggtgccatgcttcttgattctgcaatccccatcactctgagttatttcctatcaactgcaactatgatctatgctcaacacttaacacaagggcttccagaaccaccaatcgatctgttgtatcctggcattgttttgtttgtggtgggcatcattggcaacttctaccaccactaccttctatccaacttaaggggaaagggtgaaaaggagtacaagattccaaagggtggcatgtttgagcttgtcatatgtccccactacctgtttgagattattgagttttatgggttctccttcatttcgcagacgctatatgcattctctttcaccgtaggcactactttatacttgctaggtaggagttattcaactaggaaatggtatctttctaagtttgaagatttccctgagcatgttaaggctatcatcccatttgtcttctagaaatgttggaaggaataactaattttactttcatttctcagacgctatatgcattatctttcactgtaggcgctactttgtacttgctatgtaggagtgattcgactaggaaatggtatctttctaggtttgaagatttccct

SEQ ID NO: 11017 - DNA, 1678 bp, Glycine max
  Clone ID: 700997772_FLI
gccactttctgagtacaatacaacactgccatggctgcctcagtctccactattggagctgtcaacagagctccactgagcttgaacagctctgaagctggagattcggttcccagttcagccttctttggcacaagcttgaagaaggttactgcctcaagggtccctaacgtcaagatttcttctggaagtttcaaaatcgttgcggcggagaaagagattgatgagcaacaacagacaaacaaggacagatggaaaggtcttgcctatgatatttcagatgaccagcaagacatcacaagaggaaagggtatggttgattccctcttccaagctccacaggagactggaactcactatgcagtcatgagctcttttgagtaccttagcactggacttaaacagtataacttggataacaacatggacggtttttacattgctcctgcttttatggacaagcttgttgttcacatcaccaagaacttcatgaccctgcctaacatcaaggttcctctcattcttggtatttggggaggcaaaggtcaaggaaaatccttccaatgcgagctcgtctttgccaagatgggaatcaaccccatcatgatgagtgctggagagttggaaagtggaaatgcaggagagccagcaaagttgataaggcaaaggtaccgtgaagctgctgatataatcagcaaggggaagatgtgctgtctcttcataaacgatcttgatgcaggagctggtcgtcttggtggaaccactcaatacactgtgaacaaccagatggtgaatgccaccctcatgaacattgctgataaccccacaaatgttcagcttcctggcatgtacaacaagcaagagaacccccgtgtgccaatcatcgtcaccggtaacgatttctcaacactctatgctcctctcatccgtgatgggcgtatggagaagttctactgggcacctacaagggatgaccgagttggtgtctgcaagggaattttccgcactgacaatgttcctgaggatgaaattgtcaagcttgttgacaccttccctggccaatctattgatttctttggtgcactcagggctagagtatatgacgatgaagtgaggaagtggatttctggtgttggtgttgacttgattgggaagaagcttgtgaactccaaggaaggacctccaacctttgaccaaccgaagatgactttgagcaagctcttggagtatggtaacatgcttgtccaagaacaagagaatgtgaagagagtacaactggcagacaagtacttgaacgaggctgctcttggtgatgctaatcaggatgccatcaaaagaggaactttctatggcaaagcagcccagcaagtaaaaattcccgttcctgaaggttgtactgatccaaatgcctcaaacttcgacccaactgcaagaagtgatgatggaacctgcttatacacaccctgagaacctaagcattctccacttgaagagaagctatgacttgatataatcaaataatttatcttgttcatattggattgttatcctttataattttgagttacattgtctcactactaaaaaaaacacttgagataatcaattaatatttcctggtgttcattgtggttctgctgaactttgtggcttcaaataatagaaggtgttttactac

SEQ ID NO: 11018 - DNA, 1423 bp, Glycine max
  Clone ID: 700998019_FLI
ctttgctgataatcagaccattaatatcagaccctatttaaaagaaggaggttcaagcaagaagtgggccattataggtggtgtcgtaggaggtgttgttctcctccttgtgttgtttgcctgtagattgtttacaaaacaaaagagggttcccaaagctgacatattgggagcaactgagttgagaggtccggttaactacaagtatacagatttgaaagctgcaacaaaaaatttcagtgttgaaaataaacttggagaaggaggatttggtgctgtatacaagggtactctgaaaaatggaaaagttgtggccgtcaagaaactagtgttgggaaaatcaagcaagatggaggatgattttgaaggtgaagtgaagcttataagtaatgttcatcataggaatctcgttagacttcttggttgttgcagcaaaggccaagagagaatcctagtttatgaatacatggcaaatagcagccttgacaaattcttatttggtgacaaaaagggttccctcaattggaaacaacgctatgatataattttgggaaccgcaaggggtctagcgtatctacatgaagagtttcatgtatccatcattcatagagatataaagaccggtaatatccttctagatgatgatctccagcccaaaattgctgattttgggttggcaaggcttttgccaagggatcgttctcaccttagcacaaaatttgctggaacattgggatacacagcacctgagtatgcaatgcaaggccaattgtcagagaaggctgatacctacagttatggtattgtggtcctagaaatcataagtggtcaaaagagtaccaatgttaagattgatgatgagggtcgtgagtaccttcttcaacgagtaagcatggaaactgtacgagagaggcatgcaattggagcttgtggacaaggacatagaccctaatgaatatgatgctgaagaagtgaagaaaatcatagaaattgctttattgtgcactcaagcatctgctgcaacaaggccaacaatgtcagaattagtagtgctactcaaaagcaagagcttagtggagcaactgcgaccaactatgcctgtgtttgtcgaagcgaaaatgatgaatggggaaggtatctctgataatccatctaatgccactctctccatttctgttctatcggcccgatgattattggatcaatgtggtaaaggatcttgatgaactgattcaataatgtaacagaataaaatagttaaagattgcttttcatttcagtttttcttttttaacaatcattcaagtagagcatatgttgcaaagtaaaaactactatggtgttgttgatttatcagtagagtatatagtttgatagtttcctgtttaaaatcatgtatgcaagtatagtggaattttgaagc

SEQ ID NO: 11019 - DNA, 567 bp, Glycine max
  Clone ID: 700998058_FLI
attcggctggaggacaagggtactgtccatgtattcagcctcaaggttaattctagcatccccgagcaggaaaagtcacaaagttcatccaattcagatgctgccattaccccatctagctcttctcgctccttcattaaattgaaaggggtgttgcccaagtacttcaattctgagtggtcagttgctcagtttcacttacaagagggctctcattacacagttgcatttggtctccaaaagaatacagtcattattcttggtatggatggaagcttctatagatgccaatttgatccagtacatggaggggagatgactcagctggaatatcataactttttaaagccagaaccagaaacagccttgtgagacgcgatgtgaagaaatcctgagcgcttgacatttcagcttagttaggttatgcagatatgtatactgaagtaacactgacctcattttattattattactaactcagggtcgacctcgttgcttcttccattgtaatatttgtaattatatagttttctaatttttttaataataaatattgagagctttgct

SEQ ID NO: 11020 - DNA, 1534 bp, Glycine max
  Clone ID: 700998216_FLI
cggttacttgtttccttgtagaatctctccccttccttctaagtagttccattattattattattcctaaccctaacctaacttaaactaaactaaaccctttcacacacttgttcttcaatcaagtttcttcccaaaacgaccatgccgtttccgtggaagaaaaaccgcgtcccccgaatctcccaattcgtcgccgatctccaatcgccaaaacgcggcggttccctcgtcgtcgagaccggcttccccacctccctcatcgacctcttcgtcaaaaaccaaagccgcttccaaaaacaccgctccaaaaaaccgccaccgccaaaatccctctccgccaccgatcctccgccgcctcctccacctccaccgccctctccggccacttctccgcctccctcacgcgtccccgccgtcccaaccactccagtagagcaagacgacaccgccgtttccgctccggatcgaattaccgaatgctctggctctcactggtctcgtgtgaacgccgtcgtcctcgttgcaaagattctgatggtgttggtcttagtcgcgagcgtggagaggctcaccgtcggaatcaccgcgtcggcgttcgcgcttctgcttctcgaatacgcagggctgcggcgcgccgtcgtttcgtgttctgtcgcagaatcgcggtggcggtggttccagaaggtttcgaggaaggagcgtgttgttgttgagagaattgaattcgaattcgccgaattgaacaagggtttgtcaatcgatgaaattgaggttgtgggaacaaccaacgaaggggggatttgttgcagtgaaattggtgacgtggcatcgaaggttttggagccgtgtttatgtgatgaagatgtttctgaatgcaagattagacctagccgaagtggtaggtttaggtcgaagatggtgaagcttgtttctaagaaatttcgtgggtctaagaaaaagaataaacacaatgagggtgagtcaggtagtgaaatttcaagtgctgtgggagaagaaaagttaccaattttagaaattgaagaggaagaggaggaagagaatggggataataagtcaagtaacactaaacctgattgcggaatcacttgttcctatgagaagaaagtgaatagagttgagaattcaggttcttccatggttttagttatgattattgcccttgttgggcttcttttgggtcgttttccagcattggtacttttgatgacatggtgttgcttgatgaagatacttgggattctatggagaacacagaaagtgcctatgaatatgatcaagtgttctgtttcaaactcttgatgggaacaagtttttgtgttttttactttttttattcccactttgtttctggattatgatacacagctggtaaaaatttcatgtttagtctagaaagactgaggagaggattattcccatgataggaactccaaccatttgttgggaatccaacttcatgcgttgtactttgaaatgtaaatttatagatagatagatactaatcatagtc

SEQ ID NO: 11021 - DNA, 1125 bp, Glycine max
  Clone ID: 700998509_FLI
aagaaatatggcagttggcacttcaacctgcattcctgtcgtacactgcctcggcgatcgctgtagtgttctttttgattttgtattgtgctcctcgccatggccagactaatattttagtttatattggaatatgctccataattggatccttgactgtcatgagcataaaagcaattggcattgctataagacttacgatcgagggtgccgaccagtttgttcagttccagacatggatttttaccatggtcgctatttcctgcatcgttactcagttaaattatcttaatatggcattggatacttttaacacagcagttgtttctcccatctactatgccttgttcacatcttttacaatattagctagtgcaatcatgtttaaggactattatggtcaaagtataagcagtattgcatcggagctttgtggtttcgttactgttttatctggtacaactgtattacacagtacaagagagctagatcctccagtcaatacagatttgtatagtccgttgtctccaaaagtatcgtggtatatccaaggcaatggcgaaccttggaaacagaaagaagatgcaccaccctttaatttaattacagttatccggcaagaccatttcaagtgatacagaattctgagactggtggagaaagaagttagatctgtccgttgcttgatgtaggagggttatgtgcattaagcaacaaaatgtggcagtgtatacgtttttggctctgaccccatctatttgatttagcaagatttaaaagactgtcatcacattgtgcagacagagacgagacagtgctttattttttcgggggcttttgttcattggtatcatttgagatgaaagcttgtttgctatcatctaaaatactagggtgagtttgcatcatcatcatctagttttgcattatttttcccctcttgtattcctttccccaattgtattttttggggtccatcccccctccccactttgatttatctctgaacaatgagaaatctaatctatgtatattgatcagtgtaatcttaatttaatagaaggatgtgaataggtatgtatatctataatattatacagctggattcatctttgcttggagacc

SEQ ID NO: 11022 - DNA, 461 bp, Glycine max
  Clone ID: 700998622_FLI
gtgaggaagtggatttctggtgttggtgttgacagtgttgggaagaagcttgtgaactcaaaagatggacctccaacctttgagcagcccaagatgactctggagaagctcttgctgtatggtaacatgcttgtccaagaacaagagaatgtcaagagagtccaattggctgacaagtacttgaacgaggctgctcttggaaatgctaacgaggatgctattcagaggggaactttcttccagtcttgaattggaggcaaagcaaacttggcaagtaaatatttctgttcgtgaaggttgttgtactaatccaagtgctagaagttgtgatggaacttgcgtgtaacattcttagcattctcaatgtcttaggtgcaaagagaagatgctaagtttgagatgatcttactatatttttcatattggaccgtcttcctctataattttgagttacagtgtcc

SEQ ID NO: 11023 - DNA, 1486 bp, Glycine max
  Clone ID: 700998652_FLI
caaaggttgctgtaggagataagattgcagtagtgctaagtgctaacacctgcagtgaacaatggcctctgcatcagcatctctgctcaagtcttcacttgttcttgacaagtctgagtgggtgaagggacaaacccttcgccaaccttctgcatcagttgtgagatgcaaccccaccaccccatcaggcctcaccatcagagctggttcctatgctgatgagctcgttaagaccgcgaaaacagtggcttcaccagggaggggtattttggccatggatgagtccaatgctacctgtgggaagcgtttggcttcaattgggctagagaacactgaagctaaccgccaggcataccgtaccctcctcgtgacagttccaggccttggtcagtacatctctggtgccattctctttgaggaaacactctaccaatccacaactgatggcaggaagattgttgacgtgctgcttgagcaaaacattgttcctggtattaaagtcgacaagggtttggtgccccttgcaggttccaacgacgagtcatggtgccaaggtttggatggtctagcctctcgctcagctgcatactacgagcaaggtgcccgtttcgccaaatggcgtactgttgtgagcatccccaacggtccctctgctctggcagttaaggaagcagcctggggtctggctcgctatgctgcaattgctcaggacaatgggttggtcccaattgtggagccagagatcttgcttgatggggagcatggtattgatagaacttttgaagtagcccaaaaggtctgggcagaggttttcttctaccttgctgagaacaatgtcctttttgagggtattctccttaagcctagcatggttacacctggagccgagtccaaggacaaggccagtcctcagacagttgctgattacaccctcaagctccttcacaggagaattccccctgctgtccctggaattatgtttttgtctggtggacagtctgaggttgaagctaccctcaatttgaatgccatgaaccaatctccaaacccgtggcacgtgtcattctcgtatgccagagccctccaaaacactgccttgaagacatggggaggccgcccagagaacgtgaaggcagcacaagatgcactcgcattccgtgccaagtccaactcactcgctcagcttgggaagtacactggtgagggtgaatccgaggaagccaagaaggagttgttcgtcaaaagctactcctactaagatgtttgcagtgaatatgatacttgttaggcagcaacaccagcagttacagtaggtgttgacggacgatgaagtggaagactaatttgtctaaaatgtaatgtttttatagtcttggagactatttttgtttatggttaaatgcacctttacagcttaataaaccttttgctatgagttgtgtacttgattatgtctcaatatataacaaaatggtttaagctcggc

SEQ ID NO: 11024 - DNA, 1765 bp, Glycine max
  Clone ID: 700998660_FLI
cttctgtttctggattcatttgggtgtttggacacaattgcttaattatactttctgttgattgtgttgacgcaggactgaatgaactaatggagtctaaaggtgggaaaaagaagtctagtagtagtagtagtaaatcattgttctacgaagctcccctcggatacagcattgaagacgttagaccaaacggtggaatcaagaaattcagatctgctgcttactccaacgtatattttctttctgatgcagtgaattcttgtatttgctttgtttgattcaatacccagtctaacactgtttatcatgttttgtatgcagtgcgctcgcaaaccttcctgatatccatccagattgatagttcattgcatgcaaccatagttttattaggttttttcttctttgttttcaattaggtttttgctgctctccttcaaactccgtctttccgaatcctctctttgtgattgtgttctgttctgcttcctaccgcgatagtttctcttctgaagcatggccatggcggtttctgcaattggttttgaaggtttcgagaagaggctggaaatatcctttttccagccgggactttttgctgaccctgagggaatgggtttaagagctcttgcaaagtcccagttggatgagatacttacaccggctgcttgcaccattgtttcatctctcagaaatgatcatgtcgactcctatgttctgtctgagtccagtctctttgtttatgcctacaagatcatcatcaaaacctgtggtactacaaagctactgcttgcaatcccacccatattgaaatttgctgaaatgctttccctcaatgttagatctgtgaattacaccaggggaagtttcatctttcccggtgctcagccctatccccatcgcaacttttctgaggaagttgctattcttgatggctactttggcaagcttagtgcaggaagcaatgcttatattttgggtggccaagacaaatcacagaactggcatgtctactctgcttctgcagattctgtaactccatgcgacaatgtttacactctagagatgtgcatgactggcctggatagagagaaagcacaggttttctacaaagaacaatctgcttcagctgccattatgactgttaattctggcattagaaaaattcttccagattctgagatttgtgactttgactttgagccatgtggttattcaatgaactctgttgaaggtgctgctgtttctaccattcatgttaccccagaagatggtttcagttatgcaagctttgagactgttgggtatgacttcaaagtggtgaatctgaacgaaatggttaagagggtattggcatgttttctcccaactgagttctctgttgcagttcatgtggatggtgcaagcaagttgtttgatcagacgtgttttctggatgttaagggatactgtcgcgaagagaggagccacgaagggcttggaatgggtggttctcttgtctaccaaaaatttgccaagacttgtgactgtggttcacctagatcaactctgaagtgctggaaagaggaagatgaagaagagtagttttcttaagtgtctttattatgtccttgcgaaaataagtccggttttccagacagtgattgtttttctttggtgttttttcccttttatgttagaccattgttagggcgtttggaccttttattgttctactattaccatttgaacatcgaatggattttaataaatcactttgtatgcgtgc

SEQ ID NO: 11025 - DNA, 1012 bp, Glycine max
  Clone ID: 700998705_FLI
cgcagcgcatcccataaaacctgtttctattgaccatgcattcccatattgagagaattctatggagcgaggaccaaatttctcgccgtgttttcgagctcgccgccgaaatctctgacgacttcggcggccattctccggcgcccgtggtcgtcggcgtggccactggcgcgttcctcttcttggctgaccttgttcgcaaaatagatctctccatcgccgttgatttcgtccgagtcgaatcctacggttccggaaccgtgtccaatggcgcacccaccatttccttcgatttgaaggtcgacgtcaactcccgccatgtcatcgtggtcgaagacattgtagatactggacataccttatcaaaagtcattgagcacttgaaatcaaaaggagcgtcctctgtttctgtttgcactttccttgataaacctgcaaggagaaaagttcattttcagctggtgggtgaagggaaatactaccggggattcgagtgtcccaactatttcgttgtaggttatggactggatttcgccgaactgtatagaaatttaccttacattggtgtcttgaagcctgaactttacaagtgatcttatatttcttagtgaaacctgtcacacgtggttctagaagtttttctgcctcacattcttccaagagtagcagatagaaactagaagaaaactaataacatggacttgctatgcgcttccttggctaccatgaaataaattgtttcagagcttctatattttcattttaatattatcttattaaagtaacgtgacagtgtgttacttggaccaagtatcagacaaggaaaatgtttgtcaatacaagatcaaatcaacaacttattagaggggctattgtttgcaactgttttgaaaaccttaattaattttgcggttatgtatgtttcaccttttaattcttttttcagtttttccgcaatctttgactgtattctgtattgggaggaatgtattttagtcgaaatatctgaggg

SEQ ID NO: 11026 - DNA, 1012 bp, Glycine max; identical to SEQ ID NO: 11025
  Clone ID: 700998785_FLI

SEQ ID NO: 11027 - DNA, 1653 bp, Glycine max
  Clone ID: 700999014_FLI
cacaccttcttccgttgttctcttccaattgccttgattttctcggaaaattcttattttccgagaaagttcgtgtttttactgttgaatcgagaattcccaaatcggggtgtctgaaattcaaagctgttgttgttgttggcggctggggttagtctctgtggaggtttgggtgttttttgaggcagagcttattctcattttgctccaatggagatgcaggaccaaatagaaagcacaagatcaaccatatttggctcagctagtaacatccattccaatgctgaaaagcaggccgaaaatgttgctcccaaggtgaggaaaccatataccattactaaacaaagggagaagtggacagaggaagagcatcaaaagttccttgaagctttgaaattgtatggtcgtggctggcgccaaattgaagagcatataggtaccaaaactgctgttcagattcgaagccatgctcaaaagttttctctaaggttgtgagggaatctgaggtcagtgatgagggttctatacaaccaattaacatacctcctcctcggcctaagaggaaacccctgcatccatatccccgtaaatcagttaattctttcagaggacccaccataccaaatgaacagaaatatctccatctacaaacttgttggttgcagagaagacaccccatctccaacctcggtgctatctacagttggttcggaagcatttgggtctcaattttcagagcagactaacagatgcctttcaccaaactcttgcaccactgatattcactcagtcagcttatcacctgttgaaaaggaaaatgattgcatgacatccaaagaatctgaggaggaagagaaagcatcaccagcttcacgtcctttatccactgtttctaacccaaaaatgtgcatgaaacctgagtttagttccaaggagatagaagatgctactgatatgccacaaaccactagtattaagctttttggaagaacagtctctatggtaggtaatcagaagtcactgaagatagatgatgatggtaagccgataactgtgaagtccgatgaagtagatgatgttgagaatgagaagcttggccaatcaggagaatccaagcaagtagatacacaattatcactcggcgtggttagtggtaactggcctataacacccgatgctgatggagctaatgtgaccagcatagagcccccaaaggagaaccaatgcttcagtgaatctgcacctgatgcattttttccgcagtggagtttgtcccaaggccttccacctttctacctgaggccatgcaatcaggtcctaatcccttgcctcttaggccctcctctttgaaagtaagaacaagagaggaggaaagttgttgcactggttccaacactgaatcagtctgtgacatggaaaaccaaggcaagaactcagatgctgttgattctaagtttcaaaaatatcacgaggaaggagctgcaccccagaagaagcctgcaaggggatttgtaccatataaaagatgtttagctgaaagagatggacattcttttattgttgccatggaagagagggaggggcaacgagcacgtgtgtgctcatagccttacattctatttttacatgattcataatcatggtgttaatcag

SEQ ID NO: 11028 - DNA, 829 bp, Glycine max
  Clone ID: 700999148_FLI
gccttttcttgtgtggccatagacccagagctattcctcaattatcaatatcttctgcttctctctctcgatgagaaacaacaacacatacagcaaaacatgacaaccaaaggaacaactcactctgaacccaacaacactgaatgttgcatgtgtggggatcttggcttctctgatcagctttttcaatgcaaagcctgccaattcagatctcaacacagatactgcagcaatctctacccgaagccagagtctcttggaacctgcaattggtgtttgagtcaaagagaggacaccaaagagaggtcaaccaattcatcaaattcttcctcatctattaggaacaacgatgatgagagcagaatcaagagaatcaggaatggtaatagctacaacagtgctcaaaatattggaccggtgaagaagggagtgaaagggagtgtccttcatctccaaattcataaaccaattaagaaaccaaagtcaccggagtcatcaagatcaccatcagcatccaattctccaccgaaatcttcgccggttttggtttcaacccggaagaggattgtcaccaatggtaccttggaagagagactgaggaggactaggtcagaagacatcacaagaagtggtgcaaccaaacaggtcttcaggaataaggtgagaaggtataagcttctggatgaagtttcaagttaaaataatactaaaaattataagaataaaaggtttcgaatgaaagagttatgtaagagatgatcagtctatacacaggaaagaaagaaaaaagggtcatggtttttggttccttttgcgttttttccccttc

SEQ ID NO: 11029 - DNA, 1315 bp, Glycine max
  Clone ID: 700999286_FLI
gtggttaagatttcatgtagtttgctttttattcatgctatagtcgaagacctgagagactcagactaagagttgcagaggcaagaaagaaatttgattacaatggcggggagttcttcatcagctgctgtgtctcttcttcctgtaattaggcatgatgtgttcctcaacttcagaggggaagacacccgtgacaacttcattagtcacatttatgctgaactacagaggaataagattgaaacatatatagattacagactagccagaggcgaagagatttcacctgcactccacaaagcaatagaagaatctatgatttatgttgtcgttttctcccagaactatgcatcttccacatggtgtttggatgaactcacaaagatactcaattgcaagaagagatatggaagggttgtgatcccagttttctataaggtggatccatcaattgttaggcatcagagagagacatatgcagaagaattcgttaagtataaacatcgatttgcagacaacatcgacaaagtgcatgcatggaaggctgctctaactgaagcagctgagatcgcgggctgggattcacaaaaaaccaggtctttaataattacatgctcttttgagatgttttagacttcttttaatttacttagatgctaaaattgtattaatcaagtaattctcttgtgtatttacaaattcaagaccaatattatgtaggactccaatatctgtctctatccaatatatgatattttcttttttacctagaagtgtttaaggagaagtttattaaaacaggttctgatactttattttgttttattatgagccagtccagaagccacacttgttgcagaaattgtgaaagatattttgacaaaattgaatagttcttccagttgtgatcatcaagaatttgttggaattgaaacccatattacacaaatcaagctcttgatgaagcttgagacactggatattcggatcataggaatttggggcttggggggaattggaaagactacgattgcagggcaaatatatcaccaattggcgtcacagttctgttccagcagtcttgttttaaatgttccggaagaaatagaaagacatggaatacaacgtacaagaagcaactatgagaaagagcttgtagagggaggcataagtatttcaagtgaaagactcaaacggacaaaggttctcctctttcttgatgatgttaatgattcaggtcaactaagagatttaattggagggcgtggtcgttttggccaggggagtcgaattattttgaccagcagagacatgc

SEQ ID NO: 11030 - DNA, 415 bp, Glycine max
  Clone ID: 700999386_FLI
cgagtcatgatttggctctctgctcttggcggcgcaggccccatctcctccaccggcagtgccatcgccaccgtcacagtcgccggcaagcagtttaagctgtataaaggccccaacggacagatgaccgttttctcgtttgttgctgtcagcccgatcaacagcttcaacggcgatctgaatgcgttcttagtataccttcgtagcagccagggcctgcccgccagccagatcctccagtctgtcggtgcaggtactgagccgttctctgggtccaacgcagtccttacaaccaccgcattcactctgtctgagaaataagcgagcgcagcgagtgctgtcgacacggttgtcgcgctttgattctttgtatatatttgccttggtacatatcatgaacgatatctgttttctc

SEQ ID NO: 11031 - DNA, 789 bp, Glycine max
  Clone ID: 700999496_FLI
caagaatgaagagaaaaacccaccactgacacctctaggaactgatgatagtaataactacaattcttctgcaaaccacagcaatatcactgttagggtttgttctgattgccacaccactaagacccctctctggagaagtggaccaaaaggtccaaagacactttgcaatgcttgtggaattcgacaaaggaaggcaaggcgtgccattgccgtggctgcaacggcaaacggaatgaatccggtggaggctgagaaatctcaagtaaagaaaggaaacaaattgcatagcaaagggatgaagtccaaaactaagggtgcaccacatatgaaaaagaagcgcaaacttggagcgaagtatagaaagaggtttggtgcttttgaggatttgacagtgagattgagtaagaacttggctctccaaaaagtcttccctccggatgagaaggaggctgcaatcttgctcatggctttatcttatggccttcttcatggctttcccacagatcgttacgtcaattacttagatttatgagatatattggtggtaaaaccataattattgtatgagaccaatgcttaattagtgttgtgctagatttagtgaagttaattagtatgaaaaactgataatagggacaataaagttatgaggagggtggttttatcaattgtatgttgcatctgaacaagaagacaaacacaaaatactagtgtcttattgttcatgatgatgagtatcctataatctcgataaatatttaataaaattccaagagattttatgtt

SEQ ID NO: 11032 - DNA, 2443 bp, Glycine max
  Clone ID: 700999647_FLI
gaagatttggctctggcatgtcttcattggattttatactcatggaaccagctgaagttgcaggggttaatggtggaaagtggactgatcaggagactctcctgctccttgaagcattagaactgtataaagaaaactggaatgaaattgcagaacatgttggaacaaaaacaaaagctcagtgcatattgcactttgttcaaatgccaattgaggatacctttgttgactgtgatgatgatgttgatgctggttgcaaagaaactgcggatccagttgcaacaaaaagtgactcatctatggacaaagatgcttcagaatgtattgagaatcatactagcgatggcatcaaagacagtgaaaaaacttccaaagctgaagatctcgaagtcaaagtgaatcagaaggagactccaaagttacaagaaggcagtgatgagaaagccagcgaggaaacttctaaatcagaagatgctgttaaggtaaagattgatcaggaagcagacaatgactgtgctataaatgctcttaaggaagcatttgcggctgttggttttctcctggacctgaaggcccttcttcatttgctgatgtgggtaatcctgtcatggcactggcaacttttcttgcacacttggtgggttctgatgcggctgttgcttcagctcacagctccataaaatccatgacaagaaattctcctggcaccgagcttgctgcaaggtgttgctttcttctagaagatccgccagatagcaagaaggaaccaactagttctgagagggattctaaaagtgagggagaccaggatgaagtaaatgtaaaccaggataaatcaacgttggaggataaagatttaccaactgatcacaataataagaaaattgaaagtaatgctttagaagacaagggaaagcctgcttctgcagatgatggcgcctcggaaatacccatttcttcaaaggaacaagcggtggttaataatgaatgtgggcttgacaagtgtcatgatctcaacaatgcaaagctacccaatgatcaagcacctggcactctgcataattcaggtggttcaacatccaaggctgaaattccatctagttctgacaaggctcaggaggaaactttaattgaagaaccttgcccttctgtaaaggacaggcatgtgtctgattctcttccatcagagacatcaaaagatgctgagatggtttctgatgctattccctcaactaagagcaagcctcaaaatccagagtctacaaatccagctcatgaatctctagaaacaacagactcagtaatggatgtggatggagtttctaattccttgccattggaaaagattgactctcagccactaattacatcaaaatcatcccaatgtaatgggacagaaaaggatgtagaagtgatgtcaccttcaaatccagttagatcaaattctagtgctgaaaatggtccaaatacaggggcaggtaaagataatgcagataatggagcaaaagtggaagatgatggtacaaagactaaacaggatagcagttttgagaaagtgaaacgtgctgctgtttctacacttgctgcagcagcagtaaaagcaaaacttctagcaaatcaggaagaagaccaaattcgacagcttacttccttgttgatagaaaagcagttgcacaagttggaaacaaagttggctttttttcaatgatgtggagaatgtggtgatgagggcaagggagcatgtagagcgatcacggcataagctttatcatgagcgtgctttgataattgcatcaaggcttggtataccaccttcctcatctagaggtgtaccaccatctataccaaccaatagaattcctacaaatattgcaaactcactcccaagaccacaaatgatgatgaatccaccaagaccactgatttctagacctgcaggcacggtagcaactattcaaaacccattaacaccttcaactgcagcaggaaattcagttcggccatctaatcaggaaaagctttcttctgttgggacaaaataaatgtcaatacatatagaaaaatgttcatgtcttcatacttactgatctctcgccatcattttgacaattaaattcttgcaaaggtcaagtgctggttaggactaactccaaattgagtagtattgggaattcggtgaccagagtagtgtgcattggaagctcatcctttccccgttattaggagcagccgcagatgagaggacggaagtttactgatagatttgaagttgtagaccgatttttttatatttatttttgaggtgtttaacttaaaactagtggatagttgtgcaaaatgcgcgccttcaatcctctaacttgaatgctattcactacattattattggatgagagcatattgaaatttggatgacttcataaagaatatatagcagtctggc

SEQ ID NO: 11033 - DNA, 1100 bp, Glycine max
  Clone ID: 700999713_FLI
attctacattgctccagcttttatggacaagcttgttgttcacatctccaagaacttcatgaccctgcccaacatcaaggttcctctcattcttggtatctggggaggcaagggacaaggaaaatctttccaatgtgagcttgtctttgccaagatgggaatcaaccccatcatgatgagtgctggagagttggaaagtggaaatgcaggagagccagcaaaactgatcaggcagagataccgtgaagctgcagacatgatcaagaagggaaagatgtgcgctctcttcatcaacgatcttgatgcaggagctggtcgtcttggtggaaccacacaatacactgtgaacaaccagatggtgaatgccactctcatgaacattgctgataaccccaccaatgtgcagcttccaggtatgtacaacaaggaagagaacccccgtgttcccatcattgtcaccggtaacgatttctcaacactctatgcacctctcatccgtgatgggcgtatggagaagttctactgggcaccaacaagggaagaccgcattggtgtttgcaccggaattttccgcactgatggtattcctgaacaggacattgtcaagcttgttgacaccttccctggccaatccattgatttctttggtgcactgagggccagagtatatgatgatgaagtgaggaagtggatttctggtgttggtgttgacagtgttgggaagaagcttgtgaactcaaaagatggacctccaacctttgagcagcccaagatgactctggagaagctcttgctgtatggtaacatgcttgtccaagaacaagagaatgtcaagagagtccaattggctgacaagtacttgaacgaggctgctcttggaaatgctaacgaggatgctattcagaggggaactttcttccagtcttgaattggaggcaaagcaaacttggcaagtaaatatttctgttcgtgaaggttgttgtactaatccaagtgctagaagttgtgatggaacttgcgtgtaacattcttagcattctcaatgtcttaggtgcaaagagaagatgctaagtttgagatgatcttactatatttttcat

SEQ ID NO: 11034 - DNA, 715 bp, Glycine max
  Clone ID: 700999734_FLI
aagcatgcaagcgacgtcgttctgggtagccaagtttccatttggcgtaagggcgcagcagcacccaaccgtgaagagagactccatggccgagtgcaccgtccccaagtgggcccaaaaaaccgtcagcttgccccctctccggcgcggctgtcatcttgtcacttccaagatagtgaaggaaattgagcaagacctctccggcttcaagtgtggcctagctcatctcttcttgcagcacaccagtgcttctcttaccatcaatgagaattatgactcagatgttcgcgaggataccgaaaccttcctcaatcggatagttcccgaggggtcatctgcgccatggaagcatactctagaggggccagatgacatgccagctcatattaaatcatcgatgtttggttgtacactcacgataccgattacaaatggcaagcttaacatggggacatggcagggtatatggctctgcgagcatcgggatcatcctacctcacgaagagttgttgtcactcttaatggaatatgagagtgctaagatctgtttgctatacctcaccttcgtgatgaagacaatctcgctttgtaatttataacaggatgtgtgctacagatctaccttttttgccaatgtaatttgagtgccttgatatgatatggacacaactgcagatagcattatgaccctttaatgcatataagtattccaaat

SEQ ID NO: 11035 - DNA, 2058 bp, Glycine max
  Clone ID: 700999823_FLI
gctgtaattgcatagggacacaacatctctatagctatatgcagctaggagactcaagtgtgttggagatctcctcccatacccagcctgagatggcggtgacggcagcagtgttgccaccagaagaagtagcccatgatggcagcgacaacagtggtgatggtggtggtggtgagatgattgggatggacttggatgcaaattcaggtgaaggaaatgaaggtaataataagatgagctttggagggaaccggtggccccgccaagaaactttggctctcttgaagataaggtcggatatggatacagtttttcgagattcaagtcttaaaggtccactttgggaagaagtttcaaggaaattggcagaacttggatatcaaagaagcgcaaagaagtgcaaggaaaaatttgagaacgtgtacaagtacaacaagagaaccaaagacaacaaaagtggcaaatcacatggaaaaacctataaattctttgatcaattacaagcccttgagaaccaattcacaacagtctcttacccgccaaaaccacaacctacttctactttggcaacaacaaacccattgacattgccaacaaggccaagtgatcatggtaacaaagttatctcttatgtcacaacttttccttccacaaaccctactctcatttcaccttctccacaaaccaacactaccaccaccaccaccacaacaacatccacaaccaaccctagagattcatcacgaccacaaaccaacaacaacaataatagtgtcacacactctttgccaaacatgaacacctctttctctaccaccactgcctccacctcatcctccacagcatcagatgaagacttggaagagaggtataggaggaagagaaagtggaaggactacttcaggaggctcactaggaaggtcttgttgaagcaagaggagatgcaaaagaagttcttggaagccatggaccaaagggagagggaaagggtggcacaacaagacaattggaggatgcaagaaatggcaaggatcaatagggagcatgagattcttgttcaagagagatcaacagcagcagccaaagatgctacagtcattgcattattgcaaaagatgtatggccaacaaaaccccacacaacaagttgaagtagagccaccaccacaacagaagcaaacaattccccaatcgctgcctccaatattaatgccaaacaataatttcgaggtcaagaaaataaataatggtcacagtgttactagtactactactggtactgttgctactgctgctactactactactacttcgccggtgaattcttcttcttctcggtggccgaaggcggaagttcatgctttgataaggataaggacaagtctagaaaccaagtatcaagagaatggaccaaaagctccattgtgggaagatatctcaattgcaatgcaaaggcttgggtacaaccggagtgcaaagagatgcaaggaaaaatgggagaacatcaacaagtacttcaagagagtgagggagagtagcaaagaaaggcgtgaagatagcaagacatgtccctatttccacgagcttgaagctctatacaaagaaaagagcaaatcgtccaagaacccctttggcatcttccagaatatgaagcctaatgagatgatgctgatgatgacggagccactgatggtgcaaccggagcaacaatggaggcccccacctcaatcattggaagagggtgtagggatggagaatgcaagtgaagaatatcatgaaaatgaagaaaatggtggtgacgatgatgataacattgaagaggatggagatagtgtggaagatgaaggagcaaacccgtgtgagattgcgacaaataattaaacgtgcttcagtggacaccgttgaagtagacaagataaggaattttctgaatggagaaaaattaagtgtgtggttaaatttacttttacttatttcggaaaaaatagtcctttattttttttatcatttttttagacttcaaattgtgattatttcttaaggaaaacaaatgttgggt

SEQ ID NO: 11036 - DNA, 2039 bp, Glycine max
  Clone ID: 701000102_FLI
aaaatttactgcaaaaatatatcaatgtgatgattaatagtacaactgtagtaaataaacatatgttattttttcaactgtagtaaacaaatgcaacctttgccggtacttctgaataagaatttaacatgtgcttcttagatctcgtgatacgtcttgtcgtttatcctctctctctcttatacttgctcacacatcttcaaactccgttgctgctgacaaacatggccgctgccatcggaagcatgttggacacgaatgggctcacggtccaagtcatcaccggacggtggttcgtggtgttcgcctcctttctaatcatggccgccgccggcgccacctacatgttcagcctctactccggcgacataaaatccgccctcgcctacgaccaaaccaccttaaacctccttagtttcttcaaagacttgggcggcaatgtcggcgtcctctccggcctcatcaacgagatcactcccccttgggtggtcctcgccatcggttccatcctcaacttcttcggctacttcatgatatggctcgcggtcaccaaaaaaatacccaaaccgcacgtgtggcacatgtgcctctacatctgcttaggcgccaactctcagtccttcgccaacaccggttcccttgtcacgtgcgtcaagaacttcccagaaagccgtggggttgttcttggcattctcaaaggctacgtgggtctcagtggagccatcataacacaactctacttcgctttttactacgatgattcaaggtccttgattttgcttatagggtggctcccagctgctatttccttccttttcctacgaaccattcgctacatgaaaccccttcgacaacaacccaatgagctaagtgttttctacaagtttttgtatatctcacttggccttgctgggtttcttttggtcatgatcatagttcagaagcaagtgcatttctcacagagtgagtatggagtcagtgctggggttgttctttttttactattcctccctcttgctgttgtgtttgttgaacaatataaaatcagagagagtcaaaagctagcattcattaacccctccgcagtcaagatagtagctactgaaggagagtctaacactccaatttcaagaaagattgatgaagaaataataactagtactagatggtggcaaaaagtgtttagtccaccgcctagaggtgaggactatactatacttcaagcactattcagcttagacatgatactgctattcttcgctggcacatgtggtgttggtggaaccttgaccgcaattgataaccttggtcagattggaacatcgctagggtacccaaaggctagcataagcacgtttgtgtcgttagtgagcatttggaattatatgggaagggttttttctgggtttgtttcagaacactttctaaaaaagtacaagttccctcgaccactcatgctcacgctaaccctcctcttatcctgtgtcggtcaccttttgatagccttcgatgtggccaacggactctacgtggcctcggtgatcattggcttctgctttggcgcgcaatggcccctggtcttcgccataatctcggagctctttggactcaagtactattcaacgttgtacaactttggcggtgcagcgagcccaattgggctttatgtgcttaacgtcagggtaacggggtacttgtatgacaaagaagctctgaagcaattggcagccacggggatctctagaaagattgacaccgaattgacttgtgttgggtccagttgcttcaaattgtccttcattattatcactgcagccaccttttttggcgccttaatttcactgattttggtggctaggacaattaagttctacaaaggggatatatacaagaggtaccgggagcaagccgaggaagaagccaccgctgtcactgagatggctgtggtccaaaatcgcgccgagaaattagaagaaaccaaagttattggagcgtaattggtatagggtatagatagtcatcaattcctcctcagccac

SEQ ID NO: 11037 - DNA, 614 bp, Glycine max
  Clone ID: 701000133_FLI
tatataccaatactagctagtagctagagagtagagaacatggagggcaaaggtttcacggaagagcaagaagctctggtggtgaaatcatggaacgaaatgaagaagaattctcaagaactcggtcttaaatttttcaagaaaatattggagattgctccagcagctcagcaattgttctcattcttgaaggattcaactgttcctttggaggaaaaccccaagctcaagccccatgccatggctgtctttgtcatggtaacaaagttggcactattggagaccataaaagaagcagtgcctgaaatgtggtcaccagccatgaagaatgcatgggaagaagctcatgatcagctggccgaagccatcaaatctgaaatgaagccctctgattagactctagtagttgctttctctcaaattgaataagattgatagggtggtggtgtttgggtctgtgcttctcgtttgtatgaattttaataatgtatctatgttgctattggggttgctatgtcggaaagtgttcacattttaacaattcagttattgaaggtgatgtgaattgtaaggaaagggaaaatgataaatgcatggatggtatgaattgttac

SEQ ID NO: 11038 - DNA, 1269 bp, Glycine max
  Clone ID: 701000182_FLI
tattgcttcagcactttgcttggttaataaaattgaagaggctgggagtaataaggaaaaagatgtagattttctttcttccatagaggttctgatcattgatcatgcagatgtaatatcaatgcagaattggtctcatgtgcatacagttattgaacacttaaaccgcttaccatctaagcagcttggaacagatgtaatgcgcattagaccatggtatcttgatgatcatgccagattttacaggcaaacaataatactgggtctttattcaaatccagatgtaaatgcttcattcaatcatcagtgccttaattatgaagggaaggtgaaattgatcagtgaatataaaggtgtcttacacaaagtggtacccgaaatacgacaaatttatgaacgatttaacgtagactctatagtagaagctgatgatgctcgatttgattattttgttaaaaaggtttttcccagaataaaagatttagatcagggagggaccatgttgtttaccaattcttactttgaatttattcgaatccgaaattttttgaagtcacaaaatgcctccttttgtctgcttggggagtatacaacccaaagtgatatttctcgtgcgcgtctttggttctatgaaggaaaaagaaaaattatggtttacacagagagatctcacttttaccacagatataagatccgtggggttcagaatttaatcatttattcactcccagagaggaaagaattttaccctgagattgtgaatatgcttgatgggtcggacaaatgacatgcactgtccttttttcctaccttgacaagcttcggctggaaagaattgttggaactactccagccaaaaggatggtggctgcggagaaaggtgtttttgttttctgccattagaattctgccaaggcaaccatgtgaattaccatgggtccatggtagtggcatcattgattattatatgtgaccatggattccaagaggctcccgaaaacgatcttgatgatacaatgagtggaaaatagtgccgaggatgcttgaagggacactgactgtctagaaaaaaaatcatggaggaaaactctttgggttggttttgttttctattaggccccccccccccccccatcacaagtgaattcagtttagttcaatgatagaactgtaaatgtaataggggttattttttatgatagcaaacattctagaagtagtacgaggggttataattctgataatagtattatttttttggtcagctat

SEQ ID NO: 11039 - DNA, 1474 bp, Glycine max
  Clone ID: 701000232_FLI
cagattgaatatgatgaggagaagcaaacttcaaaggatagatggggtggacttgcctatgacacttcagatgaccagcaagatatcactagagggaagggaatggtggacactctcttccaagctcccatggaaagtggcactcactatgctgtcatgagttcctatgattatatcagtgccggacttcgccagtacaatttagacaacaccatggatggcttctatattgctcctgcatttatggacaagattgttgttcacatcaccaagaactttttgaacttgccaaatattaaggtccctcttattttgggtatttggggaggcaaaggtcaggggaaatcatttcaatgtgagcttgtctttgccaagatgggaatcaaccccatagtgatgagtgctggagaattggaaagcggaaatgctggagaacctgcaaagttgattaggcaaaggtatcgcgaggcagcagacattatcagaaaaggaaagatgtgctgtctcttcatcaatgatcttgatgcaggagctggtaggcttggtggaaccactcaatacacagtcaacaaccagatggtgaatgcaacccttatgaacattgctgacaacccaaccaatgtccaacttcctggcatgtacaacaaggaggagaatccccgtgttcccatcatagtcactggcaatgacttctcaacattgtatgctcctctcattcgtgatggacgtatggagaagttctattgggcacctactcgggatgacaggattggtgtctgccaaggcattttcagaacagatggtgttctaaaggaggatattatcaagcttgttgacaccttccttgggcaatctattgacttctttggtgccttgagggccagagtctatgatgatgaagtaaggaagtggatttctggtgttggggtggagaatattgggaaaaagctggtgaactcaaaggagggacctccaacatttgagcaaccaaagatgactcttagcaagctccttgagtatggaaacatgcttgtccaagagcaagagaatgtgaagagggttcaattggctgacaaatatctcaatgaggctgcacttggagatgcaaatgatgatgccatcaagactggaaacttctatggacaaggagctcagcaagttcatgttcctgtccctgaaggttgcactgaccctactgctgaaaactatgatccaacagccagaagtgatgatggaagctgcacatacaaattttaggtgattcttaggtaaattgtgagtagataaatatagttttgaaacagcaaaataaaagaatgttacaatgttttccacattagaattcacttttttatgtaagatgtagattttgtgttattgccggtgtaaccctttgttgggttttatgggtgacaatatgacatcttatagctagcatagttggaaatatcatttcctttttgtttctctgttc

SEQ ID NO: 11040 - DNA, 607 bp, Glycine max
  Clone ID: 701000252_FLI
gaattttccgcactgatggtattcctgaacaggacattgtcaagcttgttgacaccttccctggccaatccattgatttctttggtgcactgagggccagagtatatgatgatgaagtgaggaagtggatttctggtgttggtgttgacagtgttgggaagaagcttgtgaactcaaaagatggacctccaacctttgagcagcccaagatgactctggagaagctcttgctgtatggtaacatgcttgtccaagaacaagagaatgtcaagagagtccaattggctgacaagtacttgaacgaggctgctcttggaaatgctaacgaggatgctattcagaggggaactttcttccagtcttgaattggaggcaaagcaaacttggcaagtaaatatttctgttcgtgaaggttgttgtactaatccaagtgctagaagttgtgatggaacttgcgtgtaacattcttagcattctcaatgtcttaggtgcaaagagaagatgctaagtttgagatgatcttactatatttttcatattggaccgtcttcctctataattttgagttacagtgtccacttaaattgaatttggtgccttttccttt

SEQ ID NO: 11041 - DNA, 914 bp, Glycine max
  Clone ID: 701000394_FLI
gccgttctttaccttcctgaacgacaccgagaccagacacggtttggggcacagttaaggtggtagcagtagcattgttaggccatatctcctttttttctctgccttgtattgaggtaaaactcacaaatattataactttgatctggggaagcaatggcatggagaggacatctttcgaaaaacataaaagaacttcggtttttgatgtgccagtcatctcctgcaagctcacctgcaagggcttttgtggagaggaattataaggaactaaagacattgaacccaaaattgccaatattaattcgtgagtgcagtggaattgaacctcaattatgggcaagatatgatttgggtgttgagaaaggcatcaaattggaaggcttgtccgaagcacagatctttaaggcacttgaagatttgtcaaaagcaggacagtctttgaaagcttgatattgctgcttatgcactgtcttaagtggaataaatgctctcttgctgcccttgttattgcaaattgctttttgatttaaaataagccaggccttttttttttctatgttctatggcctctggtttcagcctgtctctgcatcttacatcatttcaagtatgacactgttcattgtaagttcaaaaccctggtttttcatgttgagcacacttgtcgagggagatttattcagaccaaagattatatgactactggtctatgtcaaaggttgacttgccagagaacatgattctgtattggctgtgtaactaaaaccaaagcataaacccatctatgatgttttctcctaaagtagtagaccattttatgttgctggaatggtttctttccctgttcctgtattatgtgtccatgatctaatatatatatatataaaggcttagttgcatttttggcaccc

SEQ ID NO: 11042 - DNA, 816 bp, Glycine max
  Clone ID: 701000456_FLI
cgaaaaaagaaaaaaaaaaccctaacgcactcgagaccctgagatttttcatcttcgtttctcattctctttttgatcatggacgtcgaggtgcggcagatcttcaacaagttcgacaagaacggcgacggaaaaatctcggtaacggagctgaaggacatgctcgcggccctcggatccaaaacgacggacgaggagttgaaacgcatgatggaggagctcgaccagaacggcgacggtttcatcgacctcaaggagttcgcggattttcactgcaatggcggtgccggaaaggacgactcgaaggagctccgcgacgcgttcgatctctacgacgtcgacaagaacggcctcatctccgcgaaggagttgcacgacgtgctccggaatctaggcgagaagtgctccctcagcgattgccggagaatgatcagcaacgtcgacgctgacggcgacggcaacgttaacttcgaggaattcaagaagatgatgactcgctcttaattaggtttgaatcaataatcaataataagttcatttttaaaaggtacgtacgtacgtttacgcatcttcatgttaggttagaaagaactaagacctgcacataaagtagttattaacatcttttctgtacattctctagcgtgacatgtggctttaggtgttagattaggaattgaagattgaagaacgaagaagtagggttagtagaatttgtaggactcagttctgtagttatacatatgatgataattcttgcttgttttttcttaattcctttgtcactaaaactcatgaatatgattactgattctc

SEQ ID NO: 11043 - DNA, 827 bp, Glycine max
  Clone ID: 701000510_FLI
gatgaagggtcgttcatcctgatatatattcgtctggtaaacctcatctccaagcaaggctaaattttcttttcactctgtgtcaaaaggttattatggtgaatgtggacagcgaggtggatattttgaaatgaccaacattcctccagagacagttgatgagatctacaaggttgcatcaatatcacttagtccaaatgttccagcacaaatatttatgggagttatgctcaatccacctcaacctggagatatttcttatgacaaattgttagggagagcaccggaatacttgaatcactgagaagaagagcaaggataatgactgatggattcaacagttgcagaaatgtggtttgtaattttactgaaggtgccatgtattcattccctcaaatacgcttgccgccaagagctttagaggctgctaaacaggctggaaaggttccagatgtttactactgcctcaagcttttggaagccactggcatatccactgttcctggttcaggatttggtcagaaaaaaggggtgttccatttgaggacaactattttaccagctgaggaagacatgcctgatattatggatagtttcaaaaagttcaatgatgaattcatggagcaatacgaagacgatagaggttattcaaggttgtaagaaaatcattgtaaaagctgcattatactcttgcgcttttggaagttcttcatccatccatccctcggagagaaaaaaaacataacctccgtttctactatttgtccttcattggagattattcttaaaccttacactttcttctatatcatctctgaacttacaat

SEQ ID NO: 11044 - DNA, 693 bp, Glycine max
  Clone ID: 701000683_FLI
gtgctaatagcatatttagttgtggccttgtgctacttccctgttgctctcattggctattgggtgtttggtaattccgttgatgacaacatcctcatcaccctaaacaaacccacttggctcatagtaactgccaacatgtttgttgtcatccatgtcattggaagctaccagctatatgcaatgccggtttttgacatgatcgagaccgtgatggttaaacaattgcgcttcaagccaacttggcagctacgatttgttgtgcgcaatgtttatgttgcatttacaatgtttgtgggcattacgttccctttctttggtgccctcctcggattttttggaggatttgcatttgcgccaacaacatactttctcccctgtattatctggcttgctatttacaaacctaagaagttcagcttatcctggatcaccaactggatctgcattatatttggcctcctactcatgattctgtcaccaattggtggattaaggagtatcatactcaatgccaagaattatgggttttaccaatgagggagaatgtgttgaaagaaaggtgttaatgcgtgtgatacaagcacttttctaacacttaattgaattcattctccgcaagaaccatagttcaactttcattttataaatactataaacatgcatgaatataaatgtgagactatctttgcc

SEQ ID NO: 11045 - DNA, 1444 bp, Glycine max
  Clone ID: 701000729_FLI
cgactcttcttctcaccgtcgcaggcgtcaccaccgccatcgccgataccgtgataaggactccctcaagattcgaaagaagagcaagtcccaatcccaatcccgcggagaacgacgccgtaggcatcaccgccactcttccgattccgattcctattcttcatcttccctctctgattactccagaagtgaaagttcttctgatagtgagcatgaaacatctcaccgttcaaagaggcataaaaagagtgacaggccaaagaagaataaggaaaaggatcgaagcaaaagccaccgccataagaggcagaagcataaagtaaaagaggtaggtcactttttgatgccatgtttattgtcttccgtaggcttgttcagaatagtttgttattcttcatattgaaagtttttaactctagtaagtgaccttgaaatgttgactatgtgtgcggcatcatttcatttaaatcttcagattactcataaacttgattcaacatgcttaatacttattaccggaagttttgctgcatggattcttgcttaaatccaatattcatctacataagacacactcatataattttgtatgattccctatcatcttctgttgcttgaaaacactggtttgacatcattggtcctgaactaataatgcatagcataaaacaacaaattattaatttagctgcaaaattgcggacttttttccatacacaaagttttgtacattccacttttccagtctgagatggcttatgatactttctgcctattttgtgtattggctctttgaaattggagctgggatctgtgacatgtttgggcgcttgattgacttgcttggatgttgtttcttggtggggtttgtcctggcaatgggagctttatatagaagcagcatgatgagaggagcagcagccctgtgcagctttccaagggcgtgacaaagatgacggtgtccgtcgcagtgctgtatctggcaagaagattcttctgaaacttgagaaaacaaaggaagataaagtggctgaaagcaagagaaacgaactgctgaactttttaaatgctagttttgattagcattgagaaggtatggatttgatagaagggtacaacaaaatctgggaaggaccacatttacttacacaggtgcagaaattatttttccgttataagaaccgggcagcctaccatttccttggggaaggggagtgggatatcataatattgtgcttaccattgaaagacatgtatggttctcgatcagtggatttctcttttatgaaatttgttatgagcttttgtaggatgaggagttcttgacccaactgattccatacatggtattttgagattgggcaatcattgtgttatgtgccaagatatttttttcttgtgttgatttgggcacatgtgactgaattattaaaaaatttgttcc

SEQ ID NO: 11046 - DNA, 507 bp, Glycine max
  Clone ID: 701000943_FLI
tgatgatgaagtgaggaagtggatttctggtgttggtgttgacagtgttgggaagaagcttgtgaactcaaaagatggacctccaacctttgagcagcccaagatgactctggagaagctcttgctgtatggtaacatgcttgtccaagaacaagagaatgtcaagagagtccaattggctgacaagtacttgaacgaggctgctcttggaaatgctaacgaggatgctattcagaggggaactttcttccagtcttgaattggaggcaaagcaaacttggcaagtaaatatttctgttcgtgaaggttgttgtactaatccaagtgctagaagttgtgatggaacttgcgtgtaacattcttagcattctcaatgtcttaggtgcaaagagaagatgctaagtttgagatgatcttactatatttttcatattggaccgtcttcctctataattttgagttacagtgtccacttaaattgaatttggtgccttttccttttgtcct

SEQ ID NO: 11047 - DNA, 976 bp, Glycine max
  Clone ID: 701001042_FLI
tcctacacttgtaattcgtggaactgggctttatgagctctggaaaactggcaggtatagaaactatccacctgagcaacttgtggacattatagcaaggatccttgcaatggtacccccatggacacgtgtttatagagttcagcgggatattcccatgcctctggttacctctggggttgagaaaggaaatctgagggagctagcattagctcgaatggatgacctgggattgaaatgtcgtgatgttcggaccagagaagctggaatccaggatattcaccaccaaattaagccagaagaggtggagcttgttcggcgtgattatatggcaaatgagggttgggaaacatttctatcatatgaagatacacggcaggatatccttgttggtttgttgcgactgcgaaaatgtggccgcaacactacttgtccagagcttatggggaagtgttctattgttcgtgaactccacgtttatggaactgctgtaccagttcatggacgggatgctgacaagctacaacaccagggttatggcacacttttaatggaggaggcagaacgtattgcttgcagagaacacagatcaacaaaaatagctgtaatttcaggggttggcacacgccattattacaggaaactgggatatgagcttgaaggaccttacatggtgaaatatctagtgaaataacatactagatgtttcttatgtagttttgtcgcattagttaattatatgttttatatgtcaatcacaagacattcgattgtgctgaagatccctaacgctccctcccccaatgctctcggctagattggtattcataattatctagctttattatgaaatttaataaacatatttttggtaggttcctcttaaagttgcatcatcgattgcactcatgtttgacttgcattcactctcttacacaagttgcccgtatgggttaatgcgagtttgtcaatttag

SEQ ID NO: 11048 - DNA, 1780 bp, Glycine max
  Clone ID: 701001054_FLI
aaacaatcatttttttttttcttctgccccctttctctctctgaagcgaaaccctagaaattcatcatctttcagaatctgacaagtttcctcaaccgaacctaaattctctcaccaaatcctcacttatccaaattcgatactccaatccccacccaaattccccgcatcgactcccctccccaaaattcccccatcgccggcgtctcccgcggccgaacgcatcacatcgccgattcggctacggcgctaacagtggctatcgtatgggtaagattctccaagaaaccgcgaagccgtcggcgaattccacatcggcgtacccctctgcggcgcccggcaccacgtcgtcgatgtcggtgacggagacggtgagggggtcgcaccagttcaagattacggggtactcgctctcgaaggggatcgggattgggaagtacatggcctccgacgtgttttccgtcggagggtacaattgggcgatttatttctaccctgatgggaagagcgtggaggacaatgcgacctacgtgtcgctcttcatcgcgctggccagcgaaggcaccgacgttagggcacttttcgagttgacccttctggatcagagtgggaaggagaggcacaaggtgcatagccatttcgagaggactcttgagagcgggccttacaccttgaagtaccgtggtagtatgtggggttacaagcggtttttcaagagaacagctctagagacatcagactaccttaaagatgattgtctgtctgtgaattgtagtgttggtgttgtgaggtcacgcacggaaggtccgaaaatctataccatagcaataccgccttctagcattggtcagaaatttggacatctgctggaaagtggtaaaggcagtgatgtaaattttgaagttaatgatgatatttttgctgcacataaattggtactagcagctcgttcacctgttttcagagcacagctttttggtcctatgaaagatcagaatacccagtgtattaaagttgaagacatggaagctccagttttcaaggcattgcttcattttatatactgggactcgctaccagacatgcaagagcttactgggttggactcaaaatgggcatcaaccttaatggctcagcatcttctagcagcagctgatcgtcatggcttagagaggcttaggctgatgtgtgaagcgagtctctgtgaagatgttgctattaatactgtggctacaactctagccttggcagagcagcaccattgtttccagcttaaagctgtctgtctcaagtttattgctacctctcaaaatcttagagctgtgatgcaaactgacggatttgagtacttgaaggaaagctgcccatctgttctgactgagctattggagtacgttgccagatttactgagcattcagacatcatgtgcaatcataggaatgatgccctacttgatggcagtgatataaatgggaggcgggtgaagcaaaggctctagtatgtgaagaacactgcacagcattctgtacaaccctcttctactctccgttttaaaagatagcgagagcttagttagagggagaatatatatataatcttttataggatcagaggcaattcttaattttcttggcttattcatgtgtaagagatgtaaatgtaatttgtgttgttgctgttactgttctgtttaacgtgtaggtttccgcaatatcttcagtattactttttactggaaaaacatgtcttgcaagtgttgagcattacatatttttaaaa

SEQ ID NO: 11049 - DNA, 1194 bp, Glycine max
  Clone ID: 701001275_FLI
agctaagccttataaataataagagcaaaaaaaaaaaaccaaaacaacgagagagagaacatgggttcaagttcagcatccgaaagtgtttgcgttacaggagcctctggtttcatcgggtcatggcttgtcatgagactcatcgagcgtggctacacggtccgagccactgtacgcgatccagctaacatgaagaaggtgaagcatttggtggagcttccaggtgcaaagaccaaattgtctctgtggaaggctgatcttgctcaagagggaagctttgatgaagccattaaaggctgcactggagttttccacgtggcaacccccatggattttgactccaaggaccctgagaatgaagtgataaagcctacaataaacggattgctagacatcatgaaagcatgcgtgaaggccaaaactgtccgaaggcttgtattcacttcctcagcgggaactgtggatgttacggaacacccaaaccctgtcatcgatgagaactgttggagcgatgttgacttctgcacaagggtcaaaatgactggttggatgtattttgtttcaaagaccctggcggagcaagaagcgtggaaatatgccaaagagcacaacatagactttatatcagtcattccaccccttgtcgttggcccctttcttatgccaacaatgccacctagcctaatcactgctctttcactaatcacaggaaatgagtcccattaccatatcataaagcagggccagttcgtacacttagatgacctttgtcttggccatatattcgtgttcgagaatccaaaagccgaagggaggtacatatgctgttcacacgaggcaaccattcatgacattgcaaaactgcttaaccaaaaataccctgagtataatgtccttactaagttcaagaatattccagatgaattggacattattaaattttcttcgaagaagatcacagacttgggcttcaaatttaagtacagcttagaggatatgtttactggagccgttgaaacctgcagagaaaaagggcttcttcctaaacctgaagaaactacagttaataatgagcttcttcctaaacctgcagaaactacagttaatgacactatgcagaaataaatatgctttcatatcagggataagtatgtatgttgaagatctcatctatcaagtgatgattatttcttt

SEQ ID NO: 11050 - DNA, 1510 bp, Glycine max
  Clone ID: 701001311_FLI
ggcaagccccactcaaccaccacacctctcctcgttcacgctacccctttctgctcttcttctacctttcaagttttaaaagtataaagatggcagagacattcctatttacctcagagtcggtgaacgagggacaccctgacaagctctgcgaccaaatctccgatgctgtcctcgacgcttgcctcgagcaggacccagacagcaaagttgcctgcgaaacatgcaccaaaaccaacttggtcatggtcttcggagaaatcacgaccaaggccaacgttgactacgagaagatagtgcgtgacacctgcaggaacatcggcttcgtctcaaatgatgtgggactggatgccgacaactgcaaggtcctcgtcaacattgagcagcagagccctgatattgctcagggtgtacacggccaccttaccaaaaaacctgaagaaattggtgctggtgaccagggtcacatgtttggctatgccactgatgaaacccctgaattgatgccattgagccatgttcttgcaacaaaactcggtgctcgtctcaccgaggttcgcaagaacggtacctgcccttggctgaggcctgatgggaagacccaagtgaccgttgagtattacaatgacaatggtgccagggttcctattcgtgtacacaccgtgctaatctccacccaacacgacgagactgtcaccaatgacgaaattgctgctgacctcaaagagcatgtgatcaagcctgtgatcccagagaagtaccttgatgagaagaccattttccacttgaacccttcaggccgttttgtcattggtggccctcatggcgatgctggtctcaccggccgcaagatcattatcgatacttatggaggatggggtgctcatggtggtggtgctttctccgggaaggaccctaccaaggttgataggagtggtgcttacattgtgagacaggctgctaagagcattgtggcaagtggacttgccagaaggtgcattgtgcaagtgtcttatgccattggtgtgcctgagcctttgtctgtgtttgttgacacctatggcactgggaagatccatgataaggagattctcaacattgtgaaggaaaactttgatttcaggcctggtatgatctccatcaaccttgatctcaagaggggtggaaataacaggtttttgaagactgctgcctatggacactttggaagagaagaccctgacttcacatgggaagtggtcaaacccctcaagtgggagaaggcctaagtaattcattccactgctctatgctggaagttttttgagcgttgcccttataatatgtctaatatccataactttccacgtctcttactctgtgtgtttctctcctcttcctcctattttgttatttgtatgttcttttgtaattttttacgtgatcaactaaaaacatgtactctctgtttgtatgtatgccctaccaatgtgtctcttaatatcaatatcaaaaagagagtgttcaagtt

SEQ ID NO: 11051 - DNA, 1770 bp, Glycine max
  Clone ID: 701001420_FLI
cttgacttcttcttaacttccatcgtccatggcggtttcggggttgagaagcggtggtttgcctctcttccaccatcaccaccaccaccaccaccttcgcttccttcaatcccctccttcctttgccaagctcagttttcttggctccaagtcgtcgaagaaggggttcacagtcttctcccgctatgcgcaagcgcgtgaccttttctcctcgcgtagattccaagatagcatggagaagctgccgaacctggtggaggacattgtgcagacatccttaaacactggtccaaggggtgtcctgaggttggctcaaggtgttcaggccttccttggggttggtcaggagtggttaactgatgtctctaagtcagcaaattcatttgctgggttaccgactgaactgcagcttggtttactctcccccttttatttgaggaggttgtttgagcgcatgggtgcaacctatatcaaattgggtcagttcatagcatcagcgccaacgctgtttccacctgagtatgtacaagaattccaaaattgttttgatagagctcctcctgttccttttgaggaaattgaatctatattgcgcaaggaattaggaaagccattagaaagtgtttatgaatacattgacccaacacccattgcttctgcgtctatagcacaggttcatggagcaaggctaaaaggctctagggaggatgtggttataaaggtcttaaaacccggaatagaggacatattagtggcagatcttaattttgtttatgttgttgctaggatattggagttcttgagtcctgaaataagccgaacatcactggttggtattgtcaaagatatacgtgagtctatgcttgaagaagttgacttttacaaggaggctgcaaatattgaggcttttaggagatatttagaaacaatgggacttactgggaatgcaacagctccaaaagtgtatcgatactgcagtacaatgaaagttttaactatgcaaagactatatggagttcctcttactgacctagactccataagttcattagtttctaatccagaaaccagccttataactgctctcaatgtgtggtttggaagtttgcttgcatgtgaatcttttcatgcagatgtacatgcaggaaatctgtggcttctacgtgatggccgtattgggtttcttgacttcggaattgttggtcgtatatcccctaaaacatgggctgctatggaagtcttcttaggatcaattgccattgaagattatgactcaatggcatcttccttaattgaaatgggtgctacaaaccaggatgttgatgctaaggcctttgcaagagatttggaaaaagtattctcatcaattaaggaattggacactgaaatagttgtagcaactacaactggaacagccacaaatgcaactgctgttgctgctaatatagttgttgatgagaggcagatgaatgcactctttcttgatgtggttcgggttagtgaatcatatggattgaagtttcctagagaatttgctcttctcctgaaacagctcttgtactttgaccggtacacacggttgctggctcccaacttgaacatgcttcaggatcagaggatttccattgcttccaatagcagaagcagggtatagagacaatttttaaggagttggtacacaaaatctagatgtaccccatcttagttcaaaatattttatttgtatgattactttggtatataaataaaataatccatagttgtcatgtg

SEQ ID NO: 11052 - DNA, 2609 bp, Glycine max
  Clone ID: 701001442_FLI
aaatttttttgaaaaaggaaaagagagagaggaatgataatataagcgttgaagcgttcatctccgtttagattctccagtttctgtttccgattctatttctcgtcttgtgcgcgtgcatagtgaatactcgtgcttgaacgagaaattaattgttaatttcgaagttgaccagtgtggttggtgggagagcgatgccacgatctagttccgccatgcaccaccaccgtcagagctccgataacttcatgttcgacgctcacggaaggtggttacactcttcggcttacgcgcaggagctcgggactcgatcttcgagcttgaggagaaacgacgatgatcgcgttttaaccagtggcttgcttgatctgcattctttcgataccgagcttttacctgagggacaaagttttgatggctacgagtcgattctctctggcaacaaacttgtaccaaggtctcggggcttgcctgagagccatctccttaaaagtgtctcagcagataaagagagagcaaacaatgttgccaagatcaaagttgtggttcggaagagaccactaaataagaaggaaatagcaaagaaagaggaagacattatttacatagattcaaattttctcacagtgcatgaaagaaaactcaaggttgacttaacagaatatattgagaaacatgagtttgtttttgatgctgtgctgaatgaagatgtttcaaatgatgaagtgtatgctgagactgtggagccgattgttcctttgattttccaacgaacaaaagcaacctgctttgcatatggtcaaactgggagtgggaagacatataccatgcaaccattgcctctcaaagcatcccacgatattttaagattaatgcaccacacataccggaaccaaggtttccaactgtttgttagtttcttcgaaatatatggggggaaactttttgatctcctcaatgaacgaaaaaaactttgcatgagggaggatgggaaacagcaggtttgcattgttggcttgcaagaatatagagtatctaaagttgagacaatcaaggaatttattgagagaggtaattccacaagaagtactggtacaactggagcaaatgaggaatcctctcgatcgcatgctatacttcagctttgtatcaagagatcagctgatgggactgaatcaaagcctacccgacttgtgggcaaactatcttttatagatctggctggaagtgaacgtggtgcagatacgacagataatgataagcagactaggattgaaggggcagaaataaataaaagtttacttgctctgaaagaatgcattagagccctagacaatgaccaagggcatatccctttcagaggaagtaaattgactgaagttctgcgagattcttttgttggtgattcacgcactgtaatgatatcatgcatttcacctagctcaggttcatgcgagcatactcttaacacattaagatatgctgacagagttaagagcctgtcaaaagggaacacctctagaagggatcctctttcttcctcaaaccttagagactctactgtgttgcctggctcttcagttttatctcatgatgataccttggaggatgaaacaacatatgtttccagtgacaagaatcgatttggttggcccaaacagctagaaagggaaccctctcctccgaataatgtggaccgtgttccaagtggtagaatggggggaaatttgataccatctgtgtattctgatccacaaaatggtcaaagaggcagtcaaaaggccagaactgcaaatgaatatgattacctaggaccaacatatgaacaggatagaacgagaaaaacaagtaagagggtggataacaaccaattatctgccgtgggggacaagaggaagatagaatctcgtgttaaacttgtggatgaattgcattttgaggctaatcattctgatcctgacgataatttaaatgccctcctgaaggaagaggaagatctcgtaactgctcaccggagacaggtggaggaaacaatagacattgttagggaggagatgaatttacttgttggagctgaccaaccaggaaatcaactggatgattatatttccaagttgaatactattttatcactaaaggctgcaggaatctttcaattgcagacacagttggctcaatttcagagacgcttaaatgagtataatgttgtcgtaacgtctggtaattgatggtgctaatgggcaaatgattggtgtgttgtggatgaggaattctccgttctcttaggtattgcttctatgatttcattgccgtggattgtttctcaattgtgaagaattttgatgttgacaagattattgtgggttttggagtgcagaagaaataggaatcaaacccaccatctttgttctacacttgattgattgcttagacgagtcactattgtgacttgaaatgaattgaacaacatatacaaatgtatctccacttgctcagttgacatactattgttacatgtggagagtacaatgtgaagtcaactgccctgattgcttgtagtttgcaaccgaaaatctttatatatatttttttgtttgtgcaccgtcttc

SEQ ID NO: 11053 - DNA, 1330 bp, Glycine max
  Clone ID: 701001508_FLI
tctgtctcaactttccttcattttctctcttcctctcaccgagtcacgcactcggcttgactcgtacgaactccgatccccccccgagtcacactcaaccagcaccaccgcccgatccgacgatgtctcgcgcctcctccgccgcagattccgccgcctccggtgagatcatactgttcggagtcagagtcgtcgtcgattccatgaggaagagcgtcagcatgagcaacctctcacagtacgagcatcctcaagacggcagcaacaacaaagacgctctcgccgccggttacgcctccgccgacgacgccgctcctcagaactccggccgcctccgggagcgcgagcgaaagcgaggagttccgtggacggaggaagagcacaagctgtttttggttggattgcagaaggtagggaaaggtgattggagaggaatctccaaaaactacgtcaaaacgcgaacgccaacgcaggttgcgagccatgctcagaagtactttctccgacgaagcaacctcaatcgccgtcgccgtagatccagcctctttgacatcaccaccgacacggtctctgcaattccaatggagggagaacaggtccagaatcaagacacgctgtctcattcacaacaacaatcacccttgtttcctgctgaaactagcaaaatcaatgggtttccaatgatgccagtgtatcagtttgggtttggttcttctggagtgatttcagtccaaggtggcaatggaaacccaatggaagaactcactctgggacaaggaaacgtggaaaaacataatgtgccaaacaaggtctctacagtgtctgatatcatcaccccgagttcttctagttctgccgttgacccaccgacactgtccctggggctatccttttcatctgaccaaagacagacatcatcaagacattcagctttacatgccatacaatgtttcagcaatggagaaagcatcattagtgttgcttgagattatggtccttggattcacatattaattacatatactaatctttctctagtttcctgtctttttggtgggagaaagagaaagaggttgaaggaaagggtgatggattagagaaggcaagaagaagttttaagtgactgaatttgatccttctgttccttgtacagaccccggaaaaggtcctgtcctgtttcttcttgtttgcttatgttaattaatgtcatgactttagattcttgtttatttggccgtttatgtttgtagtagttgatgtaactgaaaataacaaagtactctctgtttttatctgctgataatgtattgacgttcgatatggacttcac

SEQ ID NO: 11054 - DNA, 761 bp, Glycine max
  Clone ID: 701001570_FLI
aaagaacatctcttgctcttcccactttctctctctaaagaatataatactcaaaattcatccatttttattttatttttcttaaaaaacaaagcgcgtatagtctcacgcgcccgacgatgggttttcccgtagggtacccggagctgctggttccgaaaatgttcctccacgcgctctccctcctcgcgtggctgcgctccctcgtcttcgccctcttccgcctcctccgcatctccgacctcctcgacaccgattccgccgcctctgacctccctccgccgcctccgccacgcgagccgactctctccgccctcctcatccgcgagttcctccccgtggcggcgttccgcgacctggcagccgccgacggggatcctccgccgtcgggctgcgccgtgtgcctgagcgaattctcctcggaagaagaaatccggtgtatggcgaactgcaagcacattttccaccggtggtgcgtggaccgttgggtcgatcacgatcagaagacgtgtccgctctgcagaactccgtttgtgccgcatcacaagctcgaagaatacaatcagcgactgtgggcagcttctggagtttcacagttttactaccaagacgattacacggcttctctctgattttttttttctctttctttttccacttatatatttataattatatagcactatatctttttttcatattattattatggtgggggacttgacagctagtgtagcgaaatgtatatagctaattaaaac

SEQ ID NO: 11055 - DNA, 1943 bp, Glycine max
  Clone ID: 701001844_FLI
cgataaactaacaacgtccctatttccggtttcaaattccctccggcgacacattcggattccaatatgaggacccgtttatcctcgactcgggtcatcttcgtggcctcgctctgtttcctcgcaagcttcgaattattgcaagccaaaaccatcgacccctacaaggttcttggggttgataaaaatgcaagtcagcgggaaattcagaaggcttttcacaagctatctcttcagtatcaccctgacaagaacaaagccaagggtgcacaagagaagttttctcagatcaataatgcatatgaacttttatccgatgaagagaagagaaagaattatgacttgtatggagatgagaaaggaaaccctggatttcatggtggccatcctggaggtcaggatggatatacttattttacagggggtggtcctggacaaagccattttaacttcaaaccagggggggactggcagggtatgggtggtcagggaggatctaagtcattctccttttcttttggcagctcgggcaattccaatccttttggatttggcttggatgatctttttggcagttttttcggtggtggaggtggtgggagtcagtttggtggttttggcagttcagccaagtctgggtccaagagttctgccaaaagtcttagagctgtaaattcacagatttacaagaaagaaatacaaaatgcaggaatgacttggcttttgttatcttatataccctcatcgaaggggatccaatactttgaatccactacagaggaggttgccagttcattgcagggagctttgaaggttggaagcataaactgtgaaaaggaagtctcattctgtaaggagcttggcatatatccacggagagctcctaggctttttgttttttcttataaggagaatgaaaaaggttctttggtggagtacagtggagacttggatgctaagaatttgaaggctttctgtcaagaacacttgccaaggttttcaaaacgaaccgacttgaatcatcttgatcaattcagcactactggaaagttgcctagggtgctgcttctttccaccaagaaggacactcctgtaatttggcgtgtccttagtggcttgtatcacaaacgcattactttcagtgatgcagagcttcatgatgttgctgatcctagagtgaaaacactagaagttgatgcacttccagctatagtaggttggctaccaaatggagaaaagcgtatcctgaaaactgggatatctgtgaaagatttaaaatctgcagttcttgatcttagtaacatacttgatagttttgaaaaagtaagtaaaaaggaatcatcaggtcaggccaagaaggcacaaactgactcagacgagggacgcataccattactttctaaatcaaactttgaggctctatgtggtgagaaaactccagtctgcataattggtgccttcagatcttctaaagctagagaaaagctagaatcaatcctctctttggtctctcaaaaatctttgtcaagacgaccaagtcagggatccagcagctctagggactccattttctatgttctcttagatgctgcgaagcaaaaatcatttctaaaggcatttgacaaaacagattataaatcatcaaataatttgttgattgcctacaaacctcggagagggaagtatagtgtatttatgggcgaaatgacaatagaggaggcagagaagttcattagctccgttctcagtggagatgtacccttcagagaaacaagtaggaagcctgtactagagtattagatcataaaattgggttttgcactgttttggatgcatgctcatgtacatagtcaaagagatcataaaattgggttttgcactgttttggatgcatgctcatgtacatagtcaaagagatatataaaatattttgttttgtatac

SEQ ID NO: 11056 - DNA, 888 bp, Glycine max
  Clone ID: 701001988_FLI
tgagctcggagatagggtttgcagcgaagtgcgacttctttgcggtgtacgacggccacggcggagctcaggtggcggaggcgtgcaaggagaggctgcaccggctggtggcggaggaagtggtggggagtagtgagagtcacgtggaatgggactggcggggagtgatggaagggtgttttcggaaaatggacagcgaggtcgccggtaacgcggccgtcaggatggtgggttccacagcggttgtcgccgtcgtggcggtggaggaggttatcgttgctaattgcggtgattctagggccgtgttgggaagaggaggtgaggccgtggacttgtctagtgatcataagccccacaggcccgatgagttgatgagaatcgaagaggctggtggaagggtcattaactggaatggccagcgcgtgcttggtgttcttgccacttcacgatccataggagatcagtaccttagaccttatgtaatatcaaaaccagaagtgacagtgacccagcgaagcagcaaggatgaatttctcatactagcaagtgatggattgtgggatgtgatgtcaagtgaagttgcgtgccaagttgtaaggaaatgcttccaggggcagattaggagagtgtgcgatggagttgggaatcatcaaaaccgtgctaccgaggctgcagacctcttggctgagatagcattggcaaagggaagtagagataacaccagtgtcattgtagttgagctaagaggaacagtaacaactgattgaggcctcgtttctgtcaaaacatgtatttttatttttattttcttctctaattcttgccttgctgctttggactaatatacactcaggttgtgcctcctcattgccacaagagattatatct

SEQ ID NO: 11057 - DNA, 1792 bp, Glycine max
  Clone ID: 701002071_FLI
tgagttttctgatgacaacaggtcaggtattgataggtctttgcatcggataagcgcgattcggaatcggaaaatgcaaatcattgggcttacttgtcgggtgggtcgagctgtgggtggcagtgctgaaattatacgtgatttggttgaggatggaggttctatcttggtcattggacctcctggagttggcaaaacaaccttaatcagagagattgctaggatgctggctgatgagttcaggaagcgtgttgtaatagtggatacatctaatgaaattggaggtgatggagatgttcctcatgcaggaataggcagggccaggaggatgcaagttccaaatgtgaatatgcagcataatgttatgattgaagcagttgaaaatcacatgcctgaaaccattattattgatgaaattggaacggagcttgaggcattggcagccagtactattgctcaaagaggagttcaattggttggaacggcacatggaatgaccattgaaaacataataaaaaatccttatcttcagattcttgttggtggcatagagagcgtaacccttggggatgaggaggccaggaaaagaaaagtgcagaagacaattctcgaaaggaaaggaccccctacatttcatgtgcggttgaaatgatatctaaaactgaatgccgtgttcatcatagattagatgcaactgtggatgccattttggcaggaaaacctccattatttgaaatccgtcaatgggatgattctgacaacgagttgccaaaatatgctccattgcccgaagaaaatcttggagaaacttctgacttaactaacaataatatcacgagttctgacaatgaacctagtgaggatgataaagatcacccacgtacttggtccacgaaatggagtaccagtggacctgtgatgacgaggagttcaccaatgcaagtttatacttacaagattcttgaagctgatctgctacaagtggccaaggtaatggggcttgaagatgtaatagatgtgactgatgacattggaactgctgaagcaattctagcatccagttctgagatacgacaaaacccatggatccgtggtgtggcaaagttccatcacgtacctgtatttgttatcaagtccaataccatggcacaaatggtcaaggcagtgcgcatgatccttgggctagaatcctttggccctacaccaaagaagccattaaatgaatgcttggatattgaaattgaggacgatgaaccaaaacgaaaaccatctttggaagagattgatgccttggaggaggtccggcttgcaatagagtacattgtgattcctggtggagaagctgtggaacttcttcctagacgttctgaaattattgcccggcagcttgaactcgttcaaagttatcagttggctgctgaaaagtcaggtaccgatcagaatcccaggttgcaaattcttccattgaggctaaatacaaaaaaagcctctaaatctactgttgcccgcaagaaaacaagtcctacctcaatgtctactggtgacagcggcaatggcaccagtgttaccaggcttcctattttgcctgaataattcaattctttccccaattctaacgattcacttcactggtttgtacatgtatgatgtatgtaacatgtacagtcatacaagtggtgtaaataatttattcatagcctaagagcttgtatctcaattggggtgtgacatttatgacggaagtttgatcctccgccaagctaccccttcttgtaccaaggtatatatattg

SEQ ID NO: 11058 - DNA, 1281 bp, Glycine max
  Clone ID: 701002166_FLI
cccatctgctaccaatttcaccattctcatcctccaaagttgaaccataatttcaaatccaaccaagagacaccatgtcatcaagtggaaccatttggagctatgaggaagaaaaagcatttgagaatgccatagctatgcattggattgaggaatcctcaaaagagcaatgggagaaaattgcttcagcagttcccagcaaaagcatggaagatgtgaagcaacattaccaggttctagtagaggatgtaagtgcaatagaggcaggtcacatatcattcccaaactatgctgcttctgaggaaatcacatcttcaaataaggactttcatggctcttccaaggccacaagctcagataaaagatcaaattgtaattatggacgtggtttttctgggttaggacatgactccaccactcatagtagtggtaaaggaggcttgtcaaggtcatcagaacaagaaagaagaaaaggaatcccatggactgaagaggaacacaggttatttttacttggtctagaaaagtttggaaaaggagattggagaagcatttcaaggaactttgtgatatctaggactcccactcaagtggcaagccatgcacaaaagtacttcataaggttgaattcaatgaatagagacaggaggaggtctagtatccatgatatcactagtgtgaacaatggagatgtggctaataaccaagcacctattacagggcagcatagtagcacaattccttcaaacacaatgggtgtaggacaatcccttaagcatagagttcagggtcacataccacctggtttaggcatgtatggaacaccagttggacatcctgtggctgctcctccagggcacatggcatctgcagttggcactcctgtcatgcttcctcctggaccccacccccatgctcatcctcatccaccttatgttcttcctcttgcttacccaatggcacctccaacaatgcatcaataacaactctttttttctctttcttatttgtagttaggtttttttcttctttcttattagtatggaattaaaatcctttctgtggaaattcataaatatgttgttttaaattaaattctactcttagtttaagcaaggaaattgttgaatggatccaatggtacttagtttatgtcagtatagagttagtttaaatgccaaccccttttttccaatgtagatgtaatcctaagaattgccttgtggtgtatatggagatagatatggatttaaataccaaggaaatgaatttctctttatc

SEQ ID NO: 11059 - DNA, 2439 bp, Glycine max
  Clone ID: 701002370_FLI
atattattctcctcattccttcatttttaaacctagctccatctccctccactcaccataacatggcatcagaagcaaatgctgccaacaccaacttctgtgtaaatgttagcaacaatggctacattagtgctaatgaccccttgaactggggtgcggcggcggaggctatggctgggagccacctcgacgaggtcaagcgcatgctagaggagagaccctgaccatctcgcaggtcgcggcgatcgcggcccacgaccagggggtgaaggtggagctggcggagtcctccagggccggtgttaaggccagcagtgactgggtgatggagagcatgaacaagggcactgacagctacggcgtcaccaccgggttcggtgctacctcccaccggagaaccaaacagggcggtgccttgcagaaggagctaattaggtttttgaatgctggaatatttggcaatggtacagagtccaattgcaccctaccccacacagcaaccagagcagctatgctagtgagaatcaacacactcctccaaggctactcaggaatcaggtttgaaattttggaggcaatcacaaagcttctgaacaacaacattaccccatgtttgccacttaggggaacaatcacagcatctggtgatcttgttcctttgtcctacattgctggtttgctaactggtagaccaaactccaaggctgttggaccctctggtgagattctgaatgccaaagaagcctttgaattggccaacatcggtgctgagttctttgagttgcaacctaaggaaggccttgcccttgtgaatggcactgctgttggttctggcttggcctcaattgttctatttgaagccaacatcattgctgtcttgtctgaagttatttcagcaatttttgctgaagttatgcaaggaaagcctgaattcactgaccatttgactcataaactaaagcaccaccctggtcagattgaagctgctgctattatggaacacattttggaaggaagctcttacgtgaaagctgctaagaagttgcatgagattgatcctttacaaaagcctaaacaggaccgttatgctcttaggacttcaccacaatggcttggtcctctaattgaagtgattagattctctaccaagtcaattgagagggagattaactcagtcaatgacaaccctttgattgatgtgtcaaggaacaaggcacttcatggtggtaacttccaaggaactcctattggagtctccatggataatacacgtttggctcttgcttcaattggtaaactcatgtttgctcaattctctgagcttgtcaatgattattacaacaatggtttgccttcaaatctcactgccagcagaaaccccagcttggattatggattcaagggagctgaaattgccatggcatcttattgttctgaacttcaatatttggcgaatccggtgacaagccacgtgcaaagcgcggagcaacacaaccaagatgtgaactctctggggctgatttcatcaaggaagactcatgaggctattgagatcctcaagctcatgtcctccactttcctggtcgccctttgccaagccattgacttgaggcatttggaggagaatttgaagaacacggtcaagaacgttgtgagtcaagttgctaagaggactctcaccacaggtgtcaatggagagcttcacccttcaaggttttgtgagaaggacttgctcaaggttgttgatagggagtacacatttgcatacattgatgacccctgcagtggaacataccctttgatgcaaaagctaaggcaagtgcttgtggactatgcattggccaatggagagaacgagaagaacacaaacacatcaatcttccaaaagattgcaacatttgaggaagagttgaagacccttttgcctaaggaagtggaaggtgcaagagttgcatatgagaatgaccaatgtgcaattccaaacaagatcaaggaatgcaggtcttaccccttgtacaagtttgtgagagaggagttggggacagcattgctaactggtgaaagggttatctcaccgggtgaagagtgtgacaaagtgttcactgctttgtgccaagggaagatcattgatccacttttggaatgccttggggagtggaatggggcacctcttccaatatgttagtttttcttattttctgttttcttgaagagtggtttcttttctgtacacgtgtttgtgttgatattaagcatttggtttgtctatataaggctgtggcaaatcaatccacatacaacaacttcccagttttccttgatgtatgccatgcaaggaacttgtaattcataatgtaatagaattccatttgtttgccgtagctttgcgtgcaaatatcaatacatggccttccatgtgaaggatgttttctcttgaat

SEQ ID NO: 11060 - DNA, 977 bp, Glycine max
  Clone ID: 701002419_FLI
gattcaagaacgatgcatcctaacgtgttgaacagcaccggggcataaaacatgattgcgttgatgccccggtgctgttcaacacgttagattcaagaacgatgcatccctgtattctgctgtgataactggggctgtgaacgtgctctccactgttgtatcgatctactcagtggacaaagtgggacgtcgcattctgttgctggaagctggtgtgcagatgttcttgtctcaagtggtgattgcaatcatactgggaataaaggtgacggaccattctgatgacctttcaaaaggcattgcaattctggtggttgtgatggtctgcactttcgtgtcttcctttgcatggtcttggggtcctcttgggtggcttatccccagtgagactttcccattggagactcgttccgctggtcagagtgtcaccgtttgtgttaacctgctcttcaccttcgtcattgcacaagccttcctctctatgctctgccacttcaagtttggtatcttcttgttcttctctggctgggtcctcgtcatgtctgtcttcgtgcttttcctgttgcccgagactaagaatgtccccatcgaagagatgaccgagagagtgtggaagcagcattggttctggaagaggtttatcgatgatgccgcggatgagaaagtagcccatgtctctaatggtaatggatttgatccaacctccaggttgtaaatcatttgcattgagtattttagactctagagtaagtacagtacatgcttatgtgggttagtaacaaattaagcaagttatttttttatttcccccaccccatccatgttggtggcctaggcctgcaacaacattctaatcagttaatccaacattgattatcctgttttgcaagccatataagatacagttttttccacccacccttttctttttgtaaattgtttctttgaaaggaataatatatattgatttccaattt

SEQ ID NO: 11061 - DNA, 2039 bp, Glycine max
  Clone ID: 701002452_FLI
gcaccttttcttttcactctcagtctccgatccaatatgacggaggaacggaacgtgcggaagacacgtgtggtcgacgtggtcctcgactgcgtcatcccttacatcgacgaccccaaggaccgcgacgccgtttcccaggtgtgtcgacgctggtacgagctcgactcgctcacccgcaagcacgtcaccatcgcgctctgctacaccaccaccccggctcgcctccgccgccgcttcccgcacctcgagtcgctcaagctcaagggcaagccccgagccgcaatgttcaacttgatacccgaggattggggcggacacgtcactccctgggtcaaagagatttctcagtacttcgattgcctcaagagcctccacttccgccgcatgattgtcaaggattccgatcttcagaatctcgctcgtgaccgcggtcacgtgcttcacgctctcaagcttgacaagtgctccggtttcaccaccgatggtcttttccatatcggtcgcttttgcaagagtttaagagtcttgtttttggaggaaagctcaattcttgagaaggacggagaatggctacacgagcttgctttgaataatacagttcttgagactctcaatttttacttgacagacattgctgttgtgaagattgaggaccttgaacttttagctaaaaattgccccaacttagtgtctgtgaaacttactgactgtgaaatactggatcttgtgaacttctttaagcatgcctctgcgctggaagagttttgtggaggcacctacaacgaggaaccagaaagatactctgctatatcattaccagcaaagttatgtcgattgggtttaacatatattggaaagaatgagttgcccattgtgttcatgtttgcagccgtactaaaaaattggatctcctctatgcaatgctagacacggaggatcattgtatgttaatccaaaggtgtccaaatctggaagtccttgagacaaggaatgtaattggagatagagggttagaggttcttggtcgttgttgtaagaggctaaaaaggcttaggattgaaaggggcgatgatgatcaaggaatggaggatgaagaaggtactgtgtcccatagagggctaatagccttgtcacagggctgttcagagcttgaatacatggctgtttatgtgtctgatattacaaatgcatctctggaacatattggaactcacttgaagaacctctgtgattttcgccttgtgttgcttgaccatgaagagaagataactgatttgccacttgacaatggggtgagggctctactgaggggctgtgacaagctgaggagatttgctctatatctcaggcgtggcgggttgactgatgtaggccttggttacattggacaatacagtccaaatgtgagatggatgctgcttggttatgtgggggagtctgatgcagggcttttggagttcgctaaggggtgtcctagtcttcagaaacttgaaatgagagggtgtttatttttcagtgaacgtgcacttgctgtggctgcaacacaattgacttctcttaggtacttgtgggtgcaaggttatggtgtatctccatctggacgtgatcttttggtaatggctcgacccttttggaacattgagttgattccttctagaaaggtggctacgaataccaatccagatgagactgtagttgttgagcatcctgctcatattcttgcatattattctcttgcagggcagagatcagattttccagatactgttgtgcctttggacactgccacatgcgttgatacctagaggccagagctgtgtatatataccagttttcttttgtttttcttctcccctttcatatgctgtttctatgttcctgctctatttgtagttcattttagacaattagtcttgtaataagcctgtgttttcatttgaaattctgaaacgcttcccctaacgctattggctcccttaaaaactgaacattctcaattttgtgaataaaaagcaattcttccccccttttggatc

SEQ ID NO: 11062 - DNA, 1328 bp, Glycine max
  Clone ID: 701002466_FLI
tgaactaccacatcaaatggattcggttgccttagatggacaaattactgagatagtttacaaaggcactcataaccatcccaagcctcaagctgcgaagaggaactcattgtctgcctcatcacttgcaattcctcattcaaatcatggcggcattaatgaactaccacatcaaatggattcggttgccactcctgaaaactcatcaatatcaatggaagatgatgattttgatcatactaaatcaggaggagatgagtttgataatgatgaacctgatgccaaaagatggagaatagaaggtgaaaatgagggtatgccagctatagaaagtagaacagtgagagaacccagagttgtgtttcagacaaccagtgacatcgatattctagatgatggatacaggtggaggaaatacgggcagaaagtggtcaagggaaatccaaatccaaggagttactacaagtgcacattccctggatgtccagtgaggaagcacgtagagagagcctcacaagacctaagggcagtgatcacaacctatgagggaaaacacaaccatgacgtgcctgcagcacgtggaagtggcaacaactctatgaatagatcattgccaataaccaataccacaaacaacactagtgcagcaacttctctatacactaataacaattctcttcagagtcttagaccaccagcagcaccagaaaggacatcatcacatttcaaccccaacatgcagcagagttcatcaggaagttttggattctcagggtttggaaatccattaatggggtcttacacgaatcaacaatctgacaatgttttcatcactagagccaaagaggagcctggagatgactcgtttcttgactctttcctatgctaaaagaatattttcttatgcatagttttggatggttggaattcttggaaggggttggtttaggattttacttgactaataagatacccggttcattccatttatttataacttaggtattttaatttctgtttgtcagttagagtcagagattcacctatataatttatgtaacaaaaatttgcattagaattcaacatgagttattaaggtgaaactctaattctaacagaagaataacactaaaaatactttaaaaaattacatttaagtttcatccattttttttaattttgtattgttattgtatatttccacacccacagattggtatatggtatactgtatatttaatcattgttgtatgttacaggtgtttgtaaaaacatttttttatcattattttagtaatcgtgtgacttcagttgggagctagaaactc

SEQ ID NO: 11063 - DNA, 763 bp, Glycine max
  Clone ID: 701002482_FLI
aaacacttctgcagaaatggcagccattgagaagtttcttcagctctcggattctgttccttgcaaaattcgtgccaagcggggctgtgccactcaccctagaagcattgcagagagggttagaagaactaaaattagtgagcgaatgaggaagctacaagatctggtccccaacatggataagcaaacaaacacagcagacatgttggacttggctgttgagtacattaaagaccttcaaaaccaagttgaggcactttcggacaatcgggcaaagtgtacgtgtttacacaagaagcagcaataacggaaaaggaggagggtacccgcgtcattccctgtacagcttagtaataatttggtctagaaactagcgcacctttccgataattatctagctacatcacttcttctgcgcttgtttgggagtgtggtggcaaaagttgagtttatatatgatcgatcaatatttgatgcccacatattcaaggcatggtgtacaaaattttctgatatgtaagtctatttgcctttactcttaggggccccatttacggggatgatggaggatggggtgagttggaaaattgaaattttcatttttgcatcttcaaggttcagccataacgttaaaaaaaagagagagagagagagagaatgttatgtatgggtttggtttcacattcaaggacatgggaaacatggggggaccgaagccaacatagttttgttggttatatatatacttggatgcctattgagt

SEQ ID NO: 11064 - DNA, 1876 bp, Glycine max
  Clone ID: 701002555_FLI
gttccccctcacactcaatactccacatcaattcacaacacacaattaaacaaacagtactatggatgtttggtcatggatatgtgagctccccaactcggtggagtggacagagtccgactcgccacccatgaagttcgaactcgcgagtgagaagaaggagaactcaactcgttccattcacctgaaagccgagcgaacctccggctcagactcggaagctgcggtgaccttcaccgtatgcttgcaaggctttcacccacacaacgcccacaagcctctctgggtctccgaaaagtgccacctgtcatcagaaaagcccttcctccctctcctcctgcaacttctccaagaaatcatatcccactcccccacggcgcacgatagcacctgcccccgttcccagctccagaaactgaatcccgagcccatcgcatggatcatggactcgcacacacccgaatccctctccaccttcttcaacctcgtcttcaccatgcgcctcttctggctctgcgcctgccacgcgccccccgaagccggctccctctacttccactacctcctcgcccccagcctccaaacggcgtcgtccaaactcgcctcctccgtcctccgaaccttcttcatcaccgtgggcgtcgacaccgaactctgcttcatgcgcaccctcggttacatcattacaaagcttcacatgatcaaagaactcagcgttggattgggcttaaaaacgatttttccttctcccagattctcttacgccaacgagactcacggtctttggattctcaaaggttacgcgccagtcatgaccatgaaactggcgcgaagcaataacgttaaaaaaagtcaattctctggcatcgatgccaaggagtcaattctccgttactctctggcgcaccaccaactcgaggcacacgtgcagctagaatacaccgttgggtttttcgatgctttcattcaggttcgtgcacgtgtcgataacatacgcctccacgtggcgaggttgggatttacccaaaacgacgacgtggatgatttcgttgaggagaagcactttccgtcccgggttcgggtttgggtgggcccggagatcggagcgacttattgcgctgggctgagcttgggccggtcgacggagaacaaagagagcgaagtggaaactaagagggttgtggagggcaatttggagaagtcgcagggttcgaatgtgaaagcgttagccaagtcgtcgaggaggacgcggagtaggagttggagaatggatcaagacgcggaagggaacgcggcgatattcgacgtcgttttgcatgataacactacgggccaggaaatgggctcgtggaggcccataagtgaaacgggtggtgacccgggtcatgggctgagagggcgatatgcgagggcaaatagagcgtttaataaaagcgggtcggtggttattgcaggggatgaatatggagaggaagtggggtggaggctttgcaaagagatggaagggagtgtgatgaagtggagaatagggggagagttttgggttagctatttgcccaaccaagcaaagggttcttcttttgaaactaggtacatggagtggtgtgatgaagttgatttgcctcttattcatggtaaaacaacctaagcaagcatgccagtatatatatatgaaagttgaaacccttaattctctcaccaaattacccacgcgaaaaaaaggatcggaaaaggaggagaggtttcggtaaaaatgcatgtaatagaactaaacttagcgactagcatggttagtatatgcctatatgatactgctgtttaggtgctatatatatcaatatatgtggaatagccattggtgcactatctaattaag

SEQ ID NO: 11065 - DNA, 1558 bp, Glycine max
  Clone ID: 701002748_FLI
aaagaacctgacccaggatgaggatcgcgtgagcactcctcttcagatccgcacaagcattgcatatcaaatcaagcatcctgttccttatctctgtctctgcatttcccttccttcttcttctctctctctctctaaaaccctaattctatacatggaagggaaatctcaaatctaatgactaattaattaatccatcgatcaagcatggagtccgaactcaaagacctcaattcgaagccgccgaacggcaacggcaacagcgttcgcgatgaccgtcctctgctgaagccggagcctccggtctccgccgacagcatcgccgatatggagaagaagttcgccgcttacgtccgccgcgacgtgtacggcaccatgggacgcggcgagttgcctcccaaggagaagctcttgctcggtttcgcgttggtcactcttctccccattcgagtcgttctcgccgtcaccatattgctcttttattacttaatttgtagggtttgcactctcttctctgcgcccactggcgaagaggaacaggaagattacgctcacatgagtgggtggaggagaaccattattgtttcgtgtggacgcgccctctccagactcatgcttttcattttcggcttttattggatccccgaatcgaactctgcctctcaggaagacaagagtcggcagcccgaagagttgaggagacctggcgtaataatttctaatcatgtgtcgtacttggatattttgtatcacatgtcttcctcattccctagttttgttgctaagagatcagtggctaaacttccgctagtcggtctcatcagcaagtgccttggttgtgtctatgttcagcgggaatcaaggtcatcagacttcaagggtgtttcagctgttgtcactgacagaattcgagaagctcatcagaatgagtctgctccattaatgatgttatttccagaaggtacaaccacaaatggagagttcctccttccattcaagactggtggttttttggcaaaggcaccggtacttcctgtgatattacgatatcattaccagagatttagccctgcctgggattccatatctggagtgcgccatgtgatatttctcctgtgtcagtttgtgaattatatggaggtgatccgattacctgtttaccatccttcacagcaggagatggatgatcccaaactatacgctaataatgttagaaggttgatggctactgagggtaatttgatactttctgatattgggctagctgaaaaacgaatatatcacgctgctctcaatggtaataatagcctgcctagtgttttgcatcagaaagacgaatgataatttcatggccccccgtctcaaatgaaatgtagttcccgtcgagttttagtttcaaacttagtatctgcttatgaatggacagcttgtgtgtgaggggtatttatagctaaatagtacacattcacctaaacatctgaatggtacttgtgtaattttcttgtaaataatgtgaccaataatgttttaattgctggtgaactcaattgagccacac

SEQ ID NO: 11066 - DNA, 718 bp, Glycine max
  Clone ID: 701002786_FLI
gagaaggaaagggaaaatgggtaaggatctgagcgaggaacaagtgtcttccatgaaggaagccttctctctattcgacactgacggagacggtcggatcgctccgtcggagctggggatcctgatgaggtctctgggaggtaacccgacgcaggcccaactcaaagccatcgtggctgaagagaacctcacggcccccttcgacttcccccgattcctcgatctaatggccaaacacattaaacccgaacccttcgatcgccaactccgcgacgccttcaaggtcctcgacaaggactccaccggcttcgtcgccgtctccgagctccgccacatcctcaccaacatcggcgagaagctcgagccctccgagttcgacgagtggatccgtgaagtcgacgtcggatccgacggcaagatccgctacgaggatttcatcgccagaatggtcgccaagtaacgccgattccattctctctttccagtgttattttctctctttctttcgcttttggttgtttgcttttcagtggaccaattaatagattaatcaattgtcttgtgtttactttttattttatggtgtgtggctaaccgagggtggttttaggaaacggtggctagctactcaatttgccctatttgctttgggttttatttgtattattatgagatctgattctgagctagtctatatatgcatgctgtaattcagacc

SEQ ID NO: 11067 - DNA, 2344 bp, Glycine max
  Clone ID: 701003125_FLI
atcagaagcaaatgctgccaacaccaacttctgtgtaaatgttagcaacaatggctacattagtgctaatgaccccttgaactggggtgcggcggcggaggctatggctgggagccacctcgacgaggtcaagcgcatgctagaggagtaccggaggcccgtcgtcaagctcggtggagagaccctgaccatctcgcaggtcgcggcgatcgcggcccacgaccagggggtgaaggtggagctggcggagtcctccagggccggtgttaaggccagcagtgactgggtgatggagagcatgaacaagggcactgacagctacggcgtcaccaccgggttcggtgctacctcccaccggagaaccaaacagggcgctgccttgcagaaggagctaattaggtttttgaatgctggaatatttggcaatggtacagagtccaattgcaccctaccccacacagcaaccagagcagctatgctagtgagaatcaacacactcctccaaggctactcaggaatcaggtttgaaattttggaggcaatcacaaagcttctgaacaacaacattaccccatgtttgccacttaggggaacaatcacagcatctggtgatcttgttcctttgtcctacattgctggtttgctaactggtagaccaaactccaaggctgttggaccctctggtgagattctgaatgccaaagaagcctttgaattggccaacatcggtgctgagttctttgagttgcaacctaaggaaggccttgcccttgtgaatggcactgctgttggttctggcttggcctcaattgttctatttgaagccaacatcattgctgtcttgtctgaagttatttcagcaatttttgctgaagttatgcaaggaaagcctgaattcactgaccatttgactcataaactaaagcaccaccctggtcagattgaagctgctgctattatggaacacattttggaaggaagctcttacgtgaaagctgctaagaagttgcatgagattgatcctttacaaaagcctaaacaggaccgttatgctcttaggacttcaccacaatggcttggtcctctaattgaagtgattagattctctaccaagtcaattgagagggagattaactcagtcaatgacaaccctttgattgatgtgtcaaggaacaaggcacttcatggtggtaacttccaaggaactcctattggagtctccatggataatacacgtttggctcttgcttcaattggtaaactcatgtttgctcaattctctgagcttgtcaatgattattacaacaatggtttgccttcaaatctcactgccagcagaaaccccagcttggattatggattcaagggagctgaaattgccatggcatcttattgttctgaacttcaatatttggcgaatccggtgacaagccacgtgcaaagcgcggagcaacacaaccaagatgtgaactctctggggctgatttcatcaaggaagactcatgaggctattgagatcctcaagctcatgtcctccactttcctggtcgccctttgccaagccattgacttgaggcatttggaggagaatttgaagaacacggtcaagaacgttgtgagtcaagttgctaagaggactctcaccacaggtgtcaatggagagcttcacccttcaaggttttgtgagaaggacttgctcaaggttgttgatagggagtacacatttgcatacattgatgacccctgcagtggaacataccctttgatgcaaaagctaaggcaagtgcttgtggactatgcattggccaatggagagaacgagaagaacacaaacacatcaatcttccaaaagattgcaacatttgaggaagagttgaagacccttttgcctaaggaagtggaaggtgcaagagttgcatatgagaatgaccaatgtgcaattccaaacaagatcaaggaatgcaggtcttaccccttgtacaagtttgtgagagaggagttggggacagcattgctaactggtgaaagggttatctcaccgggtgaagagtgtgacaaagtgttcactgctttgtgccaagggaagatcattgatccacttttggaatgccttggggagtggaatggggcacctcttccaatatgttagtttttcttattttctgttttcttgaagagtggtttcttttctgtacacgtgtttgtgttgatattaagcatttggtttgtctatataaggctgtggcaaatcaatccacatacaacaacttcccagttttccttgatgtatgccatgcaaggaacttgtaattcataatgtaatagaattccatttgtttgccgt

SEQ ID NO: 11068 - DNA, 2030 bp, Glycine max
  Clone ID: 701003234_FLI
gagaaatcttagccagccaaggaggaagaaagaatcatgtggtgctggcaaggagagggaggctagaaagaaagaaaaaaagaaagagctagagagagagggtaccctcttcttaattttcactgtttttgtgtctgttgcagcacttttaggagttcttctattctagtaacctctgccaaccaacaaaacaagcctgaaaataaaatagagatgctgcctccttgctggcgatcgttcgggaagaaacagtaatgctactgacatgggaaagaaggggagttggttttctgcaatcaaaagagttttcacacaccactccaaagggaaggattcagataataacaaaggcacaaaagagaagaagaaaagtctaggaaaactaaagcatggagaggccaattcattcatccccctcttcagagagccaagtagcattgagaaaatctttggggactttgaaagggagcaacaactactggggttaaggcctgccactcctccggagaggcctaaaacgccaccttatgcccctccaagagctccttctcctaggcctccctctccaagggttccttctccaaggcctccatccccaagggctgcttctccgagggcggcttctccgcgagttacctctcccaaagccacgtcttcccggattgctcatcaccacaaggaggttggccacagaccagaaccaactttgaggcaacagcaagcctcagctactaagatccagtctgtttacagaggttatatggccaggaggagttttagagctctaaagggtctggtgaggcttcaaggagtggtaaaaggacagaatgtgaagaggcagacagtgaatgccatgaaacacatgcagctgttagtgcgagttcaatgtcagattcagtctcgaaggatccagatgttggaaaaccaggcacgatatcaagctgatttcaagaatgataaggatgcagccagtatcttgggcaaactcacttctgaagcaggaaatgaagagtgggatgatagcttactgaccaaagaggaagtagaggcaagattgcagaggaaggtggaagcaatcatcaaaagagaaagagcaatggcatttgcatattcacatcagctatggaaagccactccaaaatcaactcacaccccagtgacggatacacgatcaggtggattcccttggtggtggaactggttggaaagacaaacaccagcagcaactccacaagaaagacaaagcttgaagaattttcaaatcacacctccaagaccatactcagagcaaaagactagtccaagacctggctccagcactcaaaggcagccgcagcagcagcagcctcattttgcctttgataacatggacactcccacaccaaagtccacaaaatcaaccatagtgacatcttcaaaaccggcgcgaacgcctccatttagaactcctcaggcaaacggctcaggctcaggctctagatatccgagaccaaggggtgtggggtccaattcaccctttgatgtgccattgaaggatgatgacagcctcacaagctgcccaccattttcagtgcctaactacatggctccaaccctttccgccagggccaaagtacgtgctagtagtaatccaagagaaaggcttggtggaactccaactagtactgattcaaagaggagactttcattccctttgtcacaaggaattggctctttcaagtggtccaaagggttctcaaacaaggatcaaagagtcccagataaatttcagtcacttgaatctataggaaacgtgagtgtggattcaacggtgtctttgcccgcaagggtggtgggaagaaagccttttacaagatttgtgtgatttattttgttttattcttttttttaaccattttattttgtcaatgctggtggtgttatcagttacattatgattatgatttcagtgtattggtgatagtttgatgacaggtatacccgttgtaaactaataaaaacaaaataggaaatgatggtttggtaacttc

SEQ ID NO: 11069 - DNA, 1144 bp, Glycine max
  Clone ID: 701003350_FLI
gaggtaggaggcagaggcgcggagaagacgtggttcaccctctcaaggtctctttggaggacctttatcttggaacttccaagaagctctccctctccagaaatgttatatgctccaagtgcagtggcaagggttctaagtctggtgcttcgatgaagtgtgctggttgtcaaggaactggtatgaaggtttctataagacatcttggcccatccatgattcagcagatgcagcatgcctgcaatgaatgtaagggtactggagaaactatcaatgacagagatcgctgcccacagtgcaagggagagaaggttgtgcaggagaagaaagtccttgaagttattgtagaaaaggggatgcagaatgggcagaagataacattccctggcgaagctgatgaagcgccggacacaattactggggatatcgtctttgtccttcagcagaaggaacatcccaaattcaaaagaaaggctgaagatctttttgtagagcacactttgtcccttaccgaggccttgtgtggcttccaatttgtgctgactcacttggatagccgtcagcttcttattaaatcaaatcccggggaagttgtgaagcctgattcatacaaggctataaatgatgagggaatgcccatgtatcagaggccattcatgaaggggaaactttacattcacttcactgtggagtttccagattctctaaaccctgatcaagttaaggccttggaggctgttctgccaccaaagccttcttcacaattgacagacatggagctggatgaatgtgaggaaactacactccatgatgtcaacatggaggaggagactaggaggaagcagcaacaagctcaggaggcatatgatgaggatgatgacatgcctggtggtgcacagagggtacagtgcgcccagcagtaatgactttgtgtggaagctagattcagaattgatgaaaatgatgatatgatgataatactgttgatgttccataactgtagtgtgtggcttaaagataagtagtgtttgatgaaatgattgtgagaaagtgaacagtgtatcacttgcgtttttattattgtcgaaggggtaacttccgttctgacatcctaaatactttactatatttcgttgttcttttt

SEQ ID NO: 11070 - DNA, 1825 bp, Glycine max
  Clone ID: 701003772_FLI
cttttccgtaataaacccttcaaaagcgaaagcggtttctcgtttttggaccttatctctctttctaaggttcgattctgcgtactttgggaggaacagacacacatgaaggattcgaattcggatctgtttgacccggtcatggcgatggagtccgagtggtctcgcggcggcaccacctccgatgccgatttcgccttcgccttcaacgacagcaacttctccgacagggttctccggatcgagatcatgcacgaccccgtcgacgcccgccctgattccgacgcctgcgccaccattgccgactgggcccgccaccgcaagcgccgccgcgaggatatcaaaaaggataacggtgcggatcttgcttcggtgccagacgagcaagttttgaacgggcatcaatctgaagcggatgagtgtgagaatcaagatgaagaggctgatgcaatggttgaagaaccccattctggtgatgaagctacaaatagtaatgattcagactggagcatggactgctctgcaggtgcagttgttagagttaaaacgctgcatatcagttctcctatcttggctgcaaaaagtccttttttctataagcttttctcaaatgggatgagggagtctgagcagagacatgtcaccctcagaattaacgcctctgaagaggctgctctcatggagctactgaatcttatgtacagcactaccttgaccactactacagcacctgcattgctagatgtgttgatggctgctgataaatttgaagttgcttcatgcatgagatactgtagccggttattgcggaatatgcctatgacacctgactctgcattgctttatctggagcttccttctagtgtcttaatggctgatgcagtccaaccattgactgatgctgcgaagcagtatcttgctggtcgatacaaggatataaccaagttccaggaagaggttattgccttgcccctagctggagtagaggcaatactgtctagtgatgatctccaggtcgcatcagaagatgctgtatatgattttgtgttgaaatggtctcgacagcagtacactaaactggaagacaggcgagaagtcctgggtacccggcttgcacaattaattcgcttcccttacatgacctgccgaaagcttaagaaggtcttgacctgttctgactttgaccatgaagttgcatccaagcttgtacttgagggcctatttttcaaggccgaggctccacaccgccaacggtcgctggcagcagaagatactgcatcttcaaaccgtcgttttgtggagagagcatacaagtaccgcccagtgaaggtggtagaatttgaacttccccggcagcagtgtgtggtgtacttggatctgaagcgggaggagtgtaacaacctcttcccatccgggcgggtttattcccaggcgttccatttgggtggacaaggtttcttcctatcagcacattgcaacatggaccaacaaagctctttccattgctttgggctgtttttgggaatgcaggaaaagggctcagtgagctttgccgtcgactatgagtttgctgcgaggtctaggccgacagaggaatttgttagcaagtacaaaggcaactacgtgttcactgggggaaaggccgttggctatagaaacttgtttgccattccatggacttcgttcatggctgaggatagtctttactttatcaatggtgtccttcaccttagagctgagctcaccatcaaacactgacccccatttctagttgtaaactttctatctattccggttggtagccttgaccttttttttagatctc

SEQ ID NO: 11071 - DNA, 1999 bp, Glycine max
  Clone ID: 701004047_FLI
atcccaatattttctgcgcgaattttgctagaaaccgttagtgggtatcctcaaaatactagattttcgattcgtttggtgaacggatttttaggtgtgattattacgtttttttttttgttcaacaagctatggaggtttcggtgattggaagctcacaagcgaagctgggcgcgtctgaattggcttctagggaagttggattttgtaatctgaagaacaatttaagggttttgaatgatagagttagttttggtaggaataatatacggtgggagaaggctgggattagtttcactttgagggctcttcagactgaacctgttagagaggagaagaagccttctgggattggaacaagatccaaaacggtagatggtgtaagattatttgtggggcttcccctagatgcagtttcttatgactgcaagtcaataaaccatgctagagcaattgcagctggcctaaaagctttgaagctcttaggagttgaaggtgttgagctccctatttggtggggaattgttgagaaagatgccatgggacaatatgactggtcaggctatcttgctattgctgagatggtccagaaagttggtctcaagctccatgtttctctttgctttcatgggtctaagaaaccaaatatccctctacctaaatgggtatcccaaattggtgaatctcaacccagcattttcttcacagataagtcaggacagcattataaagaatgcttgtccctggcagttgataatcttcctgttcttgatgggaagactccagtccaagtgtaccagagtttctgtgagagcttcaagtcttcattctctccattcatgggctctacgatcatgagcatttccatgggtttaggaccggatggtgagctacgttatccatctcacccccagctgctgagtaatggaaaaactcaaggtgctggggaattccagtgttatgaccaaaacatgctcagctttctcaagcaacatgctgaagcatctggaaatcctctgtgggggcttggtggtcctcatgatgcacctacctatgaccagcccccatacaatggcttcttcaatgatggggcttcttgggagtccacatatggggacttcttcctctcttggtattccaatcagctcatagctcatggagattgcctcctttcattggcatcttcaacttttggtgactctggggtgacaatctatggaaaactcccacttatgcactcttggtatgggactcgatcccatccttcagagctaactgcagggttctataacacagctaacaaggatggctatgaaccagttgcacagatgtttgctcggaactcgtgcaaaattatattacccggcatggacctttcggatgcaaaccaaccagaggaaaaccattcaagccctgagttgctacttgcacaagttatggcagcttgcaaaaagtatgaggtgaaggtttcaggtcaaaattcttctgagtctggtgttccaggtggttttgaacaaataaagaagaatctatctggagataatgtattggatttgttcacatatcatagaatgggagcatctttcttttctccagagcattttcctttgttcaccgagtttgtccggagccttaagcaacctgaactgcattcagatgatctaccggccaaggaggaagaaggcgccgaatctgccatggatatgagccatgaatcaagtgtgagcatgcaagcagcctaatggttgtaaattcgtaatgtatgataatcatgtagataacaattagttatacccttggatcagtgcatgggatgagattgagaacaggttattttgtaagcacaatatgagaatcttttttgccggtttatcctcaagcatagaccttttagttatttcttataatgtagccagttgggtggcagattacctttttgtcatttgtgctcatgtggtgtacattccagccaatattacataataattgtgaaagttat

SEQ ID NO: 11072 - DNA, 1403 bp, Glycine max
  Clone ID: 701004377_FLI
gttttacattgggctcagacaaaagagggcaactggacaggaatattctgaactcttgcaagagttcatgactgctgtcaagcaaaactatggagaaaaagttcttattcagtttgaagattttgcaaaccacaatgcttttgaattgcttgcaaaatatggcacaactcatcttgttttcaacgatgatattcaggggactgcatctgtcgttcttgctggggtcgtggcagccttgaagctcattggcggtaatctggctgaccacacattcttgttccttggggctggagaggctggaactggaatagcagaactaatagctcttgagatgtcaaagcagacaaagacacctatagaggagactcgcaagaagatatggcttgtagactcaaagggtttgattgttggttcaagaaaggcttcacttcaacacttcaagcagccttgggctcatgagcatgagcctgttggcagtctcctagaagctgttaaggtaatcaagcctacagttttgattggatcatcaggagtgggaaaaacatttacaaaggaagtaattgaggctgtgacttctatcaatgaaaaacctcttgttttggccctctccaatccaacttcacagtctgagtgtacagctgaagaggcttacgaatggagtgagggtcgtgcgattttcgctagtggaagtccatttgatcctgtagaatacaagggcaaagtgtactattctggccaggccaacaatgcatacatcttccccggctttggtcttgggttggtaatctcaggagcaatcagagtgcatgacgatatgcttctagcagcttcggaagccttggctaaactggtgaccgaggagaactacgaaaagggcttgatttatccaccattctctaacatcagaaaaatttcagctaacatagctgcaagtgtagctgccaaggcatatgagctaggcttggctacacgtctccctcgtcctcagaatcttgtgaagtatgctgagagctgcatgtatacccctgtctaccgaaactataggtgaattatggggcaagtcacttaactttggctgtaataaacatatgttttggtggcatatgtgagttgttttatgtaacttacgcataagtgagagtggtcttatgctttttattacgaaatcaccaaaactgcaggtgaatcatgctttttgttatggggcaaatcactgttagctttggctgtaataagcatataatgctttgtattatgaaatcttagttcaattcatctcatgtcatgccgatggctggctcaataaaccttgccataggaacagtatggcttgtggtaccatgcattggtttttaacaactaattcatgtaattaatataagaatgaccagcatattgcattt

SEQ ID NO: 11073 - DNA, 2601 bp, Glycine max
  Clone ID: 701004427_FLI
caagccttcgcaaagaagtagaagaactgcacattccattgcagcagatccaaaccttcgctttcaccatggccgaatttctggatctcgaatcccaagacggcgttcgaatgccgtggaacgtgatccccggtacgaagcaggacgcccaaaacgccgtcgtccccatctccgccgtctacactccgataaagcacttcccctcgatgccggtcctcaactactcccctctccggtgccgcacgtgccgctccgtcctcaaccccttctgcatcgtcgacttcgccgccaagatctggatctgccccttctgcttccagcgcaaccacttcccccctcactactcctccatctccgacgactccctccccgccgagctcttcccgcagtacaccaccgtcgagtacaactccgacgccgccgtgggccccacttataataacccctccgtaccccctgttttcctctttgtcgtcgacacgtgcgtcatcgaagaggagatcgggttcctgcgctccgcgctcgcgcaggcggttgagcttttgcccgagaactcgctcgttggactcattacgtttggaacgtttgttcatgttcacgaattagggtttggtgcggtgccgaagacttatgttttcaagggatctaaggatttgacgaaggaccagctgctcgagcagatgagttttttcgcgaagaagccgcgcccggcggtcggcgtggtggctggcgcgagggacgggctctccccggaaagtatttcgaggttcctcgtgccggcgtcggagtgcgagttcactatcaattcggtattggaggagctgcagaaggatccttgggcggtgccggcggatcagcgtgctgctcggtgcaccagcacggcactgagtatcgcggcgggtttgttgggggcatgtgtccctggctctgctgcgagaataatggcatttattggaggaccggctactgaaggacctgctcctattgtatccaaacaactttctgaaccaattcgctctcacaaggatctggataaagattctgtgccacattaccataaatgtgtgaaattctatgatggactttcgaagcagcttgtgcatcaaggtcatgtactagatctttttgcttgtgctcttgatcaggttggaattgctgaacttaaaactgctgttgaaagaaccggaggtcttgttgtacttgctgaaagttttggccattcagtgttcaaggattcactaaagcgtattttccaatcgggtgattatgatttgggcctatcttcaaatggaatatttgagataaactgctctaaggacttgaaagtccaaggtattattggcccttgtgcatctcttgaaaagaaaggcccattatgctcagatgttgctattggtcaagggggtacaagtgcatggaaaatgtgtggccttgacaaatccacatcattgtgtctattttttgacgttgtgaggaaggaaactcctgatgcaacaatccagtccacaagcaatcaattttacttccaattcttgacttaatgttttgcttcagttatcagaataacggtgggcaaatgagattacgggttacgaccctttcacgtagatgggttgctggacctgaaagtatacaggacttgattgctggatttgaccaagaagcagctgctatagtcatggcacgccaagtctccttcaaaatggaaacagaggccgaatttgatcctatcagatggttggacaaggcattgataaatttgtgttctcggtttggggaatttcaaaaagacactccatcttctttcagtttgtctcccaggttgtcaatattccctcaatttatgtttcatttacgacgctctcagtttgttcaggtctttaacaacagcccagatgagactgcttactttagaatgatactaaaccgtgaaaatgttgcgaattctgttgtcatggttcagccttcgttgatttcttattcattccatgctggtcctgaaccagctcttcttgatgttgcagccattgcggctgataagatcctgcttttggattcatttttcacagttgtcatttttcatggttcaaccattgctcagtggcgtaaggctggatatcataatgaaccagaacatcaggcatttgctcaattgctacgagctcctcatgatgatgctgatttaattataaaggagagatttcctgtacctcgcctggttgtttgtgatcagcatggctctcaggctcgatttttactggcaaagttaaacccttctgctacttataacactgaatcttacaatcccggaggggatattatctttacggatgatgttagctttgatgtcttcctggatcacttacagagattagtagttcaataaaattatattgaccttagactttttatgtaaaattttccttcaattgctgcctgcttgtacattaccttcattttagtacgctgttataatttccaattttgtgcaaaatgttgtaattatttggaatcgtgcactctccaatcgattacatgagtattgaatctattttcctttgtgtagctttttattcagatttaaaactttacacaggtgtc

SEQ ID NO: 11074 - DNA, 318 bp, Glycine max
  Clone ID: 701004493_FLI
gtaatatattatgcaaaaaataattaaggtcttttcctttaaatgggctggttcaatgaaccgagaccactgcaggttcatggggatgggaggattaagaggctatgttttttaatcttccgatgttactgttgttttttttttaatttcaataaggatattatatatgtagtactatgcaagtagcttagagttgggtagaagggcatgttcatggtgttaattatgttatgtatgcgtgtgagtgctgttatgatggcagtgacaatgcttatgatattcatactcataaagctaggttgttctttctaaataaat

SEQ ID NO: 11075 - DNA, 2064 bp, Glycine max
  Clone ID: 701004695_FLI
agcacacacagcatagtaccatggatgcgctgcgcgtcgcccccaccaccccgcctctcctccgccgccaccctctccgcaaaatggcgccccatcccctcaccgcgcgtccccgccgcgcgcccctcatcgtcgccacgctttccatgccgccggaggccactcactcctccgccgtcgccatcgtcgaagatccctcggaggcggctcctcctccgcgcccccgcgtctcgccggattccctccagtacccgcccggcttcgtcggcgcgattcccgccagctctcgctcagacggcggcgacggcgacggtatgaataatgccatgacttatttgacgaacattctctcttcgaaggtatatgacgtggcgattgagtcccctctgcaattggcgccaaagctctctgcgagactcggggttaaggtttggctcaagagagaggatttgcaacccgttttctcatttaagcttcgtggagcttataatatgatggcaaagcttccgacggaattgttggaaaagggggttatctgctcgtctgctgggaaccatgctcaaggagttgcattggctgccaagaggttgaattgcagtgcggtgattgctatgcctgtcaccactccagaaataaagtggaaatccgtggaggctctgggtgctacagttgtgctcgtgggggattcatatgatgaagcacaagcatatgctaagaagcggggggtagaggagggtaggacattcatacctccttttgatcatcctgatgtcatcatgggtcagggaacaattggcatggaaattgtccgccaaatgcaaggtccaatttatgcaatctttgtgcctgtgggaggtggtggtctcattgctggtattgctgcttatgtgaagagggttaacccagaggtgaagatttttggggttgagcccactgatgcaaatgcaatggcgttgtcactccaccatgaccagagagtgattttggaccaggttgggggatttgcagatggcgtagctgttaaagaggtcggtgaagaaactttccgcatatgcaaggagttgatagatggcattgttcttgtaagccgtgattcaatttgtgcgtcaataaaagatatgttcgaggagaaaaggaacatattagaaccagcaggagcacttgcactagctggagctgaggcatactgcaagcatcatgggatccaggggaaaaatattgtagcaataaccagtggagcaaacatgaattttgataaacttcgggttgtaactgaacttgctaatgttggtcgtaaacaagaggctgtgctggcaactgttatggcagaggagcctggcagtttcaaacaattttgtgaattggtggggcagatgaacataacagaattcaaatacagatataactcaaatgagaaggcagttgtcctttacagtgttggggttcacacaatctccgaactaagagcaatgcaggagaggatggaatcttctcagctcaaaacttacaatctcacagaaagtgacttggtgaaagaccacttgcgttacttgatgggaggccgatcaaacgttcagaatgaggttctttgtcgtctcacctttccagaaagacctggtgctttgatgaaatttttggactccttcagtccacgttggaatattagtttattccattaccgaggggagggtgaaactggagcaaacgtgctagttggattacaggtacccaaaagtgagatagatgagttccatgatcgtgctaacaaacttggatatgattataaagtggtgaataatgatgatgacttccagcttctaatgcactgatgggggttttaggcacttgtcattattgtgtattttagtggacaagattatcatatttaatatttccactgtcgcttcaaaaggttagatgtcattagttgattagaggaacaactagtgctttttacctagtgaggtgtcttatcacatttttataatcggtagtttatgttttttttttttttttgggaagcattggaatcttatatgttgttgcctggtcttttgtgtctgt

SEQ ID NO: 11076 - DNA, 1803 bp, Glycine max
  Clone ID: 701004846_FLI
aaaattaatgcccctttcattttctctgcatctgtagtatctatcaccaatcaattccactcttcttcccatcaaacaacaaaaaatcaatctgggaaacaaaaacaaaatgccgtcattagaggaggaactcttcccatcaaccccaggaaagttcaagatcgagcggtcccaccacatgaaccgccaactctatcgctgtttcgcctccaccagcaccatgttcctgtgggccctcttcttaatcgccctcaccgcttcctatctcagcttccaaggcttcgtcgattccggcagccgctacctcaccgcctcctggggcgggatccagtgggagaagcaggtccgcacctccgcccagatccaccgtcaaggcggcatgtccgtcctcgtcaccggcgcagccggcttcgtcggctcccacgtctccctcgccttaaaacgacgcggagacggcgtcgtcggactcgacaacttcaacgactactacgatccgtccctcaaaaaagcccgcaagtccctcctcgccacgcacgacgtcttcatcgtcgaaggcgatgtcaacgacgcgaaactcttggcgaagctcttcgatgtggttgctttcactcacgtgatgcacctcgcggcgcaggctggggttcgctacgccatggagaatccccactcgtacgtccacagcaacatcgcgggcctcgtcacgcttctcgaggcctgcaaaaccgcgaaccctcagcccgctatcgtctgggcctcgtccagctccgtctacgggctcaacgagaaggttcccttttccgaatcggaccagaccgaccagcccgctagtctctacgccgcaacgaaaaaggccggtgaggaaatcactcacacctacaatcacatctacggtttatccatcaccggtttgagattcttcaccgtgtacggaccctgggggagacccgacatggcttatttctctttcaccaggaacatcttacaagggaaacctattaccgtttaccgcggtaaaaaccatgtcgacctggctagggatttcacctacattgatgatattgtgaagggttgcgtcgggtcgttggatacttcggctaagagtaccgggtcgggtgggaagaagcgtggacccgctccgtatagaatatttaacctggggaatacttcgccggttactgttcctactcttgtgagtatattggagcggcatttgaaggtgaaggcgaagaggaatattgtggacatgcctggaaacggtgacgttccttttactcacgcgaatattagttcggcccggagagagctcgggtacaagcccacgaccgatttgcaaaccgggttgaagaagttcgtcaagtggtatctttcctattacggctacaatcacggcaaacctgtaaattaataaattttgttttgtttcctttttattcgggaagggttttttttttctttttcttttttagtgtggtaggttttaagtcacagatagaaaaaaagaagaagaaagaacctggtcaagaagaagaagggaaactggattaaaaggaagaaagaaaagaggggaaaaaaaagagaaaagaaaagaaaagaagagaaggagaagatttacattctttacttgggaggccagctaaaacagctgttgttccttcgttgatttcttttcttttttggtattaattggtgttttttgtattttattttttacattttcttattctgtaaagaaagaaagttcgagttcaacctcgatttatttagttgttgtttatatttaaatttaaatgtttactttgtcct

SEQ ID NO: 11077 - DNA, 1932 bp, Glycine max
  Clone ID: 701005244_FLI
ttcactttgtatttgtaataccatttccttgcgcggcactgcttcccgccgccgccgccgtcagcgtcagcaccaatggcagacgcatcttctccgccgacggatcaactcgccgccatcaccctcgacgaggttcccaaagctaatttctccgaccgcgtcctcatccgatccatcatctcccgcaccgacggcggctcgggcctcgccggcaggaaggcgcgcgtcggcggctgggtgaagacgggacgcaaagccgacaaggacgctttcgcgttcctggaaatcaacgacggaagctgcgccggcaacctccaggtcatcgtcgaagccgcgctgggcgaactcggccaactcgttcccaccggaacatgcgtcgtcgtcgacggccacctcaaactccctcccgctggcaccagacagaagatcgaactccgcgccgataaggtcctccacgtcggtcccgtcgatcccgccaagtatcctctgcccaaaatgagactcactctcgagttcctcagagatttcgttcaccttcgttccagaaccaacacgatatctgcggtggctagaattagaaatgctcttgcgtatgctacacatacatttttcaacaaggaagggtttctatacgtgcacacgcccattgttaccacaagtgattgcgagggtgcgggtgagatgtttcaggtgaccactttgctgagtgaggcggagagattggagaaggagttgttgcagaatccacctccgtcggaagcggatgtggaggcggctagggttgttgttcaggagaaaggggaggttgtgtctcagttgaaagctgccaaggcgagtaagcaggagattggtgctgctgtggatcagcttaagaaggcgaaggagagtttggctaaggtggaggagtggtctaagcttaagcctgggattcctaaaaaggatgatggaaaggtggattatggtaaagatttctttgcacgtcaagcgtttttgacggtttcaggtcagcttcaagtcgagtcttatgcttgtgctctgagtagtgtgtatacctttggccccacatttcgcgcggagaattctcacacttccaggcatttggccgagttttggatggttgaacctgagattgcttttgcagagttgaaggatgatatgaactgtgccgaggcatatgtgaaatttatgtgtcagtggttacttgacaactgccttgaggatatggagtttatggctgataagtttgataaaggttgcattgaccgtttgaaattggttgcttccactccctttattcgagttacatatacagaagcagtggaaatactagaagatgctgtgaagaatggtaagaaatttgaaaatgaagtgaaatggggaattgacttagcatctgagcatgaaagatacctaacagaggtaaagtttcagaagcccgtcattgtatataactatccaaaagatatcaaagcattctacatgcggctcaatgatgacttaaagacagtggctgctatggatgtgcttgtacccaaggttggagagctaattggtggaagccaaagggaagaacgttatgatgtcatccagacaagaataaaggagatgggtttgcctgttgagccatatgagtggtaccttgatctgaggcggtatggaacagtgaaacatgccggatttggccttggctttgaaaggatgattctctttgccactggcctggaaaatattagagatgtgattcccttcccacgatatcctggcagagcagatctatgattacaagtggtttttacgaatctattgcaccaagtagttaagttgacaatggaaatgtagtatttaaatatagcatatttttttttgtgtgtgatggcaacaccaatagtagccttattggggattcctctttgccaaactaatttattttgg

SEQ ID NO: 11078 - DNA, 809 bp, Glycine max
  Clone ID: 701005317_FLI
ctcccctctctctctcaattgagacttattcatttcgtgttctctgcgaattagcatgttccgttcatcgttccgccgcgcgttttcggcgagggcgtcgaagcactgcgagaaccacgagttcctctctcggaactcgttcctggggagctgggaggcgccacgggacccgaaggaggcggaggcgaagctggcgcggctgcgaagggaatacgcgaagcaagtgaaggaggttcggaaggaatacataagagagatggaagcgatgaagattgagaaggagcgcaaagacgaggctcacagggaagccctcagagtcgccaacgaagagcgcaagaagctcaaggctcaagccgcgcagcttagagcacaggaacgcgacatcgaacgacaacagtttcgagaaaccctattaaaagaaagagcagagaaacttgaaaactggaggatgaaagtcaaaatgcttgaagggaagaaggctgagaagaaagagtttctgcgccgacaaagttcggcgtggattgaagaaggcaatcttgagaaaaaagttgtggaagctatggctgaaataatgcatctttgagctccttgcagttctacatttgtattggttgaggtctgtgttatctggttagtagaatttggtcttatgtttgaagcagcctcgtaaaaatagttcttgcatttagagaatcacattcctgctttagcccatagaatactttgggtgtattcactgttttgcttttgggatcaagttttttttacttggcatgagaatattaaaaaagaagatatttgaatcaagt

SEQ ID NO: 11079 - DNA, 659 bp, Glycine max
  Clone ID: 701005509_FLI
attcctctctcattctcactataaacacaaaacccttcccatcctaattaaggtgaaaatgaaggcatcacccattgcttggttcactttggtggttgtgtttcttgtggctgaagttcaagtttcaatggcagtgacatgcagcccagtgcagctgagtgcatgtgtaagtgcaataacctcttcaacccctccatcaaacctatgctgctccaagatcaaagaacagaaaccatgcctctgccaatacctcaagaaccccaatctcaagaagtttgttgactctcctaatgcaaggagagttgctagcacttgtggaactcccttcccaaggtgctaagtgttaataaattggaagaggttttaatttctctgcctgattatgcatcttgatatctatccaagtgtttggccagagactagagagtgaaagaaaattatgtgttaattgttatcatatatatatatatatggtgtggtttaaggtctctatatatgttttaatgttagtgagattaagtattagtcctaatggatatgtgatgctttggtttcatgtcattccatttcagttccttggtgtggtctcatctcacgtaacgttaattagttgttgcaaaaggctgtatttataattcaaagaagtatctgtttctgat

SEQ ID NO: 11080 - DNA, 783 bp, Glycine max
  Clone ID: 701006002_FLI
ggctgaggaggtttgatcccgtcacgttcggtggtggccgccgtcaccatggaaaacgacaccgtcgcagcagaggaagccagacagaaacttctgcttcatcattttaagagggttccataacttccattcatccttgatttagtttcactacctggggtttatattttctaattttaactttggtgtatagagaggaggagcatacaattctattcttgaatatgatgatagttttgatatggtggttattgctggtggtggggtatgtgtatagttcatacctgtaggttctcccaggtaatttgtttttgttattcatgtcttatggtttacaaattgaatccgttgatttttgtagttagaccacacctcagtgtttcaataaattatttagcatcagttatctatggaatgttaggtatgaattatttcttttaactgctaatcatcaagtatataaaatgttggtgcaacctaattttttttaattttctctcgtccacaattgtccaatatacacacacctgtctgatagtttatgtggtcatatttgtatgttggacttggacatgacagttatttataatcaatcttaatgagaatccaaggtcaagctgaagaatgaagtgttgctgcaggtcctccacttaattttgaccagtttatgtcttcacttttttttcttccatgtgttttggtacttttgtaacgttctggtgtattatgatggattgaattcggtagttgagattatggaaacattaaggctggtttttgttg

SEQ ID NO: 11081 - DNA, 1556 bp, Glycine max
  Clone ID: 701006018_FLI
atttgatggcgatttccacaatcctacatttcctgctggaacaagagttcccagacaaccttggcatgatttgcactgtagaatagatggacctgctgcatatgatgttcttattaattttgagcagcgatggagaaaagcaactaagtggaaagagtttgcaatccttttcaaaaaaacctctcaatggcatgatgatgctttaataagaatagaacgcatctcatggatattaagtccttctggtgctgctaccttaaaggataaatcggattattatactgttccagaggatgaccctttagtgtgggtttctagtgaagacgatcctgaaaactggcatgttcagatcttccgatccattgactcaggatccctgaaaggatttcccaaacgtgttgatattgctctgtcccagaatcttatctgtgctaaaaatttggttatagacaaaagcattcaaacagcatacattcaagcgatcagatctgctcaacattttatttatattgaaaaccaatacttcattggatcatcgtatgcatggccagcttataaagatgcaggggctgataatctcatcccaatggaattggcactgaaaattgctagtaaaatcagagctaaggagagatttgctgtctatattattttaccaatgtggccagaaggtgatcctaaaactggggccatgcaagaaatcctcttttggcagggccagacgatgcaaatgatgtatgatgttgttgctagagaattgaaatcaatgcaacttactgatgtgcacccgcaagagtacctcaatttctattgccttggtaatcgagaacactttaatgaagatagttcaagcacaaatggtgcacaggtctcaacggcatataaatatcgccgttttatgatttatgtgcatgctaaagggatgatcgttgatgatgagtatgttataattggatctgctaatataaaccaaagatctatggctggtactaaagatactgagatagctatgggtgcatatcaaccccattacacgtggtcagcaaagaaaagacatccacatggccagatttatggttacagaatgtcactttggggagagcatcttggcatgttagatgaaacttttgaagaaccagggagattggagtgtgtggaaaaagtgaatgagattgccgaaaacaattggaaattattcgcttctgaagatttttcacttttgcagggacatcttctcaagtatcctgtacaggtagattccgatgggaagattagatccctaccagactgtgaaaatttcccggatgctgggggtaagatattgggagctcactcgacaacaattcccgatatcctaacaacttaaactcctgaattcatgttgttgaagatttataaagattgtgtgatgtgttgcctgccccttcctgagaaagaggacaaaaagaagttggggtgaagttatgtagctttctgtacttaaaaatgattgttcggatcacttgtaaatctttcacacggtattgattcatattttgaaaggatcaccagtttat

SEQ ID NO: 11082 - DNA, 1465 bp, Glycine max
  Clone ID: 701006048_FLI
ctcactttctctctcttgtcttcaaatctcaattctattttggaaaatcagaatcaaagacagttaaaaatacagaacaaacatctcactcaacatcaacacttcagatctacgtttccactctcacaacaacgaaaaaggaaagaaaaaccgattctacagcgacaacaaggaacgaaagaacgatcgatttctcgaagcgccctcaaaatggcgcgtgcacccttcacttctttccccttcgtcctcattatccttctgtcaatcgtccacctttcgcactgcaagaccctcaaacgtgacgttaaggctttgaacgagatcaaggcttcgcttgggtggagagtggtgtatgcgtgggtcggtgatgacccttgtggagatggggatcttcctccttggtctggtgtcacgtgttccactgtcggtgattatcgtgttgttaccgagcttgaggtgtatgcggtgtcgattgttggaccttttcccactgctgttaccagcttgttggatcttacacggcttgatcttcacaataacaagttgacagggcctattcctcctcaaattggacggttgaagcgtcttaaaatactaaatttgaggtggaacaaactacaggatgcaattcctccagaaattggtgagcttaaaagtttgacgcatctgtacctaagcttcaacaatttcaagggagaaattcccaaggagctagcaaatcttccagaccttcgctatctatatctccatgaaaaccgtttagctggaagaataccaccggaattgggcacactgcaaaatcttcggcacttggatgctggtaacaatcatttagtgggtaccataagggaactcattcgtattgaaggttgctttcctgcactacgcaatctgtatctaaacaataattattttactggaggaatacctgcacaacttgctaacctaaccagtcttgagatcttgtacttgtcctacaacaaaatgtctggagttataccatccactgttgctcatattcctaaattgacatacttgtacttggatcacaatcagttttcagggagaattcctgaacccttttacaagcatccatttttgaaagaaatgtacattgagggaaatgcattccggcctggtgtcaaccccattggtttccacaaagtgcttgaagtttctgatggagacttcctcgtttaatgaggctctaaatatttatatatatttttttcttcaggaggtgtacttgtataattattgaaacaatcgttcctctaattatctcaatgaaatagctaaataggtaattcaattttgtctaaatctatcttgtcagagtaaacagttgttttaagtttgctattttaagagctttccacgctccaaacagttgtattattgatagtcttgaactcttgatatcagcttcaaaaattgaggaatgatattacatattttttcagtg

SEQ ID NO: 11083 - DNA, 871 bp, Glycine max
  Clone ID: 701006112_FLI
gatttttcttctccctttgaaaccctagcgtagctcttatacctttcacatctttcatccttttcatatctcatcgtgctaaatctcataacatgacttacctttttttggatatgtaaaccaaaatcttcaatcattgagatcaatatgaacatcaacttgcgcttgatcgagagattctaaagatgaagattcaagaaattaaaggtgtggaagcaacaaaggaagatgaaactaactttgctttgtgggaggcaattagagatatggatgcaaacaagcaccagaagcatgatgagggattagattgtctaccagacgaacttcttcaagagattaaattctatatgtatgattaaattctacaaatttaggtttggatgcattaattttgtacattgtggttttcgtggttcataaagattaaaacaagttaggttttgatcatataaacttagagttagttttggacagaagttttaatggtctgcgtcattgaaataaaagtttaaggcctagtgaaattgtattataaatctccgccaccactgccaactttagtgttcattaattcaatatcattggaggaatcgaacgtgcgaacctcgaggcccgacctggtatggcccctagtgggactcgaccatggaaaatctgtgatctctagaaacctcactggagctgacaacaacactaagggtggagggtgaacaaggtgaagcggcatggccaacaaaagggacgagccacacaatgcacatcaaaggcagatttattcgttcaacccaaggtttaactatgaattttttaactgcaacaatttaagtgtatcctattggagttaaaattacccattgttggaattggactt

SEQ ID NO: 11084 - DNA, 1486 bp, Glycine max
  Clone ID: 701006212_FLI
gtggtctgcaactatgagcaaggattatctaatcatactttctctccttctttccacggtgcttgcaactgcaagttcttcttcttcttcttcctccctctatcttgggaagggcttctcccatcgcaaattgtctcccagttatcacattcacaaaaccattgacgaatcctatgcagttatcttcgatgctggtagcacgggaagccgtgtacatgtctatcgttttaaccaacaattagatctccttcgcattggccaagaccttgagttgtttgtcaagactatgccaggtttaagtgcttacgctgagaatccacaagatgctgcagaatctcttattccacttttggaggaagcagaagctgctgttcctcaggagtttcaccccaggacgccagttaaacttggagcaactgcaggtttaaggcaattggaaggggatgcttctgataggatattgcaggcggtcagtgacatgctcaagaacagaagcacactgaacgttggggccgatgcagtttcagtgttgagtggaaaccaagaaggagcttatcaatgggtaacaattaactatctactgggaaacttgggaaagcattattcagaaactgttgcagtagttgatcttggaggtggatctgttcaaatggcttatgcagtctcagagacagatgctgcgaaggctccacgagcaccggacggagtggaatcatacataacggagatgttccttaggggaaagaaatattacctctatgtacacagttacttgcgatacggtatgctagcagctcgtgcagaggctttaaaggttcgtgattctgaaaatccttgtattttggctggctttgatgggtattacgtatatggaggagtgcagtataaggccaaagctcccccttctggctcaagcttcagccaatgccaaaatgttgttgttgaagcactccatgttaatgcaacatgctcttacaaggattgcactttcggagggatatggaatggtggtgggggagctggagaaaacaacttttttattgcctcatttttctttgaagttgccgatgaggctggttttgttgatccaaacgcccccaatgccaaagttcgtcctgtggattttgagaatgcagcaaaggttgcctgtaacacagaattaaaggatctcaaatccattttccctcgtgttaaggatggagacgttccttatatatgcttagatcttgtatacgaatatacattgctcgttgatggatttggcatagatccgcagcaagagattacgttggtgaggcaagttgagtatcaagattctctcgtggaagcagcatggccactaggcagtgccatagaagccatatcatcattacctaaatttgagaaattaatgtatttcatttaagctttaaaacgaggagccatatgtatgtgtggaatgaactccatcactcttaaataaaaatcgttttgttcctttttttct

SEQ ID NO: 11085 - DNA, 813 bp, Glycine max
  Clone ID: 701006284_FLI
cttcaataattcatcgcctctttattaataataagtatagtaaatacgctagtctatggggaacactacttcttgttcttgtatttgtatctctaatggtgttattagtattgggaatattttgaagaagagaagaaaagctaagaaaacagcgatgctgttggacagtgatggaaacactcgggagatcaagctacccataaaatcaggggagctcatgatcgaagaattcggccacgtcgtcactccggtcgacgaaattcgtagaacgggacgggtttcggctttattggccgacgaggagcttgtggccggtaaggtttacctgctattgccagtgaataggatcaattcgaaggcttcagagtttgagatggctattgcggaaaaacagagtggccacacaaagagtaagaggggaaataatatggccaaggtttcgccgtcactgatttcgaggtcaaatgaaagggacgaagaaaaccaagttacggttagtgttttccctgtgtgtccgaggtttgggaaccaagtacgatggaatcccgttttggatcctatcgtagaataatataatcaatccccctcatctccgaacgaatctggccaacaattttgatcttaaatttaaattaatttgtcttcctcacacacttgacacccgacactattgtgtgctcatttttaattttaactttacactaacatggatcaaattcttttagaagttagatgtccaccaatatttgttaaactcccgattcattcatttatgtcgattttgttcttggcaactatagtttgtttcttctc

SEQ ID NO: 11086 - DNA, 688 bp, Glycine max
  Clone ID: 701006450_FLI
cttcccagtcggctccgctaactacaaaccattcatcaagtgctcaacacagttcaggcagcagaaatggaactgtcgtggaacctaagccaactactcagacataccagtatgacagtagctaccaaccagcacctgaaaaaatagcagaagcacacaaggctgcaagatttgctgttggggcactggcatttgatgatgtctcaattgcagtagactacttgaagaaatcccttgagttgttgacaaatccatcagctggtcagtaagatgttatgtaaattgaaatgtggatttctatggtttttctacctattatttgcatgtcttgttttgtatattacatacatcatgcatttaaagtgtgaagaaatttggggaagatgaacggaaattgtaaaatctgctgggactgcgatctttcttgtttatctggtagttattgagattggcttgtttgtcaaggaaatgtgatacatataagagatgtctgctagataaatttcagttgtctgtctgggacaattctctttttctttttgtttgggtcttgcactcaaattcaggttcgcgttcattaacccattgaccctgaggatttgaatctcagctgtgaaattccttagtacatcataattacttgttgcttaagttccatttcagagattagtacaatttggtttggcat

SEQ ID NO: 11087 - DNA, 1176 bp, Glycine max
  Clone ID: 701006473_FLI
agatgagcatgttttaatgccacttgtattcggaatgtcacaaattggaacagtagaagaaggaaagtttgtgtattacaaattttccgtagacaatgtaacttgggagaaactttcttctgggaattcttgtgttgagttaaaattagaatcagagacagatgggggggacactgatcttttcatctccagacatcctctcatatttcctacacgacaccagcatgagtggtcttctcatgatattggctcaaagactttgattcttagctctaaagataaaaacatgggtgcagggacttacagcattggtgtatatggcttcaagggaattaccaggtataaaatatcagttgtggtccaggataacttcaaccaaaatgttggtcagcaagcatcatcttccgtgtcatctatggaactggacactgaacaatgtaggaactgcaagcattatatacccagtaggactattgcactacatgaagcttactgtagcaggcacaatgttgtttgtcagcatgctggctgtggagttgttcttaggattgaggagtccaagaaccacattcactgtgacagatgtgatcaggcgttccagcaggtagaattagaaaagcacatgaaagtttttcatgagccacttcactgcccttgtggaataatcctcgagaaagagcaaatggtggagcatcaagcttcagtttgtcccctgcgtcttattacttgccggttttgtggtgatatggttcaagctgggagttctgccatggatgtccgtgacagattaagaggattgtctgaacatgagagtatttgcggttctaggactgccccctgtgattcttgtgggcgttctgtgatgttgaaggacatggacattcaccaggttgctgttcatcaaaaaggctaattctgatattttcatcttaacagcaacttgtgaaagattgcatctaggtaataaatagaaaattaaaagaaactggaggaaattgaaagatacaagcagattgatggtggagcagaaacatctctatgttctactgtggacaactggctggatatatcaccctgttgttgatcttgtcattcattatgtatgaaattatgattatgaatttaagattgtgatttacctcgctatttcgttatggaaattgtttggtttgtggt

SEQ ID NO: 11088 - DNA, 1398 bp, Glycine max
  Clone ID: 701006617_FLI
caatcatcgtcaccaaacaaacattcattcattccacgcttccattctctctctaaatcgcattaccttcttctatctccttagttcccggcgagttcgtgcatcggagcctctaaatcgcattaacatcatcgaatcaaaccttccttctctttctcaactccagaatctcgtccttgtgagagaaaaaaaaaaaagttagttagggttacgcacagttaattaattatttaataatagaaaaatgagctttcaggacatcgaggccggccggtccttcgctgcccgacgcaacctcatcaacggcaaacaagaccccacgcaggcggtggcttccggcatctttcagatcaacaccgccgtctccacgttccagagactcgtcaacaccctaggaacccccaaggacacccccgagctccgtgataagctgcacaagacgagactgcacattggacaattggtgaaggatacttcggctaagcttaagcaagctagtgagattgatcacaatgttgaagttaatacaagtaagaagatagcagatgcgaagcttgcaaaagattttcaggcggtgttaaaagaatttcagaaggctcagcgtctttcagctgagagggaaacagcttacactccttttgttccacaaggagctcttccatccagctatacagccagtgaagtagacattagttctgataagactccagaacagcgtgcccttcttgtggaatccagaagacaggaagtattattcttagataatgagattgccttcaatgaggctatcattgacgaaagagatcaaggtattcaagaaattcagtcgcaaattggtgaagtaaatgagattttcaaagatcttgctgtgcttgtccatgagcaaggagcaatgattgatgatattgggtccaatattgagcattcccatgcagcaactgtgcaagcaaaatctcaacttgccaaagcttcaaagacacaaagatcaaattcatctttgacatgcttgcttttggtgatatttgggatcgtgcttctaatcgtcatcattgttcttgctgcttagtccaaaactctcgattctattatgaatcaaatgctctatatactaagctgcagataagatctccctcgctgatgactacagagtggtgatttaccagatctcacatatgaccggaatttgtctcatcaggtttcagtacatgacgtgggaatattaacattagtgtctcgttatttcgttgtgggtatatgttctacttggggctttaaggatgtatcacaacctgcctgttgtgtaagttatctttttggttccttaataaaagatatatattaaattgttctttacctgtatatgcaacttcaaaattagcatgaccgacccttctttat

SEQ ID NO: 11089 - DNA, 2740 bp, Glycine max
  Clone ID: 701007186_FLI
caactcaattcaagtttgtttgagtaacatccaactaagtcgaaagatcattggtttcgtggaacaagtttagaattattagtcaagtttgattgagtaaaactcaactaaattgagtagcaagtacaaaagttaacatgattcctcgacttaatttgaaaaattaaccttatttcattggtgagtatgcttttaatttggtttagattaggtctgaaggttagaaacaaaatttcaaggttgcatctttaatcactactgttctcaaattaacaatgaaagttttcaattttaattatttttaaattatcaatgcatggcggatcgttagagtgaaaaagagagagcatagatgactcaattactcaacccaaatcaatttaatgtatacctggttgattaggtttgaatttttcttttaaattctgatgcaactcaacctgaacaaaggtaattatttttaagttttatacattaggcctgttaacaaactcctaaatattaaactaaattcacaattagataaatgaaatacactgaatctgccatcattcttcttcttcttttaaaaaaagaatgccatcattgtttttttattattaaacatcattgttttttaaaaacataagtacagtgacctttataaagcttttatattattgcctctatctaagtggacccatttttaggcttgtgggttgttggagtggtgctttgctacttccaccctgtacagcgtatttttcgtgaatttgccccattgctgttcctcatgtaaagaagaagaaaagttctgcccagacaaagtgaaaaaggaaaaaaggaaaaagatgattatagtgactaaatgatgtacaaatttccagctagcttaaccatccattcgtaattgcaggatgcgatgacttccttttcagcttgtggactaatagaccctctttgttctcaaaacctcactcccaagcattccaccatcactgcaaccattgattctcagtcatcgatttgcgccactagtaatggtatgagcactagtgcactacgtacattattacttgcatgccaagtgccattcatcttagcatattattattagaggaaaaaaggttgcgcacagtatgcaaattaaattaaaagtcatactaatagtaatttgtgattgaatgacgttacatggtaaactttttaacattctggattgaattgcaaactgtgcagttgggagcccagtctcagctaataaaccagagggcagagagaatcatacgaaaggagccacaagtggttcctctgagccatctgatgaggatgatgaagcaggtgcttgtgaacagagcacaaatccagctgatatgaagcgccttagaaggtatctcaaagataaagcattaaacttaggttgtgtttgggtaaatttttctgtgagaagacgactcacagaggtgcataagttggttttagccgagaggaattcaattaattttactttcttatttttttcccctgatattttaaattatgttatggttttaggaaggtttctaatcgcgactctgccagaaggtcaagaagaagaaaacaagcgcaattgtctgaccttgagttgcaggtaactgatctgttgggagagtacatgaatggtatttaatttgataagtctttaataagggaatgaaatatagtgatattaattcttagagctatattttcgtacgaacagttgttgataaagacagtggaacgttactagcactctgaatctctttgtttttggaatttaagcattaacattcaatatttggtaaaatgcacaagaagcaatacaatgtttttttcgtttgaattttgctttctcaggttgaaaaactgaaagtggaaaatgcaaccctatacaagcagttcacggatgctagccaacattttcgtgaggcagatacgaataaccgagtgctgaaatcagatgtagaagctttgagagccaaggtataataggttcttctgcaatattattctatagctaagaaaaggagattacaactttataaaagcagggaaaagtagtaataaccaagaatgaaggaagcttggtttttaattaaggttgatgaaaaatatctcaatagaatttcaactgagtactgctccgaagaattaagataagctaatctgtctaggttaatttaaaaagagttttaagagagttattataaaagtgtataaaaatgtttgatattgtctggctggcatatataggtgaagttagcagaggatatggtgactaggagctcttttactacgttaaacaatcagcttcttcagacacaacatcatcaaatgagcacaccccagcaactgaacacgactaatctgcggcgcatggcgcatgtttcgccaacaatcaccgttcatggaaatgatgtctcgtacaataatggtggacagaattcagcacttggaaacttggatatgagtttcaatgacatcaatgaagtcatgaacgatgctatgagttgtggaactatttggccactcgactagacagactctctctgtagcttccaattagatcgatccatcttttatattttacgtcttgtctaatttgattagtaggctatatatgttaatgtcaagctatgctatttgtcttcgcttgattcctctttaatgatgcctgtttaaaatggcgtcttctttcgttgtatgtagttttgtataaaaggacttgattgctttatcc

SEQ ID NO: 11090 - DNA, 1766 bp, Glycine max
  Clone ID: 701007191_FLI
accatctagttccagcatctctggaagttcaattcaccctgatgtagcctcttcttaccagctcagagccagttcaggagcttctatggttgccaataacccatctgattcttctttcatgtctacaaggcatcatgatgcttaccagtcaaactcaggatcagatttgatggagaacggaagcctggattcacgcgacgatgaaggtctaatgagattaagactaaaagcactggagagggcattgcttgatgatagtgatgctggggaggatgaagaggaggaggaggaggaagaggaagacatatttgaggctgcacaaagcatggaaattgatcctgacattgctgagtgggctgattcaattcataatatgctgctccatggttcaccaaaggagtcctcttcttcagattccaataccagcagcatcagcagcaccaaagaaatatcacaaacttctcagacccccaagaagttgctttatgaatgtgctattgcactttctgaaggaaatgaagtggaaggatcatctatgataaacaatctccggcagatggtctcaattcagggagagccttctcaaagaattgcagcctatatggttgagggacttgcagctcgcctggccgaatccggaaaaagtatttacaaagctctgagatgcaaggagcctccaacttcagatcgtctagcagctatgcagatactgtttgaggtttgcccatgtttcaaatttggattcattgctgctaacaatgcaattacagaagcagtgaaagatgacatgaagattcatataatagattttgacatcaatcaaggaagtcagtacataaatctaatccaaacacttgcttcaaggtcaagcaagccaccacatgttaggttgactggagttgatgatccagaatctgtgcagcgatctgttggaggcctacggaacataggacaaagactagaaaaactggcagaggcacttggtttgccatttgagtttcgagcagtggcatcaaggacttccattgtcaccccatcaatgctcaactgcagtcctgatgaagcactagtggtaaactttgcattccagcttcatcacatgcccgatgagagtgtttcgacagtaaacgaacgggaccaacttcttcgcttggtgaagagcctgaatccaaagcttgtgacagttgtggagcaagatgtgaacacaaacaccacccccttcttacctagatttgttgaggcctacaattactactctgctgtgtttgagtcacttgatgctactcttcctagagaaagccaggacaggatgaatgttgaaaggcaatgcttagcaagggacattgtcaatgttgttgcgtgtgagggcgaggataggatagagcggtatgaagttgctggaaaatggagagcaaggatgacaatggctggcttcacttcatccccaatgagcacaaatgtcaccgatgaaatccgaaaactcattaagacggtgtattgcgacaggtacaagattaaggaggaaatgggagcgcttcactttggttgggaagacaaaaacttgattgttgcttcagcatggaagttaccaagataatcaattgtgttaggcgatagactcattctagtatcagtaatctagtgtttgcttgcatgcttgtttagtctgtagattacttctgatattcctattgtggtgttttcttgcttttccacatgtatactaacgtacaatcttaagctaataacgaactttgattttatgt

SEQ ID NO: 11091 - DNA, 958 bp, Glycine max
  Clone ID: 701007356_FLI
gcagcagaggggctaaacagagagcagtacgtgtacttggcgaagctgtcggagcaggcggagcggtacgaggagatggtggagttcatgcagaaggtggtggtggggtcgacgccggcgtcggagctcacggtggaggagcgcaacctcctctcggtggcctacaagaacgtcatcggctcgctgcgtgccgcgtggcgcatcgtctcctccatcgagcagaaggaggagggccgcaagaacgacgaccacgtctccctcgtcaagcactacagatccaaggtcgagaacgagctcactcaggtctgcgccagcatcctcagcctcctcgactccaacctcgtaccctccgcctccgccagcgagtccaaggtcttctacttgaagatgaagggcgattaccaccgctatctcgccgagtttaaggttggggacgaaagaaaaaccgctactgaggataccatgttgtcttacaaggctgcccaggatattgcttctgcggatcttccccctactcaccccatcagattgggtcttgctctcaacttctccgtcttctactatgaaatcctcaaccagtctgataaagcgtgtgccatggctaaacaggcttttgaggaagcaattgctgagctggacaccttgggagaagaatcttacaaagacagcacgctcataatgcagcttttaagagacaacctcaccctttggacttctgatgttcaggaccagctagatgagccctgatatcccttataggttgatgggtggtattcttcctctcatggaggtgggctttgaatgtcatttatttgtgctaattaagaatcgccctagtttataaaatgattggcaatctgtgatataatgttgtatgaacagagaccaggcttcttttttttgtgtgtcatatggtattggaaaggatactgtataatgggatatccaattaattatt

SEQ ID NO: 11092 - DNA, 426 bp, Glycine max
  Clone ID: 701007506_FLI
gcaaatagcaagtgccactcaaatacttctggaatgaatcatcaaatgcttcatcaacttatgggagttgatcctggaactaaccctgtttgccatttccttggaagcaaggccattttatgggtacccaatttatctgtggacactgcctatcagaccaacattgttgcttaattagtccattctcatggtgctcaagatgcatggactaattaagcaacatgagaatgagattgtgtataaaataaattatcatgtgctgtgtgttgtgcaagtactaccttctctagctagattgctagagctagaatttcaacctacctatgtgtactgataagatctgcttccctacttaaagagagcatcatcctgtgatcagtgtgcttcgtattctctctctctatatatatatggtaaaaagtggtt

SEQ ID NO: 11093 - DNA, 1014 bp, Glycine max
  Clone ID: 701007536_FLI
gaattcggctcgcggtggaaaggtcctcccaagttcaaaccacaatataccaaagatgaagccatacagcatgtgcgtgacctttaccgggagtccctcaagaaatatggagcagaaggatccaggggtaaatcagcagaagatggtgaacaaaatatagatgagctttctttcacagaattaagagataagctaattgccctagatcctctcaataaaaagcacatcatcagcattaataaagctgaggccgagttctggcgaaagtcagaaggatatagggttggatggagtgatgaaatattgggctttgattgcggaggccaacagtgggtatcagaggcatgtttccctgctggaaaactagctaatccaagcatgaaagaccttgaatacattgaagagctgaagctacttatagagaaagaagacatacctgcacctgctccaattgagcagcgctggacagctagcagtaggagttccttgagtcctgcttcaagtccgtctggggatgatatattttcttgggtaggtataatcatgtacctccctaccatggatggtcggcaaaggaaagatataacagaagagttctttcattataggcatttgactcaggcaaagttatgggatcgttactccgcatatgaacactgggctaagattgaggttccaaaggacaaggaggagcttgcagccctccaagcaaggctaagaaagcggtttcctgtggatgcatacaataaagcaagaaaggaattggaccccaataggatcctttcgaacaacatgttggaaaagctcttcccacaatcagacaccatataattttgtgttggttgtgtctatattgtccatattttttatgtttactatatattcaaccctaagtgctgataaaaaaaatatattcaaccctaagttgttgactttggaacattgggttggaaaatatctggtgcacaatctggattattatgcataaatgcatattttcagtttatttcttgc

SEQ ID NO: 11094 - DNA, 1012 bp, Glycine max; identical to SEQ ID NO: 11025
  Clone ID: 701007625_FLI

SEQ ID NO: 11095 - DNA, 854 bp, Glycine max
  Clone ID: 701008047_FLI
tcaattttgagcacttaccaacaccacttccaatggcttcatatcatgaagaagaagtgaggctattgggcaagtgggccagcccatttagcaacagagtagaccttgctctcaagctcaagggtgttccctacaaatactccgaggaagatcttgctaacaagagtgctgatcttctcaagtacaaccccgttcacaagaaggttccggttttggtccacaatgggaacccattgcccgagtcactcatcattgttgaatacatagatgagacgtggaaaaataacccactattgcctcaagacccatatgaaagagccttggctcgtttttggtctaagaccttagatgacaagatcttgccagctatatggaatgcttgctggagtgacgagaatgggcgtgagaaagcagtggaggaagccttggaagcattgaaaatcctacaggaaacactgaaagacaagaaattctttggaggagagagcataggattggtagatattgctgccaatttcattgggtattgggttgccatattgcaagagattgcagggttggagttgctcaccattgagaaatttcccaagttatataattggagtcaagactttatcaaccaccctgtgatcaaggagggtctgcctcctagagatgaattgtttgctttcttcaaagcttctgctaaaaagtagaaccattttagaggtaggattcataataagttagtatgattttgttgggaaacaattatcttgttgtgagcaaaggattgttctgttttaaatttaattgactgtgatttggttgggtattggctattttaattttaactaaaaaaagtgttcagtttt

SEQ ID NO: 11096 - DNA, 1656 bp, Glycine max
  Clone ID: 701008431_FLI
gtgagcgaaactagaatccgaaaaacaatggcggcgaagctagacagccacgccgtggcttccgatatgatcgacttcctcaacgcttctccgacggctttccacgccgtcgacgaggcaaagaggcgtttgcgaagcgcggggtaccaccaactctcggagagggaaccgtggaaacttcaaccgggcaacaagtacttcttcaccagaaaccactccaccatcgtcgccttcgccatcggcaaaaagtatgtttctggaaatggattccacataatcggggctcacacggatagtccttgtctcaaactcaagcctgtcaccaaggttgttaaggctgggattttggaggttggtgtccaaacctatggaggaggcttgtggcacacatggtttgatcgagacttgaccgtggcggggagggtcattgtgcaggaagagaatgccggttctgtttcgtactcgcatcgccttgttagaatagaggaacctataatgcggatcccgactttggcaattcacttggacaagactgttagtgatggattcaaatttaacaacgagactcaccttattcccatcttggcaacatcactgaagggtgagctcaataaagtgtccactgaaaatggtcctgttgaaagtggaaatcagaacgatggaaagaaagcaaatgataaaacaggcaccagcaatacgaagcaccaccttcttcttctacagttgcttgcaagtaagcttgggtgtgaaccagatgacatatgtgattttgaattgcaagcttgtgatacacaaccaagtactattgctggagctgcaaaggaattcattttttcaggacggcttgataacctctgcatgtcattttgctcgctgaaggcattaatagatgctacatcctctgacagcagtcttgaggaagagtcaggggttagaatggtggctttatttgatcacgaggaagttggatctaactctgcacaaggagctggctctcctgttatgctaaatgctgtgacaagggttaccaattccttcagctcaaatcccaaccttctggagaaagcagtacaattaagctaccttgtatctgccgatatggcacatgcactacacccaaattacatggaaaagcatgaagcaaaccatcagcccaaactacatggaggacttgtcattaaaaccaacgctaaccaacgctatgcaaccaatgttgtcacatccttcatattcagggagatagcatcaaaacataaacttcccgttcaggactttgtggtgcgcaatgacatgggttgtggttcaaccattggtcctattcttgctagtggcataggtatccgcactgttgatgtaggtgcaccgcagttgtcaatgcatagcatacgagaaatttgtgctgttgatgatgtgaagcattcatatgagcatttcaaggcattttacgaagaattttctcatgtcgatggtaagatggtcgtggatatataggatatctctaatcacgaaatcctcattttgatcctttgctctagaagctgttgctgaaatggtcgtgttttgtaatttagtatctatataatgctgacttattataagttttcaataaaattagactccctgaatgcaatattagcaacgactttaagtgtgttt

SEQ ID NO: 11097 - DNA, 2401 bp, Glycine max
  Clone ID: 701008639_FLI
agaaagcaaagcaggagagagaggggatgacaccacatcctctgttttcattctcattcttagttttccctgccattcaaattttcacatgacctctcattattatttttattattattagtttcttttgtttctatcaccaaccattcatctttggatggtgaattccccatctgggttcctctctttttcctttgatctcttcgccttctctcaatttcttcttctctgatcccagaaaagaaaaaaaaaactaaaaaacattaaaaacaaaaataaaaaaaacatagctgctttgttttctctctttgctggattagatattttggttcagtttttattattgatgctcctaagatccgattctcttagatcgaatttggcataacccacttcgtatctgattgaagcaccaactgggttctgtctgagattcaacataagatggagtcggatcttggcaagctcttcattgggggaatttcctgggacaccgatgacgaacgtctcaaagaatattttgggaaatatggagaggtgatagaggctgtgatcatgagagatcggacaacaggccgcgctcgtggtttcggttttgttgtctttgctgatccttctgctgcagagagagtcattatggataagcacataattgatggccgcacagttgaagctaagaaagctgttcctagggatgatcagcaaactataaacagacagtctggtagcatccatggatctccgagtcctggacgcaccaaaaagatttttgttggaggtttaccatcaacaatcacagagagtgactttaagaagtactttgatcagtttggtacaattgctgatgttgttgtaatgtatgatcacaatacccagaggccaagaggttttggcttcatcacttatgattcagaagaagctgtggacagagttctttataagacatttcatgaactcaatgggaagatggttgaggtcaagagggcagttcctaaagagctttcccctggacctacccgaagcccattgataggatataactatggtttgaataggaccagtggcttcctaaatagttatgctcagggtttcaatatgaatccaattggaggttatggagtcaggatggatggaaggtttagtcctcttactagtgccagaagtgggtttagcccatttggctccagtggttatggaatgggagtgaatttggatttaggattgaacccaagctatggagggacttccagttatggtggcagtctgggatacgctcggatgagtcctttcaacaatggcaactctaacagatataccactcctattggcaatagcgggggcaatgggagaagcgattctcttatgaactcagcttcccggagtgtttggggaaatgggggccagaacaatgctgccaatagtccagtcagccctggcgcttacttgggatctggaaatggggcttttggtgtttcaattggaaatggtggcaccaattggggtccatcagttccaacccagggtggaggggctgccactgggtatagtacttggggtaactcttatgatggtggagataacaacatcagtttaggaggtggagggtatggaaggaacagcagcccaagtgtgcctcaatcctcaacatttactgcaccaactggtgattatgaaggatcctatgggaacttgtaccgcaatggttcagtttacagtgactcaacttggcggtctgctgcttctgagatagatgcttctggttcgtttggttacggtggacttggtggtatagcttcagatgatccagtaaagagttctgatggttttattggaaactacaatgtaataagtagacaaactaatagaggaattgctgcttaggagatatgttaattggatatgttatggtaacagtagatcaagggaaactggttaaagaaaacgaggtattgtgaaatcatacagaagctaaatcagttacaagtgttttttgtgtaaggtttgggattttttttgtctttatttttcaaggctaggttcctttcttggaatttgattgaggtgtaacatcagattgcgggatatactcaggaagattggttccagtagtttaattgtgcattgctggaaaggtgcaccatcatcgttagtatgcttaatgatagtttattaatttttgaatttttttttgccactgtaatgcttggcaaagctgtttgttcttgtcaccatctttttcatgggacatgtttctgatcaaattgtaagtgatgttcagtttgatttatcaggtttgatacattagaggggtacccatcttggatcccccatcaaataattagttaatggacagatattattttttgttagacttttgttatacaactttatactttggttt

SEQ ID NO: 11098 - DNA, 1264 bp, Glycine max
  Clone ID: 701009040_FLI
tttcgaaggtaaaggtaaaatcggtgatggtttgatgcctattctgcataaatctgcaccacaggtagcattattctctgctcgagggccaaatataaaggacttcagcttccaagaggcagatcttctcaaaccagatatattagctcctggttcattgatttgggctgcttggtgtccaaatggaactgatgagccaaattatgttggtgaagcgtttgccatgatatctggaaccagcatggctgcaccacatatagctggaattgctgctcttataaagcagaagcatcctcattggagccctgcagccattaaatcagctttgatgactacatcaacgactctagacagagcaggggatcctcttctagcccagcaaacttctgaatcagaagctatgaggctggtcaaagctactccttttgattatgggagtggtcatgttgatccaactgctgcattggaccctgggctcatctttgatgcagggtacgaggattatataggcttcttgtgcacaacacctagcattgatgttcatgagataaggaactacactcacaccccatgtaacacctccatgggcaaaccatcaaatttaaacaccccatcaataacaatttcccatcttgtgagaactcaagttgtcacgcgcacggtcacaaatgttgccgaggaagaaacctatgtgatcacagccagaatggaaccggctgttgccattgaagtcaaccctccagcaatgactatcaaagcaggcgcatcgcgccagtttttggtgtcacttacagtgcgctcggtgacaggaaggtatagttttggagaggttttgatgaaagggagcagagggcacaaggtgaggattcctgttctggccaacggataccgacgatagatagcatagtgaagtttggtcagcaaaggaaaggaaagcaagtgctgcttgtaatattctttgtaacctgtggggaataaggtatggcgctacatttattcgtctaaatatataaatatgtaatgttaaattatgaataggtgtaaaggtaagcaggtgtaaggggtcactcctagtttcttccacatatagttttgcttatattgtctagtaattttgttggaatgcttcatcacaagttttaacctgtatctgccccattccccaaaagttcgttgcttacagcatgtgtaatacatgaaataatttgtataacataaggtatcaatggcacagcgtaaatcctaccaaagctattggctagtt

SEQ ID NO: 11099 - DNA, 876 bp, Glycine max
  Clone ID: 701009133_FLI
gttgtgttgtgtgctgcaacacatccagaaacacaatcggtgtcgtgttgggttgggtttttttgttattaaaagaaaagaaaaggggggatggctcggagagcagaggaagagtacgattatctgttcaaggttgtactgatcggtgattctggtgttggaaaatccaatctcctgtcccgattcactcgcaacgagttttgcctcgaatccaagtccaccattggagtcgaattcgctactcgcactcttcaggtggagggaagaactgtgaaagctcaaatatgggatactgccggacaggaacgatacagagcaattacgagtgcctactaccggggtgcccttggagctcttcttgtctacgatgtcactaaaccaaccacattcgaaaatgttagccgatggctcaaggagctaagggatcacgccgatgctaacattgtcatcatgttgatcgggaacaagactgatctcaagcatctcagagctgttgccaccgaggatgctcagggttatgccgagaaggaaggcctttctttcatcgagacttccgctcttgaagcaactaatgttgagaatgctttccagactattcttgcagagatataccgcattatcagtaagaaatcactctcttccaatgaccctgctgccaatattattaaagaaggcaagactatcacagttgggggggcacccgaacccaacacaaacaagccttcttgctgtacatcatcttgaaaccattgctacttgctcagtatcattgttttgcctgttttcttttctttaccattcttttttattaacttatctggatttcttatgcttgtgcgtgctgattaatgagtattatcccagtttttaattgat

SEQ ID NO: 11100 - DNA, 1528 bp, Glycine max
  Clone ID: 701009148_FLI
tttgggagttaggttctgcacgctctgcttccagcgagtgttctttcttcgtttcaacaccttaatttgcacacgctgcttcttcagcttgagaaatggcacaagaaacctttctattcacatctgaatctgtaaacgagggtcaccccgacaagctgtgcgaccagatctctgatgcagtgctcgatgcgtgccttgaacaggaccctgacagcaaggttgcctgtgagacatgcaccaagaccaacatggtcatggtctttggagagatcacaaccaaggccaacgtagactatgagaagattgtccgtgacacatgccgcgaaattggattcatctctgatgatgttggtcttgatgctgacaaatgcaaggtgttggtcaacattgagcagcagagccctgatatcgcccagggtgtgcacggtcacttcaccaagcgcccagaggaggttggtgctggtgaccagggtcacatgtttggctatgccactgatgaaacccctgagtacatgcccctcagccatgtccttgcaaccaaactcggtgctcgcctcaccgaggttaggaaaaatggtacctgtgcttggctgaggccagatggcaagacacaagtaactgttgagtactacaatgacaatggtgccatggttccagttcgtgtccacactgtcctaatttccacccaacatgatgagactgtgagcaatgaccaaattgctgctgaccttaaagagcatgttatcaagcctgtcattcctgagaagtacctggatgagaagaccatcttccaccttaacccttctggccgttttgtcattggtggccctcatggtgatgctggtctcactggaagaaagatcatcattgatacctatggtgggtggggtgctcatggtggaggtgccttttcagggaaggaccctaccaaggttgacagaagtggtgcctatatcgtgaggcaggctgcaaagagtgttgtggcaaatggccttgccagaaggtgcattgtccaagtttcctatgccattggtgtccctgagcccttgtcagtgtttgtggacacttatggaactgggaagattcctgacaaggagattcttcaaattgtgaaggagaatttcgacttcagacctggaatgatcaccattaacttggaccttaagaggggtggccataggttcctcaagacagctgcttatggacactttggaagggatgaccctgacttcacctgggaagttgtgaagccactcaagtctgagaagcctcaagcttaagattgttgtgaagttaatcactcccttcaatggatgtcttgctaggtgtggatgaataatttgcgtgttccatgactactactacttcattcataggtctaatgtcatctcatcaatacttaaactgttttttttttccttttctccttttactcacaatttattttttggttatgcaatgttaccgttttgatgcaatggaaattttatcagaattttgtaccaattgattgcattttgagagggtg

SEQ ID NO: 11101 - DNA, 768 bp, Glycine max
  Clone ID: 701009174_FLI
gatcagcaagtgcgtttcggaagcagagaccgaaatacttcgagatggcccgtacaaagcaaactgctcgtaagtcaactggaggaaaagctcccaggaagcagcttgcaaccaaggctgcacgtaagtctgctccaacaactggtggtgtgaagaagcctcatcgttatcgccctggaactgttgctcttcgtgagattaggaaataccagaagagcactgagctcctaatcaggaagcttcctttccagaggttggttcgtgaaattgcccaggatttcaagactgatctgcgtttccagagccatgctgtgcttgcattgcaagaggctgctgaggcataccttgttgggctctttgaggacactaacttgtgtgccattcacgccaagcgtgtgactattatgcccaaggatattcagctggcaagaaggattcgtggtgagcgtgcttgagttggtgcgttctgtgtttgtgaagatggattgttggtggctgcggatggtgttttgttactaagttttctttttgttgaagcctataggttattagggaaaaataggtgtttacttggtagtcatattaattgtcattggcaaatactgcctaagacactgtgaaggtctggttgttagaaatttggcatgtatttgatttttttggatcctttatttctcgttttatttccgggtgggcagcccctttgggaattgtattgggcccctttttgttgccaaaaaaaaaagttgaagctagcttatcgtgtcc

SEQ ID NO: 11102 - DNA, 1000 bp, Glycine max
  Clone ID: 701009339_FLI
gtggttgttgcttattcaggctcttgcatctcgtccaggtggaccacctttcgttcacgtaaccggtgttgatgattcccaatcatttcatgcaaggggtggaggacttcacattgtagggaaacgcctctcagattatgccaaatcttgtggagtgccatttgagttccacagtgctgcaatgtgtggaagtgaggttgaactagaaaaccttgtaattcaaccaggggaagcactagttgtgaacttcccttttgttttgcaccacatgccagatgagagtgtgagcacagagaaccacagagacaggctattgagattggtcaaaagcttgtcacccaaggttgtgacacttgttgagcaagaatccaacaccaacacttctccctttttccaaaggtttgctgagaccttgagttactacactgctatgtttgagtccatagatgtggccctccccagagatgataagcaaaggatcaatgcagaacaacactgcgtggctcgcgacattgttaacatggtagcttgtgagggggatgagagggtggaaaggcatgaactcttggggaagtggaggtcaagattttcaatggctggttttgcaccatgccctttgagttccttagtcacggatgcagttagaaatatgttgaatgaattcaatgaaaattataggctcgaatatagagatggtgctctctatctaggatggaagaatagagctatgtgtacctcttctgcttggagatgttactgactcattgtcatagcctcataggtatatgtatattttcctccttgttaatttcttcccttttttggacacttagtcattattcagtcgtatcttcagtttctcaatagaactagctagttagagacttagctttcttccaacgtgtatcctttaccttttgtgggttcagctgagtcttttaacatttttgtacatttcaatgctacatagaaggtaagagaaaacctcagttattgactt

SEQ ID NO: 11103 - DNA, 1593 bp, Glycine max
  Clone ID: 701009362_FLI
gcaaagggtggtggtgtggtgcttgttgtggttggtggtggagtgcgcaggataagcggcaaagtaaggtgaaggttaggggagagaaagaaagaatcaaatcaaccaaacaaaagaaccccatttaagaaaatatatagaaagaaaaaaaaattgattaaaagattgttctttttattaacaacaacccgtcatagttttaaggccatttaattggttcttattgtgcttgtgtgtgtgctataaatccttcgtggtttttggtgaccctttgggttctatagttagtctaaggtaacccactttgagaattctcataaagttgcatgcttttggattggaaggttgttgcaatggggaaggttgtgttgttgtttctttgcatggtattggtggtggtgcctttggcttgtactgattcaattcagaagcttgaggttcagaagcacttgaagaacttgaataggcctcctgttaggtccatcaagagtcctgatggagatgttattgattgcatccatgttacacaccagccagcttttgatcaccctgacctcaaaaatcacaagattcagatgaaaccaaatttccatccagaagggcatccttttggagaaagcaaagtctcttcaaattcaaagcctattactcagctgtggcaccaaaatgggaggtgccctgaaggaacaattccggtccgaaggacgaaaaaggatgacatattaagaacaagctctgttcagcattttggaaagaagaagcaaagtagcttccctcagccaaaacctgcaaaacctctacctgacatcatcagtcagagtggccaccagcatgccatagtgtatgtggagggagataagtattatggagccaaggcaaccataaacgtttgggacccaaaaattcaacaacccaatgaatttagcctttctcaaatgtggattttgggtggctcttttggtcaagatctcaacagcattgaagcaggttggcaggtcagccctgatttgtatggagacaacaacactagactcttcacttattggacaagtgatgcatatcaagctactggttgttataatctcctttgctctggctttattcaaattaacagtgatatagccctgggagcaagcatctccccactttctaagtatagctcttcccaatatgatatcagcatcctggtctggaaggaccccaaagagggtaactggtggatgcagtttggtaatgatcatgttatgggatactggccggctcctctattctcgtacctctccgacagtgcgtcaatgattgagtgggggggagaggtcgtgaactccgagtccgacggccaacacacctcgactcaaatggggagtggccatttccctgaggaaggttttggcaaggctagttacttcaagaacattcagattgttgatggtgacaacaagcttagagctccaaaagaccttggcacttacactgagcaagatagctgctacaatgttcaaactggtagtgctggagattggggtaactacttctactatggtggtcctggtagaaatccaaattgcccttgatcattcatgttaatcaaac

SEQ ID NO: 11104 - DNA, 1460 bp, Glycine max
  Clone ID: 701009432_FLI
ctccatcgcgtgtgcttcaattccatggctaaaccgaaggctccaagacgaaccctagagtcatactcagtcaaacacataagcaaaaccattagagctggcgattgcatcctcatgcggccctccgatccgtcgaaaccgtcgtacgtagcgaggatcgagcggatcgaagccgacgcgcgcggcgcaaacgtgaagattcacgtgcgctggtactaccggccggaggaatcaatcggcggtcgacgccagtttcacggctccaaggaggttttcctctccgatcacttcgatgttcagagtgccgacacaatcgaagccaagtgtacggtccacagcttcaagagctacacgaagctcgatgctgtcggaaacgacgatttcttctgtcgttttgagtacaattcctccaccggcgccttcaatcctgatagagttgccgtgtattgtaaatgtgagatgccttacaaccctgatgacctaatggtgcaatgcgagggctgcactgactggttccatcctgcttgtatagacatgactgtggaagaagccaaaagacttgaccacttcttttgtgaaagttgctctgctgaaggtcaaaaaaagttgcaaaactctcattctgcttctagacactcagatacaaaggtggatactaaacgccgtcgtaggtaaaatagtgtgatagtatataaagcataaaatgagttagatctataatggatgtactgaagatcttgcttttctaatcctgggtaggggccagacaaacacagagacaaagttatctagtagtaagctgtagtctttctactttcatggaaagagactagtttggaaatgtttgtcatgtctatttggtttgagtactcatcctgtttcctttggaagtggaggacgtgtttatgtaattatttagtgtagattctgtgtcacttctctctggtccttgttctcgggcgttttgtaaagtattttgacttatttataagcagtagacactttattctttctttttactgatagaggtaggcaatgatctagagtttctatacaccgataatggcgccgtgttgttggcgtgaaaagaattgaggataaaaaaatatacgatattgggttgtaatttaattcagcctttcgttggcaaagacctctgaaagaacttgctagagacattgcatgccgatagtttctcacctctgtatcatctggcgtgatgacgatggagattggaaaatacgttatttttttggaccatagaaaaacaaatctatattggagtactgcctatggtttgaaccaatcaaagacgcaatacactccactaacggtgcttgtgaatggactagagtggaatgtcgcggagtgaaatagaacagaacgacattgaatgtagtaaaaatattgttcgaatattttatgatggggtagaataaaaacatcatgttattgcgaat

SEQ ID NO: 11105 - DNA, 970 bp, Glycine max
  Clone ID: 701009713_FLI
gaaagatgcgcctgcctatgaactattgagtgaagatgaagactggggtcctggcaaaagaaagcgaagagaaaaggagtctgatgctgttgattctcttatgactttgcatgaaagtgagaataggcatcccaataatgagcacaacatgacaagtaaagattcttcaagcataaagatcaaaaggcattgttttaggattccacgtgatgcagttgagaggcttcgccaagtttttgctgagaacgaacttcctccaagatctataagagagggtctttcaaaagagctgggccttgacaccgagaaggtcagcaaatggttcaaaaatgcacgttacttagcacttaaaaacagaaagcatcaagcagaaggagtagcagatcagcttcagagtatcacttctacaaagaacagattacaaaaacaggagaatgtcgatcctttgaaatcaaagaccccaaaaattactaggacacattcccagaaggatgttaaaaatgtcaatggaagaaagaaaatgaagtcatctaacaagaaaagacaaccagaaattcctccacctccaggagaaaatggcaagaaggactttatggagatcagtgatgatgtgagcttgaagaaactgttgaagaaaagaaagaagaggttgataaattttacgtttggaggagactctcagttggcagagttggaatttgaaagactaagcgaattgaagactaaagtagatagtatgaagcaaaaattaactgcaattcaaaattacagagttaagggttcaccctattcgaatgaaccatccattgtatatgtacccacagctgtgttaagggaaaaggttgaatgataactttaattgaaaaatgcacagtgggggaatacatgatttgtagttagttcctgtctttcctttgtagtattcaaagaaaggaactgttttgaagttaatgatattaatacttgtctc

SEQ ID NO: 11106 - DNA, 1250 bp, Glycine max
  Clone ID: 701009719_FLI
ctcaattctcttcaccctttgcctctgaaagaaatgggtagtcttgaagcggaaagaacaacagtaggattggcagcaagagacccttcagggattctctccccatacacctacaatctaagaaacacaggccctgatgatgtttacattaaagttcactactgtggaatttgccattctgatctccaccagattaaaaatgatcttggcatgtccaactatcccatggtcccaggacatgaagtggttggtgaggtactggaggtgggatcaaacgttagcaggttcagagtgggagagttggtgggagttggactcctcgtaggttgctgcaaaaactgccagccatgccaacaagacattgagaattactgcagcaagaagatctggtcttacaatgatgtttatgtcgatggaaaacccacacagggtggctttgctgaaaccatgatcgttgagcaaaagtttgtggtgaagattccagagggtttggcgccagagcaagtggcaccattactgtgtgcgggtgtgacagtgtacagtccactggtacactttgggctgaaagagagtgggctaagaggtggaatattggggcttggaggagtgggacacatgggggtgaagatagcaaaggcactgggtcatcatgtgactgtgataagctcttctgacaagaagaaacaagaggcacttgaacaccttggagctgatcaatatctcgttagctctgatgccactgccatgcaggaagctgctgattcacttgactacatcattgacactgtgcctgttggtcaccctcttgagccttatctctccttgctcaaacttgatggcaagttgatcttgatgggggtcatcaacacccctcttcaatttgttagccccatggtcatgctagggaggaagtcaataacgggaagcttcattgggagcatgaaggagacagaggagatgttggagttctggaaagagaagggtctgagttcgatgattgaaatggtaaacatggattacattaacaaagcctttgaaaggttggagaagaatgacgtgagatacaggtttgttgtggatgtcaaaggcagcaaacttgtcgatcagtaaaagaaagaaagtatactactagcacgacacacgcaacatccatccttccatcatgaagagtctggaaaagttattaattaattgagaactaaagctgtatttgttgttcactctaaaaaagaagctgtgttttgtttatt

SEQ ID NO: 11107 - DNA, 1057 bp, Glycine max
  Clone ID: 701009761_FLI
gcaagaatggcacttcgttgcttggtgatgtccctttctgttctcttcactcttggtcttgcgagagaaagccatgccagagacgaagatttttggcatgctgtttggccaaacactcccattccaagttcattgcgagatcttctaaagcctggccctgcaagtgttgaaatcgatgatcaccctatgcaaattgaagaaacacagtacccgaaaaccttcttctataaagaagaccttcatccaggcaaaacaatgaaagtacaattcagcaagcctccctttcaacaaccatggggtgttggtacatggttaaaggaaattaaagacactactaaagaaggatatagttttgaagagctatgcatcaagaaagaagccattgagggagaagagaagttttgtgcaaaatccttgggaacagtaattggttttgccatttcaaagctgggaaagaacattcaagtactttcaagttcctttgtcaataagcaagaccaatacactgtggaaggagtgcagaatcttggagacaaagcagtgatgtgtcataggctaaatttcagaactgcagtattttactgccatgaagtccgtgaaacaacagctttcatggttccattggtggctggtgatggaaccaaaactcaggcacttgctatttgccactcaaatacttctggaatgaatcatcaaatgcttcatcaacttatgggagttgatcctggaactaaccctgtttgccatttccttggaagcaaggccattttatgggtacccaatttatctgtggacactgcctatcagaccaacattgttgcttaattagtccatgcatcttgagcaccatgagaatgagattgtgtataaaataaattatcatgtgctgtgtgttgtgcaagtactaccttctctagctagattgctagagctagaatttcaacctacctatgtgtactgataagatctgcttccctacttaaagagagcatcatcctgtgatcagtgtgcttcgtattctctctctctatatatatatggtaaaaagtggttatct

SEQ ID NO: 11108 - DNA, 1082 bp, Glycine max
  Clone ID: 701009821_FLI
ggaatttgacttcttgctggacgatcttgagaccatcaaagtaattggaaaaggcagtggtggtgtggtacaacttgttcgccataagtgggttggaagattgtttgctttaaaggttattcagatgaatatacaagaggatattcgaaaacagattgttcaggaactgaaaataaatcaagcgtcacagtgtccacatgttgtagtttgctatcactcattctatcataatggagtaatatctcttgtgttagaatacatggatcgtggttctctagcagatgtaatcaaacaagttaaaacaattctggaaccatatcttgctgtggtttgtaagcaggtattgcaaggccttgtttacctgcacaatgaaaggcatgtaatacacagggacattaaaccatccaatctgttagttaatcacaaaggggaggtgaagattactgattttggtgttagtgctatgctggcaagctcaatgggccaaagagatacatttgttggaacttacaattacatgtcgccagaaagaatcagtgggagtacttatgattatagcagtgacatctggagtttgggtatggtagtgcttgagtgtgccataggacggtttccttatatacagtctgaagatcagcaaagctggcctagtttttatgagcttctggcagcaattgtggaaagccccccaccttctgctccacccgatcagttctcccctgagttctgtacattcgtgtcatcctgcatccaaaaggatcctcgggatagattaacatcattggagctactggatcatcctttcataaaaaagtttgaagataaagatctagatcttgggattttggtaggtggcttggaacctcctgtaaactttccgagataatttttacaatagagtgtaaaatttgtactagacagccacaactcttggtgatggaacaaggaaatttcttgtcagttatgctatattagatatgattataccggtatcagtcctaagtttggtgactttattacagttttatgaaaactgatttgtataaaagttgtttcttgtttgtattaagaaaaacttaatc

SEQ ID NO: 11109 - DNA, 1349 bp, Glycine max
  Clone ID: 701009829_FLI
ggggcaccctgacaagctctgtgaccagatctccgatgctgtgctcgatgcatgcttggagcaggaccctgacagcaaggttgcctgtgaaacctgcaccaagaccaacatggtgatggttttcggagagatcacaaccaaggccaacgtggactatgagaagattgtgcgtgacacatgcaggaacattggttttgtctctgatgatgttggtcttgatgctgacaactgcaaggtcctcgtcaacattgagcaacagagtcctgatattgctcaaggtgtgcacggccacctcacaaagaggcctgaggagattggtgctggtgaccaaggtcatatgttcggctatgccactgacgagactcccgagctcatgcccttgagccatgtccttgccacgaagctcggtgccaagctcaccgaggttcggaagaacgggacatgcccttggctgagacctgatggcaagacccaagtcactgttgagtactacaatgacaagggtgccatggttccaatccgcgtccacactgtgctcatctccacacagcatgatgagactgtcacaaatgatgagattgcagctgatcttaaagaacacgtgattaagcctgtgattcctgagaagtaccttgatgagaagaccattttccatttgaacccttctggcaggtttgtcattggagggccgcatggcgatgctggtctcaccggccgcaagatcatcatcgacacctatggaggatggggtgcacatggtggtggtgccttctctgggaaggatcctaccaaggttgataggagtggtgcctacattgtgaggcaagctgcaaagagcattgttgcaaatggacttgctaggagggcaattgtgcaagtttcctatgccattggtgtgcctgagcccttgtctgtgtttgttgacacttatggcactgggaagatccctgacaaggaaatcctcagcattgtgaaggagagttttgacttcaggcctggcatgatctccatcaaccttgatctcaagaggggtggaaatggcaggttcttgaagactgctgcatatggacactttggcagagatgaccctgacttcacatggggaagtggtgaagccactcaagggggagaaggtacctgcttaactaaaaggggttccaacactcttggcaagggacttttgcactactactggcttcttattatctgattgctaaaattttctctatgtttccttccctcttactcaattctgtttttttttttctgtatttttttatgaatttcccccttttttttgtgtacttgtatgtgttctttcagaacatatatattttatatgatgaaac

SEQ ID NO: 11110 - DNA, 2721 bp, Glycine max
  Clone ID: 701009842_FLI
ggcagatcggtgaagcggcggagcaaatggttgcagagattccatacatgactcgatcttagtttagttaggagcagcggtggaaagcctaatagaacaagtatgtcctgcaaggatggtagcagaaacggaatcggaatcggaatggataacgggaagtacgtgcgttacacgcctgagcaggttgaagccctagagaggctctatcacgattgccccaaacctagttccattcgccgcctgcaactcattcgcgagtgccccactctctcccacattgatcccaagcaaatcaaggtttggttccagaacagaagatgtagagagaagcagaggaaggagtcgtcgcggctgcaagctgtaaataggaagttgactgccatgaacaagctgctcatggaggagattgataggttgcagaagcaggtctctcaactcgtctatgaaaatggctattttcgtcaacataccacccaaaatactaagcagcaggcaatcaaagacacaagctgtgaatcagctgtgaggagtggtcagcagcacaatttgacaactcaacatcccccacgggatgcaagtcctgcagggcttttgtccattgcagaagagactttagaagaatttctttctaaggctactgggactgctgttgagtgggtccaaatgcctggaatgaagcctggtccggattccattggaatcgttgctatttctcatggttgcaatggtgtggcagcaagagcttgtggtctagtgggactagaacccactagggttgcagaaatcctcaaagatcggcctttgtggtttcgcgattgccgagctgttgatgttctcaatgtgctgcccacagcaaatggtggaaccattgagctgctttatatgcagctatatgcaccaaccacattggctcccgctcgagacttctggttgttgcgctacacttctgttttagaagatagcagcttagtgatctgtgagaggtcacttaaaaatactcaaaatggtccaagcatgcctcctgtgcagcattttgttagagcagagatgctgcctagtgggtacctgatcagaccttgtgaaggaggcggttccatcatccacattgttgatcatatgaatttagagccatggagtgtgccagaagtgctacgtccactgtacgagtcatctaaagtactgtctcagaagacaactatggcggccctacgtcatttaaggcagatttcacatgaagtttctccgtccaacgtcagtgggtggggtagaagaccatcagcactacgagctcttagccaaagattgagccggggtttcaatgaggcactcaatgggtttactgatgagggatggacaacaattggcaatgatggtgtagatgatgttactattctcgtgaattcatcccctgacaagttaatgggtctgaatctttcctttgccaatggatttccgtctgtcagtaatgcagtgctatgtgccaaagcatcgatgctattacagaatgtgcaccctgccattctccttaggttcctgcgggagcatagatcagaatgggcagacaacaatatggatgcttacacagctgctgctattaaagttggcccttgcagcttttcaggatctcgtgttggaaactatggaggtcaagttatactccccctagcacacacaattgagcatgaagagtttttggaagtcattaaattggaaggagttgctcattctcctgatgacacaataatgcccagagaaatgtttcttttgcaactttgcagtggaatggatgagaatgctgttggcacctgtgctgaacttatatctgctccaattgatgcttcctttgctgatgatgccccccttttaccttctggatttcgcatcattcctcttgaatctggaaaggaagcttccagccccaatcgcacccttgaccttgcatcttcccttgacgttggtcccagtggaaaccgagcttcagatgaatgtgctggaaattccagctatatgagatctgtgatgacaatagcatttgaatttgcatttgaaagccatatgcaagagcatgtagcagctatggcacgtcaatatgttcggagcattatatcatcggttcaaagggtaggattagcactttctccttctcatttgagttcacatgcagggcttaggtcaccattgggtactcctgaagcacaaacccttgctcattggatctgcaacagttataggtgctacttgggtgtggagctacttaaatctaataacgaggggaatgaatctttgctcaagtccttgtggcatcactcagatgcaatattatgctgcactctaaaggcattgccagtgtttactttctcgaaccaggctgggcttgacatgctggagaccaccctagttgcattacaagatatacctttggagaaaatatttgatgatcatgaacgaaaaattctcttttcagagtttccccagattattcaacagggttttgcatgtcttcagggtggtatttgtctttcaagcatggggcggcctgtctcatacgaaagagtcgttgcttggaaggtgctgaatgaagaagagaatgctcattgtatttgctttatgtttatgaactggtcttttgtttgacattttgttctaagtacagtagtgcttattgtaatctaaagtgttagataaagatttactcaagacacttgagctttgttggttggt

SEQ ID NO: 11111 - DNA, 2068 bp, Glycine max
  Clone ID: 701009936_FLI
gtccgcaggtatatgggtacaataactggcataagtgatttggattctgttcggtggccaaattctcattggcgctctgtcaaggttggttgggatgaatcaacagctggagagagacaaccacgagtgtctctgtgggaaattgagccattaacaacattcccgatgtatccatcattatttcccctcagactgaaacgtccatggcatcctggcacctcatctttgcatgatgggagagatgaagctactaatgggctaatgtggatgagaggtggacctgtagaccaaggtctcaattccctaaattttcaaggagctggtatgttgccctggatgcagcagagactggatccaactttactaggaaatgatcagaatcaacagtaccaagccatgttggcagctggtttacagaacttaggtagtggatatctcatgaagcaacaaatgatgaattttcagcagccttaccactatcttcaacaatctggaaacagtaattctcctttgcaacttcagcagcagcaaccaattcaacaatctgtgtcttctaacatgctgcagccacaagctcacgtgttgacagagaacttctctcagcacctccttcagaaaccacataacaatcaagaagtccaagcacaacagcagcaacatacttatcaagactcgctcttaattccgagtgatcaactccatcagagacaacactctggcattccttcaccatcatattcaaaaccggatttcttggattcgagcatgaagttccctgcttcagtttctcccgggcaaaacatgcttagttcactttgtcctgaaggaagtggcagtctcttgaatttatcgaggagcagtctgtccttgctgactgaacagttaccgcaacagcaatggactcaaaaatatgcacctgtgcaggtcaacacctatggaggcactgtgtcacatgcacaatattctggaaaagattctgcaatggtgctaccacattgtaactcggatgcccaaaattctacgctttttggtgtcaatattgattcatctggccttctccccatcacagtccctggttacaccacctcgtctgctgacactaattcatcaacaatgccattagcggattctggtttccagggttctctatatggttgcatggattcatcggagttgttgcaaagcgcagggcatgttgacccagaaaaccagagtcaaacctttgtcaaggtttacaaatcagggtcagttgggcgctcacttgacatatccaggttcagcagctatcatgaactacgcgaggagttggctcagatgtttggaattgaggggaagttagaagaccctcttagatcaggctggcagcttgtgttcgttgacagggagaatgatgttcttctccttggagatgatccgtgggaatcattcgtcaataatgtttggtatatcaaaatactttcacctgaagacattcagaaaatgggggaacaagcggtagaatcccttgcattaggttcaggacaaaggctaaatggcactggtgccgagtctcaggacatagtttctggaccaccatcaattggctcacttgagtactgagaaaattgaaacatgtattccttcagaccccatggtcaagagaatttctctacatgtttttattacttaagttggaatatgttgtgtatgatctgttcccccctctcaccctcattattactatcagcatttgaagaaaaatatacatttatgattaaaaaaaaaccttaggacatgcttctgtgccaatttgaacttggggcactgcaagctagagttagtgttactgctattttagcataatattttattcaacttttgcatgaactaatgtactctagataggaaactagagaaggctgtttatgcttttgaactgtctatgtattctaaaatgccatcacttcccagttaaggggtcgaacttttacctcaaaaaatgtatgagtagtattttactatattgccattgaaaccatcaacccaccatacgacatgtctcttaaatgctactattttgtagctctat

SEQ ID NO: 11112 - DNA, 1334 bp, Glycine max
  Clone ID: 701009968_FLI
cttgttcacccttccccttctccttacttctcactctctttccaaaacactccctttctctttccccttacccttcttctgtgtgtgatgatgtagatagagaataaaaagagaccagtgtgcagtgagaaagagacgaacacagtccgaggaacaaccacgtgtatgggaaggagttccagtccatgctggaaggactcgacgaagaagggtgcgtggaagaagcagggcaccactctgagaagaaacgacgactaaacgtagatcaggtgaaggccttggagaagaacttcgaagtagagaacaaactggaacctgaccgaaaggtgaagctcgcgcaagaactcggcttgcaaccaagacaagttgcggtttggttccaaaaccgccgtgccagatggaaaacaaagcaattggaaagagattacggcgtcctcaaagccaattacggatcacttaaacttaactttgacaccctccaacaagacaacgaagccttactcaaacagataaaggaattgaaatcgaggctggtgcaagaagagaacaacaacaacactgaaagcgatgtttcggtgaaggaagagatgatagccactctgcaggatagtaacccgctctgtgaatccgccattcctggatcggactcgaaggagttgagttacgagtgtttcaacaagagtgatgaggtgggagggggttctgtgttccctgtggatttcaaagatgggtcttctgatagcgactcaagtgcgatcttgaacgaggagaacaacaaccacagccccaacaacaacgcggcgatttcgtcgtgtggggttctgcaaagtcacgggcttttgtcgtcgccttcttcttcgtcgatgaacaactgtttccagttccagaaacagtaccagacgacgacgcagtacgtgaagatggaggagcacaattttctcagcgccgacgaggcctgcaatttcttctcggacgaacaagcaccaactctgcagtggtactgttcagaggaatggagttaagagggaagaagaagaagcttaattaattgagagcgagggagggaatagaaagaataaggcattttgcagggtgtatagtaatgggatggagagagaaacattgtaaaaatgaaatggtcaaggattgaagaagagagggaaattgaagagcttgagagagaggggatggggtcgaagcacgcatggcgtggggtcggagatgagaggttgatgacgataaaaaaaaaggggggtaataataatcatcaacatccgtgcggggaaaggggagtaatttatgaataataataatgattaggtcgtaatgaagtg

SEQ ID NO: 11113 - DNA, 1285 bp, Glycine max
  Clone ID: 701010007_FLI
ataatttttgcaaatgaaatgaaggtaccacgacttaagtcactgactgcaaatttgcatcgcatgggtgtatctaacactgtagtgtgtaactatgatggaaaggagcttccaaaggttttaggtgtaaatgctgttgatagagtattattggatgccccttgcagtggaactggggttatttccaaagatgagtctgttaaaacctctaaaagtctggaagatatacagaaatgtgcgcatctacagaaggagctcattcttgcagcaattgacatggtggatgctaattcaaagtctgggggatatgttgtttattctacatgctcaattatggttgccgagaatgagtcagttattgactatgcactcaaaaagcgggatgttaaattggttccttgtggacttgattttgggcgtccaggatttacaaagtttagggaacaacgttttcacccttctttagaaaagacaaggcgtttctatcctcacgtacagaatatggatggtttttttgttgcaaagttgaaaaaaatgagcagctcaaagcctggtgcaatatcatcagaaacagccgagaaagaagacactacctcgttcgtggaggaaaaggagaaatcaagtgatggcataaaagaaaatggcaatgtatcttctgaatcagaaaaggggaagaaaagaaagttcccctcaaaaccaagtaacggtctaaaatcaaatggcaaagaatcttcagaatctgaacccaaaaagaggaataaaaggcaatttccatctaaggaagagatttcaaaagccagggaggataagagaaatgctttaagagaaaaaaggagaaaaggtggcaaacaacagaagaacaaaaaatgatcaaagccagtggcaatacatgaggcagttatagcaccgactcgactcgactcgactcgaagatggaagtactggggtggttgcttgtcataggagtgcaccccggaatcagtggcatgccctaatctagggcacatttttgttttgtttttaaggttattatttagccgaggtatattttataacttccatctgcaaaggtgtaaatcagaaagaaaaaatatttctttttcgtggcatcaattatttggggtttattttcttatcattatcttcaatcttcatgtctattgtcttggatgttaattatccttctttccattacacgtgcttcaaatattgatgattcaccatgtttcagatgttactgttatgttttcatgatcaagtctatctattattaaacacttaatag

SEQ ID NO: 11114 - DNA, 1972 bp, Glycine max
  Clone ID: 701010364_FLI
gggtaatgagtgattattattgttgtatctgagtgatgatgtattgatgtatatttggatttgccattgaatctgaatctgataggaaaaaaaacaaaaaggagcagatgggtagctcaggtttctcatggaaattggcggatcatccaaagcttccaaagggtaagactgtggctgttgtggtattggatggttggggagaggccacacccaatgagtacaactgcatccacaaggccgaaacaccctgcatggattcacttaaaaagggtgctcctgaacggtggagattggtcagggctcatggtactgctgtaggacttccaacagaagatgacatgggcaatagtgaagttggtcacaatgcccttggggctggtcgcatatttgctcagggtgctaagcttgtcgaccttgctctagcctctggaaaaatttttgaaggagaaggtttcaagtacataaaggaatgttttgaaaatggcacattgcatctcattgggctactgagtgatggtggagttcactccagacttgatcagttgcagttgttgcttaaaggagttagtgagcgaggtgttaaaagagtccgtgtccatattcttacagatggccgtgatgttttggatggctcaagtgtggggtttgtggaaacccttgaaaatgatcttgcaaacttgcgcgcaaaaggtgtcgatgctaggatagcatcaggtggaggtcgtatgaatgtcacaatggatcgttatgagaatgattggagtgttgtgaaacgagggtgggatgctcaagttcttggtgaagccccttataagtttacaaatgctcttgaagctgtcaagaagctgagggcagaaccaaaggccaatgaccaatatttgcctccttttgttattgttgacgagagtgggaaacctgttggtccgatagttgatggtgatgctgttgttacattcaacttccgagctgatcgtatgacaatgattgctaaagctcttgagtatgaaaattttgacaaatttgatagagttcgttacccaaaaatccgctatgctggaatgcttgaatatgatggtgaattgaaacttccaagtcattaccttgtttctccaccagagattgacaggacttctggtgaatatttagtgtataatggtattcggacttttgcttgcagtgagactgttaaatttggccacgtcacattcttctggaatggaaaccgctctgggtattttaatgcagaattggaggaatatgtggaaattcctagtgattctgggattacattcaatgaacaaccattaatgaaagcattgcagattgctgaaaaggctagggatgctattcttagcgggaaatttgatcaggtacgcgtcaaccttccaaatggtgacatggtggggcatacaggtgacattgaagcaacagttgtggcatgcaaggcagctgatgctgctgtgaagatgattcttgatgcaatagagcaagtgggtggaatttatgttgtcacagctgaccacgggaatgctgaggatatggtcaagagggataaatctggaaaaccacttctaggcaaggatggaaaaatccagattcttacttcccatactcttgagcctgtgccaattgctattggaggtcctggattggcccctggtgtcagattccgcaacgatgttccaactggtggacttgccaacgttgctgcaactgtgatgaatcttcatggatttgaggctcccagcgactacgagacaactctgatagaagtagttgataactaggaaccaatagatgattttttttttttaatttgcaaaaactcagggtaagcattgcagcccacaaaataattgaaagttttcatccttccacatgtgtggtggttttgttcttatgagttaccaaatttcagtctggagttgacagaacagtataaccaattaatggcattttgacactttctcct

SEQ ID NO: 11115 - DNA, 604 bp, Glycine max
  Clone ID: 701010688_FLI
gtgagtactctgaaagagagggttacaagggttctgaatatgcacctacatatgaagacaaagatggtgactggatgctagttggagatgttccatgggacatgtttatgacttcctgcaaaaggctaagagtcatgaaaggctcagaagctagagggttgggttgtggtgtgtgacaaacagttaatttactatggctatgatgaggagattaaatcattctttcatcaattcagttcttggaactaagggattttgaatcaatgcttagctatctgtctatctatcaccatgccaatctgggaggactctaaagtagggatatggaaggctctttctacaagttttgtcaatatttctggttattaattttagcatatgtgattgggggtgctatatgctattatttccattgaaccctttcaagaggaacctcagagaaatttgtcttaaacgaagtttgtggacaagagagataaaagggattgatttgttcatccaaggttttttttttttctttttctttttatctcacacaaaaatatagtgtaatacatcaaatattcatgtaatactttgcaattcaatggacacaaaattaact

SEQ ID NO: 11116 - DNA, 1260 bp, Glycine max
  Clone ID: 701011677_FLI
gatgatactatcaaacaatgaagactatggggaagagttagttgctgactcctatctcctccctgcagcagctttgggccagaaatcaagcaatgagttaaagaagtatgttttctcatctcccaatcccacagctaagcttggatttggtggcacccaattaggggttcaaccatccccagtggtggcagctttcagctcaagagggccaaatgtgctcacaccaaaaatactcaaaccagacctgattgctccaggagtcaacatcctagctgggtggactggtgcagttggaccaactggcttgactgaagacaccagacatgtggaattcaacatcatttcaggcacttccatgtcctgcccccatgtcactggcttagctgcccttcttaagggcactcacccagaatggagccctgcagctataaggtctgccctcatgaccacagcttacagaacctacaaaaatggccaaaccataaaagatgtcgccaccgggctaccggctacgccatttgattatggggccggacacgttgatccagtggctgcgtttgatcctggtcttgtgtatgatacttccgtggatgactacttgagcttcttctgtgccttaaactacagttcctatcaaataaagcttgttgcaagaagagacttcacctgcagcaaaaggaacaattacagagtggaagatctcaattacccatcttttgctgttcctttcaacacagcttatggagtaaagggtggttctcgcaaaccagccactgtccaatatacaaggactttaacaaacgtgggtgccccggcaacgtataaagtttcggtgtcgcagtctccctcggtgaagattatggttcaaccacaaacacttagtttcgggggacttaatgagaagaagaactacacagttacgttcacgtcttcgtcaaagccttctggaacaaacagctttgcttatctggaatggtcggatgggaaacataaggttactagtcccattgctttcagctggacttagactctgatttttaaaagccctaactttgaattacctgttgcaagcaaacgtgctcgtcttcatgaataattgtatctctttgtttttattctgcttttggtgcagcaaaaggggcactgatgttatgtttctctttgctgtactcctttgaaaattagtacagaatgattgtacagaaaagaaacagggtaatggtgtacctgaataaatgacagtaagctctttcttatccc

SEQ ID NO: 11117 - DNA, 1220 bp, Glycine max
  Clone ID: 701011736_FLI
gtctctcttgaggttgcagacttagagagagagagagataatgggtctcatttcaatgcaattcaggttctgaaaaccaaagcttttcataggaaaagttgtgctaagatgccggggaaagctgacactgatgattggcgagtagagcgcggtgagcagattcagtttcagtcttccatttactctcatcatcagccttggtggtgtggagtgggggaaaatgcctctaaatcatcttcagctgatcagttaaatggttcaatcgtgaatggtatcacgcagtctgagaccaatgataagtgaaggtgttgccaaagaataccaaaacatcaaacatgccgtgttgtcaaccccatttaccatggacaaacatcttgctccaaatccccagatggaacttgttggtcattcagttgttttaacatctccttattcagatgcacagcatggtcaaatcttgactacttacgggcaacaagttatgataaaccctcaattgtacggaatgtatcatgctagaatgcctttgccacctgaaatggaagaggagcctgtttatgtcaatgcaaagcagtatcatggtattttgaggcgaagacagtcacgtgctaaggctgagcttgaaaagaaagtaatcaaaaacaggaagccatacctccatgaatcccgtcaccttcatgccatgagaagggctagaggcaatggtggtcgctttctcaacaaaaagaagctcgaaaattacaattctgatgccacttcagacattgggcaaaatactggtgcaaacccctcaacaaactcacctaacactcaacatttgttcaccaacaatgagaatctaggctcatcaaatgcgtcacaagccacggttcaggacatgcacagagtggagagtttcaatattggttaccataatggaaatggtcttgcagaactgtaccattcacaagcaaatggaaaaaaggagggaaactgctttggtaaagagagggaccctaataatggggctttcaaatgacacttcgcccagccatacagcaacagttaggtgaagatgaagggtttttatctcatccaacttgtgatgctgtattgaaggcaattcattcttggcttagttaagtggtgagaccagtgacatggagtacactctgccttgtttggtctctccccttgcatttgtttctctttacaagtccatatgtaaaaatggataacgg

SEQ ID NO: 11118 - DNA, 921 bp, Glycine max
  Clone ID: 701011848_FLI
ctctccaaagccaaagacgaagccgcgcgcctcgtcgctcgcgatttccgcctcaagtcctccgagtaccgatcccaagctgcgaggattagggagattttggagaatctgggattggcgcaggagagcttgccctccaatgtggttacatcggcacaagttcttgcgaatgtcgccaacttgttgaatataagagatactgaaatgagtagctttcttgtagcaatgggtgatatttccttgaggaagactgaagttgaggaaaaaagggctgaagtgaacaaggaatccaagcttctacttgattacaccagaaaggccatagccaggctaacctatttaaaaagaacacttgctcagttagaagacgaggttgccccatgtgaggctcagaaggaaagctgggagacaaacttacaagtaatggctgcaaaagaaagacagtacaaccagcaatgtgacaactacaagagaatgctggatcgttcaggttataacccagaggttagccatgggattttggttgaaatggccgagcatagaaaggagctagagaagaaaactaagcccatccttgatactctgaggagttaccaagatttgcctccggataaagctttggctgccttagcaattgaggataagaaaaggcagtatgccgatgctgagaagtatcttgaagatgtattgcagtcagctcttgctagttctgagtgatttagtactataatttttcatttattttttttgtaaatttgcttgcttttaagattctatttttcaaccttgctaaagatgtgtatggacaaatgtattacgtaagttggctttgcttggactggactgaatgggatcaggtgcagttgtattttaaattgcacatcatgcggtcatcgtccaattctcaggaaaatttgttgc

SEQ ID NO: 11119 - DNA, 1690 bp, Glycine max
  Clone ID: 701011957_FLI
atcgctgcctgatcgagcgatacggtttctccgaagacgacatcaccgttttgatcgacacggacgagtcctacacggagcccaccgggaagaacatccggtcagcgctgaccaggctggtccgatcggcggagcccggggacgttctgtttgtgcactacagcggacacggcacgcgcctccccgcggaaaccggagaggacgatgacactggttatgatgaatgcattgttccttctgacatgaaccttatcaccgatgatgatttcagagaatttgttgatggggtccctagaggttgcaggatcacaattgtgtctgattcttgccacagtggtggcctacttgaagaagctaaggagcagataggagagagcacaaagggagaggaggaacaatctagctctggctttggattttcaagttttctacatcggactgtggaagatgccattgagtctcgcggattccatatcccttcagcgttgcgccacaacagaggcagggatgatgatggtgatgaagctcaaaatagggatattgaacttccggatgggggctatgtaaagaacaggtctttgcccctttcaaccctcattgatatactcaagcagaaaactgggaaagatgatatagatgttgggaaactgagacctacccttttcgatgtttttggggaagatgctagtcctaaagtgaaaaagttcatgaatgttatttttaacaaactccaacatggaagtgatgaaagtgggggtggaatattggggctggtgggtggtcttgcccaagagtttctcaagcaaaagcttgatgacaatgatgagggatatgcaaagcctgcactggagacaaaagtggaaagtaagcatgaggcatacgctggaccaaccaaacgcggccttccggatggtgggatattgatgagtggatgtcagactgaccaaacttctgcagatgcaagtcctgcaggcaacgctgccagtgcttatggtgcttttagcaatgcgatacaggctataattgaggagactgatggtgcaatcacaaaccaagaacttgttcaaagggcaagagagaagctgaagaactccggtttcacacaaaaacctggactctattgcagtgatcaccatgttgatgctccttttgtgtgttgatctcttctcatctgatgactgatgcagagaaagagagaataatgtgtgttgtttatagtatgcttgtgtattgctgtatatgtttggacaatcaaattgaagttagtgtgttttcatacagttttcctatgcatcactattatcaggtacggaccattccctccaacattttagcacttctaatgtctccgctgattacagcattatggtgtatttgctgctacttgaccattttgcggggagaccaaactatcagagcaagttctatgcaccaaaccacagacttcggctctgtaaatctgaataaaatggtgtatgtgaaattattataaaatatatggttaagttttgtatttcctttgcaacattcttgcaactttgtaaggattttaatttgttgaacttagttgtagtatacttataatgttatgtttgtttctctttgttgagtagtctagaaaataggagaaattgactgtatttggatgaagaatttcaaaattttaaagaatttgaaatgcttagaattt

SEQ ID NO: 11120 - DNA, 1052 bp, Glycine max; identical to SEQ ID NO: 10204
  Clone ID: 701011990_FLI

SEQ ID NO: 11121 - DNA, 1046 bp, Glycine max
  Clone ID: 701012346_FLI
attttgcttcagttgtgaaggttgtcagatgggggcggtctgtatatgcaaatattcagaaatttatccagtttcagcttacagtaaatgtggccgctctagtgattaatgttgttgctgcagtttcgtctggtgatgttccattaaatgcagtgcagcttctttgggtgaatcttatcatggatactctgggagcgctggccctggcaactgaaccaccaactgatcacctcatggatcgaactccagtgggtcgaagagaacctctcataacaaatattatgtgaggaatttgctgatacaggcaatgtaccaagtgtctgtcttgcttgtactcaatttccgaggcataagcatactgggtctgagccatgacagaaaagaccatgcaatcaaagtgaagaatactttgatattcaatgcatttgttctctgtcaaatctttaatgaatttaatgctcgaaagccagatgaattcaacatattcaaaggagtcacaagaaactacctctttatgggtatcattggattaactgttgtgcttcagattgtcatcattttatttcttggcaaatttacaacaacagtgaggcttaattggaagcagtggctcatctctgtcgttattggattgattggttggcctcttgctgtgattgggaaattgataccagtgccaacaactcccatcaacaatgttttttcaaaatttcgaatttctagaaaggatcatgaggaatctcaatagatttggcgttgtgctgtttcaaacaattctgctgtttcttttgttctctgactgtcagcatatactggaaaggatactgcatacgaaaagcgtttatatttctactgatctagcatttacttgttaatttgtagagaaatttggaattggtttttatacctaggttctaataagaatgcaccggatctcagttagtcttggtttttgtccatacaagtttgaaaaatgttgattaatattccgcagatttgaaagttgtaaagatgtggatttcaatttggttatttgttctttgatt

SEQ ID NO: 11122 - DNA, 1660 bp, Glycine max
  Clone ID: 701012412_FLI
ctaacaggatggtcaagtcatgttgcgttatgtgcttgtgtttgatcttacttcacattttcctgcgctttgtgccaatacagtcagcacctgaaagtgccattgtgacacagattcctggcttcagtggcactctaccttccaagcactatgctgggtatgtgacggtggataagagtcatgggaggaacttgtactactattttgttgaatcagagggtaaaccttccgaggaccctgtggttctgtggcttaatgggggacctggctgctctagcttcgatggattcatatatgagcatggtccttttaattttgaggcagcaaagacaagggggggtcttcccacactgcacctcaatccatacagctggtcaaaggtttccagtgttatatatttggattctcctgctggtgtggggttttcatactcagagaataaaactgattacataactggagacataaagactgccactgattctcatgcctttctccttaagtggtttgaactataccccgagttcctttccaacccgttcttcattgctggagagtcatatgcaggagtttatgtgcctactctcgcttctgaagtagtgaaaggaattgatgccggggtggagcccaaactgaatttcaagggttacatggttggaaatggtgtcacagatgaacaaattgatggcaatgctcttgttccatttgtacatgggatgggacttatcccagatgaactgtttgaggaggttaaccgtgagtgcaatgggaatttttatgatccaacaagtgctaattgttctagcaagctttcaaaagttgatgagttggttgatgagataaacatatataacattctagaaccatgctatcacggcacagaagcagagaagattacagaatcctatattaggatgccatctaccttccggaagttgggtgagaccgaaagaccttttcctgtgaggaaaagaatgttcggtcgtgcttggcccctaagagctcctgtgagagatggaattgtaccaacttggccacaactgatgaatagtaaatctgctccaccatgcacggacgatgaggttgcaaattcatggttaaacaatgaagcagtcaggacagcaattcatactgcacagaaaagtgtggtcagtagttgggatttatgcactgacagaatttacttcgatcatgatgctgggagcatgatcaagtaccacaagaacttaacttccaaaggttatcgtgcacttatattcagcggcgatcatgacatgtgtgttccatacacggggagtcaagtgtggacgagatcagttggatacaagattgttgatgaatggaggccttggtcatccaatggtcaagttgctgggtatacacaaggatacgacaaaaatcttacttttctgaccgtaaagggatctgggcatactgttccggaatataaaccacgagaggcattggacttttacaaacgctttctcgctggattgccaatatgatatagaggaaaagagaagatggagtaacactgcttcttattttgtttgtactttgttaataataatgatttaaggatgtatgaagacacattttatatttgtgttctatgtttaccttattaatttattaccatattaatattaaactagatgtc

SEQ ID NO: 11123 - DNA, 1000 bp, Glycine max
  Clone ID: 701012504_FLI
cttttctgtcttgtgcatccttagtcatttctcatattactcaagtcaaggtacattacattcatagatgatgattaataaagctttaataaacaagagaagatgagtacttaggcttccttaagctccttagtgctgctccttgcagctctaattctatcccctcaagttcttgcaaactatgagaatcccccagtgtacaagcctcccactgagaaaccaccagtttataagcccccagttgagaagcctcctgtttacaaacctccagttgaaaaccccccaatttataagcctccagtagagaagccaccagtgtacaagcccccagttgagaaacccccagtttataagcccccagttgagaaaccaccagtgtacaagcccccagttgaaaaaccaccagtgtacaagcccccagttgaaaaacccccagtgtacaagcccccagttgaaaaaccaccagtgtacaagcccccagttgagaagcccccagtttacaagcccccagttgagaagccaccagtttacaagcccccagttgagaagccaccagtatacaagcccccagttgagaagcctccagtgtacaagccaccagtagagaagcctccagtttacaagccaccagtagagaaacctccagtttacaagcccccagtggagaaacctcctatttacaagccacctgttgagaagcctccggtctacaagccaccatatggaaagccaccatacccaaagtaccctccaactgatgacacccatttctgaaggatgtcaagaggtgtattgagtatatgctaaataagaggtgctcaaaatgtagttatagattacaaattattgcaagggttgctcttagcttcttcatttcaagcttttgtttacactttgcagtgctatggcaaagataagagtatcatggatggaaaaagggggggggaaaatgttgctttgtactccaaattatgaataatagaactttatattatttatc

SEQ ID NO: 11124 - DNA, 1335 bp, Glycine max
  Clone ID: 701012510_FLI
gatgaaacaagctgcagcacttgcgaggagtgcaaagagccaggaagaggtttgttggtgtaaggcaaaggccatcaggtagatgggtggctgagatcaaagacaccattcagaagataagagtgtggctgggaacttttgacactgctgaggaagctgcaagagcctatgatgaggctgcttgcttgcttcgtggcaccaacacaaggactaacttctggccttgttctcaatcctccacaagtccagctctttcctcaaagatcaccaatctcctccttcaaaggcttaaagaaaggaacaacaacaacacttgttcctcgtcctcgtcctcctccacttcacttctcatcaaccaccaacaaatgcatcagcaagttggtgcatatggagaaggttcaacacaattctcaattgaccaattcactgatttcctcaatgaccctgaagattatagcacaagcaacaatgacttcatcaacaacagtgcacaaattgactacattactagtagctttgaatcatgcttaactgaaaaagatggtgggactaaaattgatatgcaatacaaatccaggaatgtgacaccacagacttcaagcaatgacagcaattcaggagtggaggatagtgaagaagaaggctctgatttgggtgtgcaaagcacaaatttggatgtccatgattttaagtttttggacaacattgctccacctagttactactctccctttgagatggctgaagagatggaggaggagcctgtggagcctgagaatgagaactatggcgatgagccttcaatgcttagagctgtgatgaagagaatgacttatgagaggaagttctcagcttctctctatgccttcaatggaatacctgaatgcttgaagttgaaacttgaatcagggaacatgaagggaagaggactagctgatcaattaacaagccttcaaatggcttgtagcaaaaacatactcgagaagaacaaggaggagaaagaatacattggaacaatggataggagacaggaagaagaacaccaacaaacatcacctgacatggattcttcaagtgttgatggggaactgttgctttggaattcacttgatcttcctcctatttgctttgttaacttgctagaaaacggttcattcaattagcaatatccattcattttctgtaacattatttatgctgagcacaactatattgtaacattagactttgtagtaagcatgaagtaatatcttctgctaattgaaattatttaaattcttatttcattcataattcctagtatcaatgagtaacattgaatttaaagtttttctt

SEQ ID NO: 11125 - DNA, 1283 bp, Glycine max
  Clone ID: 701012537_FLI
cacactccatcacccccatatataccccttctcctctcacactaattaacacactcatcaaaaaacccttctttctttcaggttcattacttgatcagtgtcaaaagggtagttgcaaattgcaatggctaagcatgatgttgagggtggttccttctcagcaaaggactaccatgatcctcctccagcacctttgattgatgctgaggaactcacacagtggtccttctacagggctttgattgctgaattcattgccacattacttttcctttacatcacagtgctcactgtgattggttacaagagccagagtgatgtcaaggccgggggtgatgtgtgtggtggagttggcattcttggcattgcttgggcctttggtggcatgatcttcatccttgtttactgcactgctggaatctccgggggtcacataaacccagcagtgacatttgggctcttcttggctcgcaaggtatctttgattagagccataatgtacatggtggctcaatgcttgggagccatatgtggagttgggttggttaaggcattccaaaaggcatactacaacaggtatggtggtggagccaatgaactcagtgaagggtacagcacaggtgttggattgggtgctgagattattggaaccttcgttttggtctacactgtcttctctgcaactgaccccaagaggaatgctagagattctcatgtgccggttttggcaccacttccaattggctttgctgtgttcatggttcacttggcaaccatcccagtaacaggcactggcattaaccctgctaggagcctaggagctgctgtcatgtacaaccaacagaaggcctgggatgaccattggatcttttgggttggaccatttattggagcagccattgcagccttctaccaccaatttatcttgagagcaggtgctgctaaggctcttggatcattcaggagcaaccccactatttgagtcaatttcctcttcataatcatgggtttcaaaaaggagataattggaagcaaaatgacttgatattgtaagaataataatgttattaataatggcaattgcttgtgcttttattgcaagcttttctttgatcctatgtagattaaaggttctttcaagacaagagcctttggtaaataccctttagtattttcaagcactttcctttcttcagtgtgtgttcttttcttttaggtaattaatctcttctactcaatgtattcatgaaaaaaaaaattatataatatccatgcttttactc

SEQ ID NO: 11126 - DNA, 1835 bp, Glycine max
  Clone ID: 701012620_FLI
tgtgactccaaacaaagcccacacaccaacttcatttccattcacaatgtcaatttcctccacttccaactccctcattccccccaaatctttaatcccccaatcccaccccctcattcccaacatcaggcccgggctccggcccaagcctggcccatccccttccatcctcgccgtccacgccgccgagcccgccaaaaaccccgtcgtcaccgacaagcccaagccccaagcccaacaatctgcatccccggccgcggcccgtgcaaccaaatgggccgtggacagctggaagtccaagaaggccctgcagctgcccgaataccccaaccaggaggatctcgaggccgtcctccgcaccctcgacgccttccctcccatcgtcttcgccggcgaggcccggacactcgaggagcacctcgccgaggccgccatgggaaatgccttcctcctccagggcggagactgtgccgagagcttcaaggagttcaatgccaacaacatccgtgacaccttccgcatcatcctccagatgagcgtcgtcatgatgttcggcggccaaatgcccgtcatcaaggtggggagaatggcggggcaatttgcgaagccgaggtcggattcgtttgaggagaagaacggcgtgaagcttccgagttacagaggggacaacattaacggagactcctttgacgagaagtcgaggattccggatccgcagaggatgattagggcttattgccaagccgcggcgacgctgaatcttctcagagctttcgccaccggtggttatgctgctatgcagagggttactcagtggaatttggacttcacggatcacagcgaacagggagataggtaccgagagcttgctaaccgagttgatgaggctcttggattcatggctgctgctgggctcacagtggaccatcccataatgagaacaactgaattctggacatctcatgagtgcttattgttgccttatgaacaatccctcaccaggttggattcaacttctggtctctactatgactgttcagcccatatgctctgggttggggaacgaaccaggcagcttgatggtgcccatgtcgagtttctaagaggagttgctaatcccttgggaattaaggtaagtgacaagatggatccaaatgagcttgttagactcattgagatcttgaatccccaaaacaaaccagggagaataactgtgattacgaggatgggagctgaaaatatgagggtgaagcttccacatctcatcagggcagtgcgcagagcagggcaaattgtcacctgggtcagtgatcctatgcatggaaacaccattaaggctccatgtggtcttaaaactcgccccttcgatttcatcagggctgaagtgagagcattctttgatgtgcacgagcaagaaggaagccacccaggaggggttcatctagagatgacgggtcagaatgtgaccgagtgcattggtgggtcaaggacggtcacatttgatgacttgagctcacgttaccacacacactgtgacccaaggctcaatgcttcacaatctcttgagcttgctttcatcatcgccgagcgtttgagaaagagcaggatcagatcgcagcaacctcttgcccctctaggagtgtaaaagtgccttcaaaaccaacaagagaaagatatttttgttcttttttttttttgtcctacatatttattattaatcgatggttgtcactttgattttgtgttgtgtttgtatgtgtatactacctagtaatgcgtttggactggcaaggacaagagtacttctatggataataaagaaacgaaaacgtttc

SEQ ID NO: 11127 - DNA, 1026 bp, Glycine max
  Clone ID: 701012770_FLI
cagcatcgaacccgtcgtagcagaaaaacttgtcaccatggtttcttccgacaaggatccacgagaggatgtccttcaagcctggtacatggatgatagtgatgaagatcaaagactcccccaccacaaagaacccaaggagtttgtctcgttggaccaacttgctgaacttggagtccttagctggaaactagatgctgataaccatgaaaatgatccagagctgaagaagattcgtgaagagcgtggttacacctacatggatgtttgtgaggtctgcccagaaaagttgccaaattatgaacagaaaatcaaaagcttctttgaagagcatcttcacactgatgaggagatccgcttttgtgctgctggaagtggctattttgatgttagggatcgcaatgaagcttggattcgtgtgtgggtcaagaaaggaggaatgatcatcttacctgccggaatttatcatcgctttacgctagatgagagcaactacattaaggctttgcgtttttttgttggtgagccagtttggactccatacaatcgtccaaatgaccatctccctgcaagacaacaatatgtcaaggattttgtggaaaaggatgttagcaaccatgctgttgatgccgccgcgtaagatctggttctgcctaatcatagtaccacatgaaaaggaccaagactttgttgctaaagtaaggtttgaaaaaaagaaaataatggtgtctttaaataaagggtcctggcttgttatgccttgatgtaccctcgccagtgtttttgttgcctgtccctgtataaagattgcattgtattattattagaattgggtacagaataaacataagcatatgttagtatgctgatgtatatttatgtatgcttgggctgtatttaaattttacgagataaaattgaagcgggagaacctagccttaaatataggtgacgtcatagatagatgtggtttagtgtgatgctaatatttttcatgatgaatatctcatgcgctttaaagttgtc

SEQ ID NO: 11128 - DNA, 1542 bp, Glycine max
  Clone ID: 701012802_FLI
gtctctgttagaagatagaagaagaaatatcttgttgcgtgttgcgatatcataacatcgatggcctccatcatccaaatctcacaatgtcgtcaactcttctcccagtgacagcaactcccattttcactctcaccaaaaccctccctctccccaaaccctacctactctcctataaattcaaattcaacaccctcgtccgccgctgctccctctccgaccacgaggagcagcgctggctccgcgaagagcagcgctggctccgcgacgaacaccgctggctccgtgaggagcagcgctgggctcgcgagcgcgaccaactcctccgcgagatcgccgacctcaagctccaaatccaggcgctggagcgtcgcctcttgacgcgcgatttgtcctctccggcttccatctccgacgccgtcgccaatgtcacgttgctcttgcaggtgctcaaggacaagaatctggttctcgagagcggttcgagcctgcggaacacggaggaggtgaagcaattggaagaggtcgtcgaacatgtgaaggaggttgtggtggttgaggaatctgctagggttgaaaagaggatctcgttgcggataggttccgaaggtgaagaggttcgacagatgcaggaagcattgttgaaattggggttttactctggcgaggaagacatggagtattccagcttctcaagtggaaccgagcgtgctgtgaagacttggcaagctgcattaggtgctcctgaggatggtatcatgacagctgaacttcttgaaaggttgtatttggagataaggaataaggacaccggcagtgcgactcaagacaaacaatctactactgttttgccaaaggaagttgaaaatggagctgcagttgcttcagtggcagaaaattcagagggtcagcaaaaagatgtgaaaagtgataagggaacagaagtctcccaccggggagtttttctccttggagagaatcggtgggaagaaccatcaagacttttcacaaggaatggagttgataggagcaagaacaaggatgtaacgacaaaatgccttcaatgtcgtggggaaggtcgcttgctgtgtacagttttttggaatgggtggacgagggtacaaaatgcccatattgtgaaggcctagggtatactgtatgtgatctatgtggagggaaaacaatggtataggtatgacatacatttctagttcatcgtttcatactcaggcatgtaattatcagtatcattgcatcacaaaattttgtatagtatgctatttaatcatcaaaactgggaaataggaacttaatatttgagagatttttaactttcaaggctttggagcttacagagctacgtgaaaatctgcagagaaacctcaaattacaacatagaacggtgcatgcatttttaaccttcaaaatgaatgaggtgatattccattctgagtaatactcaaacatacattttacccttgtccgaactacgtctgtttcaaactttatgatttgttaaatcgcaaaatgtaatgctatgtt

SEQ ID NO: 11129 - DNA, 639 bp, Glycine max
  Clone ID: 701013026_FLI
atttgaggttgttacagggatggccaagaaacaaggaaaggaaaagtcatcagtttcgaatcatagcagtaccaagtcgaagtcaaactctaagcgcggttctgaatcaaagtacacaaaagcaatgcaatccaaggacgaggacgatgaaggtgtgggtgtggaagaggaagacgaagatgaacatggagagactttgtgtggggcatgtggagagagttatgctgccgacgaattctggatttgctgtgacatctgtgagaaatggttccatggaaagtgcgtgaagattacccctgcaagggccgagcatatcaagcagtacaaatgtccatcttgcagcaacaagagagctcgaccttgacaacatcatggctaggatggttggtgactataatcttggcaattttatgactactaatttgtttagtaggtcaagtttattagtcttgctgtgaatttcaggtatattgcttcagatgttattacattaggtatatgagctgctgtcgattcatctaccattaggatatttgtttcataagtggacttgaatgttgttttgttatgtgtttctttaaaattaatgtagctgtgtaactgtgttgtgtccatagcttagtgaagtttatattatcc

SEQ ID NO: 11130 - DNA, 1503 bp, Glycine max
  Clone ID: 701013041_FLI
tgggagttaggttctgcacgctctgcttccagcgagtgttctttcttcgtttcaacaccttaatttgcacacgctgcttcttcagcttgagaaatggcacaagaaacctttctattcacatctgaatctgtaaacgagggtcaccccgacaagctgtgcgaccagatctctgatgcagtgctcgatgcgtgccttgaacaggaccctgacagcaaggttgcctgtgagacatgcaccaagaccaacatggtcatggtctttggagagatcacaaccaaggccaacgtagactatgagaagattgtccgtgacacatgccgcgaaattggattcatctctgatgatgttggtcttgatgctgacaaatgcaaggtgttggtcaacattgagcagcagagccctgatatcgcccagggtgtgcacggtcacttcaccaagcgcccagaggaggttggtgctggtgaccagggtcacatgtttggctatgccactgatgaaacccctgagtacatgcccctcagccatgtccttgcaaccaaactcggtgctcgcctcaccgaggttaggaaaaatggtacctgtgcttggctgaggccagatggcaagacacaagtaactgttgagtactacaatgacaatggtgccatggttccagttcgtgtccacactgtcctaatttccacccaacatgatgagactgtgagcaatgaccaaattgctgctgaccttaaagagcatgttatcaagcctgtcattcctgagaagtacctggatgagaagaccatcttccaccttaacccttctggccgttttgtcattggtggccctcatggtgatgctggtctcactggaagaaagatcatcattgatacctatggtgggtggggtgctcatggtggaggtgccttttcagggaaggaccctaccaaggttgacagaagtggtgcctatatcgtgaggcaggctgcaaagagtgttgtggcaaatggccttgccagaaggtgcattgtccaagtttcctatgccattggtgtccctgagcccttgtcagtgtttgtggacacttatggaactgggaagattcctgacaaggagattcttcaaattgtgaaggagaatttcgacttcagacctggaatgatcaccattaacttggaccttaagaggggtggccataggttcctcaagacagctgcttatggacactttggaagggatgaccctgacttcacctgggaagttgtgaagccactcaagtctgagaagcctcaagcttaagattgttgtgaagttaatcactcccttcaatggatgtcttgctaggtgtggatgaataatttgcgtgttccatgactactactacttcattcataggtctaatgtcatctcatcaatacttaaactgtttttttttttccttttctccttttactcacaatttattttttggttatgcaatgttaccgttttgatgcaatggaaattttatcagaattttgtacc

SEQ ID NO: 11131 - DNA, 1172 bp, Glycine max
  Clone ID: 701013063_FLI
cattattcactcacttcccccctcttcattttgtagtcctcctttacctgcaaaaaacagcagatggctcagcttaacctcatacttatctggttatttttattgagtctgtgcctttattcatgtcctacttcggcccagttaagtagacaccactatgcaaaaacatgccccaatgttgaaaacattgtcagagaagcagtcaaaaagaagtttcatcaaacatttgttacggttcctgctaccattcgtctcttcttccatgattgcttcgtgcagggttgtgatgcctcggttttggttgcatccacaaaaaacaacaaagcagagaaggatcacccagataatgtttcactagctggagatggatttgacacagtgattaaagcaaaagaagcagttgatgcagttccattgtgcaggaacaaagtttcatgtgctgatattttagccttggcaacccgtgatgttattgaactggccggtgggcctttctacgaggttgaattgggaagatttgatgggctaagatctaaagattcagatgtaaacgggaggctgcctcatccagagttcaacttgaaccagctcaattcactgtttgcggccaacggtctcacccaaacggaaatgatagctctatcaggtgctcacactgttggattctcccattgcaacaaattcacgaacagagtatacaatttcaagagcaaaagtcgagtggaccctacactgaacgagaaatacgcaacacagctaaagtcaatgtgcccaaggaatgtggatccaaggattgcaatcgatatggacccaagcactccacggtcattcgacaatgtttatttcaagaatcttcagcaagggaagggcctcttctcttcagaccaagttctcttcacggactcaagatccaaggccactgtaaatgcatttgctagtagcagcaaaatcttccatgccaacttcgccgctgctatgaccaaattgggccgagttggaatcaagaatgcacagaatggaaacattcgcaccgattgttcagtcatttaatttaagaagggacaacagattattatcaagtcaggggaattcgttatttatattagttaccctgtgtttaaaataataagtactgaaagtatttaatttctcaattgccatgattcctctgt

SEQ ID NO: 11132 - DNA, 1659 bp, Glycine max
  Clone ID: 701013076_FLI
caagagcttgtcaacttttacctcaaacacaagttgctcggcgatgatccccgtgtccacgtcatccctgtcattgatctttgcgatgtggaaccttggaatgtaccagtgatattagcatcgtcatcagctatacgatttggtgacccagattggtttttcttcagccctgttgatttcaagtacttgaaaagcaaaaggtttaacaggacaaccaagtgtggattctggaaagccactgggaaagaccgtgacattaggacaggggacactgataacactgtcattgggactaagaagactcttgtttactatcaaggccgtgtttcctgtggtgtcaagtccaactgggttattcacgaatatcatgctgttacctttcatgaaaaccagaggacttttgttttatgttgcttgatgaagaaacctgggaaaacaactgaaggcggaactgatcccctgatctgtgatgaaggggagcccagcagaagcatggtttctgactatgaaaatcagccaacagcagaaggaattgcatctgaaggtacttttacaggaatagaggcaatctttcaggcaaccccttgggcagagaattgcttctccccaatacaacagtctccgactcttattgagcaggaaggagcatcctttccaaactatgcatttaacaatgcctattttagaaatgaagacaacattatgcagactccatttgaaactacaaaggaagatgaattcctaaatttaatcttagccgatgaaagtatagtgatcaatgaagaaaataagcatgattttgtcaatagctctacccaatcagagtcattgaaaagggtatcctgtgaaagcagtgatacagatgctgaagtcatctctaaactggatgacaatattgtggatatttcaacagcatgtaatgattatcctaattcagatgaatactattcatcaaaaaggtttaaatcatcacatgatgctgtccatggtggaatatgttttctactttctaaccttgaagcaaaccaagagaaaaacgagagtatgtttcaagatagtttctggggaacagagacatcatcttgtgactccacactagataaacctttggagatcaattatattgatatttctagttctcctttcactccatggagatgagaaaattaatatcattgaagaccagtcaatttcgtatgatgggaactaagatctaagttagctccattagattggtagtagctattttggagtatgtcataaaatatgactagttctacaatagcaaatttattagaaaacaattctgtattagaaattgcataatggtagttatgcataaaaaataactatgggcagttatgtattaagatttaggagcttatatcctaacagtaaatctattagaaagtattaaaaactgcatgatagcagttatgcatagaaaacagccactagtagttatgtattaagagcatatatgtgatggtattagtagattgtgtaattaggaagtatgtgtagttgtttgcagtttatggacagagaatactctatgtaggagacttttgtctctaggacaacaagtgtattttgtatcaatgtattttgtgtgattttagtatttcaataatatatttcattagtttttggagggtg

SEQ ID NO: 11133 - DNA, 691 bp, Glycine max
  Clone ID: 701013103_FLI
gcaatatttaaaattggtaacagcagagatatgcctgaaattccggatcacctctcaagtgaggcaaagaatttcattcagctatgcttacaaagagatccatcagcccgcccaacagcccagaagttaatagagcatccctttattcgagatcagtcagcaacaaaagctacaaatgtcagaataaccagggatgctttcccctacatgtttgatggaagtcggacgcctccggtatagtcctcaatgcttatttattttctttttgaaattatgttccttttgcctcttacattctagttcctacatattttgatgtaatcagtataaagagggttccgttctcatatgaataacaggatgcaattgtcttgatatttgtctgatttcatcatttgtggttatccaatactggatcaacacgggattgtcatctatgtagaggtgctataataccatgtcaggattttatctcagggtttgtttaggtttttttgtgctctatgtatcttgtagctcaactttatatgtttagtattgtcaagtttaaaataatagattgtaaatatgtaataacttcatggatgaattgtttctgcaaatcaccgggtgcaattgacagtgaagtatgctttgttgtttggttgtgtctatagagttaggtgttaaacactgatacagtgttgcaatc

SEQ ID NO: 11134 - DNA, 1790 bp, Glycine max
  Clone ID: 701013157_FLI
ctccactgtgtgtgttgttatcataccctagaacaacgccacttaaactggatctcccttaatttgtatattttattgtattaatttttcttaattaccctctaaatattttcatcatcaggtggatgatcacaaggtcttgatgggttccaatggtggaagtagtaacaataataaggtaatggaaaaaccaggtcaaaatcaacttgtgcagcagcagcaacatccagaaaccctcaagtgccctcgttgtgactcatcaaacaccaagttctgctactacaacaactacagtttgtctcagcctagacacttctgcaaagcctgcaagcgctattggacaagaggtggaaccctcagaaacgttcctgttggtggaggctgcagaagaaacaagcgtgtaaagcgtccaataacaagcccttgttctgccgccattgacactgcttctaattcttctaactcttcttctgctcccactgctgctgcttcactacaaccccagatcgacactgcttcaacctcaaatcacatcaaccctttgttctatggattaccaagtagctctagcgatgtgaatcttccattgttctctaggttcggttctagaatctccagttccgggtttgatcttcagttgaataatgcccttggattaggtttttcatccggggttttgtccaatgaagctagtgataataacggttacagaagcgggtttggttcaaacaatatgcttctttcaagttatacatccactactactactactccagctatgtcttctcttttgcttcaacagaagttcatcagtggtggattgaaaaatgatgctgatagcagcaacactttccagcatggcttaagcttaacctcactagagcagttgcaaatagcaagtgatcatagcagtgaggcagggatggtggcattaaaagatgtgaaagtagaattaggacaaaacaacaacaggttggagtggaatggtggtgctttccaaagccagatccagcatgtgggcttgtacgatcctttgctttattggaataattcagcaacagctttgggtgtttggaacgatcaagctgctaatattggttcatcagtcacttctctgatctagaaaaatacaatccaatcgaatgaagaagtatggttttcaagtttgtctcccccttctgtcttgttgctgctacttttttcttttgttttgtttttcttcttttttttgggccaaaatgggaaattaaagggaggaaattaaggtgatacttgtaagaaaatgggaaagcaaaaggtgagaggagtttggatcggagcgatcatgtcagctgaatcctgcaaatatatataaatttctcttacaagattgggaaaagaattgcatatattgctctgagaggaacctgggatcctcttctctcatcttctcacagttgctgcgcagtgttctctacggaaatcctttctgttgaattaaagttccccatagttaagtaagttggtctttcattttgttatgtacatatggatgacatttcttttctttttcttatcttgtaatgaaccagctgtggttagctaggtggggtaggggatttactgggtatgatgctgtccttgaataaaggaactaatattggtttcatttttgttaactttgtgatgatttttgttttggatagggagaatgggaatatattgggtataatggtatagaagagagggggattatttacttggttttagatgattaatgagttaatgtatgtcggtggtttaatttggtg

SEQ ID NO: 11135 - DNA, 2107 bp, Glycine max
  Clone ID: 701013183_FLI
tccgagcagttttagggaaatacgcaccagggtcaacgtccccttcatgttcttctggccatgaccaagagaatagaagctctttggatttttacactggaatttttggacttgataagtcaaggataatggatacagtaaaccaagctatggaggagctcatcaagatggctaccgtgggggaaccattatggcttcgtagcttcgagactggtcgcgaaattcttaactatgatgaatatgttagggagtttgcagttgaaaattcaagcagtggaaagccaaggagatccattgaagcctcaagagacactgcagttgtttttgtggatctccctcggcttgtccaaagttttctagatgtgaatcagtggaaggaaatgtttccgtgtttaatatctaaggcggccactgttgatgtaatatgcaatggagagggtcctggcaggaatggtgcagtgcaactgatgtttgctgagctgcaaatgctcactcctatggtgcccacaagagaagtatattttgtccgtttctgcaagcagttgagtgctgaacagtgggcaatcgttgatgtatccatagacaaagtagaagacaacattgacgcgtccctcgtgaaatgcagaaaacgcccttccggttgcattattgaggacaagtccaatggccattgcaaagtaatatgggtggagcacttggaatgccagaagagtgcagtccattcaatgtatcgcaccattgtgaacagtggcctagcttttggggccaggcattggattgcgactctacaacttcaatgtgaacgtctagttttcttcatggcaacaaatgttcccatgaaggattcaaccggtgttgccacgttggccgggagaaaaagcattttgaagttggcacaaagaatgacatggagtttctgccatgcaattggcgcgtcaagcttccacacatggactaagtttacaagtaaaactggagaagacataaggataagttctagaaagaacttgaacgatcctggtgaacctcttgggttgatattgtgcgctgtttgttctgtatggttgcctgtctcacctaatgttctgtttgatttcctgagggatgaaacgcgacgaactgaagtaccactctcttgtctcctttccttctcaatccttttgtcaattttggttaataatttgaatggttaaatgtcctgatacgtatcacattatcttagtgggacatcatgtcaagtggtgggacagtgcagtccattgcaaatttagccaaaggacaagaccgaggaaatgccgtagccattcaagtaagttacttcggttcaaatttcaataccttaaaatgaaaatgcaaagtgcattgaggtaaaaaagacatggttctaagtgaaatatggtattcttctgatttggcagacaattaaatcgaaagaaaacagtgtgtggatactgcaagatagctacacaaacccttatgagtcaatggtggtatatgcttctgtggacattactggcactcagtctgtgatgacaggatgtgattcgagcaatcttgccatactgccctcaggattctctattattcctgatggtcttgagtcaaggccattggtgattagttcaaggcaggaagaaaaaaataccgagggaggatctttgtttacaatggcattccagattcttaccaatgcttctcccgctgccaagttaacaatggagtctgtggactcggtcaacactcttgtatcttgtacattgagaaatatccgaacgagtctacaatgtgaagatggctagtcaaaatcagataatcacttgatagagagtcatagactttaattagctgtgataatcttaggctctctattcccttttttggatggtattcggtttggcaaaaatagcttgcttttgtcccctttctccgtttctgggttagttttactcattattccactaccaaggagggttggttgagtttgtatatctgtatctgcagttctgtaggtagaaagatagacaaaaagcttttagaacctagagtattaagtatggcgtgtatagaattatcatttgttaattccttatgcagttggttttttggt

SEQ ID NO: 11136 - DNA, 1381 bp, Glycine max
  Clone ID: 701013187_FLI
gaagaaatgagtatgaaagacacaagctgcaggctttaaatcagcggcagaaattggttcttcagagaaaaactgaagaagctgcaatggccaccaagaggttaaaggagttgttagaagcacgtaaaacttccagccgagaaactttagttacaatgaatggaagtggaacaaatggtcagagcaatgagaaatctttacaacggtggcttgatcatgaactagaagtcatggtaaaagagcatgaagttcgttttgagtatgagaaacaaagccaagtgcgagctgcccttgcagaggaattggccatgctgaagcaagtaaatgagtttgctgcaaagggtcgcggtcctccaagaaagaatggatttgccagggcatcctccatgtcaccaaatgcaagaatggccagaatagcttcacttgagaacatgctgagcatatcatctaattcacttgtagcaatggcttctcaactttctgaggcagaagaaagagaacgagccttctctaatcgtggacgctggaatcagttgcgctctatgggagaagccaagaatttgcttcaatatatgtttaattctgttgcagatgctaggtgccaactctgggagaaggacatggagatcagggaaatgaaagatcaaatcaaagaacttgttggtctcttacggcaaagcgagatgaagagaaaggaagttgagaaggagctaaaagtaagagagcaagctgttggaaccacattggctacaccaccatctggagactccccaaatccatcgaaacaatatgctgaagacatgaaggggctcttatcaccagtgtctatgccagtgcctaaacagctaaaatacacgccaggggttgccaatggtttggtgagagaatcagcagcatttgtagatcagggtagaaggatggtacccatcggacagttgtcaatgaaaaaactagcaattgtaggacaagcttctggaaagttatggaggtggaaaagaagtcatcatcagtggttactacagttcaagtggaagtggcagaaaccatggagactttcagaatggatacgacacagtgatgagacaatcatgagaacaaaaccacgctcacaggctttgtcacgtatcaggtgatcttttttaggatcagcccagttcatgtggctcggtatctttcgacccacaagaattatcctagacacatggcattggaaataacagggcactaggagcagtgtaatataattggttgctgaagaaatgtatatacctgtcagtattgaataatgctgtccagatcttggaaattttgccataatttgtgcatatggagcatcttggaggtatgttgaaatgtgatgtttggacggagatacccaaat

SEQ ID NO: 11137 - DNA, 1028 bp, Glycine max
  Clone ID: 701013306_FLI
ctcaactccgcaggatctcttacaccacaacgacagagattcttcctcaacacaatcgaaaaaaaaaaagcttccgattctaaaaccagaacaacaaaaaagtaaaacacacacgtcattttaaaacatttcatttttttggttatttatttaaagagcgagtgttgtaacaaatggtgaagccgaagagcgtggagaaacccgcagaggaacaacaacaacgaagtgtttcatcgtacagaggagtacggaagaggaagtgggggaagtacgtgtcggaaattagtttacccaacagccgtcaaaggatttggttgggttcctatgacagcgccgagaaggcggcacgcgcgttcgacgctgccatgttctgcttacgtggcagcggcgccaaatttaatttcccgagtgacccacccaacatcgccggcggggggaacatgacctcctcccagattcagatcgcggcggcgcgtttcgccaattcggagccccgaaatgagcgttcggatcaacccgtggagtctttaacttcggatgaggaaacggcatcgtttccggtcatttcggatacggatacatcatctcctcctctctcagacgtgacgttccaaaacgacgccgaattagtgactgggtcgttccctgatatgttttcggatttcgggtcgggcgattttgtgcccgatttctccgattttccgagcttcgacgatttcagccgggacttcttcttgcatgaacttccgggtttcaatttcggagaagagaacttggatggattgataattcaggactcgttcttgtggaatttctaagcgggtcagggttcggataattttattatatccgaacccgatatcagaatccggatcggatccgggtttgggttgggtcaaattttgcgtgccaagccctccatgtgttagtagttagtgatgattatagttttttttttaacgtaccaagtagtcaaatgtttcgattttttgggatgcgaatcataattcatttatttgtcatgactt

SEQ ID NO: 11138 - DNA, 1314 bp, Glycine max
  Clone ID: 701013436_FLI
ccgctgcgcacagctgctccgccgtgactctgtggtcgacggtataaaatgaaggtgaaaaagcagaagaggcacaggaagattttgacgttttacactgcttgcttcggttttcggaagccttacaaggttctatgtgatggcacatttgttcatcaccttcttgtgaatcgaataacccctgctgacacggccattggcaatgtcctcagtgctacgatcaagctctacacaacaagatgtgttctagctgagttgaaacgacttggtagctcgtattctgaggctctcgaggcagctcataaacttatagttgcaagatgtgagcatgaaaaatgtaagagcgcagatgcttgcatcatggaggttgttggagaaaaaaattctgagcatttctttgttgctagtcaggacactgacctgcggaaacagttgcaagaggtacctggtgtgcctctcatatttggtcttagaaatgctcttttccttgaatctccatctgcatttcagcggcaatatgtcaaaacttctgaagaaggacgattgcatatgacacagaaggagtaccagatatttaaggatagggtaatgaatagattgactggtgaggaagccaacaattccattactgaaataatggaaattgaagattcagaagatcagaccataaatgtgcaggcagtagagaagggtattacctcaaggaatcgtatggaaatcaaggataaacctcagttcaagagaaaaagagctaagggtccaaacccactttcatgcaagaagaagaaaagtgaaaaacaaaatattggtcctttgaaggaaacgaatgaagacaacacagtgaagagaagtaggaaaaggaagaggtcacataaacaaaaaatggcaacagaaacaagcagttaggtccatatatatatatatatatatatatatatatatatatatatatatatatatatatatatatatatatatatatatatacacagttacaaataggtatttttagaagagctccttgactttactgcttctgttgagtcgagagaaaagcaagttttaaatccatgctgacatggaaggggaagtgtatcgagattagttgcttgttgaattttatactgtgtctattttgctggctatcgtatttttacctacggatagccaaatagccgttgttcacggtggaaatagattctgatatttatgatcttaattagagatgtaaataggttggtttggattgaatttgatcaaattcatgattcaatccaattacatttgaaaggtttgagtcgatttttctaagag

SEQ ID NO: 11139 - DNA, 969 bp, Glycine max
  Clone ID: 701013445_FLI
gagaaaagtagtcttttgtcctcaacttattgaagtgagagtaattttggtaaatactgtgatgcccctgaagtgcagaagcatctaaaaaccataccgcaaacacgaaacaatacacaaccattccgtatatttatcttcatttctctatttttatacattgccacttttgggccttgattagcttaaattcctctccaacgtctaatagtttttgccaagtcttcatctctctgcaccaagaggaacaaccctcaaccctgccataggcatgtggttcctccactcaacttcctaagccttcacattttccttgctccaagtgccacattaacaaaatggagagcacaagagaatcttctgtgttgctgctaagtgatcttagtcctttttcaggctcttaaccctccactattcttcctttgttcctccacattcagcaatcagagggaatggataacaaggcaacaattctgatgcaaaagtacgaggttggacattttcttggccaaggcaatttcgccaaagtttaccacgcaaggaacttgaagactggccagagcgtcgccatcaaagttttcaacaaagagtcggtgattaaggtggggatgaaggagcaactcaagcgcgaaatctctctgatgcgccttgtgaggcaccccaacattgttcagcttcatgaggtcatggcaagcaagacaaagatatattttgcaatggaaatggtgaaaggtggtgaacttttctataaagtgtcccgagggaggttgagggaggatgtggcaagaaaatatttccagcagctgattgatgctgttggtcactgccacagccgaggggtgtgtcaccgcgatctcaagccagagaaccttcttgttgatgagaacggggacctcaaagttacggatttcggtttgagtgcattggtggaatccagggagaatgatggccttcttcacacaatatgtg

SEQ ID NO: 11140 - DNA, 940 bp, Glycine max
  Clone ID: 701013533_FLI
caccattcttaacttcactcacttacaaatcacaatgacacaacaagcaacaacctcttccgaaacaacaacttcctcttcttcttcttcttcctcctcctcctccacattttcaccctcgcagcattcgggcccaaaggcccaggcccagaaacagagcaagaggcccagggactgcagcaagcacccggtgtaccacggcgtgcggaagcgcaactggggcaaatgggtgtccgaaatccgcgagccacgcaagaagtcccgaatctggctcggaacattcgccactcctgaaatggcggcgcgagcccacgacgtggcggctctcaccatcaagggcgagtcagcaatcctcaatttccccgaaattgcggacctgctccccaggcccgtcacgtgcgctccacgtgacatccaggctgcggccacggccgcggcctccatggttaaattcgaccccgtgacgcaatcctcggactcggagactccggagtcttcggagctgagcgagattgttgaacttcccaacattgaagacagcagctttgactccgttgactccagaccggagttcgtgttggtcgatgttgttgacggttgggtgtttccgccaatgggaatggggtcagagggaatcgagatctgtgccgctttttctgatgagttgtttccgcaacagagttttgttgatgagatagagatactacccatttgggattgaatggtgagtgggtgcgtctttggtttttttactaaattagacttggcttaatttgggatcaccatcatatgctctcaagtctcaaattgaattcgctcttcacttccaaacatgtgggattggcaaatagcattaatgggtgtttggctatatttgctgtcagtggtccaagggtacttaaatttactctactatgtcagtgtgcactatatttttcac

SEQ ID NO: 11141 - DNA, 925 bp, Glycine max
  Clone ID: 701013650_FLI
ttttggtttttcatgaacaactagcaaccaccctttttgttaagatggcaatgagcaacaatgtgatcggatgcataaacttcgtggccgtgatcctctcaatcccgatcatcggcgccggaatctggctaacaaacggggatgccgattcatgcgtccagttcctgcaatggcccgtcatcatcctcggagtcctcatcctcgtcgtggcccttgcaggtttcatcggagccttcttcagagtctcgtggctcctcatcgtttacctcgttgccatgctcgtcctcgtcatactcttagtgtctttggtcgcttttgtttacatggtcacgcttcggggacacggcaacatcgaacctaaccgcgcttacttggagtaccgcatggatgatttttctggctaccttcgtcgtagggttagaagctcgttcaagtgggaccgcatcagaagctgtcttagccaaaccaacatgtgcgctgagcttaaccagagttatagaatggctcaggacttcttcaacgctcgtctaacgcccatgcagtcagggtgctgcaagccaccaacgcaatgtgcgtacacgtttgtgaatccaacctattggattagccccatcaacactgcagcagatatggattgcctgcaatggagcaacgaccaaacacaactttgctacaactgcgactcgtgcaaggccggtttattggcaaatcttaggaaggagtggagaagggccaatgtgatattaatcatcacagtcattgttttaataattgtgtatttggtagggtgctgtgcctttaggaatgtcaaaactgaggacctcttccgcaaatacaaacaaggctacacttgaaaagctttaggttcaatgtgtgtgtgtgtgtgtttttttttttatataaatgttagtttttttttattagt

SEQ ID NO: 11142 - DNA, 342 bp, Glycine max
  Clone ID: 701013763_FLI
gaaaaactcaaatggtgtcccacatcgaacagggaggcatacagctccagttgacgtgaaacgtagaactgggagtagaaaataaacgtgtttttactgaaaaggtaaagagagtgattgtttatattatgattcttttataattttttagatcgacgagagagagagagagattgttataatttttttcttggtttgtattttgtaatcacacggataatggagcaatagcgcttgttgctttgtttgtatcatgacattcttttattttactccacactagatttttaggggatgtaaaaaaatgaaactcctaacactgcaatgattttttatttgtac

SEQ ID NO: 11143 - DNA, 756 bp, Glycine max
  Clone ID: 701013785_FLI
gttgataaacatatcctagcccgccaaaccggtctctccagaagtcaggtttcgaattggttcattaacgcgagggtgaggctatggaagccaatggtggaggaaatgtatttggaagaagagaaggagcatcaaaacgacgtagcatcgtcggagggaggaggcatcaatattctcggggatcagaagccaacacaggctcgactcgttcgaattgactcagagtgcatgtcgtctatcgtcaacaacccagatgacaaaaacgacacaaagagcggcaaaaccatccaaaacgacaaccaaatggacgcattcgggtcggtggagcttgacttttggtcctacacgcaccagtactcctccggacacagtggcggcgtgtcgttgacgctggggttacagcagcacggtgaaagcggggtgagtttagcattcccgccagcggcaacacagagctccatgttttacccacgggatcagattgaagattgccaaacagttcagtactctcttgtggatggcaaaggacaaaacatgccttataggaatctcatggggacacacttgcttcatgatcatttggtatgataatatatatagaatcaaataaaaatagtctcaattcaatatcatggaggacgtggatttaggtgtcacgtaagtaagtacatacattatggtagtcaacttaattaaagtagaaagttttgttttgtttttaattaatcagcacatatatatagtacatagttatat

SEQ ID NO: 11144 - DNA, 745 bp, Glycine max
  Clone ID: 701013845_FLI
atttcctctcagaaccctcgatcactcccacgcgctcctatatcctctccttcaccgtcgctctctccaacgatcacaacaacatcgtcatcccatggcaaacgccgcatctggtatggcagtccatgatgactgcaagttaaggtttttggagctgaagacaaagaggacacaccgtttcatagtttttaagattgaggagcagcagaagcaggtcattgtggagaagcttggtgagccagcccaaggctatgaagatttcactgccagccttcctgctgatgagtgccgttatgctgtttatgattttgagtatctgactgaagggaatgtccctaaaagcagaatttttttcattgcatggtcccctgacacatcaagggtgaggagcaagatgatctatgcaagctccaaagacagattcaagagggagctggatggaattcaagtagagctgcaagcaactgatcctactgagatgggtcttgatgtgttcaaaagccgggccaactaaaatgattatagaaaatagtaggctttctggtgggagcagcactccttaagccttagttactcatggaaaatatcctagtttgtgggatggtcaacttgggtagttatggtcccaaactctctcaattttccaagttgtggcataaattctattgcaccttttaacaagctttgcttgttccagtgtgttttattatgatttgtgatttatacaaccttgcgtttgagtgcc

SEQ ID NO: 11145 - DNA, 1066 bp, Glycine max
  Clone ID: 701013978_FLI
gtttctctttctctttctctgtctgcttcttcactttctctcgtttcaatcgaaaaaaatcatgggcagaaaattcttcgtcggtggcaactggaaatgcaatgggaccactgaggaggtgaagaagattgttactactttaaatgaagctaaagtccctggagaagatgttgtagaagttgttgtgagccctccttttgtgttccttccttttgtaaaaagtttgctgcgccctgatttccatgtctcggcccaaaattgttgggttcgcaaaggtggtgcttatactggagaggttagtgctgaaatgcttgttaatttgggaattccttgggttattattggtcactctgaacggaggcagcttttgaatgaatcaaatgagtttgtgggagataaagttgcctatgcacttcaacaaggtctgaaagttatagcatgcattggggaaactcttgaacagcgtgaagctggtacaacaacggctgttgttgctgagcaaacaaaagcaattgcagctaaaatatcaaattgggacaatgtcgttttggcctatgagccagtttgggccattggaacaggaaaggttgcaactcctgctcaggctcaagaggttcatgctgatttaaggaaatgggttcatgacaatgtgagtgctgaagttgctgcatctgtaagaattatctatggaggctctgtaaatggaggaaactgcaaagaattggcagcacagcccgatgttgatggatttttggttggtggtgcatccctcaaggcggaatttgtggacatcataaacgctgctactgtgaagaagaattgaaattcgtagttaggaactgataatgctgcctttcaagctgcttcggaaattgctgtttttgagttttggttctgtgctttgtggccaatgtattgaactctgtttagtacctgaataaacatgctttcctttgatctcatccataggcgatcaattggattttgattaaatttctgattgcaaaaatagtgtaactaccataacatttggtgggtaaataatgttgaacttgactgtactttt

SEQ ID NO: 11146 - DNA, 1657 bp, Glycine max
  Clone ID: 701014010_FLI
atttgaggttaaataataacagccttacaggatcctgccctcagtctcttagcaacattgaaggtctaacccttgtggacctctcctacaacaatctgagtggttccctgccaagaatatcagcaagaactttaaagattgtgggtaactctttaatttgtggcccaaaagcaaacaactgttctactattttaccagagccactttccttccctccagatgcactgagaggccaatcagactctggtaaaaaaagccatcatgtggcacttgcttttggtgcaagttttggtgctgcttttgtccttgtgattatagttgggtttcttgtttggtggcgatatagacgcaaccagcagatattctttgatgtcaatgaacattatgatccagaggtgcgtcttggtcatttaaaaaggttttcattcaaagagcttcgagctgcaactgaccatttcaactcaaagaacattcttggaagaggtggctttggaatagtttacaaggcatgcttgaatgatgggtctgttgtggctgtcaaaaggttaaaggactataatgcagccggtggtgagatccaatttcagacagaagttgagaccataagtttggctgtccaccggaatcttctgcggctttcggggttttgcagtactcagcatgaaaggctccttgtttatccctacatgtctaatggcagtgtagcctctagattaaaagatcacattcacggtcggccagctttagattggacgaggcgaaagagaatagctttaggtacagcaagagggttggtttacttgcatgagcaatgtgaccctaaaattattcaccgcgatgtcaaagcagcaaacattttgctagatgaagactttgaagctgttgttggtgattttggtttagctaagcttctggatcatagagattcgcatgtgaccactgctgtgcgtggcactgtcggtcacattgctccagagtatctatccactggccaatcatcagaaaaaactgatgtgtttgggtttggaatcttgctgcttgaactgatcacaggtcataaggctctagattttgggcgagcggcaaaccagaaaggtgtaatgcttgattgggttaagaagctccaccaggatggaagattgagtcaaatggtagacaaagatctaaagggcaacttcgatctgattgaactagaagaaatggttcaggttgcactcttgtgtacacaattcaatccttcgcaccgccccaagatgtcagaagtattgaagatgttagaaggggatggcttagctgagagatgggaggcctcacagaggattgaaacaccaaggtttcggtcttgtgagcctcaaagatattcagatttaatagaggaatcttcactcgtagttgaagcccatggagctttctggtcctaggtgacaaacaagtatcttggttttccactatagctccttgtttaaaaggtgtagtttaaatgttaaatatgacattgtcattcgtgtcaatagctatgtaatgctcgtattcatctgtaaaaagaaaaaaaaaaaagaggaaagtcatgtataagtatcttctttgttggaatgttgatttagttgcttcagaaaaattttgaatcaatgttagaaaattgtatgtagttgcaccc

SEQ ID NO: 11147 - DNA, 872 bp, Glycine max
  Clone ID: 701014122_FLI
agaaaacccagttagatagagagaagaagaaagcgtttctggaattttcgtttcgctggtgtatcgtgtgcgtctgcgtgtggaggttcttttctttgcaactttccttcaaattctagattccttccctttcttttctttcccttataaccaccaacctctccctttccccctcgattttccatcatccttctccctaacggtatcgagaaaaaaaaatggcggaagaacacagatgtcaggcgccgcgcttctgcgccaacaattgcggtttctttggcagccctgccacgcataatatgtgttcaaagtgctaccgcgatttccagctcaaagagcagcaatcttccaacgcgaagatggttctgaatcagtctctcgttccgccaccgcctccgtcggtgatttctcagccgtcgtcttcttccgctccggcagcagatccggcttcggcggtggttgttgacgcgccacgcgcggcggaggagcttaaggcgccgcagcagaaccggtgcatgacttgcagacggcgcgtggggctcacggggtttaagtgccggtgcgggatgatgctttgcgggacccaccgttacccggagcagcacgcgtgcgagttcgactttaagggaatggggagggagcagatcgcgaaggcgaatccggtggtgaagggcgagaagctcgagaagatctgagaggaatgaaagaacgaacgaacgaacgggaatccgggtcgggtcgttgatccgtgtggcgtgggtgttgcaaatggggcgccgtaaaaggcggtgggggtgggtgggtgggtcattgttatgttgttgcgttgtcatcgtaaattaaaaaatttagaaacgtttcaattgtcattc

SEQ ID NO: 11148 - DNA, 1235 bp, Glycine max
  Clone ID: 701014384_FLI
caatagtgcattgggatcaatcctttattcattcattcattgtagcgcttgctgggtttgccgtgttcgcgttcgttgttcgatcggagaagacccttttccctctcgtaggtcacttgagatggcatcaagacaccgtgttcacagagaacccttgaatgctcgaagggggtacccgccagaagggccatatgctcgcgtgcctcccatgcctcgcccgccacctcctattcctcctcatccggctgtgttggaagaggaacttgaatttcagcatgccgagatgcggagactcgtggcagacaacaggaggttgattgatgaccgaatggcgttgcagcgagaccttggggccgctaaggaggagcttcatcgcatgaatcttgccattggtgacattcgcgccgagcatgaggctcattcgagggagcttgttgagaaaggcatgaagatggaggctgaccttagggcaaatgagcctttgaagaatgaggtcatgcaactgcgatctgaagttaagaaacttaacaatctcaaacaagagctgacaggtaaggttcagacactcactcaagatgttgcaaggttacaagcagataatcaacaaattcctatgatgagggctgagattgatggtttgcaccaagagctaatgcgtgccagaaccatggtggattatgaaaagaaggcaaacatggagttcatggaacagaggcagtcaatggagaaaaatttggtttccatggcccgggaagttgagaaattacgtgctgagcttgcaagtgctgatagcagacattggggtggtggtatgtcaggtgggccttatggaaccaaatttggtagcccagagggttttcctgctccatatgcagatggatatggtgttcacctgggtgctgcagataaaggtcctatgtatggggtaggtgctgcttcgagaaaggggcatgagaagccacgcatgaatcgtcgttgaaattcaagcaactgctattggtgatgaagaaagtcttgccatcactttgcattctctgtttgcagaatagctgagattgagtttgatgtccttctgtgtatgcatgcgacaccagtggtcatttatctggaactctggatatatttagtcctaaactggcatatgtaggttttagtgttgcttagctttttcttaaagaaaacattgctgcagtatctctatgtttaaaatttagtatgatggtattcttcacttt

SEQ ID NO: 11149 - DNA, 1004 bp, Glycine max
  Clone ID: 701014546_FLI
gcaagaatggcacttcgttgcttggtgatgtccctttctgttctcttcactcttggtcttgcgagagaaagccatgccagagacgaagatttttggcatgctgtttggccaaacactcccattccaagttcattgcgagatcttctaaagcctggccctgcaagtgttgaaatcgatgatcaccctatgcaaattgaagaaacacagtacccgaaaaccttcttctataaagaagaccttcatccaggcaaaacaatgaaagtacaattcagcaagcctccctttcaacaaccatggggtgttggtacatggttaaaggaaattaaagacactactaaagaaggatatagttttgaagagctatgcatcaagaaagaagccattgagggagaagagaagttttgtgcaaaatccttgggaacagtaattggttttgccatttcaaagctgggaaagaacattcaagtactttcaagttcctttgtcaataagcaagaccaatacactgtggaaggagtgcagaatcttggagacaaagcagtgatgtgtcataggctaaatttcagaactgcagtattttactgccatgaagtccgtgaaacaacagctttcatggttccattggtggctggtgatggaaccaaaactcaggcacttgctatttgccactcaaatacttctggaatgaatcatcaaatgcttcatcaacttatgggagttgatcctggaactaaccctgtttgccatttccttggaagcaaggccattttatgggtacccaatttatctgtggacactgcctatcagaccaacattgttgcttaattagtccatgcatcttgagcaccatgagaatgagattgtgtataaaataaattatcatgtgctgtgtgttgtgcaagtactaccttctctagctagattgctagagctagaatttcaacctacctatgtgtactgataagatctgcttccctacttaaagagagcatcatcctgtgatc

SEQ ID NO: 11150 - DNA, 947 bp, Glycine max
  Clone ID: 701014573_FLI
atttttgcaggcagatgatgtggcagacttggaatgggtttctcactttgtggatgattctctcccggagttatctatattgtaccccattcattgttccaagaaaacaagagtatgggccgaaccggaatccagattgagcccggcccaaaccgtttcaaaagtcccgagaaagtcgagaactgaaaagcctagaaagcccaacactcgtgtctggtcctcttttacggtgtttgctggctccgttgggttcggcgagttggtgactaagaagcagaagaaaaaggttgaggcccaaagcggtggggcccagtctctgcgacgttgtagccactgccaggtgcagaaaacaccgcaatggaggatcggtccactagggcccaaaacactttgcaacgcttgcggggttcgattcaagtctggtcggctttttccagagtatagaccggcctgtagcccgaccttttgtggccacattcactctaacaaccatcgtagagtgttggagatgagatggaaaaaacagatagcagaatccgttactggttcagaccggaaacaattgatcccaaattattaaattttgttagacaaaatttacaatggagtagagtgctagtattattttttcgttagaattaaagttttacctcttatatgcatataaaagtttgcattattgagataaaattttaattctaactaggctatccaaggaaactatgtttaagtagtttttttagagtccaataggctatagattaggaataggtcaacgaaccggtctgagccggtttgatatttgtaccacggttagtgagtagtgatttaaattagtgctagtgagctagggaggaactaagtggtagtaatggacattaggaaggcattgattgcatgtatcccattttcctagatcaattgagtataataaaatcgagaaagag

SEQ ID NO: 11151 - DNA, 1479 bp, Glycine max
  Clone ID: 701014631_FLI
gacttaacaacagcacaaagcgggttactgtctgttcaagctaccatctctctctctctttcttagtgcctccttgccagaagttaaaatggcccaagaaactttcctattcacatctgaatcagtgaacgaggggcaccctgacaagctctgtgaccagatctccgatgctgtgctcgatgcatgcttggagcaggaccctgacagcaaggttgcctgtgaaacctgcaccaagaccaacatggtgatggttttcggagagatcacaaccaaggccaacgtggactatgagaagattgtgcgtgacacatgcaggaacattggttttgtctctgatgatgttggtcttgatgctgacaactgcaaggtcctcgtcaacattgagcaacagagtcctgatattgctcaaggtgtgcacggccacctcacaaagaggcctgaggagattggtgctggtgaccaaggtcatatgttcggctatgccactgacgagactcccgagctcatgcccttgagccatgtccttgccacgaagctcggtgccaagctcaccgaggttcggaagaacgggacatgcccttggctgagacctgatggcaagacccaagtcactgttgagtactacaatgacaagggtgccatggttccaatccgcgtccacactgtgctcatctccacacagcatgatgagactgtcacaaatgatgagattgcagctgatcttaaagaacacgtgattaagcctgtgattcctgagaagtaccttgatgagaagaccattttccatttgaacccttctggcaggtttgtcattggagggccgcatggcgatgctggtctcaccggccgcaagatcatcatcgacacctatggaggatggggtgcacatggtggtggtgccttctctgggaaggatcctaccaaggttgataggagtggtgcctacattgtgaggcaagctgcaaagagcattgttgcaaatggacttgctaggagggcaattgtgcaagtttcctatgccattggtgtgcctgagcccttgtctgtgtttgttgacacttatggcactgggaagatccctgacaaggaaatcctcagcattgtgaaggagagttttgacttcaggcctggcatgatctccatcaaccttgatctcaagaggggtggaaatggcaggttcttgaagactgctgcatatggacactttggcagagatgaccctgacttcacatgggaagtggtgaagccactcaagggggagaaggtacctgcttaactaaaaggggttccaacactcttggcaagggacttttgcactactactggcttcttattatctgattgctaaaattttctctatgtttccttccctcttactcaattctgttttttttttctgtatttttttatgaatttcccccttttttttgtgtacttgtatgtgttctttcagaacatatatattttatatgatgaaac

SEQ ID NO: 11152 - DNA, 875 bp, Glycine max
  Clone ID: 701014732_FLI
caaggaacaacctccaaaacataacatcctacgccaaacaaaactttgacctccttcagatctatacccttctctctctctctctctctcttctattttcaaattctacatcatgggcacggaggttctacggccacaagattgtttcacccaacgcatcggtgttccaccgcctggcttttcccggcgaaggacctatggtacccaccacaacaacaaaaacaataacgttaacaattatttcaggggtaaccggaagccgacaacccgacccgaacaaagaaaacgggttgtggacaaaaggcccagtttagatgattcgaggttttcgagtttggagatggagaaggtcacgattcttcggaggggggaatcgctcgattcgaagctgaaaacagaggctttgaagaaggaaggtgataatttggtcgtggttgggacccagaggctcggacccgacccggatatggtcccgaagcagatccggatcgtggatttcaggtccgggcgcgagatttacgccggatccgcgttcgcggtgtcgccgtcgccgagcgcgctgcccttgccgtctttttcgaagaggcagccggcggtggcggttgccgactctgcgacccgtgatcttaggcgtcttctccggcttgaatgagccgaatcggtgccgtttccggatttcgggtcgggtctgacccgactctaacctatcttgtgttcctttcttcgttctcttccttaatctagaatcttctgcttctcctttacgcccctctgattttggagttatgacccgaccgtgatttttttaaacgggaaggcagatctggaattgggaaagtttgggggcgaaagtgttaataaaagaagtttggagt

SEQ ID NO: 11153 - DNA, 1092 bp, Glycine max
  Clone ID: 701014851_FLI
tgttcatgctggattaacgatggagccatcacttgaactgtttcaggaaaaatttccggataggttttttgatgtgggaatggctgagcaacatgcagtcacatttgcttctggtttggcatgtggtggcttgaagccattttgtgtcataccttcgtcctttctacaaagagcctatgaccaggtggtacatgatgttgatcaacagagaattccagtgcgttttgttattacaagtgcaggattggtaggttctgatggtccccttcgatgtggagcatttgatataaactttatgtcatgcttaccaaacatgattgtcatggccccatctgatgagcttgaactcatgcacatggtggctactgctactcgtatcaataatcagcctatctgctttcggtatccaaggggtgccctggttggggaaggctacactataggtgatggaatccccatcaagataggaagaggaagagttcttgttgaaggtaaagatgttgctttcctaggatatggatcgatggttcagaactgcttaaaggctcattcactccttgcaaagcttggcattgaggtcacggttgctgatgcaaggttctgcaagccccttgacattatgcttctgaggcagctttgtaaacaccactcttttctagttactgttgaggaaggatctattggaggatttggttcccatgttgctcagtttattgcagttaatggactgctcgatggaagaattaagtggcgaccaattgttttaccagacagatatattgagcatgcatcaccaaatgaacagcttgaccaagcagggttgagtggacatcacattgctgccacggcattgagtttactaggccgtacccgtgaagctctcctatttatgtgttcgtgacttgcttcgtgcccttttccagatacgatgaatggaagttggatagctccacaggaagaaggagaaccaacaaagcaaagatgtaaagaatgtcattttctctttaatctgtacagaactgatgttaaatagtaaaaaggaacttaacgggagttttgtttttttggacatctaacaggtaaattgttgag

SEQ ID NO: 11154 - DNA, 1509 bp, Glycine max
  Clone ID: 701014866_FLI
gccatttgggagttaggttctgcacgctctgcttccagcgagtgttctttcttcgtttcaacaccttaatttgcacacgctgcttcttcagcttgagaaatggcacaagaaacctttctattcacatctgaatctgtaaacgagggtcaccccgacaagctgtgcgaccagatctctgatgcagtgctcgatgcgtgccttgaacaggaccctgacagcaaggttgcctgtgagacatgcaccaagaccaacatggtcatggtctttggagagatcacaaccaaggccaacgtagactatgagaagattgtccgtgacacatgccgcgaaattggattcatctctgatgatgttggtcttgatgctgacaaatgcaaggtgttggtcaacattgagcagcagagccctgatatcgcccagggtgtgcacggtcacttcaccaagcgcccagaggaggttggtgctggtgaccagggtcacatgtttggctatgccactgatgaaacccctgagtacatgcccctcagccatgtccttgcaaccaaactcggtgctcgcctcaccgaggttaggaaaaatggtacctgtgcttggctgaggccagatggcaagacacaagtaactgttgagtactacaatgacaatggtgccatggttccagttcgtgtccacactgtcctaatttccacccaacatgatgagactgtgagcaatgaccaaattgctgctgaccttaaagagcatgttatcaagcctgtcattcctgagaagtacctggatgagaagaccatcttccaccttaacccttctggccgttttgtcattggtggccctcatggtgatgctggtctcactggaagaaagatcatcattgatacctatggtgggtggggtgctcatggtggaggtgccttttcagggaaggaccctaccaaggttgacagaagtggtgcctatatcgtgaggcaggctgcaaagagtgttgtggcaaatggccttgccagaaggtgcattgtccaagtttcctatgccattggtgtccctgagcccttgtcagtgtttgtggacacttatggaactgggaagattcctgacaaggagattcttcaaattgtgaaggagaatttcgacttcagacctggaatgatcaccattaacttggaccttaagaggggtggccataggttcctcaagacagctgcttatggacactttggaagggatgaccctgacttcacctgggaagttgtgaagccactcaagtctgagaagcctcaagcttaagattgttgtgaagttaatcactcccttcaatggatgtcttgctaggtgtggatgaataatttgcgtgttccatgactactactacttcattcataggtctaatgtcatctcatcaatacttaaactgtttttttttttccttttctccttttactcacaatttattttttggttatgcaatgttaccgttttgatgcaatggaaattttatcagaattttgtacc

SEQ ID NO: 11155 - DNA, 903 bp, Glycine max
  Clone ID: 701014974_FLI
agaaacatggcttccttaagctccttagtgctgctccttgcagctctaattctatcccctcaagttcttgcaaactatgagaatcccccagtgtacaagcctcccactgagaaaccaccagtttataagcccccagttgagaagcctcctgtttacaaacctccagttgaaaaccccccaatttataagcctccagtagagaagccaccagtgtacaagcccccagttgagaaacccccagtttataagcccccagttgagaaaccaccagtgtacaagcccccagttgaaaaaccaccagtgtacaagcccccagttgaaaaacccccagtgtacaagcccccagttgaaaaaccaccagtgtacaagcccccagttgagaagcccccagtttacaagcccccagttgagaagccaccagtttacaagcccccagttgagaagccaccagtatacaagcccccagttgagaagcctccagtgtacaagccaccagtagagaagcctccagtttacaagccaccagtagagaaacctccagtttacaagcccccagtggagaaacctcctatttacaagccacctgttgagaagcctccggtctacaagccaccatatggaaagccaccatacccaaagtaccctccaactgatgacacccatttctgaaggatgtcaagaggtgtattgagtatatgctaaataagaggtgctcaaaatgtagttatagattacaaattattgcaagggttgctcttagcttcttcatttcaagcttttgtttacactttgcagtgctatggcaaagataagagtatcatggatggaaaaagggggggggaaaatgttgctttgtactccaaattatgaataatagaactttatattatttatcagattatt

SEQ ID NO: 11156 - DNA, 1746 bp, Glycine max
  Clone ID: 701015156_FLI
gtatcatcacctctcttctgagagatgttagtttgggaggaaaccattccaacttcagcaagagtcaaatcttttcaaactgatgaagatccttcctttgtggagcttttgtttcaatatggtcgatatcttctaatctcttgttcgcgtcctggaacccaggtggcaaacctacaaggtatctggaacaaagatgttgagcctgcatgggatggtgctcctcacttgaacattaatcttcaaatgaattattggccatcccttgcttgcaacctacacgagtgtcaagagcccttatttgatttcatttcctctttgtcagtcattggtaaaaaaactgcaaaggtgaactatgaagcaaatggttgggttgcacatcaagtttctgacatatggggtaaaacatcaccagatcgaggtgaggctgtttgggctttatggccaatgggtggagcttggctttgtacacatttatgggagcattatatttatacaatggacaaagattttcttaagaataaagcttatcctttgttggaaggatgtacaacatttttgttggattggttgattgaaggccgtggtggattattggaaaccaacccatccacttcaccagagcacatgttcactgcaccagacggaaaaactgctagtgtgagctactcatcaaccatggacatttcaatcataaaagaagttttctctatgatcatttctgctgctgaggttttgggaaggcataatgatactattatcaaaagagtcaccaagtatcagtctaaacttcctccgacaaaagttgctagagatggttccattatggaatgggcagaagattttgtggacccagatgtacatcatcgacatgtttcacacctttttggactgtttccaggacatacaattagtgttgagaaaactccagacctctgtaaagctgtggaagttagtctaattaaaagaggagatgatggtccagggtggtcaacaacttggaaagcttcactgtgggcacatcttcacaatagtgagcacgcatatcgcatgataaaacacttgattgtcttggtggagcctgatcatgaaagggattttgaaggtggactttacagcaacctgttcacagcacatcccccttttcagattgatgcaaactttggtttttctggagcaattgcagaaatgcttgttcaaagcacaacgaaggacctctacttgcttcctgcattgccacgcgacaaatgggcgaatggttgtgtgaaaggattaaaagctcgtggtggggtgacagtcaatatttgctggaaagaaggagatctgcttgaatttggcctttggacagaaaaccagaattcccaacttagactacattatagaggaaatgtggtcttaacaagtttatcgcccggcagagtttactcatataataaccttctgaagtgtgtgaaggcatactcccttaacgaagtgaatccttgaatcttttctataaatcttctgaggaacatgaattgctttttgcaatttgtcatagggtattagggttcaatgttggatgtagtttggtggttcaagatacatttatcttgattcctaagttaattcttccagagtcacatttatagccacggaggatgtaatttactaatttaagggagaactttttcagttgatgcatttgttttaagttttgtggtgtaaaacccgtgtaatattattgtcatttattattcaacttcatac

SEQ ID NO: 11157 - DNA, 1018 bp, Glycine max
  Clone ID: 701015315_FLI
aagagtttgatgttgcgttgagatggcttacacgctccctacccttccataattgttggtctctttcagtgcctcagtttggtgttttcaacaagttgattggatgggatttgctttgtcttttggttccttgcctgttttggtttcctcttatgactttgctaccccaaataaagaaattcaatggctggggtctgtcttcactggcatcatcttctgtgttgttgtttatagattgactgctattttgagttctctgttgttcaagggatatggcaaattgagtagtgcagagaaaattgaatggaataaccggggattctcaacatttcatgctctgtttgcatcatttacgtcattttacctcttggtgttatcagatattttcaacaaggattcacatgaagaacttgttattaatagatcatccactttctcaaattcggtactggggatttctataggttattttctagcagatctggcaatgattctttggcatttcccagctttagggggtctggaatacgttttacaccatgggttgtccatgttttcaattatccaatctttgctatgtggtcaaggacagatctacatactaatggttcttttctctgagagcacaactccttttgtaaatctaagatggcacttggatattgctgatcttaagagctccaaactttacgtctggaatggcattgcattgttcttcgggtggttgattgcaaggattttcctatttatgttcttttttatccacatgtggacccattttgacgaggttaaggagatctacccattgggtttttacagcttgcttgtggtgcctccagtgttggcaatgatgaatttgttttggttctggaaaattgccaagggtttggttaaaactatatcaaaagcaaagcatagcatatgagcctaccaaatggccatttaattactttagcacagttgtgattaacatttttcccccatttaacttgcaagattcagtacagttctatgctgt

SEQ ID NO: 11158 - DNA, 1076 bp, Glycine max
  Clone ID: 701015373_FLI
tgcaagaatggcacttcgttgcttggtgatgtccctttctgttctcttcactcttggtcttgcgagagaaagccatgccagagacgaagatttttggcatgctgtttggccaaacactcccattccaagttcattgcgagatcttctaaagcctggccctgcaagtgttgaaatcgatgatcaccctatgcaaattgaagaaacacagtacccgaaaaccttcttctataaagaagaccttcatccaggcaaaacaatgaaagtacaattcagcaagcctccctttcaacaaccatggggtgttggtacatggttaaaggaaattaaagacactactaaagaaggatatagttttgaagagctatgcatcaagaaagaagccattgagggagaagagaagttttgtgcaaaatccttgggaacagtaattggttttgccatttcaaagctgggaaagaacattcaagtactttcaagttcctttgtcaataagcaagaccaatacactgtggaaggagtgcagaatcttggagacaaagcagtgatgtgtcataggctaaatttcagaactgcagtattttactgccatgaagtccgtgaaacaacagctttcatggttccattggtggctggtgatggaaccaaaactcaggcacttgctatttgccactcaaatacttctggaatgaatcatcaaatgcttcatcaacttatgggagttgatcctggaactaaccctgtttgccatttccttggaagcaaggccattttatgggtacccaatttatctgtggacactgcctatcagaccaacattgttgcttaattagtccatgcatcttgagcaccatgagaatgagattgtgtataaaataaattatcatgtgctgtgtgttgtgcaagtactaccttctctagctagattgctagagctagaatttcaacctacctatgtgtactgataagatctgcttccctacttaaagagagcatcatcctgtgatcagtgtgcttcgtattctctctctctatatatatatggtaaaaagtggttatctcgtgcctcgccttgagct

SEQ ID NO: 11159 - DNA, 791 bp, Glycine max
  Clone ID: 701015492_FLI
gtgatcgcaatgatatttccctacttcaatcagattttgggggttctgggtagcatcattttttggccgttgaccatatattttccagtggaaatatacttgagtcagtccagtactgtatcatggacgactaagtgggtactgcttcggactttcagcttttttggctttttgtttggattgttcactctcattggatgtattaaaggaatagtaactgaaaaaataagctgagaagctttgagacctctccaaggaattagactcagatagccttcttttttttctccacttttctcctttcaagacccacaaataatgaggatcatctgcaatgtcttttccacatattcactcaattactaacttggaaccattacataaagatcggacatctatctcagtaaattagacataaaacacgtatttgagatccgaactgtccgatctttattcaatggttacaaatgcactaactgtgtgagggcaaggaataggagactgcaccgaatccagttggacaataaacatgcagattctctcatattttcaataggaatagtgattctgtatttgttcacctgctgaaggtatccactgctgaaatgaatgagctcaacactcctacttcctcggttcttccactgttatacaaacaaattgaaagtggacattattattttccgtgggaaaattttcagttctatttgattattgtttgaagtcttatcgatactatttagattaagccaactttggtataaatataagttcctcacaagtgacctctc

SEQ ID NO: 11160 - DNA, 527 bp, Glycine max
  Clone ID: 701015564_FLI
attcttttcatcctcttcgcagagcctcagtagcttcgcattagcaatggcgagaatcaaggtgtacgagctgaggaacaagacaaaagcagagcttctgaaccaactgaaggatctcaaagcagaactcgctctcctccgcgtcgccaaggtcaccggcggagccccgaacaagctttccaaaatcaaagtggttaggctttcgatagcgcaggtgctgacggtgatttcccagaagcaaaaagcagcgctgagagaggcttacaagaagaagaaataccttcctttggatctgcgtcccaagaagaccagagccatccgaaggcgcttaactaagcaccaggcttcattgaagacagagcgtgagaagaagaaggaattgtattttccactgcgaaaatatgcaattaaagtgtaatgttagatcccaatacggatgataattttggcgtttgttagttgacacagttttgatgccgttttgtcctagttttcttttaatcatcatgaaacttttattaaatgtt

SEQ ID NO: 11161 - DNA, 977 bp, Glycine max
  Clone ID: 701036924_FLI
agattttggagattgaagagatatcacaagatgctgcatattggattcgaagaattccacctcgcctctgggccactgcttattttgaggggcataggtttggtcatttgacagccaacatagttgaatctttaaacacttggatattggaggcatctggacttccaataattcaaatgatggaatgcattagaaggcagctaatgacttggtttaatgagcgccgggagaccagtatgcagtggacatcaatacttgtaccatctgccgagagacgtgtagccgaggctcttgatcgtgcacgcacatatcaggttcttcgtgccaatgatgctgagtttgaagtgatatctcacgaaggaacaaatatagttgatatcaggaaccgttgctgtctttgccgtggctggcagctctatggtttgccctgtgcacatgctgtggcagcacttctctcctgcaggcagaatgttcatagattcacagaaagctgtttcactgttgcaacttatcgcaagacgtactcacaaaccatacacccaattcctgataaatctctctggaaggagttgtctgagggggatgccaatgctagcaaagctacagaagttgttatcaatccacccaaatcactcaggccacctgggaggccaagaaagaagagagttcgtgcagaagaccgtggacgcgttaagcgagtggtgcattgtagtcgttgcaatcaaacaggccactttagaaccacatgtgcagctcccatctaagttgctgaattaataaattggacaacctttagttatgttatgttctctttattatttatttaggcttgatagcttagactggcgagtaaatgatctctgttatttactttacattaatgtgaattaattcgtacagatgctctatgtgtatatccttcagtaattggcattgttcttcaataacgcatatagtaattgcataatttttgttct

SEQ ID NO: 11162 - DNA, 1571 bp, Glycine max
  Clone ID: 701036984_FLI
gcccagaacacctggtaccgagtcccacaggtagggagggtcctgtttttataactatggatagaaccttcttaaggctaatcaatgatataattttggaaactgacaagacaattgaagttagaggctgttccctttgacttgtgccatttcttctctcaataaacttctattgatgccccgctccacgttccattcttcagtatcctttgtagtttgaaccttcctcacactcccacttcagaaaccaatcaaagagagagagagagagagatgggtagagctccttgttgtgacaaggcaaatgtaaagaaaggaccatggtcaccagaagaagatgaaacgctaaaggattacatagagcaacatggcactggagggaattggattgcgcttcctcaaaaagttggtttaaaaagatgtggtaagagctgtagactaaggtggcttaattatcttagacccaacatcaagcatggtcaattctctgatgcagaagataaaataatctgcagcctcttcgctagcattggaagcaggtggtccataatagcatctcagttgccagggaggactgacaatgatataaaaaactactggaacaccaagctcaagaagaaatgatggccatgaatccttcagtactccaaaggaagcctcaacaaattacccttttatccatccttcaaagttcagcatcatcattcagagacagcaacaacatctcatactaccaccctcacggttccttttcctactcatcatcaagtcttgtgagtggtaacaactcttctgctaatgctgattccttgtttcaagcacaagagagtttcatggaccccaagtgccaattcaaagatagcagcatctttgtgtctggaggtgaagccacagccatggccacggccactagttgcagctcttctgatgggagctgcaacaaccagataagccatgtcatggagcctgcagagtttggtgatgcaagttttgttggtggggccaataatcacatctacagtggggaggaagatgataataatactcagaagttgatgatgttctccaatgctggtggtagtgttagtgggtggacaggcaaacaaaatggattattgtgggaacaaaatccattggattatggtcttgaggaaattaaacagctcattagcactaataacagttgcaacaactttttgtttgatgacaagaagacacaagaaagagtcacgtactactgatcgatgatgatttcttcagacttatgacttgttggactcaatttgtttgtgcttttgtgggatgggtttttagttttagtttttactttttagtattgaatagaattgaaccactttctttgtttgaaagtacatttaaagttttctttttgcagttactttgccgaggtaaccctacccattcacattcaaaccatacacatcccctaaggaagataaagaaaaggaggaacgaggaacctttgatatacttaacaagagttccctatttgtaattcttttatcttccaaacatcatcataaagaagcttgcagcagcagtccactaat

SEQ ID NO: 11163 - DNA, 1323 bp, Glycine max
  Clone ID: 701037185_FLI
aatgaacccaacaacaagtacgatgtttttctgtgtttagttggcccagatacccgctacaccttcgctggtaatctctataatgctttgcgccgcaacagaatcaatacctttttcacagaagataatcatcatgatgagctactactcatgaatggcgaccaaatttcaccctttgctctaagagcaattaaagaatcaaacttgttaattgttgttctctctccaaactacgcatcatccccaaggaatcttgatgaatttgtggccatcgttcggtgtataaagaggaagaagcaactgctgcttcccgtcttttacaaagtggaacgaggggaaataatggatgcaatatttagtggacctgatcaacaagcgctctgtgtattcgaagaaagatttggagattacaaagagagggtgaatgaatggaaggacgccttgctagaagtctacggttggactgctatggaataccaaaatgggtccggatacgaatatgaattcatccgagagattgttgatatagccaagaggcgccagcgccgccgatatgatgtttttctgagttttaggggaagagatacccgccactctttcacaggttttctctataaagccttttgccgggagggattctacgtcttcatggatgatgagggattggagggtgggaatcaaatttcacctacgattatgggagcaattgaaagatcaaggctttcaattgtagtgttctctgaaaactatgggtattccacgtggtgtcttgatgaactttccaagatcattgagtgcgtgaaaaccaggaatcaaatggtttggccaatattttacaatgtggaaaagtccgatgtatgcaatcaaacaaaaagttatggtgatgccatgactgcccaggagaaaagatttggaaaggactctgggaaggtgcataaaggaggtctgctttgtctgaaatcgccaacttggaaggagagcatctcagggaaaatcagtaccaatatgaatttatcgaaaggattgtggaaaaggccattaatataccaagtccttgctccaatgacagctacgaggaagagtcaagagtgtcaaaatgcacgcattgggagattgggagctgtgtagtcagctgatagtgacatcagcaagcagccttgaatttatgtgtgcttaacgatgttgttactatatccagttcaattctcaaggtttattatgttccttttacatcttgtgtaattcttgaggtctcgtgtttttctttttttttggtgtgtaccaaggtccaaggattatgtctgagattaacatctccctttt

SEQ ID NO: 11164 - DNA, 1398 bp, Glycine max
  Clone ID: 701037220_FLI
aacctctcaagtccaacctacccctttttcttctcccaccaacttcaccgtcttcttcctcgatcatgtctcacttcaagggcaagtaccatgatgagcttattgtcaatgctgcttacattggcactcctggaaagggtattcttgctgctgatgagtcaacagggacaattggcaagcgtttggccagcatcagtgtagagaatgttgaatccaacaggcgtgctcttagggagctgcttttcaccgctcccggtgctcttaaatatctcagtggtgtcatcctctttgaggaaactctctaccagagcacagctgcaggcaagccctttgtggaagtcttgaaggaggctggtgttcttcctggcatcaaggttgacaagggcacagttgagcttgctggcactaatggagaaaccaccactcagggtctagatggccttggtcagcgttgcgccaagtactatgaagccggtgcacgttttgccaagtggcgtgctgtgctgaagattggtcccaacgagccatctgagctggctatccatgagaatgcctatggcttggccagatacgctgtcatatgccaggagaatggcctggttcccattgttgagcctgagatccttgttgatggatctcatgacattcacaagtgtgctgccgtcaccgagcgtgtccttgcagcatgctacaaggctttgaatgatcaccacgtccttcttgagggtaccctattgaagccaaacatggtcacccccggatccaattctgctaaggtttcccctcaggtggttgcggagcacactgttagagcccttcagagaaccgtgcctgctgcagttcctgctatcgttttcttgtctggtgggcagagtgaggaggaggcatccgttaacctcaatgccattaaccaggtcaatggaaagaagccatggtcactctctttctcctttggaagggcacttcaacagagcacccttaaggcatggagtggaaaagaggagaatgtgaagaaggctcaggaagcccttttggtaagagccaaggctaactcagaggcaactctgggaacctacaagggtaactcaaagcttgctgatggtgcctcagagagcctccatgttgaggactacaagtactgatcaatctaagtgcgggtaggaatcggtattttatgggtacaaccgaattttcttgttaatgagtattgtgcttcgactcttcccagaataataatcgtttggaattttgctttttgtttttcctagtgttccttcatatcaattttagtaattcggtgtattggtcaaacctgtgcaaacaggggaggggatgtaactttgttttcttgatagacaccaccaccttgctgttaacgaggctttgtgtttattttgc

SEQ ID NO: 11165 - DNA, 846 bp, Glycine max
  Clone ID: 701037394_FLI
acagatagaaagaaaagaaatttcaccgtaccagagaacaaggaaggatagaagaaagtgaaagaaaatggcgttgtacatggacgaagaagagatttggaagtgtccgaagcatccatcaaagagaagaagaagcggaatttgccctacttgccttcgagaccgtctcgtaactctttgccctgactgtgctaacgtgcgcccctgttcctgctacgcaaccagctcctcctcctcttcctcgtcttcctcctccttatcgcgtttttctggcgccggcgatggcgtcggttccgtcggccgcgtccacaacctcatcgagcaagagcctgggctccgccgctcgcgctccatggcgattccgtttctcaggtcacggtcgcggttctctggcggcggagatagggtttcggatctcgacagcacgagggactcgccggcaatgaacggaagccggtcggcgaggtcgttctggtcaatgttcaagtcgcagaagagcagtagacacggcggcggaggaggcggcgcgccggagcaagagtgggaggcgaaaaagatattggcggaggaacgagacggcgatggtggcataaatccgatgatggtgcggtcaaggtcggtggcagtgacggcggtaacggtggtttccggcgacggagaattgagaccgcggacgaaagggagagggtggttcttcccaagtccgatgaaggctttccggcaatccaaggtctctaaagtgattcaggaagggtctcctttgtatagaggttgaaattttgtagattaaaaaaattataataataataacaacaaatactttatataagtttatatatattaacc

SEQ ID NO: 11166 - DNA, 1820 bp, Glycine max
  Clone ID: 701037507_FLI
gaagaaaccaacacttgggggtgtctcagatgagaggaaatcagaatcaacttctagtgtagttaatgcatcagaacttccacctcatctccttcttgaaatgccagctttgtcaccgacaatgaaccaaggaaacattgctaaatggaggaaacaagagggagacaagattgaagtgggtgatatattatgtgagatagagacagacaaagctacacttgaatttgagagtcttgaagaggggtacctggctaagatacttgctccagaaggttcaaaagaagtggcagttggacactctattgcaataacagttgaagatgcaagtgatattgaagctataaagaattctgttagcagctcaacaaaccaacagaaggccccccaacgtggcactaaaagcgaggtcaaagctcagaaaaacaatataacacgtattagtccagctgcaaagttgctaattgcagagtatgggttggatgctccaacattaaatgcaactggtccttatggcaccctactgaaaggggatgttctatctgcaattaagtcaggaaaattgtctccaaaacctgcttcatctaaagaaaaggcattgtcatctcaaagtcatcaacaagttgcagcttcccaagagtcaaaatctgacttaaaaaagtcagatgcttatgaagattttcctaatagtcaaattcgcaaggtgatcgccaagagattattggactcaaaacaaaatacactacacttatatttatcatcagatgtcatactggatcctcttctttcccttcgaaagggtcttaaagagcagtatgatgttaaagtttctgtgaatgacattattatcaaagttgtagctgctgctctcagaaatgtaccagaagcaaacgcatactggaatgttgagaaggatgaggtgattttaaatgattctattgacatatccatagcagttgccactgagaagggcttgatgactccaataataaaaaatgctgatcagaagacaatatctgctatctcctcagaggtcaaggaactagctgcaaaggcacgtgctggcaaattgaagccacatgaattccaagggggaacttttagcatttcaaacttaggaatgtttcctgtggataaattttgtgctattataaacccccctcaggcttgcattcttgctgtagggagaggcaacaaagttgtggaaccagtaattggaactgatggaattgagaagccatcaattgccactaagttgagcttaacattgtctgctgatcatcgtgtttttgatggcaaagttggaggtgcatttctctctgcattgcaatcaaacttcagtgatataagacgacttcttttataatgacgcaacacaaattttcatgttacttgattggatttctcacgaccaatcatgtggatccaccacaacctggatcaaacttgcatagcatccccatttttgtccttttcactttcatctcatcatctgaaacagttttcgactggtttgactcattagtttttgtataataatatcttgggtcaaattactaaataccctgagaaaatacccaccaaggtaccatctaacattaggttttcaacaatcgagattcaagcacattggaaattttgttcattaggcactttgctgttctttgatgtgtagttttgtattaagagctttgtatagactgccattcaaatacctacatttgggtgaataaatattcttttcatgtgcagcatatctgtcatccgatttaagtgatggcatgatttggcacaatggtactcttggttcaatgttcatctat

SEQ ID NO: 11167 - DNA, 748 bp, Glycine max
  Clone ID: 701037510_FLI
ggaggagtttgttaactgtgtccgctgcattaaaatactttctcctcaagaagttcaacaaatgagcttggatggagattttggcaatggtggccttccatatccagcaggcagcagctctgatggtgggaatgcttaaatggcatccaggaatctgctaattattcttccatgttagtaacttacatcgtttttaggacatattcatcagtgttgtccaaaaggttgtggggtcggtcggcagatgattttgtcctgctgcagcaggctgggtaatatttgcggttataacttattaggagaaatttgtctctgccatgtacaggcgaatttgaagagccaaaagaagaaaaaggtggaaaaatttgctgccctcaatctacgacttacatttaaggttgttaacctggtgatgaatgagatacttggaccacacgcacatggcacatcccaacaaagatgtgttaagccatatgcatgtgatgacgttgaaaagttgagcagaagttctcttggcagcgtttgaaatatgtattaaatgcagcgtactgtagaaagaaaggctgaaatatcacggcatagttcagtgtataaaagtaggtttcttgtgcggtctttaaaaggagttattgacatctgaattgaaaggtggctttttggttttttgtaaaacactaggcagctagatatgtattgtatggccaactatatattgaagcatcaaatacagaatgcattgttttgctgc

SEQ ID NO: 11168 - DNA, 1610 bp, Glycine max
  Clone ID: 701037770_FLI
gggccccgtgctaaaatcatggccaccacagccaccgaacctctcccttcctccgctgaaatgcctcctgccccgcctcctccgaagcaaccgccgcaaccggtggcggcggcgtcagcagtgaagcctgaggctccattgtccgattcgaaagcttcggcggaggcgaacgtaatagtggtcccgagctactctcgttggttctcgtgggattcgattgacgaatgcgaggtgcgtcacctccccgagttcttcgaatcggcgtcgaagagccctagggtttacaagtactacaggaactcgatcgtgaagtacttcaggtacaatcccacccgaaaaatcaccttcaccgatgtccgcaaaacgctcgtgggagacgtcggttccatccgaagagtcttcgatttcctcgaaacttgggggcttatcaattaccatccctcttcgtcgctcaccaaacccttgaagtgggacgacaaagagaccaaatccgattctgcctccaacaccaccgaatcttcttccgctcccgccaaagaaaacactaagagactctgcagtggctgcaaagtcgtttgtaccatagcttgttttgcctgtgacaagtatgatttgactctttgtgcgaggtgttatgttcgtggcaattatcgagttggtgtgaactcttcggattttaggcgagtggagataagtgaggagacaaagacggattggaacgaaaaggagaccacgaatcttctggaagctattacgcattacagtgatgattggaagagggtttctcagcatgttcctggcagaactgagaaggagtgtgttgctcattttctgaagcttccttttgtggatcaattccagcattatcaacaacaccctgctgtcaatggcactgatgacagttgtaatccgttaaagagggtaactaatgctgatgcagaatctgaattggatactgttgcctctgctgaacccaataagagaatgcgtctcacgcctcttgcagatgcaagcaatccgattatggctcaggctgctttcctgtctgctttggctgggtcagaggttgcacaagctgctgctcaagctgcattgacaactctgtctgaggtttacaaagcaactaaaataaattatcggtcgtttccgaggaatacattgctgcaagatgctggtatcatgtctaacggtggtaatacttcagattcatttcaaggatctcgattgcatgcaaacatacagcttgagaaggaagagttagatgtggaaaaagcaatttctgagattatagaagttcagatgaaaaatatccaagataagcttgttcagtttgaagatttggacctgctgatggaaaaagaaggccaacagctggagcaaatgaaaaatatgtttttccttgatcagcttactcttttatttcataaatcatctgcaccaaaaactggagaatgccaagaaggcaataatgtaaagacgaaccatggctattgatcttaggcttagcgaatgtattcaattttccttttcaattatcttgctctctccatttgctttggcctcgagtcactggactatttcttcaatatcatacaactctatcttgatgt

SEQ ID NO: 11169 - DNA, 917 bp, Glycine max
  Clone ID: 701037910_FLI
gtttggtttggttacttgctcgaatttcctcgaatcgcttaatttgtatttgattagttaaaccgcaacgcggaatctcttttctcgaactggctaactctcaggcaagtggttcggacgctgattccagcaacaagcggctggtgctcgcactgtatgacgccctaaactccggcgactccgacgccgtcgtcaagatcgtcgccgccgacctcgagtggtggttccatggtccgccctcacaccagtttttgatgcgcatgctcaccggcgactccgctgccgacaactccttccgcttccttccgcagtccatcgccgccttcggctccaccgtcatcgtcgagggctgcgacaccgcccgcaacattgcctgggtccacgcctgcaccgtcacggatgggataattactcagatcagagagtacttcaacaccgccctcaccgtcacccgcatccacgattccggcgagattgttccggctagctccggcgccggccgtttgccctgtgtctgggaaagcagcgtctccggtcgggtcgggaaatccgtacccggtttggttcttgcaatataaaataattattaacaagtaattagggaagaacgcggtcacgtgtgaataataattaaataaggaggttgtgcacgtggcggtgactgggtcgaacggtttcagggaacattgatatattttcgtagtattggtgtgttctagaggttagagagatgtgagaccctattggtggggtttcttatttctttaattttctcaggtttggtttgtttttgttttgtttgcttgtgtgttttgggaaccactatgggcctatccaggtggctgtatctttcttttgtaatgcggtttgttgatgatgatgatgatgcaataagaatatctatggattatggtttt

SEQ ID NO: 11170 - DNA, 1417 bp, Glycine max
  Clone ID: 701038069_FLI
gtgtgattgagtttggctgtcataatctctctctcatccgaaaatgtcactcatcttgcaaactccgccttctacaactctctcttctgcatctcccattcacagaacaataacaagatacaccacattctccttctcgcttcgtcctccaacaactcttcacttcaatccccacaggtccctccctctaattcgcgcttccaattcttctatcaatgccgcttcgaccactgaactggacgctgtgtccgccttcagcgagatcgttcccgacaccgtcgttttcgatgatttcgaaaagtttcctccaactgctgctactgttagttcatcgcttctcttgggaatatgtggccttccagacaccatttttaggaatgctgtggaaatggctttagctgattctgagtgttatggacttgaaaatcctaacgcgcgattgtcttgttttgtcaacaaggctttcgcgaatatcggtagtgacatggcaaagcttgtccctggccgtgtttcgacagaagtggatgcgcggcttgcttatgacacacatgccattatcaggaaggtgcatgacctgttgaagttgtacaatgatagcaatgtacctccgcaacgtctgttgtttaaaattccttccacttggcaaggaatagaggctgcaaggttgctggaatccgaaggcatacagacacatttgacctttgtctacagttttgctcaagctgcagctgcagctcaagctggtgcttctgtcattcaaatttttgttggtcgcataagggattgggcacgtaatcattctggtgacacagagatagaatctgctcagctaagaggagaggatccagggttggcattggtgacaaaagcttacaattatattcacaaatatggacataagtcaaagttgatggcagcagcagttcgcaacaaacaggacctatttagtcttctgggggttgactatatcatagctcctttaaaggtattgcagtctctcaaagaatctgttgcttctcctgatgagaagtactcttttgttaggaggttatcccctcagtctgctgccaagtacacatttagtgatgaagagcttgttagatgggacgaagatagcctctcaaaggccatggggcctgcagctgtgcagcttctggctgctggactggatggccatgctgatcaagcaaagcgggtggaagagttatttgggaaaatttggccaccaccaaatgtatgattcgacgacttctttatgtcgcacgagagtcttttgcctgatggatcaataaacataatacacgactgatgaagggaatatttcgttggttttctttccctcttaaccatgaagtcttgaacaatttccttaatgtgaagcacgcggttcctaaatgcacattttgttatttttctc

SEQ ID NO: 11171 - DNA, 2311 bp, Glycine max
  Clone ID: 701038124_FLI
attttgggatccctggtgctgttaccgtggttaacggctttgacaatgagttcttcttggaaagcataaccatggcacaaaatgttcattttgcttgcaaatcttgggttcaaccaaacaagcttgacccagagaagagaattttcttcgttaacaaggtgtatctaccctgtgaaacaccaattggggtgaaagaactaagagaaaaggaactgaaacagctaaggggtgatggatggggacttagggtatcttctgatagaatctatgactatgatgtatacaatgatttgggtgattcagacaaaggagataggtttgcaaggccaacactgggtggtcaacacaacccttaccccacacgttgccgcactggacgaccaccatctaccgttgatacgaaaatggagtcacgaccgagtgatgaatcagagttaatatacgttcctagagatgaagaactgggggacataaagcaagaagtcattgatcaaggaaaattgatggcaatgcttaagaattatgcctgcgttagtagataaaatcatgggcaatgaaggagttttcaacattgattactttattaaagaatcagggcaatctattatgttcaacttgggaggtgccgtacaggaattttttaaattcgatcctccaaaaacattttcaagggaaaaatcacatttcttactggatgatgaatttgggcgtcaagtgcttgctgcgttccctctaggtattgaaaggctaaaggttttccctcccgcgagcaaattggatccctctaaatatggttcagtagaatcagctttgaaagaagaacacattataggccatattgaagggatgtcaattcaacaggcattggaagagaataagttgttcatgctggactatcacgatgtttaccttccattccttgatcgcattaatgctcttgaagagagaaaagcttatgcaacgaccacaattttgttcctcaccaaaatgggaactcttaagcctattgctatccagcttgctcttccaactgggaatccaaatacttcatccaagcaagttctcactcctcccaaagatgccacctctaaatggctctggcaacttggcaaagcacatgtttgctccaatgatgctggtgttcatacacttgtgcaccactggttacgtatacatgcttgcatggaaccgttgataattgcaactcatcggcaattgagtgtgatgcatcctatattcaagcttctgcatccccatatgcgatacacactcaagacaaatgcaatagcacgtcagacactcatcaatgctgaaggtaccattgagacagaccacactccagggagatactgtatgcaatttagctcagctgcctataaagattggtggcggtttgacatggaaggttttcctgcggatctcataagaagaggtttagcagttccagatgcaacccaacctcacggcattagactacttattgaagactacccttatgcagctgatggactcctcatatggtccagcataaagaagttggtcaggacctatgtcaaccattactataaaaattccaatgccgtttcttctgacaacgaactccaatcttggtacagagaattcatcaatctcggacaccctgatcataaaaatgctagttggtggcctaaacttgacatccctgaggatctcacctccatgcttaccactgttatttggcttgtatcagcacaacatgctgtcttgaactttggtcaatacccatatggtgggtacgttccaatccgtccaccactaatgcgaaaactaattcccaaggaagaggatcctgagtactcagattttgtcatggatccacagagatacttcttatcatcactgccaagtttattccaggcatcaaggttcatggctgtgatcaacattggttctgcacactcgcctgacgaggaatatataggacaaacaaaggatttgtcctcttggtcgggagagcctgagatcattgatgcattcaatcaattttcaatggagatgaaaagtattgagatggagatcaagagaagaaatgccgatccaaaacttagaaacagatgtggcgttaacgttttaccatatgaactgcttataccaagttctgaacgtggggcaacaggacgaggagtgccaaatagtgttacagcctagtccaatatgtgtacaaaccagcaactgaatcaatgttctattattcttcaccttagctggactaaaatggatttaatatttgatctcctaaaaacaaaaaagaaaataaaatgcaaaagggaat

SEQ ID NO: 11172 - DNA, 1073 bp, Glycine max
  Clone ID: 701038136_FLI
tggaaatgagaaaatagacggaagtgagagaggaggcactgagcatccaacaatggccttgttctctgctaccgcaaccgttcttcctcggaacctcgcattcgcttcctccaccaaactctccctctctcacagtcactctcttctacatcacttcctttcattccccactcccaaatcatcaaaccctcgcaaccgggtcgcaatctctctccaaaccccacgcgctcaatccggcgcgtccgcctccgcctccttccatggcctctgctacgtcgtcggcgacaacatcgacaccgatcagatcattcccgcggagtacctcaccctcgtcccttcgaagcccgacgagtacgagaagctcggctcctacgccctcgtcggcctccccgccacctacgccgcgcgcttcgtcgaccccggcgagaccaagaccaagtactccattgtcattggcggcgccaacttcggctgcggctcctcccgcgagcacgctcccgtggcgctgggcgcttccggcgccgccgcagtggtcgcggagtcgtacgctaggatcttcttccggaactccgtggccaccggcgaggtgtatccgctggaatcggagggacgcctctgcgaggagtgcaccaccggcgatgtggtaacgattgagctcggagagagccgtttgatcaatcacaccaccggaaaggagtatcgcttgaaaccgatcggcgacgcgggtccggtgatcgaggccggtggcatctttgcctatgccaggaaaaccggcatgattccttctcgttgagatattggcatggaagtagatatttggggaagctggaaccactcgtggaactgtgttacctttggcagcagctaccaattatttgagtatatactatttgcaacatactgctttctcaactcagattttatctcgcattatgcagttttgacatttgacagacagtcaattccgcagatagactactgcattagacttatttgtattttaggaaatatgaagttttcattatgtcgaagtttggatgaaatcagcaggattttagtatattctggtttgt

SEQ ID NO: 11173 - DNA, 278 bp, Glycine max
  Clone ID: 701038142_FLI
gtctccatgccgatcaatatttatggtgtggggcaattctgagtctcgagtgttttagttgtgaactctgttgcgtgattaaaacaagtctgagaagaaaaacaaattagtccaaccttttgtttgtttctggaagttagttatatcaagttgtgtttttgcattaaggggtttttgtcaatgatatgctaattttaatagatgtagatttatgtcaatgatattgtatgttaattttattcagtctcgtatctagctgaataattaagaattatact

SEQ ID NO: 11174 - DNA, 1464 bp, Glycine max
  Clone ID: 701038150_FLI
cacacctcatcggaatattcctttcttttcggtttcaatctctggatccgtcgtgacagacggcatggccacttccaatggcttcgtcgacggcactccctcggaatctgcattgatctttctcggcaccggttgttcgagcatggttcccaacctcatgtgcctccttcagccttctgaccctccctgccccgtctgcgtccagtcattgtccatccctcccgaacgaaaccctaattacaggtgcaatacgtctctcctaattgactacggcgccgccgccgccaacggtggcgatcgcaagtatatattgatcgatgtcggcaagacgttcagggagaccgtgcttaggtggttcgttgcccatcggattcccagaattgattctattattttaactcatgaacatgccgatgcagtccttggattggatgatatacgtgctgtgcaggcttttagtccaacaaatgatattgatcccacacccatatacttgagtcagcattcaatggatagcatagcagagaagtttccttatttggttcagaaaaagcgcaaggaaggagcagaaatacgaagggtggctcaaattgactggaacattattgcggatgactgcaatcaacagttttttgcgtcgggattaaaattcactcctttaccagttatgcatggagaggattacatctgtttgggctttctttttggtgagaaaaacagggtggcttatatatctgatgtttcccggtttcctgctagtacagagtatgtcatctcaaaaagtggagctggacagttggatcttcttatattggattctttatataggactgggtcacacaatgttcacctttgttttccacagactctagaaactgtgaagaggttgtgtccaaagcaaacactactaattggcatgactcacgagtttgatcaccataaagacaatgagtttttgatggagtggtccagaagggaaggaattccggtgaagcttgctcatgatggtttgagagtccccataaacttatagtaagggaaggttaaagcatgtgacaatgtataccgcatactgttgatcttaattagattggattggagcattaatattctttacagaatatcctcaatttctgctgtagtaaaaagccacatttttgctagaggtcgcatttctggatatgagaagaggataacttactttgatggaaatcccaattcttcttattgaactcgtgaaagcttgtattagaataattttataatcgactccttgatgccggaaaacaaattgagtgggcaatgagttttaagagctaaaaaaatccacatcttaaatttcttctgcaatcactgtgcgttactctacgatgaaactaatctgctggctacaaagttgtattattcaattgtatggtaattgttataaataacaattggtcaacttgacattgagttttgctc

SEQ ID NO: 11175 - DNA, 1463 bp, Glycine max
  Clone ID: 701038272_FLI
gaagagaagaggacttgtattttctgccagtttcccagtatggtggccacaagcacaaatcaatccgagttagaaacaagtaagaaggattccacttatgacagaatagctgaagtcaaagcctttgatgaaacaaaacttggtgtgaaaggcctcttcgattctgggatcacaaagataccacgcatgttccatcatgccaaggtggaggaccacactgaaaccatgccaaatgactcaaacttcagtgtccccatcatagatctccaagatatagacacaaactcatcccttcgtgtgaaagcacttgacaagattcgaagtgcatgcaaggagtgggggtttttccaggtggtgaatcatggtattgctgttgatcttttggatgagatgatatgtggaatccgtaggtttcatgaacaagatgctgaggtgagaaaacgcttttactcgagggatatgaataagaaagttagatatttctccaatggtactctttatagagaccctgctgctaactggagagacacaattgctttttttcgtactcctgatcctcctaatccagaagaaataccatcagtatgcagagacattgtgattggttattcagagaaagtaagggcattaggctttacaatctttgagctattctcagaggctcttggccttcattcttcttatcttaaagaattggactccgttgatggacaatttcttttgtgtcactactatcctccatgccctgaacccgaattaactatgggtacttcaaagcacactgatattagcttcatgacaattcttctgcaagaccagatgggtggtcttcaagttcttcatcagaatcaatgggttgatgttcctccagtgcatggatctcttgttgtaaacattggggattttctgcagcttatatcaaatgatatgttcgttagtgtctatcatcgggtcttatcaagtcatacaggccccagaatttcagttgcaagtttctttgcaaactcatttcaacagagttcattgaaggttgttggtccaataaaagagttgttatcagaagacaatccaccaatctatagggacactactgttaaagatgtcaaagcacattattttgagaaaggccttgatgggaacaattccttgcacccctttaggttgtgaagtgaataatgagaattcgattagagcactcttgattcctttggagttggctttagtgtgcattttatcatggttaactttttcctttgactgcgattttcagtatcttgtaacttctaaataaacaacatcaagttctagagacagagcatggttaaggcacccttaattatttgcactgcacaagagcaaagtttctagtttctgtattatgataatataatatagagtggtgagtatattattctcacagtatatatggatttattttatgtaagagtggttggaattggatc

SEQ ID NO: 11176 - DNA, 1855 bp, Glycine max
  Clone ID: 701038279_FLI
caaaattacagacgattggacattcactcactaataagatttttccatttaaaatattttccaaagtccaaagtcaaacacaatcaatgattcaaatagcatcgtgtgttcactctgtttagtagcatccaaaatggcgcattcttctgttatagtcttcctctgcactctccttctcttcttttctccgtcaattcgtgcctccgacgatgacgtggcgctgcacgcgaagaagctcatcagagacctcaacttgttccccgacgctgacgtcaacatcgttcccgttgctaattgcaccctccaaccccgcaggatcgtcgagaagcgcctgaggttcccgaagctgctagcttcggattccgagccttcggttgaggatttgggtcaccacgctggctattaccccattcagcattcacatgccgcaaggatgttctactttttcttcgaatcacgcaataggaaggaggatcctgtcgtaatttggttgactgggggacctgggtgtagcagtgaattggctttgttttatgaaaatggccctttcaaaattgctgacaacttgtctcttgtgtggaatgagtatggttgggacaaggcatcaaaccttttatatgttgatcaaccaactggaactggctttagctacagttctgatttgcgtgacattcgtcataatgaagagggtgtcagcaatgacctgtatgactttattcaggccttctttgtagagcatccccaatacgccaagaatgacttttttattacaggagaatcatatgctggacactatattcctgcctttgcaactcgtatccatcgaggaaacaaagctaaagaaggaattcatataaacctgaagggattggccattggtaatggacttactaaccctgcaattcagtataaagcttaccctgattatgcactggaaatgggcataattaagaaggctacacgtaacctccttaacttagtattggttccagcctgtgaatcggcaataaagctgtgtggcactaatggaaagacttcctgtatggctgcatatgtagtttgtaatgtcatattcagtgacatcatgttacatgctggagatacaaattactatgatatcagaaaaaagtgtgagggaagcctttgctatgatttttcaaacatggataagttcctgaaccaacaatctgttcgggattcactaggcgttgggaaaattcattttgtttcttgtagcactgaagtttatgcggctatgttggtggattggatgaggaatcttgaagttggtattcctgaccttcttgaggacggaatcaatttgcttgtttatgctggggaatatgatctaatctgcaactggcttggtaattcaagatgggttcatgccatggaatggtctggtcagaaagagtttgcaacctcacttgaagttccttttgttgttgatggatcagaagccggattactgaagagctatggacctctaagtttccttaaggtccataatgcgggtcacatggttccaatggaccagcccaaggctgcattagagatgctgaagaagtggattaatggaacccttgctgaacctagggatgataaggaaaaattggttgctgagatgtgatctcttttattgcttatttaattagtctagcaaaagggaacataaatgagaaaagaaattgcagaagtgtgacctgtatgtagtttgtgtgatatgataccacccccacagcacaattctaaaatgacattgtactaagaacttctatcatggaagaaaacctactattctaaaggaattccgtattttctgctttacatgctttattttgtttcacataagatc

SEQ ID NO: 11177 - DNA, 1877 bp, Glycine max
  Clone ID: 701038508_FLI
ttcaaaaaacaatcccttgagatcaccgttgacttgtccaaacgttccattgtctccaccaatgtctacattggccatggcttccccatgctcacgttcgatgagcaagactttgtggccgagcttccttttaagtataaacccttcattgaatcagtgaacaaacgaggccttaatatatctgaagttgtgtgttctactgcctcggttgggtggtatggggagataaagagcaaaaggacactgaagcttcagtgctttcacacacaagggtctactaatttgtttgctatgccgttggagggtattacggtggttgctgatcttgatgagagaaagttagttgcatattttgacagcaagattgttcctgtgcccaaggctgagggaactgagtacgtagcttcaaagcaaaagcctccatttggaccaacgttcattggagcagcttttgtgcagccaaacggaccaggattcaagatcaatggccactctatcagctgggcaaactgggagttccacctgggatatgatattcgagccggtccagtgatatcgctagcatcaatttatgacattcaacagcaaaggtatcgccgagtgttatacagaggatatatatcagagttctttgttccatacatggacccaacatcaagttggtacttcaagacctttcttgacagtggtgaattcgggtttggccaatccatggtgtcacttgagcctttcgctgattgcccatccaatgctgcatttttggatgcatattttgcaggagaagatggtgtgccagttaaaatagctaatgcattttgtgtttttgagaagtatgctggggatatcatgtggcgtcacacagaatcagaaatccatgatgaagagataagggaggttaggcctgatgtgagcctagtggtgagaactgtctcaactgtgggcaactatgactatatcgtagattgggagtttaagccaagtggttccataaaaatgggggttggtctgacaggaattttgggaatcaaagcaacagcatacacccacgtggatcagataaaggaggatgcctttggcacattgctaacagacaacaccattggtgtgcaccatgatcactatctcacatatcacctcgacctcgacattgatggagaagccaactcattcgtcaagaccaatttggagaccgtgagagtaacagatcacagttcaccaaggaaaagttactggaccgtggtgcgtgaaactgctaagactgaggctgatgctcgaatcaaacttggtttgaagccatccgagctagcagtggtaaatcccaacaaggaaacaaagcctggaaacaaaatggggtaccgtttgttcccattcacagtggcaaacccacttttggcccctgatgattatccacaactgagaggttccttcactaattataatgtgtttgttacaccatataacaagtctgagaaatgggcaggggggttgtacgctgatcagagcagaggagaagacactttagctgtttggagtctcaggaataggagcattgaaaataaggacatagttctgtggcacacggtggggattcatcatgtgccttgtcaggaagattatcctattatgccaacactgagcggtggatttgagctaaagcctaccaatttctttgagagtaatccggttcttaaagccaaggcaccaaagcctgtgcatttgcccaagtgcaattctaaaccttagttgattttttctttaaattctactttggggtgcagttagcgtgaagggcggccacaagagggttgtgttatgccatccttaagagattcacacgtgatgtgcttttgcaataaaataattggaaaagtttgctc

SEQ ID NO: 11178 - DNA, 1512 bp, Glycine max
  Clone ID: 701038535_FLI
attttataaaaaactggagcgttatttattttcttcttaaccccttcttcctcttgcgcatcgtctcaactcaactggcatttctgaacactctaaaaaaccagagccaaaccccaaacaaaattgtcttctcttctatttctccaattacaactcgtttccctaactcggccgagtcatcatggcgaatcacccttccgaagctcccaccgacgacttcctggagcaaatcctgggcctctcgaccttcgcctccgccgaccccgccgccgacgcctctccgatgatgcttcagctcaactccggcgacgccgccacccacctcgccgccacccacctcgccgccttccacgcgccgccctaccagctcggcctcagcttggaccaaggtaagggaccattcctcacgcccgaggacgcttctggaagcggcaagcgcttccgcgacgacgtcgttgataccagacctaaaaacttttttcatggacaacccatgcctactactgttcctactgctccacatccaccagcagtgcgacctagagtgcgggctagaagaggacaggctacagatccgcatagtatagctgaaaggttgcgcagagagagaatagcagaaagaatcagggctttgcaagaactggtccctagtgtcaacaagacagatagagctgccatgctggacgaaattgtggattatgtcaagttcttgaggcttcaagtgaaggttttgagcatgagtagattgggtggagctggtgcagtggcaccactggtaactgatatcccattatcgtcagtcgaggaagaaggcggtgagggaagaaaccagccagcctgggagaagtggtcaaatgatggcacagaaagacaggtagccaagcttatggaagaaaatgtgggtgctgccatgcagtttcttcaatcaaaagcactctgcatcatgcccgtctcactagcttcagcaatataccagtcacaaccctcaggcacttctagtatagttaagcctgaaactaatcctccttcataatcatagtcagaactctggcacagatgcaccatccagtggtcccatcaagggctcacctaacactgctaggacccacgtgtaatttgcctgtttcaaacccccttaaccttagtcattggttcgcatcaagttgcattcaaggttggatgccatagtctttcctttttgtcgttctttcaacttttttgtctagacagggtttgatgtcaatgcccttcaaaacacaagcaaaccccatcttgataaatttcatgtaaagggaaagaaattgtcgaagttcacttgatatgctcttcctttttgtatcaattagtgggggttagtggaacgtgatggaagcgcttttatagtggggcttggttttttgtagtgggcagtgggaccttctaaaaggttagggtggtgtgtatattttattagtgatgtaactcttagggaatttgaattgcagagctgaaatggataatgattgctttaac

SEQ ID NO: 11179 - DNA, 1546 bp, Glycine max
  Clone ID: 701038558_FLI
tataatagaacgcggaagaagaagaagaagtaaccgacgcttgaataaaccgaaccgttcttcgattcgggttcaagttcgaagaagaaaagcgatgagttcgggtagtagcagcagccacagcagtgagaaggagaaggagaagcagagagtgagtcgcacgtcgctgatactctggcacgcgcaccaaaacgacgccgcagctgtgcggaagctcctccaggaggatccctcgctcgtcaaggccagagactacgacaaccgcacgccgctccacgtggcgtcgctccacggctggatcgacgtcgccacctgtctcatcgagttcggcgccgacgtcaacgcgcaagatcgctggaaaaacacccctctggcggatgcggagggagctaagaagagtaatgtgatcgagcttttgcaatcgcatggtggcttgtcttttgggcaaaatggaagccatttcgagccgaagccggtggcgccgccgttgccaaacaagtgtgattgggaagtcgagccgaccgagcttgacttctccaactcggtgcgaatcgggaaggggtcttttggtgagattttaaaagcccattggcgtggaacaccagttgctgttaaacgtattcttccatctctttccgaagatagattggtgattcaggacttcaggcatgaggttaatttgttggtgaagcttcggcaccccaatattgttcagtttcttggagctgttactgacaggaaaccccttatgctaattactgagtatctaagagggggtgatcttcatcagtacctcaaagaaaaaggcgcgcttagtcctgcaactgctatcagcttttccatggatattgtcagaggaatggcctatcttcacaatgaaccaaatgttataattcatcgagacttaaagccaaggaatgttcttttagtcaattctagtgccgaccatttaaaagttggagattttggattgagtaagcttatcacggtccagagttctcatgatgtatacaagatgactggtgaaactgggagctaccgctacatggctcctgaagttttcaaacatcggagatatgataagaaggttgatgtgtactcctttgcaatgattttatatgagatgcttgaaggtgaaccaccttttgcaagtcgtgaaccttatgaaggagcaaaatacgctgcagagggacacaggcctcattttcgggcaaagggttatacccctgaattgcaagagttaacagagcagtgttgggctcatgacatgagtcagagaccatccttcatagagatccttaaacggcttgaaaagatcaaggagaatttacctacagagcatcactggcacttgtttacctcataaatgtctaatagcaataatttgttcagaaattaagatgatttatttaccattaccattctctggtttggtgccggatatatggattggttgagccaaccaacctgcaaagtcaatacttgttttcaactgtttggattaatgagcagaaaaggtgatgttgattgccctgcctttggtttc

SEQ ID NO: 11180 - DNA, 1849 bp, Glycine max
  Clone ID: 701038652_FLI
tgaaaatcttccaccaaatgtaattaagcaacttgccaaggagttgaaaagtcttgatgaatcccctcctgagggcattaaggttgtggtaaatgatgatgatttttcgacaatattttctgacattgaaggcccaggtaagtagcttttatgttttttgttgtatgattgagcactcgcatttggtaaggagctcaaactaactgcagtactataattttgcagctggaactccttatgagaatggagttttccgaatgaagctgttgctgtctcatgatttcccgcattctccacctaaaggttttttcttgactaagattttccatccaaacattgcaaacaatggagagatttgtgtcaacacacttaaaaaggattggaatcctagccttgggttacggcatgttcttattgtaagtgcagtagatattcttgatttattgagtcaagttttgcttgattggtctttgtgtttattgccattgattcccattttgaacaggttgttaggtgtctattgattgaaccatttcctgaatcagctctaaatgaacaggctggcaaaatgctgcttgaaaattatgaggagtatgctagacatgctaggtaagttgagccaatgatggtattcctgtactggaattttgaaaatttaatgagtggctgaatggtgttgctaaggagcattttattagatgctttcaattacataaaaaaatattaaatatttttttttaaaatatatatgttccttttcattagcattctccctggtttagaccctgttctgaaatcttttatggcaaatgaaacttgaaccaagagctatgttgagccccccccaattcaaataacagagattgctttcttcatctgccatagttcatcagtcggacatctatatatatctacccttggtgtttgagagaaaggagtccattcttccttgtttcccacattgggggacacatgctgaatgtgatcccagctgtagtatttatatctcaaacaaactagttcatgtacctcattggagctgtgtttctttagctgctcaattgcacaggagttgagatgtaacatgtgggacgtttttgattttagactcgggtgtttttttattggatttgataaattttcttgactttgataaacatttgggagctagttgttggatttgataattttctcgcgtttgataaacttttctccatgctattgttaccttattctacctacttggttcataaattattttccattatgcatgaattgaggagtatcatttgtggcatgcaggctttacaccggaatccatgcaaaaccaaagcccaaattcaagagcggagctatatccgaatcaacaactgctctgaatgtggatcagacaaacacctctgtgattagtgctgacatcaaaaccacaccggcgagtgctgcattgccagcagccaccacaacaagaggaaataatcaggaacaggcagcagcggctgttaatggttctaatgctgccgctacagtcatttctgctgctgcttctgcaccccaaaagaaggaaggtggacaagcaaaagctcaggtggacaagaagaagatagatgccagaaagaaaagtttgaaaagattgtaataaaattgttcaattattgatgttttttttaattgtgtcttagttttacaatttgatagagaaagaggaaggagtggagatatggtctcctgggttcaacatttgttttatataatgaattagtaatttcttgttaggagtaaatggatgacattgaacttgttgtctttggacttgtgttatactctttggtaaaatattgatcttttaggg

SEQ ID NO: 11181 - DNA, 310 bp, Glycine max
  Clone ID: 701038718_FLI
aaaagaaaaaagaagagagaaaaatacaaaattaggatatttgttccaggcctagcaaggggtagatgacctcctaagaggaaaagcttcagcagttgcaactgaggaaaaggtgcatgaaaatggtaagcagctggtttttcaattgtaccaataatgtaatggtgttcgaccccacctggattataaagagttatttacatattgattatttcctttgttaaatgaacgagtgaagtgaaagtcattctgttcagtggttaatcatgtgattattattattattgaatgcattgtgtaagtatttatc

SEQ ID NO: 11182 - DNA, 853 bp, Glycine max
  Clone ID: 701038753_FLI
ggatgttaagtcagaaactggaagtacatctctaaaggttttgccaccatggatgattaaatcagggatggttcttacaaaggaacaacgtggagaggtgaaggaggaaatgaagatggatgggacttcaatttccacatcagcacagtacttggacgacaagaaatcaacagttgaccatgatgataagagaaatatacaggatgagtatattaaggcttattatgctgctttgcttaaacaacaacatgaattggaagctgctagtaaacaagaattgtcaaatacactcactgcaaatgatccttctagcagtgcttctaatcgtcaagttggcatgaaatcaaaacttgaggaagatgatgatggtactgaatgggaggaggctccagttgcaggtactggaaatgaaaattacaaggtcgatttgaatgttcaagctgatgatgctccagcagatgacgacgaagatgtggactgggaagaaggttgatgaaaagattatctctcagcacagtaaggttcacaaaatataaattttgaaggcatgaatttatattcaacaaatggaagcagttatataactgatatctccgcaataatgctagtattcagtttcatttccggcggcctcaacggtgggaaactccattacaatttttttttttttttttataccagaacttcaatttggtgcttctggggaagtaaaatctaatgttttgttgtactgttgaatgtgtgctacacttggctaaggcatcacttatccaattcaaatacttcatcaatgcaataatcgttaccatacacatttaaataatgcactgtaagatttatttttcattcatgg

SEQ ID NO: 11183 - DNA, 1995 bp, Glycine max
  Clone ID: 701038821_FLI
ctgaattatacaaaacagcacgtatatctccaattacacttacttatttccataattgcatggaaaatgggaactatactgtaaacctccattttgctgagatacagtttacaaatgataaaacatttagaagtcttgggaagcgcatatttgatatctatgttcagggaaaactgattcgcaaaaattttgatatagagaatgagacaaatgttgctgagaaaccactggtactgcctatatacaatatcagcattacaaataatgtcttggagattcggttctactgggctggaaaaggaactactagaattccggatgttggagtttatggtctccttgtatcagctttttctgtggtttcaaattctagagtttgctcaaatggagaaaagaaagtttctgtttctataataattgcaattgtagttggtgctctatgcttagtgctgtttacatctggattcatttggtggaagtggaaaggctttttcagagggaaactgcgaagggcaggtacaaaagatagagatactcaggcaggcaattttagcttggagcagatcagagttgctactgatgacttctcttctgctaataagattggggaaggtggttttggtcctgtatacaagggtcaattgctagatggtacttttatagcggtcaagcaactgtcatcaaaatcacggcagggaaatcgtgaatttataaatgaaataggcttgatatcttgtgtgcaacaccctaaccttgtaaagctttatggatactgtgctgaaggagaacaactcttgctggtatatgagtacttggaaaataacagccttgcccgagttttatttggtagtgaaaacaagcagcttaaattggactggcccacgaggtttaggatttgcattggcatagcaaaaggtttagcatttctacatgatgagtcaagattcaagatagttcacagagatatcaaggcttctaatgtgttactcgatgacaaattgaatccaaagatatctgactttggcttggctaagcttgatgaagcagagaagacgcatatcagcacccgagttgctgggactataggatatatggcaccagaatatgcattatggggctaccttactgacaaggctgatgtttacagttttggagttgtggcattagaaattgttagtgggaaaagcaataacaattatttaccagatgatggaagtgtttgtcttttggatcgggcatgtcagttaaaccaaactcggaacttgatggagctgattgatgaaaggttggggccagaccttaataaaatggaagtagaaaaggtggtcaaaataggtctcctgtgctcaaatgcttctccaacacttaggcctacaatgtctgaagtagtgaatatgcttgaaggacatgcagatattcctgatgtaatcccagaaccaagtacctacaatgatgatttaaggttcaaagccttaaggaatctccatcaatatcaatcaaaacagagtttgagtggaaaccagagccagagttcaatgacacatacattcacctcagcatctggtggtaatactcacactactagttatattgaggatcatagttcagttgacagtagttagttttctcctttcaccaacttgacgcactttaccagatagcagtggtagctccagatcttagggcttgaaaattttgaccagcatggaaccttctattttcacttgtgtagttttctgctttctgaagaggtctccaaaggagtatgagaagatttttcctttcttccttatgtcacccttatttgatttgattttactttttttgtttctttaatgtacaaatatattgctacaaataaagcaatctctaaatcataaatttaggttacttctttatttatttctatgtgtatccatataacggaagttcaattcatacctgatgtaaaatattataataaattataaattagattgtgtatgtttcaaacgg

SEQ ID NO: 11184 - DNA, 1356 bp, Glycine max
  Clone ID: 701038834_FLI
gttcccaatactgtacctatcagcagggacatgcaccacattgatcatcataggaggatccacagcaaggacattttaccaagtggtgtgtggtgaaacatgcactgccaaacctatgaccactgtggaatggtacttggtgttcacctgtgtagctgtggtgctatcacagttgccaaacttgaattccattgctggggtgtcactcattggagctgtcactgctgtagggtattgtactgccatttgggtaacctctgtggcacggggtgccctaccggatgtgagctataaccctgtgaggactggaaacagtgttgaagatgcctttagtgtgctcaatgcattgggtatcattgcctttgctttcaggggccacaatctcatccttgaaattcagtctactatgccttcaagcgagaagcatccatcacacgtgccaatgtggaaaggggtcaaggtttcttacacgatcattgcagcatgcttatttcccatggccattggaggctattgggcctatggccaattgattcctgcaaatggaggaatgctcactgccctataccaattccactctcgcgatgtgtcaagattcgtgctagggttaacaagtttttttgtagtggtgaatggtttgtgctcgtttcaaatctatggcatgccagcattcgatgacatggaatcagggtacactacaaggatgaagaagccatgcccgtggtggctgcgtgcatttattagggtgttctttgggttcttgtgcttcttcataggagtggctgttccgtttttgtctcaaatggctggtttgattggaggagtggcgttgccagtgacattcgcgtacccatgtttcatgtggcttaagacaaagaagccaaagaagtatagtgccatgtggtggctcaattggttcttggggacattgggagtggctttgagtgccatattggttgcggctagtttatatgtcatcattgatactggtgttaatgtgagctttttcaatcctcagtagtctcacatatagagtgggaaaatgtactaggaaaatgatgttgggaggtaattaattagtaagagaattgctaaggttttctttctttctttttttgagaaattcaaatttgtgaccccactttgtagttctaggttgattttgcctaatagtgatatttgtataaatatcattaactgcataaggggaggggaaggtaaatcaagattgtataaattttcttgttctgcaaattgaaaaatacttaagagtttatttagtcatacatgatatgatgaagtaggatatagtataaaatttaataatatttagacaatgtttcttttgcattgtat

SEQ ID NO: 11185 - DNA, 1038 bp, Glycine max
  Clone ID: 701038843_FLI
cagatatgaaccggtcaatgaacccactttggacaactgctttgtatcaacaagttatgatgctactactcactttgagtcgaccgtggatgacgttctcaacatgtatacattgataactggaaaggtaagtgttatgccttggttaccacttgtttccacttcttgaattaatttttgagccacagatagtgactcagattgttctacagtaatactgtattttataatatcatatcacatatttataagtctacatactgtaggaatcggttattcttagggccctaattcctatatgggaaaatagttgcttagctacaactaaatgctattagttgaaccatgttggccattagtttcacactggctttggattttgatatggcttttggttcttgtaaatcaattttctgcaaaaaaaaaatgttttttgtatttcagttaataaaatgagaacaaagtgacattttggtaattgaaagtgaaaataagaaatgaaaacagaacattttctcaaagtagaaacatccttagattcccttcttccccactcccaaaagctaaaaatggcttagatcaattttatttattcattttagaatgagttggatttcttatgggtggactagcaacctgtttgggcatgggaaatcttgattgacgattgatgatattctctgataactttcttcttggtaattgggtaatattgtactcataattttgaacaggttattgacctgagtgtggatcttagtgctgctagtgctgcagaagagtaaagaaaactcggtgatgtccttccttcatgatctgttgctgatgggatccgtaatggacttgataatgaatgttattaacgtttataataaattgatataaaatatttcttttttttaaaacaagatttgtgtggctggggaactttttcccgtccagaagctctgttgtgcgtaacatttttatatgtagacatacattgccttctgatgcagtggatttagtttggtaatgtagtgttcttttcatattgtt

SEQ ID NO: 11186 - DNA, 853 bp, Glycine max
  Clone ID: 701038893_FLI
ggtatctcaaaccaagtcacgccaaaaatgtgatagaggttcctatttccgagctcttaaatacatctattttgtgcctttatctatctgcttgtttgttgcttggacaacgtgataactttagtgtgggtcattctgttgtcgtggtctatgactcctggagtcctggttttttgatagcggggaatgcaaacctgcagcacttgtttcatttattttcctattgttcaagaacctaagaagttgtggactgcaggtatggctttataacatcggattaggtagtcttgtgtacagtgttgagaagatttgtgatgaatctggtgaggatccaaattgcagcagatcggtgactgggaatagcattgctgatcacttggtctattatggcgttgacatgggatcagatgagccaagttcatgcagaattgttatggattcttatgttcagaatactaacatcaaagattcaagaggaaacttaatcttgtccagagatcctgcaacccccctcatcaaattgagtggagagggtgacaatcaggaaaatcccattaatgttgattgaattggcatcagatatctgttgcatgatatgttccagaggtttgccgtgtggcattattcttcagatttcttctttcttcatggtccatacagctgaacaattttattgaacaggctagggctggaaggagtttgtatagtcttggactcgtgtacatatgctcatacttgtatatataactaataattatatttttttacttcataattaataattcttgatactttgttaagtgtataatttcactttcaaattctactgaattccacttctcatttgggtgat

SEQ ID NO: 11187 - DNA, 1025 bp, Glycine max
  Clone ID: 701039007_FLI
gtaattaaagtggtgtgactattgagttctatgaaatgatgccaccaacaaccacacccactcattgattcatttggttccctcactttccccacttcctttgtctccatataaacccttcaccctgtgacccttttcccactcccaaacccctctcttcattccaattttggcaccacaccatgccaaccctcaaccatgtcctcacattcacattcttccttctcctctcttgccattgccacctcctcaatggccaagaggacacctcatttggccgtgccatagacagaaaattgttaggcctaaagagaaaagaaaagctcagccacttcaaattttattggcatgacatagtgagtggccgcaaccccacttcggtggcggttgttccgccaccgccgaaggtgaacacgaccacagcatttggcttggtgaacatgattgacaaccctttgacgttggggccggaattgagctccaagcttgtgggaaaatctcagggtttctacgcgtcggcctcgcagactgagattgatcttctaatggctatgaactttgctttcattgaaggtaagtacaatggcagcaccatcaccatcttggggaggaactgcgtcttccacaaggtgagggagatgcctgtgattggaggaagtggactcttcaggtttgctagagggtatgctgaggctaggactcattggcttgatctcaagggtggggatgctattgttgagtacaatgtttatgttatgcattattgattgatgatttaataattatgttatatagaagagattatacttttagcttttgctttagcaattggcaattggcactctttgtttctttttttttctttttttctttccatttgttgcttttgattcttaattagctttgccttttctagaggtggggtttgttcttgtaagcccatcttaaaatttgttccctatttaattatgtatttgtggctggtgtgataattggaataataatttatgatgcaattggaaagt

SEQ ID NO: 11188 - DNA, 745 bp, Glycine max
  Clone ID: 701039075_FLI
cgagcatcgaagctcacgaattgaattgaattgagtttctttgtctccagagatgaagaagggcgtccatccacagaagcaatggatatcctacgttacacaaacgggtaggttgatgcatgtgatgatgacaaagatacaccctgttgggaaagtttaccacttccgagctaagcgccaaatggccgagagtttaggacagattgctaagttcagacgtcgctttgggctagaaaatccagagggcaatgaaaaatgacttgtccaatgagcagagggagctttggcctttttattttgtgcaaattggtggaaaataactgggaaattggtgatactctcaagcaggttttttttgtagcattcaatgtatctagtttaactgcagaaatgtttccttcttcagttcatattaagtgatattttcttgtgggtttattcaatgcaagttcaagctgaggttctttgttggcacttctggatattacggaaagagaaactttgatgttggggactaggacacactaaggatcaaattactaatttgaattgaataaccatatccagtgattgtttggtccaaagcataaatcttgtcctaaacaggttgcaaccgtcaacaatatgccctttttaatttgttcatacgttttttgtttgtgattggctctcttgtatctgcattattcttgtctgttcatatgttttagagaagttcaggaacataattatgcttcaacgcttt

SEQ ID NO: 11189 - DNA, 1530 bp, Glycine max
  Clone ID: 701039084_FLI
gcaggagccattactctccgccaccgccatgacggttgcaagcgccgcctcttcacgcaccaagaggctcgtcaagctaacgctctcgctcctccgcctcggcttcaactcctccaaatgcaaaacggcagcgaagatggcggtggcgaggatcaagctgctgcggaacaagagagaggtggtcgtgaggcagatgcgacgcgacattgcccttcttctccagtctggtcaagacgccaccgctcgcatcagggttgaacatgtcatgagagagcaaaatgttttggctgcaaatgagttcattgaactcttctgtgaattagttgtggccaggctcccaatcatttcaaagcaaagggaatgtccagcagatttgaaagaaggaattgctagcttaatatttgcagcccctaggtgctctgaaataccagaacttgtggcacttaagaatatctttgacaagaaatatgggaaagattttgtatctgcagctgttgatctcagacctagctgcggtgtaaatcgccagttgattgaaaagctctcagtacgaacaccaccgggtgaagtaaaattgaaagtgttgaaggaaatagctaaggaacatcaaattgattgggatactacagaaagtgagacagaacttctcaagcctccagaagagctaatagtagggccacgtgcttttgtcagcgccagcagcctaccagtgaaacattcttcaaatgtgtcagtggaatcaaatcagccagctactagattatcaggtggtggaagaactgaggccgtgtattacgaggattccaagtctgctgctgaagcagcagctgaagcagctaagaaagcaattgctgctgctgaagttgctgcttatatggctatgaaggagtctattgaagctcctcaaccatatgcttacaatgataagttgtataactcaggagtcaactctgggaccttccaatcaaacaatcctgcaaaatgtggccagaacatgactccaaaatctacaactgaagagaaaatgtacaggtcacagagcgtaccaagatctgatcatctgaacagtgaggatacattgcctgaccaatatggtggaaatgattataggaggcacagctaccatccaacttctgcgcattcagatattaagtttgatgaatcagattgtgatgaagaaattgaagcagaagaacctcctgtggttactatgccccctaatcggtttccatcaccagtaccttcatctatggttaaacaggatagccgcattcatgttcatcccaaattgccagattatgatgaacttgctgcccgctttgatgcactaaaattcaagaagtcacaatcctgaacccactttagcaaccaactgtttatgaatctatttaattaatttatacacaatacatataagaatggtatattttgttacatagagatactaagaacattggatgctatactttggtacgtacggttctgcctcagcatgttatatttttttctggaatagtattaactttcctc

SEQ ID NO: 11190 - DNA, 1362 bp, Glycine max
  Clone ID: 701039094_FLI
ctttcaattatccaacagaactgaagatatcgtagctggaaacgtctagcacccacaaatgggtaactcccatggacaccggcatcgcaaacacggtaactccgttcctcccaacacggttcctcctccctataaatacaatcctcacccaaccacctccaattccaccatgctttctcttccttacacccacgtcgacaccaccctccgctccctcgccgcccaagccgagggcttcggtcgcttcgctatcggcggcctccacggtccccttcaccccgtcacatctctcgcagatgatggaccggggtcactgcgtgacgcgtgtcgcagaaaagaacctttgtggattgtgttcgaagtttccggcaccattcaactctcctcgtacttgaacgtgtcgtctcacaagaccatcgatggtcgtggccagaggatcaaactcagcggaaaaggcttgcggctgaaggaatgcgagcacgtgataatttgcaatctggagttcgaaggaggcagagggcatgatgttgatgccattcagatcaaacctaattccaagcacatatggatcgatcgttgcacgctcagtgattttgatgatgggctcatagatatcacccgagaaagcacagacattactatttcaaggtgccacttctctcagcatgacaaagccatgctcattggggctgatcccacgcatgttggagataggtgcatgagggtgaccatacaccattgttttttcaatgggactcgacagaggcaacctcgtgttaggtttgcaaaagtgcatctgtacaataactatatcagaaactggggcatatatgctgtttgtgctagtgtggaatcccagatattctcgcaacataatatctatgaagcaggacagaagaaagtggcatttaagtaccttactgagaaggcagcagacaaggaagtgggagcaactggtaccataaggtctgaaggagacatattcttaaatggtgctcaaaaagggttaatgactgaggatgttgggtgcaacatgtttcaccccagtgaacactatccctcttggacagtggaagcccctacagacgatctgaaacagattcttcatcactgcactggatggcaatctcttgctaagccagcagatcaaacactatgagcacaatagaagcttaagctgttgcataaatgcaggggtaacagaactaacatcattgatctcctgcccccccaaagtctattctagcaagttactttcctgtgtatataaaatatagattagtagcggattattaaatattaataagtactacacgtttgttaaactattatggctattgacaagagagtaaattacaaatt

SEQ ID NO: 11191 - DNA, 1017 bp, Glycine max
  Clone ID: 701039134_FLI
cttctttctttcttactttctctcactcaccaaatagttttctcacaaaggaggaagaatggcatctttcatttcactctctttgttgcttctctttctcaattaccccttcctttccctctcaaccaaccctgaagggaacgctctgcatgctttgagaagcaggatttctgatcccaacaatgtgttgcagagttgggacccaacactggttaatccctgtacttggttccatgttacttgtgactccaacaatcatgtgattcgcttagacttgggcaactctaacgtttctggaactctgggcccggaacttggccagctacagcatctgcagtacttggagctctacaggaatgagttaacagggaagattcctaaggaacttggtaacttgaaatcacttattagcatggatttgtatgataacaagttggaggggaagattccaaagtcatttggaaagttgaagtcacttaaattcctgcggctgaacaacaacaagttgacaggatccatcccaagagaacttactcgtctcactaatctcaaaatctttgatgtttccaataatgatctctgtggaacaataccagttgaaggcaactttgaatcttttccaatggaaagttttgaaaacaacaggtttagtggtcccgagctgaaaggacttgttccatatgattttggatgctgaagaaagatagaaatcgcattattatcatctaaacagactacaatgaagaggcttagtttacgtagggagggagtatcacaaagggaaaagctggtgttattttcacatcaatatttcctcaccatttttacacttttcttaattgaaaaaaaaaaagaaaaggaagtgtgaattgaaatctatgtttttcatattttattataaaaaggaagctatgtaagaatgctctcaaaacaattgtatgtaaataacattattgatgtatgcttgacccgaatatgaatctaaaaatgtcagatttgcatgtctagttatataat

SEQ ID NO: 11192 - DNA, 1558 bp, Glycine max
  Clone ID: 701039157_FLI
cacaaagcgggttactgtctgttcaagctaccatctctctctctctttcttagtgcctccttgccagaagttaaaatggcccaagaaactttcctattcacatctgaatcagtgaacgaggggcaccctgacaagctctgtgaccagatctccgatgctgtgctcgatgcatgcttggagcaggaccctgacagcaaggttgcctgtgaaacctgcaccaagaccaacatggtgatggttttcggagagatcacaaccaaggccaacgtggactatgagaagattgtgcgtgacacatgcaggaacattggttttgtctctgatgatgttggtcttgatgctgacaactgcaaggtcctcgtcaacattgagcaacagagtcctgatattgctcaaggtgtgcacggccacctcacaaagaggcctgaggagattggtgctggtgaccaaggtcatatgttcggctatgccactgacgagactcccgagctcatgcccttgagccatgtccttgccacgaagctcggtgccaagctcaccgaggttcggaagaacgggacatgcccttggctgagacctgatggcaagacccaagtcactgttgagtactacaatgacaagggtgccatggttccaatccgcgtccacactgtgctcatctccacacagcatgatgagactgtcacaaatgatgagattgcagctgatcttaaagaacacgtgattaagcctgtgattcctgagaagtaccttgatgagaagaccattttccatttgaacccttctggcaggtttgtcattggagggccgcatggcgatgctggtctcaccggccgcaagatcatcatcgacacctatggaggatggggtgcacatggtggtggtgccttctctgggaaggatcctaccaaggttgataggagtggtgcctacattgtgaggcaagctgcaaagagcattgttgcaaatggacttgctaggagggcaattgtgcaagtttcctatgccattggtgtgcctgagcccttgtctgtgtttgttgacacttatggcactgggaagatccctgacaaggaaatcctcagcattgtgaaggagagttttgacttcaggcctggcatgatctccatcaaccttgatctcaagaggggtggaaatggcaggttcttgaagactgctgcatatggacactttggcagagatgaccctgacttcacatgggaagtggtgaagccactcaagggggagaaggtacctgcttaactaaaaggggttccaacactcttggcaagggacttttgcactactactggcttcttattatctgattgctaaaattttctctatgtttccttccctcttactcaattctgtttttttttttctgtatttttttatgaatttcccccttttttttgtgtacttgtatgtgttctttcagaacatatatattttatatgatgaaacaaaaaaaatgttctctcaagatttatgctagaaatatgtaataatctcaaattatagagagtatacaattttactatgtgaattgcagtac

SEQ ID NO: 11193 - DNA, 1032 bp, Glycine max
  Clone ID: 701039269_FLI
gcagcccttcctccatttcctcctcatataaactcttctcaataaccagatatttcattgcatgaatattcaaaaaacaatggccatgctcaatatcatctccattctctctctcttactcactcaatcccacgccaaaatacccggcgtctattccggtgggccatggcaaagcgctcacgccactttctacggtggcagcgacgcctcaggaactatgggaggagcgtgtgggtacgggaacctatattcccaaggctacggtgtgaacactgcggcactaagcactgctttgttcaacaacggtttcagctgtggagcgtgtttcgaaatcaaatgcacggatgacccgaaatggtgcaaccccggtaacccttccatcttggtcaccgccacaaacttctgccctccaaactacgctctccccaccgacaatggcggctggtgcaaccctcccaggccgcacttcgacctcgccatgcccatgttcctcaaaatcgctcagtaccgcgccggcatcgtccccgtctcttatcgccgggtggcttgcaggaaacagggagggatgaggttcacgatcaacggcctccgttacttcaacttggttttgatcaccaacgtcgcgggtgcaggggatatcatgagggcgagcgtgaaagggtcaaagacagagtggatgagcatgagccgcaactgggggcagaactggcaatcaaacgcggttctggttggtcagtcactctcctttagggtcacaggcagtgaccgacgcacatccacctcgtggaacattgtcccacgtaattggcaatttggccaaaccttcgcgggaaagaattttagaatctaattactataccgtgtttggatcatttgcgtttttgaaagcgctttgtttgatttgccaccttttatttttggttgtttgctacctacatgggagaaaatggtagccaactttttgacttttgatcatgttttggggagtggagtgaaggaaatgaggctaaagaagtgtgatttttgtcgggg

SEQ ID NO: 11194 - DNA, 1461 bp, Glycine max; identical to SEQ ID NO: 8325
  Clone ID: 701039358_FLI

SEQ ID NO: 11195 - DNA, 912 bp, Glycine max
  Clone ID: 701039415_FLI
gcagaatttgtccaaggaggaattcgtacatatactgcgtcgccaaagtactggtttctcaagaggaagctctaaataccgaggagtaacactccacaagtgtggccggtgggaagctcgaatgggacaatttcttggcaaaaaggcttatgacaaggcagctatcaaatgcaacggaagggaagcagtgaccaactttgagccaagtacttatgaaggagagctgaaatctgcagccattaatgaaggaggcagtcagaatcttgatctcaatttgggcatagcaaccccaggacctcccaaagaaaattgggggcaacttcagttcccctccttcccttacaatacacatggtggaagaagttcaatgatggaaaccaatgttagttctggaattggtaatccatctttgaaaaggatggttgcaactgaagatcgtccttcattatggaatggcatgtctcctaatttctttcccaatgggcaggaaagagcagagagaatcggcgttgatccttcaaacggactccccaactgggcgtggcaaacacatggccaggtcaatgctaccccagtaccaacgttctctgctgcagcatcatcaggattctcaatttcagctacctttccatcggctgccatctttccaacaagttctatgaactcaattccccagagtctctgttttacttcatccagcatgcctacccgcaatgcatctgaatattattactaggttaagcccccacaggcaccaccatagctgattttgcagtacagattaaagacaaactaaaacaaaagtgttttcggtccaaattctttttataattcagccactgattggtgtatactgagattcgacaccttattgctgtctcttgcttaaactataatgccccatgtttggat

SEQ ID NO: 11196 - DNA, 1090 bp, Glycine max
  Clone ID: 701039520_FLI
tgcgcatccaatcccttcactgttgttttcccccaattcccagtcccacatagcttagaacttacgatctacaattttacaaatacaaatacccttctccctcgctcaaaacacaaacaagctcgcttcttccttctctcatcaacaacatgcagatcttcgtcaagactttgaccggcaagaccatcaccctcgaggtcgagagcagcgacaccatcgacaacgtcaaggccaagatccaggacaaggaaggtatccctcctgaccagcagaggttgatttttgctggtaagcagctggaagatggtcgcactcttgctgattataacatacaaaaggaatcaacacttcacttggtcttgaggctaaggggaggtaccatgattaaagtgaagactttaactgggaaagaaattgaaattgacattgaaccaactgatacaatcgaccggatcaaggaacgtgtagaagaaaaagagggaattccacctgtgcagcagagactcatatatgccggtaagcagcttgctgatgacaaaacagctaaagagtacaacattgagggtggttctgtacttcacttggtgcttgcattgaggggtggtacttattagtgtagatgcatatcagaacccaaagacatgaaaggaagctctatacctgtcccgtctctgaagacatcattgttcttatgtgcttggttgtaattgaggctgctattggtggtcagtaactcagtatctttaagttgtatgctatttgaaaccctaagttggcctttataaagaatatctgaaaaccaatgatttaaaaccatagtttaggtacatattttgctttcttctgcttttcaagggagcaccaatgttaaccttcaaacgcttctgtcagtgtcagagaagtttatcttctgtagccttgtttgtgggtgtcttccgcttgaaaagagggaaatggaaggttgattgttcgtgttttaagccattttggaatggaatgttgtcaaaatgatggatcggattgaggtcatcggggcattgtagttgattttaaaatttttaatgtttggttttaggaggcttactttcgc

SEQ ID NO: 11197 - DNA, 1177 bp, Glycine max
  Clone ID: 701039608_FLI
gtgcccaaccgtgattgcccatcgaatgctcagttcctagatacatatgttcacgctgctgatggtactccgttactcatcaagaacgcaatctgtgtctttgaacaatatggcagcatcatgtggcgtcacaccgaaacaggcattcccaatgaatcgttcgaagaaacgagaacggaagtcaacttagtggtaagaactgttgttaccgtgggcaactacgataacatcattgattgggagtttaaaacaagtggctcaatcaaaccctcgattgctctctcgggtatattggaaattaagggagtggatattaagcacaagagtgagatcaagagcgatcaacatggtatcttggtgtcggcaaacagcattggtgtttaccacgaccacttctacatttaccatcttgaccttgacattgatggtgttgccaactcttttgagaagacaagtttgaagactgtaagagtgacagatggaagttcgaagaggaaaagctattggacaactgaggttgaaactgccaagactgaaaatgatgcaaagataatacttgggttgagccctggtgagctttcagtggtgaatcctaacaagaaaacctctgttggaaatgatgtgggataccgtttgattccagcaatcccagctcatcctcttctcacagatgacgattatccacaaatacgtggcgcttttaccaatttcaatgtgtgggtcactccatacaataggactgagaagtgggctggtggactctacgttgatcacagccatggagatgatactttagccgtttggaccaaaaagaatagagacattaacaacaaggacattgtgctgtggcacgttgtgggaattcatcatgttccagcacaggaagacttccccataatgccattattgagcactgcattcgagctcaggccaaccaatttcttcgagaggaatccggttcttaaaacactttctcccccggatgtccaatggcctggttgccccaagtaaaactagctagccagccatttccattatattagtgtgcttcgagtgctacaactagatgtgttccttggataatgtgaaatgcgatctgcttattgcatgtgcaagaataatgatttgatatgtattgcttattattatatcaatgagaagtttacttgaacttgac

SEQ ID NO: 11198 - DNA, 2421 bp, Glycine max
  Clone ID: 701039913_FLI
aacaaaaaaaaatctttccttattgttttccgtgtttcctttgtttcatagcttctgggttttggttttcagacccacaatacaaagttcacaagtgtgtgtaaagattgaagaagaaaatgaccgtagagaagaaaatgaatgattccggcgacgagtttcccgtcggaatgcgtgttctcgccgtcgacgatgatcccacttgcttattggttctggaaactctcctccgaagatgtcaatatcatgcaaccacgactaatcaagcaataaaggcgttggcgctgttgagagaacacaaagacaagtttgacctggtaattagtgatgtgcacatgccagacatggatggatttaagctgcttgagctagtgggacttgagatggatcttcctgtcataatgttatctgcaaatggtgatacgaagctggtgatgaaggggatttctcatggggcctgtgattatctgctgaaacctgtaagaatggaggagctcaagaacatttggcagcatgtaatcaggaggaagaagtttgactcaaaggagaagaacaaaacccgcaacatagacaaacctacttcaaacagtagcaatggactagggtcatcaggaacaggaaattctgatcacaatgagaagctgactaagaaaaggaaggatcaagatgaagacgaagatgaggagcaggagaatgatcatgacaatgacgacccatcagcccagaagaagcctcgggttgtttggtctgtggagctgcaccgcaaatttgttgctgccgttaatcagctaggcattgacaaggctgtacctaaaaaaattctcgatttgatgaatgttgaaaagcttacaagggagaatgtggcaagccatcttcagaagtataggctttatctgaaaagaattagctgtgtggctaaccaacaaaccaatatggtggtggccttagggggtgccgatccatcctatttgagaatgaattctgtgagcggggttggacatatacaatcaataagtggttctggacagcttcataacaatgctttcagatcctttccacctagtgggataattaatagattgaatactcctgctggtttaaatgtgcatggatttccttctggagtacttcaattgagtcaatcacaaaatttaaaaaacaccaatgataatcttaagttccagtcagccattgttcctgctaatcagaatggtgttcatggaatgacagtatctgtagggcttgatcaactgcaaaacaataagggtgttatgtctgttcaaaacctgactactgtttttgatgccaaaacaacttttcccatctcgaataaactcccagatccaagaccaaaaataaccaactctggctctcacactccagatgtgagtttctcaaacaatgccttgatgttggaaccacgccctcaaggcacacaagggagtgtaagaattgaaactttatcttcttcagtagcctctcaacattcagaattttctttgtctttgctggatcaaggtagatatagtgataattgggcaagtactgtgcagccatctgtgatccagacaaactcttaccctccaagtgaatgttttggacagactaatatacctcctacagataacatggcttctgtacccttgcaaggtgggaatctaagtggtgcgtccatcacttcactgtccaggcaatcctatgattcaatgacagatatgcactctgaaggagtgacttttaccaacagacctgggcatataagcagtaatgtgccatatcaagggtggcatgacaataatcaggatgctactcaccattcaaatattttgtcaataaactcactgactccagtcaatggtgctgctgttccagctggccatgcagcaatgaactcagccttacacagaaacttggactttaattattgtgatcccttacaaatgaagcatgagggatttgtggagttaactgacgaggccttatcgaaacaacatcaggggaatatcatgaacctaccgaaatctcaacaaagtcatttctctaataatcttggttcactggaagacttggtcagttcaatgatgaaacaggaaaatgataagatgaaattattggatggaaacctcatttgcaataattactctggtgggttatctcgatgtgatagcaggtttagcagcacattccagaatatcatgcatcctcgctgatgaatttttttgtagttttcatcgtgttttaagggctttagcttttgtcttctcgtagttactataggatttagcttctccagattactttgttctctaggtttgttccactaagggctttctattttttaaacaaatgcattgttgtccttgccttgagtccagcaatgcaatatggagtgttattgatcactttgtttaatctccttag

SEQ ID NO: 11199 - DNA, 1349 bp, Glycine max
  Clone ID: 701040251_FLI
gccccactcaaccaccacacctctcctcgttcacgctacccctttctgctcttcttctacctttcaagttttaaaagtataaagatggcagagacattcctatttacctcagagtcggtgaacgagggacaccctgacaagctctgcgaccaaatctccgatgctgtcctcgacgcttgcctcgagcaggacccagacagcaaagttgcctgcgaaacatgcaccaaaaccaacttggtcatggtcttcggagaaatcacgaccaaggccaacgttgactacgagaagatagtgcgtgacacctgcaggaacatcggcttcgtctcaaatgatgtgggactggatgccgacaactgcaaggtcctcgtcaacattgagcagcagagccctgatattgctcagggtgtacacggccaccttaccaaaaaacctgaagaaattggtgctggtgaccagggtcacatgtttggctatgccactgatgaaacccctgaattgatgccattgagccatgttcttgcaacaaaactcggtgctcgtctcaccgaggttcgcaagaacggtacctgcccttggctgaggcctgatgggaagacccaagtgaccgttgagtattacaatgacaatggtgccagggttcctattcgtgtacacaccgtgctaatctccacccaacacgacgagactgtcaccaatgacgaaattgctgctgacctcaaagagcatgtgatcaagcctgtgatcccagagaagtaccttgatgagaagaccattttccacttgaacccttcaggccgttttgtcattggtggccctcatggcgatgctggtctcaccggccgcaagatcattatcgatacttatggaggatggggtgctcatggtggtggtgctttctccgggaaggaccctaccaaggttgataggagtggtgcttacattgtgagacaggctgctaagagcattgtggcaagtggacttgccagaaggtgcattgtgcaagtgtcttatgccattggtgtgcctgagcctttgtctgtgtttgttgacacctatggcactgggaagatccatgataaggagattctcaacattgtgaaggaaaactttgatttcaggcctggtatgatctccatcaaccttgatctcaagaggggtggaaataacaggtttttgaagactgctgcctatggacactttggaagagaagaccctgacttcacatgggaagtggtcaaacccctcaagtgggagaaggcctaagtaattcattccactgctctatgctggaagttttttgagcgttgcccttataatatgtctaatatccataactttccacgtctctt

SEQ ID NO: 11200 - DNA, 1101 bp, Glycine max
  Clone ID: 701040391_FLI
ataaaatcgcaggcgaagcgtcacagtcactccctctcctcacacgaaaaagtatccccccaacccaccccaccccacccccaaccctcaacttagggttcttctgttcttcttcttcttctcctttaaccaaacaacaagaaaaaaaaatcacattccccaaaacacccttctcgctccgcatggcgaaaacgaggccaggcagaaaggacgtggactcgtacaccataagaggaaccagcaagatcgtccgagctggagactgtgttctgatgcggccctcggacacgtcgaagccgccttacgtggcgcgcgtggagaagatcgagcaggacaacaggagcaacgtgaaggtgcgtgtgaggtggtactaccggccagaagagtcgattggtggtcggagacagttccacggggctaaggaactgttcctctccgaccactacgatgtgcaaagtgcacacaccattgagggcaagtgtgttgtgcactcttttaagaactacaccaagcttgagaatgtgggtgctgaggattactattgtagattcgagtacaaggccgccaccggggctttcacccctgaccgtgttgctgtgtattgcaaatgtgagatgccttataacccggatgatctcatggtacaatgtgaagggtgcaaggattggtaccatcctgcttgcatgggcatgactattgaagaagcaaagaaactagatcattttgtatgttctgaatgttcatctgatgatgatatgaagaaaccccaagctacattttctgcatcactgggagctgatggcaaggtggagccaaagcggcggaagagatgaccataatgcagtagtagtaaacatgtgaggtgtgtttggctctagctgaatttggctggctctatggtagcttttgtgtgttgtacagcttcttctagaggctataaacatttcatgtatttgactcaggttatgtatctatccgtgttagattttatcatgacattcatctgtttttcatttgtccatgatgagacctccgatccaagtgttaattcttgagatggcatcaaaccttaaaaactaagtacagagcaattgttagttt

SEQ ID NO: 11201 - DNA, 1030 bp, Glycine max
  Clone ID: 701040550_FLI
gcttctgtcagcagaaaccgtagcactataattgttccggctggaagctccagggatgaaggatgggcagcattcaggaacattttggcagagatcaatgaagcctcaaggcttttcattctgcccaatcaggtttccttcttttgaaacagacatttttcttcctgcttagccacaagaatagtcaaagttgttgcttttttttattcatcttatttgcttgtttgcattccgcaatagcaaaattctgaatcctcagagcatcttgttggactttcggatgatgttggtgctggcttcatatctggtcatagtactcaacctgccacttcttctgagttgaatgtggacaggtctgttgatttgccgcctcaggatgaaattgggaacttgggggtctcaaaagtgatcagggctgatcagaaaagattcttctttgatcttgggagcaataataggggtcatttcttaagaatatctgaggttgcgggttctgatagatcctccattattcttcccctgtcagggctcaagcagtttcatgagattgttggtcactttgtcgaaatcacaaaggaccgaattgagggaatggcggttgctaatgttcgcacaattgatcccccctcaaagatgaatgctaacttgggataagaatgggtgttgtcttcgagtctgatttgtgttattttattttattttccctcagcctcctttcttcttctcatattgttcttccattaatgcttttgaaataatgcaaactctggttggtcagcagaataatttgaattgcttggcaaggttaatatgaataggaataacggaagaaaaaaaggatcagagacttgtacttgtttggatagtttggcacccaagctacaatctgtaataatgtttgattgtttattttgcgttccttgcacagatttcgcatggatttaagttctcatgcctaccatatgttaggttggtgacttaactattttgtagggtttggtttccatctaacagcatgaactttgctttc

SEQ ID NO: 11202 - DNA, 962 bp, Glycine max
  Clone ID: 701040606_FLI
ctctgacacaagaattaagttgtgagatggagagaagtagtgaagaggagatgttaataacgaaaggtccatggacagagcaagaggattctcttctcttcaattacatcactgtccacggcgaaggtcactggaactctgtcgctcgctacacaggcatgcaaagcattaattatattcatcatcttaatcctagcttctttcttactcacactcatcacgttttcaatcacaggtctaaaacgaacgggcaaaagctgcagattaagatggttgaactacttgcgtccaaatgttcgacgtgggaacataaccctccaagaacagctcttgattcttgacctccattcccgttggggcaacaggtggtcgaaaatagctgaacatttaccgggaagaacagacaacgagataaagaattattggagaacgagagtggtaaagcaggctaagcaactaaaatgtgatgtgaacagcaagcaattcagggacacgttgcgttttgtgtggatgccacgtatgctagagcggattcgggctcaggcctcatcatcggcccaagcccaccaaagcagcttaatctccaacagtaacactcaagcacacagtggattgttgtcatcagcgcttcatgcccacgcgccttctctctctgactcgagcgcgtcgtacaatcttatgggtgctgatgctggaagttgctcatctcatagctactactcagacatagcaggcaatggttttggtggtgcggacttgtggacggatcaaaacatttgctttctgcaacaccagcttgctcatcatgacttgttctgatcatgcatacttcaacatcttgctccaaaattcactctaaactgcaacatataaagcaattgtaacactagtcgtgaaacatgcatgtttctttttatgttaatttggtgtgaaatttaataatctatacttcaattaatttc

SEQ ID NO: 11203 - DNA, 1047 bp, Glycine max
  Clone ID: 701040632_FLI
tgattcataaggagattgagaggcaaaggagacaagaaatggctaccttctatgcctctcttagatcccttctccctcttgagttcatcaagggaaagcgttcaatatctgaccacatgaacgaggcagtgaattacataaagcacatgcagaaacatatcaaagagcttggtgccaagagagatgaactgaagaaactctccaatcattccaataatatggaaaataaccatgagggcttgcatacatcttgcaacttcactgtccacgagaaaaatggtattattggaatagaaatcaccagtgtcttcagagaggaaaagcctaaaatttcaaagttactacagtttttgactgaagaaggacttgaagttgttagtttcttttcaacagaagtcaatggcagattgctccacagtgtgcagtgtgaggtgaaccattccaacagtgtagatccatctgagctgagaaagaaagtttccaaagcattttcaacctttagatgctctgattgattttgtcgttgaagctagctagcctcacaatctggctaataacaggaaatttacccatagcatgcattttaaacggagagctactctaactatggtactatagaaaaaatctaagagttttagtattgttatttttttggattaatagttgaatgagtttgagaagtgaaaaagagagagggagaaagagagattcattaaatggaagctcgtttaactattggtaaaaaaaatatcagtactaaaaccttaaatttcttaggctaccatagaatttctcttttagacttttctaacttgatagactttgtttggatgagtttgcttgcaaattttaaattggcaactgtccccttttttctctttgatttggactctgctgctttctttgtgaagaatgagggaagaagacagtaaaatcgtacaactcaaaaatgaactctatcccaattccttttgtagcttttctgcaataaaatggattcagttctgtcttttttttttttcctttcaaaatttacagatgtgcgtt

SEQ ID NO: 11204 - DNA, 2828 bp, Glycine max
  Clone ID: 701040644_FLI
gagacacaaagaagaatcatggaggtgaacaaccaaatcgtggagaggagcaagagggttaaagggagagtggttttgatgaagaagggtgtgttggacttccacgacatcaaagccaacgttctcgatcgagttcacgagttattaggcaagggtgtctctcttcagcttattagtgctactactcctgatccagcaaaggggttattgagagggaaggtggcaaacttggagaggtgggtttcgacgattacctctttgacatcaacaacagacacagagttctcagttacatttgagtgggatgagagcatgggtgttcctggggcattcataatccgaaacaatcaccatagccagttctacctcaagacactgaccattgaagacattccagggcatgatggtcctgttaattttgtctgcaattcttgggtctaccctgctcatcgttacgcccatgatcgtgtcttctttgccaacaaggcttatcttccatgtcatacacctgagccactgcgcaagttcagggaacaagaactaaaaactctctgcgggaaagggttcgggaagcttaatgagtgggacagagtctatgactatgcatactacaatgatttgggacttccagatgatggtcctgactatgcacgccctgttcttggaggatcacaatttccatatccacgtagaggaagaactagtcgtccacattgcaaaacagatcctaaaactgagtcaagattgcatcttctaaatctaaacgtttatgtgccgagggatgaacagtttggccatgtcaagttttcagattttctggcttactctctgaaatctgttgctcaggttttgcttccagagattaaatctttgtgtgacaaaactattaatgagtttgacacctttcaagatgtacttgatatttatgagggaagtattaagctgccaagtggacctttaacgagtaaactgagaaaacttgttccctatgagctattgcgagaacttattaggaatgatggtgagagattcctcaaattccccgtgcctgatgtgatcaaagtgagtaagacagcatggaggacagatgaggaatttgcaagggaaatgcttgcaggggttaaccctgttattatccgccgtctccaagaatttcccccggccagcaaactagaccccagcgtatatggagaccaaactagctccatcagagcaacgcacatagaaaatagtttggatgggcttacaatagacgaggcaattcaaaatatgaggctatttatattagatcatcacgactcgttgatgccatacattagtcgaataaactctaccaacacaaagacttatgcctctagaacgctcctgtttctacaagatgacggtacactcaagccactggctatagagttaagcttaccccatccacaaggggaacaacatggagctgtgagcaaagttttcactccagcacaagaaggagtatcggcttcggtgtggcagctggctaaggcttatgcagccgtcaatgattcaggatatcatcaattggttagccactggttatacactcacgcagtaattgaaccgttcattatagccacaaacaggcagttgagtattcttcacccaatacacaagctcttgaagccacacttcagggacacaatgcatataaatgccttagcccggcacacgctcatcaatgctggaggggtactagagattacagttttccctggtaaattcgccttggaaatgtcgtccgttatatacaaaagttgggtattcaccgagcaggcactacctgctgatcttcttaagaggggaatggcaattcctgattcaagttctcgtcatggactaaggcttgtgatagaggattatccgtttgccgtggacggcatagaaatctgggatgcaatagaaacctgggtgactgaatactgtaacttctattacacatccaatgacatggtcgaggaagacagtgaacttcagagttggtggaaagaagtacgcaacgagggtcacggtgacttaaaagataggaattggtggccagacatgaagaccaaagaggaactcattcattcatgcaccattatcatatggcttgcttctgcattccatgcagctgtgaattttggacagtacccttttgctggatacctccctaaccgtccaacggtgagtcgtaggttcatgccggagcaaggtaccccagagtatgaggagcttaagtcagaccctgaattggcattcctcaaaacaatcactgcccagttccaaacacttgttggtgtgtcactgatagaagttctgtccaggcactcaactgaagaggtttaccttgggcaatgtgagaaccctgaatggactctagatgctgagccattggcagcatttgagaggttcagacagaagctgttggagattgagaacaatatcatggaaaggaacaaggacaagagattcaaaaacagaaatgggccggtgaagatgccttacacacttctctatcccaacacctcagattattctagggagggtggactaactggcaagggaatccccaacagtatatccatctaatacaacactcctacctttctatcttcccattaaattctatttcaagcaatttgtgtgtcgtgattactagagtgtgtataatttataacattgtttgtcttcagattaccatgttgcctgcctctgctttaattggttcaagctcgttgtgtaactggttttgattgaaaaaccatatcatcttttgggagcatcataaacaattgaaattgcaagtgttttggttaagcttc

SEQ ID NO: 11205 - DNA, 1145 bp, Glycine max
  Clone ID: 701040651_FLI
cctttcctttgggacatggtaaagtccacatttgaaggtttgaagaaaggaaatcaccccgttaggtcctctgagggcactggagggacatacttcatgcaagattcaacaggccaggagcatgtttcggttttcaagcccatggatgaggaaccaatggctgtgaacaacccaaaaggtcttccgaattcatccaatggtgaaggtttgaaaagagggacaaaggttggagaaggagcctttagggaagttgcagcttatttattggatcatcccaagagtggaccgcgtttggcgtcaggtgaagctgtaggattctctggtgttccccctactgttatggtgcagtgcttgcaccaagaatttaaccacccaaatgggtttgcttcctcctcaaaacatgttaagattgggtcactgcagaagttcattagtaatgatggtaattgtgaggactatggaccctcggctttcccagtggaggaggtgcataagattgctgtacttgatataagattggctaatgcagacaggcatgctgggaatatattgatcaaaaaggaggcagatggccagataaagctcattcctattgatcatggctattgtctaccagataaatttgaagattgcacatttgattggctttactggccacaagtacgtcagccttactctcctgagactgtgaattatataaattctctggatgctgaaaaagacttggaacttttgaaatgttatggatgggatattccacttgagtgtgcaagaacacttcgcatttccacaatgttgctgaagaaaggggttgaaagaggccttacaccctatgcaattggaagcattatgtgtcgggaaaatttgaacaaggaatctgtcattgaagaaattattggggaagcccaagattccttgcttcctggcatggaggaatcagcatttcttgaagccatctcccaaatcatggattaccaccttgataagcttgcaaactagacactatttttttttttttttgagtcatagatgtatttgtatgtatgtattcagtgagtgaactagtccattttgggatggactgcaggtttgcataaattatgagatatcattctatatatatatatcggcttgatgtgttctgg

SEQ ID NO: 11206 - DNA, 1054 bp, Glycine max
  Clone ID: 701040858_FLI
ctttacctaattatatatatatatacacatctgttctctctttctcagaaatcagaattgagcaagcgattggatttggataactgaaggtgatcatcattttagatattattataagaagttcatcaaataattgatcagaaatattcgatggggagctttgaaactgagctgaatcttaaggccacagagttgaggttgggattacccggctgtgatgaaactcatgacaaaagttcatccagtagtggatctgttgttagaagcaacaagagatcttcaccagaacccagtgtggaagagtccaggtgcaactctaatggttcttcagattctaccaccacaagtgatcatgatgaagacagtgtccaacctgcaaaggtacaagtagtggggtggccaccaattagatcttttaggaagaacagtctgcaacaacagaagaaggtggagcagcagggtgatggaagtggaacgtatttgaaagtgagcatggctggtgcaccttacttgaggaagatagatctgaaggtttacaatagctacccagaactcctcatggccttgcaaaatttgttcaagtgcacatttggtgaatattcagagagggaaggttacaatggatctgaatacgctcctacttatgaagacaaggatggtgactggatgctggttggagatgttccatggaacatgtttgtatcctcctgcaagaggctgaaaataatcaaaggatcagaagcaaaggggttgggttgtttgtgaccaacaaaacttgcaaaagcaaatcaaatcaaaatagtcacatgaggtcttcaaagacaaataccctttgtgttgtgcaagcaaatacatggtgtttatgagaactcatatatatatatatatatatatatatattaggaaaatagatggatattatctatgtatacattatttttgctttattaatttcagcagaggcggctttgaggtctgctttctaaattatatgtaatcctctaaaaaagaaagagaaagaaaatataagaaaagctaatgctatttcaattgt

SEQ ID NO: 11207 - DNA, 1054 bp, Glycine max
  Clone ID: 701040896_FLI
aagagctcttaaccagttactgagaatgagtgatgttcttcttctaacttctgaggaggctgaggaattaaccggcataaacgatccaatattagcagggcaggagtttctcaaaagagggattcgcacaaaatgggtgattgtaaaaatgggttctaagggttcaattcttataacagcatcgagtgtagcttgtgcacctgcattcaaggtgaatgttattgacactgttggatgtggagacagttttgttgctgctattgtctatggttttatacataatatgccactggttaatacattggcaattgcaaatgcagtgggtgctgcaacagccatgggctgtggtgctggtaggaatgtagcaacactggagaatgtagtacatatattaagatcatcaaacctcagcgaagatgatgaattttggattgaaatacttgaaaagaatgtggttgctcaggaaataacatacctgtcaaatgttatgaacggaaacaaaaaccgtctcaaccttgtctcatttgacaaggttgcctctgagctcttgcctaagcttgaacttccacaaacagtggggaatgcgccaacttgataggttgtggaaaaatagattgaagtgcattcatgcgaaagaacacttctgattcttgggttcttggctttatcctgtaaaagtaaaaatttaagcattaagactgcagagttttatctctcttgggttacataaattgccgtagctaaattgctttgagcaagtacatgaaaggtagctagcttctcatcaagcactttaactgatttttggcatttcagtctcaacaggattcctttgattttgatgtcaaaggtatttttactccctgaaccagtggagcagagctcttatcctctgagatcccaatgtttttgcatcattttttgcatgaatgcttctcaaacagtgtatgtaatagtcttcatcttatcatagttgattgttgacgcagacagggaaagattgtttgtatgacttaaaatatttgattagggattactctacaatagtttgtct

SEQ ID NO: 11208 - DNA, 905 bp, Glycine max
  Clone ID: 701040918_FLI
gcctcagctaataacaacaatgcttctgcttcattgggtgtccatcgtcgacgacgcaggaagaaatcagaaataaaaaggagagatcctgctcatccaaaacctaacagaagtgggtacaatttcttctttgctgagcagcatgcaagactaaagctacttcaccatggaaaggacagagagattagtaggatgattggtgaactctggaacaagttaaaagaatcagaaaagacggtttatcaagagaaggccatgaaggataaagagaggtacagagtagaaatggaggattatcgggagaaactgaagatgggcccagttatcagtgatgctgtgccgcttcaacaacgacttcctgaaccagatactgacatgttggatgaagctgagggagattctcctcaaactccagaggagagcagctctggtggaagtgattatgaagattataataaaactgcagagagaggttttgatatggatgcattgcctgttataggaatgggcgcagaaacaagttatttgggttcagaagagaagttatctaagggggggttatgagcttctccaggagagagagagagagagagagagaggttagctggccctgatttttagcagagattttcttatggtaattttagatgcagtggagatttgaggtaggattcaggttgcagtgcttacaacacagtgcttaactgtgagttttgtcatttttaatgtttttattaaggtgttcatgttggcttcatgccatattgctgttgtacatctggcatgctgacatggatgatggatgatggatgatggatggtaacttgttaattaggcctttgggagcagtggacactggggagtctgctcttcctatgttattaggtccatcgagacctaagaat

SEQ ID NO: 11209 - DNA, 737 bp, Glycine max
  Clone ID: 701041256_FLI
gacgttatcagcatgctagatgacaccgtttccgtttccctcggaattgaagaggaaacagaagcagcagcagcagaagaagatgcagaatctgaagtcagcattttggagtggcaagttttattgaactccaccaatttggaaggaccgaattcggagccttatttcggagatagcgaggatttcgtttacaccgcggagtacgaaatgatgttcgggcaattcaacgacaatgcatttaatgggaaacctccggcctccgcctccatcgtgaggagtcttccgtcggtggttgtgaccgaagctgacgtggcaaacgacaacaacgtggtcgtcgtctgcgcggtttgtaaagatgagtttggtgttggggaaggggtgaaggtgttgccgtgttcgcatcgttaccatggggagtgcattgtgccgtggttggggataaggaacacttgtcccgtttgtcgctatgagttccccactgatgatgctgattatgagcggaggaaagcgcagagatctgtaatgtgatgatgatggtgatggggttattattagggtcagttttttgactttcagtaatagggtaatggatgaaaacttgaaaaagtatagattttttttttgctgccgaagaaattgtgctttttaattttaaaaaaaattgagtctagggaatgatgtttctctttgaattgtactttttgggatacatcacagaaatgaatcatttttccatc

SEQ ID NO: 11210 - DNA, 2656 bp, Glycine max
  Clone ID: 701041406_FLI
cacactcacttcatttcttctttagtactactcactctctcaagctctctgtctgcgacaacacaaaacgacatcactctgattgtctcattaacgtcgtcaaaaatgctgcaaacccgtcccggcggctccggtggccgcacggtgctggtgggggtgaagatggactcccccagcaaggaattgctcacatgggctttggtcaaagttgcacaccctggtgataccgtggttgctctgcatgttcttgggaacaatgaaaccgtgaatggagacgggaaatcgtcgctgctttcgcttgtcaaggcgtttgactctgttcttgctgcttataaaggattctgcaatttgaaacaggtggatctcaagctcaaaatttgccgtggttcgtcagtgaagaaaactttggttcgagaagcgaatggttattccgcaactcatgttgtggttggaactactcatggcctgcataaaatccggtcatctaccgttgtagctaagcactgcgctaaaaagttatccaaggattgttgtgttcttgctgtcaacaatgggaaagttgtgttcaagcgtgacagctcgccgccgagtgttgcagagttacaaggggttgatcgtcataacagaaatggtttgctaggttcaatacattggacactcggtaagaacagaaaagttctaagtgatgacagttcagggatggatgccgatgagaagaaaactggcccgatttcggatcacagtttagcgaagtttttttctggaatctaaagaaactgttagaaatccgagctgttcaatttgtggcacaaccctggcattgccagacccttctttctaccaatctgcagaaggagtttctggtgatgagggtagagagaattctttggctatggtgcctgtgcaacccactgttgcagcaaaaacggaattgaaaccaggttggccactactagacggaagaattttatcggacaggcaatctgctggtagatcattgtttcacctgcagatctctgtggtccagtgggcaatgaggttgccttctagaaacctttcatatgctgtagatcgtgatgaaaaatctaaaatttgtgatcaaggtcaagatcagcctgcggctttagatagtgaaagtggcgctcttgttctggtagatgctgaattagggactgcttcttcgcctgaaaacaattcaggaaacattcctaaagaattggagggccttcatgagaaatactcgtcaacttgccgattgtttgagtaccaagaacttgtatcggccacatcgaatttcttgcatgaaaacttgatcgggaaaggaggaagcagtcaggtttatagaggctgccttcctgatggcaaggaacttgccgtcaagatcctaaatccttctgatgatgtgttgtcggaatttcttctggaaatagaaattatcaccaccttgcatcacaaaaacattatttccctcctggggttctgctttgagaatggcaaacttcttctcgtttatgatttcttatcaagaggaagccttgaagagaaccttcatgaataggtaataagaaaaattcacttgtgtttggttggtccgagagatataaggtagcagtaggtgttgctgaggctttagattatctgcattctaaagatgatcaacctgtgatccatcgggatgtgaagtcatcaaatgtattattatctgagaattttgaaccccagctctctgattttggactggcaaaatgggcatcaaccttgtcatcacatataacatgcacagatgttgctggaacctttggttacttggctcctgaatacttcatgtacggcaaagtaaatgataagattgatgtctatgcattcggtgtcgtgctccttgagcttctttcagggagaaagcccataagccgtgattatccaaaaggccaagagagtcttgttatgtgggcaagtccgattctaaatagtggaaaggtgttgcaattgttagatcctagtttaggtgataattatgatcatgaggagatggaaaagatcgtattggcagccactctctgtataaaacgtgctccaagggctaggcctcaaatgaaccttatctcaaagctccttcaaggtgacgccgaggcaatcaagtgggcaaggttacaagttaatgctttggacccaccagaaatgcttgacgatgaagcgtgtccacctagtaatctacagtcacatataaatcttgcactgcttgatgtggaggatgacttgctctccatgtgcagtgttgagcagggtctcactttggaggactacttgagaggccggtggagccgtgcatcaagctttgactgagcaaactgctagcaaatcgctagaagaagctcaaccctttgaccttaatctcttttgtagatacagttttcttgtgcctcttccattaacaatggcatcttctatgggtttaaaatggatttagggtgacaggatgtttgtgtgtgccctcctcctttccttaataatgaggaaactaggccttataagttgttaggctagttaccccttttcattctatacttgaaatggtttctatttttgtccatgatctcaattcgatcgagttttgtaatttgtattgataaaaagatgaagaagttgtatttagagc

SEQ ID NO: 11211 - DNA, 1514 bp, Glycine max
  Clone ID: 701041458_FLI
acgccgacgacatcctgatccgtcaggtggtgccagatgttggcgaagccgaagaggaggacaacctgctgaacgccgagcaccacttcgcgagcttcaaggccaagttcgccaagacctacgccaccaaggaggagcacgatcatcgcttcggcgtcttcaagtccaacctccgcagagccaggctgcacgccaagctcgacccctccgccgtccacggcgtcaccaaattctccgatctaactccggccgagttccgccgccagttcctcggcctcaagccgctccgcttcccggcgcacgcccagaaggcgcccatcctccccaccaaggatctccccaaggatttcgattggcgagacaaaggagccgtcactaacgtcaaggaccaaggggcgtgtggttcgtgttggtctttcagtacgacgggtgcgttggaaggagctcattatctggccactggtgagctcgtgagccttagcgagcaacagcttgtggattgcgatcacgtgtgtgatccagaagaatatggagcgtgtgactcaggctgtaatggtgggttgatgaacaacgcatttgagtacatacttcagtctgggggagtacagaaagaaaaggactatccatacaccgggagagatggcacctgcaaatttgacaaaaccaaagttgcggctactgtatctaattacagtgtggtttcccttgatgaagaacaaattgctgcaaacctagtaaagaatggccctcttgcagttgctatcaatgcagtttttatgcagacatatgttggtggcgtctcatgcccatacatctgtgggaagcatttggatcatggggttcttctagttggttatggtgaaggtgcatatgctcccattcgttttaagaacaaaccttactggatcattaagaattcatggggcgagagctggggagagaatggatattacaagatctgcagaggtcgaaatgtgtgtggagtagattccatggtctcaactgtagctgctatatatccatccagccattaaatacaaagatatgcctgattgtggttgtgatgtgatactggactaaggggagtttgtataaatatttatgttgtgaactttatcatttggtactggtaaaattatctccgtataggatcaggaaactgctaagaccatgttgtttatgtagtatgtaatttctgtatgtatgcttgacatatacaagtgggaaatccaaggaaatgtgtggtcctaaaaatggtgcaagataagcaactctctatggagattggcggggtggggttgtttcaaactgcaacaggggaatacttgccactgattatgtctcagttattgcataattaaactaatatacgtgccactgtcaatgttggttcttatggatgtggtagtgccatacccaaaaggataccaaaatgtttaagttgcttctgtacctttgattcgtttacctttgagtttgtgcatgtataaaaatttctatggacttaggacttc

SEQ ID NO: 11212 - DNA, 1401 bp, Glycine max
  Clone ID: 701041472_FLI
cttcaaatcgattaagttcatagagagaattgaaatatctatttggtaagtgattgagagtttgaatttgtagataataagatgggttcgtcgactaatggtggtgtgccgccagggtttagatttcatccaacggatgaagagctgcttcattactacttgaagaagaaggtgtcctttcagaagtttgacatggatgtcattagagaggtcgacttgaacaagatggagccttgggacttgcaagaaagatgtagaattggatctactccacaaaacgagtggtatttcttcagtcacaaggatagaaagtaccctacaggttcaaggactaatagagcaacgaacgcagggttttggaaagcaacaggaagagacaagtgcattaggaatagcttcaagaagattggaatgagaaaaacccttgtgttttacaaaggaagagctcctcatggacaaaagactgattggatcatgcatgagtaccgcctagaagatggcaatgatcctcaaggaagtgccaatgaagatggctgggtggtgtgcagagtgttcaagaagaagaatttattcaagattgaaaatgaaggtgggtctacacataaaccagatcaccaaatcaacaattcttcaaacactaatgcacggtcctatagagaaaatcactacttactacatcaacagcaaaatcctaggaactcatcagggcttgagcttgataagcctgagctggctctccattacccgccgccacacttgcaaaaccctccatactcactcttccaatcccagcctcttcttcagacccaaaagcctatggtttatgattattcatatacatcagacacccctatcatggcaaagcaactcatgacaaaccctagagactgtgagagcggcagtgatggcctaagatatcaagtttcggagtcaggtatggaagttgggtcgtgtgaaccaaatcaagaaatgggaaccggaagaggtgaaggaataaacgaatggggtgttcttgataggctagtgacctctcatcttgctggaaatgaggactcatccaaaggggtcaggtttgaagaggcaaatccacagtctgtccaccagatcaatcaactttcattgaggggagagatggacttctgggcctatggaaaacaatgattaatttccctttattatagtgaaatttataaacaaattaagtgcattcaaggttggagataattacaaaggctctaaccattttaaaaaggacatatattttgatactgatcgatttaagattgtttgttatgtttttcacttgattagaagacttcattagttgtaatatttcaatccattgtttgtcaagtaccatagtgtcaattgaaaaaaaaatgcaattattgattgtatgat

SEQ ID NO: 11213 - DNA, 758 bp, Glycine max
  Clone ID: 701041506_FLI
aagaaaacggttagagttccggcgattagttcgaaggtcgccgatattccgccggatgagtactcgtggaggaagtacggacagaagccgatcaagggatcaccgtacccgaggtgagtggtttgtggccgttgatttggtgttggctttggtcaaaggtgtgttaactgacgttgatttgttttgtgttctcagggggtattacaagtgcagtaccgtgagagggtgcccggcgaggaaacacgtggagcgtgcttcggacgatccgacgatgttgattgtaacgtacgagggggagcaccgacactcgattcagaccgcgatgcaggagaacatttccgggggagtgggtttggtattcgagtcaacgtgagtgtggaattaaagaaaggggaactgttggggggctttttttttgtagtaggaaaaaaaaaagaggtgaataggaaaattgaattaaggtggtggttgcaatgtaaatctgaccttattgaaagaaaatattattgtgctgttattatattattacagggtatcttaatcttctcccacaaaagtcttcttacctgattattttattcaagattttgaaagtagtttgggtcattgatgatgaaattttgtgattggagccaagtgtgatatagggtcgcgcaattagaaatggtaggtagtttgttttgtatagtgggaatggtaaagggtccctatccaagttgatgcctcgtaatggaaaaaatgaaatgacgtttcaactc

SEQ ID NO: 11214 - DNA, 1502 bp, Glycine max
  Clone ID: 701041509_FLI
gggagttaggttctgcacgctctgcttccagcgagtgttctttcttcgtttcaacaccttaatttgcacacgctgcttcttcagcttgagaaatggcacaagaaacctttctattcacatctgaatctgtaaacgagggtcaccccgacaagctgtgcgaccagatctctgatgcagtgcttgatgcgtgccttgaacaggaccctgacagcaaggttgcctgtgagacatgcaccaagaccaacatggtcatggtctttggagagatcacaaccaaggccaacgtagactatgagaagattgtccgtgacacatgccgcgaaattggattcatctctgatgatgttggtcttgatgctgacaaatgcaaggtgttggtcaacattgagcagcagagccctgatatcgcccagggtgtgcacggtcacttcaccaagcgcccagaggaggttggtgctggtgaccagggtcacatgtttggctatgccactgatgaaacccctgagtacatgcccctcagccatgtccttgcaaccaaactcggtgctcgcctcaccgaggttaggaaaaatggtacctgtgcttggctgaggccagatggcaagacacaagtaactgttgagtactacaatgacaatggtgccatggttccagttcgtgtccacactgtcctaatttccacccaacatgatgagactgtgagcaatgaccaaattgctgctgaccttaaagagcatgttatcaagcctgtcattcctgagaagtacctggatgagaagaccatcttccaccttaacccttctggccgttttgtcattggtggccctcatggtgatgctggtctcactggaagaaagatcatcattgatacctatggtgggtggggtgctcatggtggaggtgccttttcagggaaggaccctaccaaggttgacagaagtggtgcctatatcgtgaggcaggctgcaaagagtgttgtggcaaatggccttgccagaaggtgcattgtccaagtttcctatgccattggtgtccctgagcccttgtcagtgtttgtggacacttatggaactgggaagattcctgacaaggagattcttcaaattgtgaaggagaatttcgacttcagacctggaatgatcaccattaacttggaccttaagaggggtggccataggttcctcaagacagctgcttatggacactttggaagggatgaccctgacttcacctgggaagttgtgaagccactcaagtctgagaagcctcaagcttaagattgttgtgaagttaatcactcccttcaatggatgtcttgctaggtgtggatgaataatttgcgtgtttcatgactactactacttcattcataggtctaatgtcatctcatcaatacttaaactgtttttttttttccttttctccttttactcacaatttattttttggttatgcaatgttaccgttttgatgcaatggaaattttatcagaattttgtacc

SEQ ID NO: 11215 - DNA, 455 bp, Glycine max
  Clone ID: 701041622_FLI
cttggttacactgaagatgatgtggtctccactgactttatcggcgatagcagatcaagtatttttgatgcaaaggctggaattgcattgaataagaactttgtgaagcttgtttcttggtacgacaacgagtggggatacagctcacgtgtcattgatcttcctgtattcgttgccaagaagtctctttaaggtgttacttcaaagtagcttgtcttcacattattaccgtatgtttatgtttagctgcgatttagtgtcttgctcgagcaaaaaatgagaggtctgaataaatcggtttctgaaaccagtggtgttacttgttggaggagcattagctcttttttggacttttgatgttttctcttgtggagggggatcgagtttttggatttttatatactcgctgatgtacttggcttgaatacttgctaatgtacttgttattgattgtt

SEQ ID NO: 11216 - DNA, 1206 bp, Glycine max
  Clone ID: 701041663_FLI
ttgtggtatttgtggagatggaggggatttaatctgttgtgatggctgtccatcaacatttcatcagagctgcttggatatacagatgcttcctcctggtgaatggcattgtccaaattgcacctgtaaattttgtggcatagccagtggaacttctgataaagatgatgcatctgtgaatatcctacagacttgcatcttatgtgagaaaaaatatcacaactcttgcactaaggagatgaatacccttcctaataaaatcaattcatcaagcctttctttttgtgggaaagagtgcaaagagctttcggaacacttgaagaaataccttggtaccaaacatgaactagaagcaggtttttcatggtgtctcattcatagattagatgaagactcagaggcagcttgcaggggacttacccagagggtagaatgcaattccaagttggccattgcactgactgtgatggatgaatgctttttacctgttattgatcggaggagtgggatcaatttaatccgtaatgttttatataatagtggatcaaactttagtcggttgagctatagtggcttttacactgctattttggagagaggggatgaaatcattgctgcagcatctatcaggttccatggaactaagattgcagagatgccattcattggaacacgccatatatataggcgccaggggatgtgccgccgacttttttctgccattgaattggccctttgctctctgaaggttgaaaaactagttattcctgcaattgctgaactcacacatacatggacaacagtttttggcttcacatatctagatgaatcactcaggcaagaaatgaagtcactgaatatgatggtcttccctggtatagatatgttacagaagctgttagtggaacaaggaaaccgtgaaggttctgagaaaatggaaaatggaaacaacgattttatcaagaccaaaatgggaaataggtcagatatgggtttttcaactccacaaggtcctcgtggaagtgatgatgttagttcaaatcctgctaatgagacaaatgatgaatgcagcgatgcttctcaagaactatacaaccaagttttggttgatgggattatctgttcccaatctcattctgaggaaatgatgtctgatccaatttcagataaatgtgattctccttctagaactagtcacagtgaact

SEQ ID NO: 11217 - DNA, 1295 bp, Glycine max
  Clone ID: 701041718_FLI
atttgcttcttcgagtttcacagccaagtcgtaaaagggtttcaagggatggaaaacatgcagagcttctggcaattgggtgatgaactccgtgggcactcaaaagcatcggaggatcacaagtggttaatggttgcctcgaaactggccgaacagacaagattgaagggggagcgtgtgaacaaccttgatctttcaaagggacccattgaaacaaggtcaagggataaatttgggttccaggaagagaacaaatttgattctcttaacttgagcatgttgaacctggactctaaatttactgagaatgtgagcaaaagctcacttcgaaatggtgtttatggtatgaatgcagtgtatcagaaaaacaatgcaaacttggtgagtaatgtgatcagtaacaagtacaatggcagtattcagcataacaaagagatcaacaacaacactggcaacaacatcaacaccaatgaaagcaacaacacaaatgcaactgacaaaaggtttaagaccttgcctgctgcggagacactcccccgcaatgaggtgcttggaggatacatctttgtctgtaacaatgacacaatgcaggaagacttgaaacgtcagctatttggtttgcctccaaggtatcgagattctgttagggcaataacaccagggctacctttatttctttataactatactactcatcagctgcatggtatttttgaggcagcaagttttggtggctctaacatagatccaactgcctgggaggataaaaaatgcaaaggggaatcaaggtttccagctcaggtaagaatccgtgtcaggaagctctgcaaggcattggaagaagattctttcaggccagtattgcatcattatgacgggccaaagtttcgtcttgaactgtcagttccagagactctggatctgttggacctatgtgaacaagctggttcagcagcataagcaagaatcaaacaaagaatgaatgtgcaaaataggtaggttttggtgtgccagctgtgtggttttggcagattttccgtgaagcgtaagcttggaaagtgaatcatcatcatgttttgggggaagtaaagggagcgtgttgttgagagtgagagaccctttgttggtgaataaatggttgttgtggtatctatcccctggaagatgctttgtagctgttgcatgacatttaatacctttgtatgattaagtaaagtacagactactgtttgtactgctaaagtatgtatctgttgaaccaagaaaaaaattaaagttaaaaagcttcatgtatt

SEQ ID NO: 11218 - DNA, 1177 bp, Glycine max
  Clone ID: 701041969_FLI
ctcaggtggctaaactacctccgccctaacatcagacacggtggtttctccgaagaagaagacaacatcatttgcagcctctacgttagcattggaagcaggtggtcggtcattgcagcacaattgccgggaagaactgataatgacataaagaactattggaacacgaggctgaagaagaagcttctagggaaacaccgtaaggaactacaggcacgcaacaaaggaaacggtggtatccttaaacaggagaacagttcctcgctcttgcttcagcaaaacagtgctcaacaattacatccatgttggccacagattccagtgctgccactttcatcaccgtacacaaaccaaagtccaagtttcaacgaccaagattccattagaaagcttctaatcaagcttggagggagattctccgatgattatcaacccatcctagatgggttgaatcttcagttcccacatggttcaaattctctctcatcaacacaacaaattcaagaggagcaagtccatgttggttcttctgcactagggtgcatgaactctattggccacaatcaagtacaatttggtcagagtaatgagtactgtgctgagttggtgcaaggacaagggagtttcattaccacagcaattggggaaatggtttcttctaatgattattctcgaaggttattaggtgggtcgttggagttcttctatggggaggaaatgattactgataataagataatgggtgcttgtgcttcttcaagttgtgggcaaagtactaattggggtgaaaccagtagttctctgatgtatccttctcttgttgcttcgaattacgagggtgtgcggcaagagatgccacgagaatgtgcttttcaagagttgagctacccgggggcgcaatagcatgtgtgtacattatttgttatcaattggtggaggttgggattatatgtatccaaattgaagctagcaaaagggaattaactttgtatttgattcccatatagataataaaaatcagcttgatttatatataactagagacttgtccgctatgtgagactttctcatgtgctgatcccttagtggcagtgcagtttaattatctgatttgtttgtgtattatttggttgtaatcttgagagtcatttaaatatatccttttatgttccaagct

SEQ ID NO: 11219 - DNA, 1751 bp, Glycine max
  Clone ID: 701042019_FLI
ctctccgccacttcctgcacaaaccctcccttctccatgggacagtcaccgtccacctccgccgcgcctccgtcggacctcaaccgcctccaaattgctcagttacacccaaacaccgattctgattccaccgattacaccctgcgtctctccgacgattgcttggccgcaatctttcatttcctgaacaccgccgatcggaaacggtgctctctggtatgcctccggtggcgccttgtcgacggccagaggcggcaccggctctccctgaacgcacagccggaattactagacttcgtcccttccctatttaaccgcttcgactcggtcacgaaactcgctctacgatgcgaccgaaagtgcgcgagcataaacgacgaggctttggttctgatctcgctgcggtgcaggaacctcacgcgcctgaagctgcgcgggtgccgtgacataacggaactcggaatggccggcgtaggcgacaactgcaaggcgctgaagaagctatcatgcgcgtcgtgcatgttcggcgcgaagggaatcgcggcggtgctcgatcgatgctttactttggaagatctaacgctaaagcggctacgtggggtccaccacatcggcgacatggcggttggtgccgcggcttcgttgaaatctatatgcctgaaggagctcgttaacgggcaaagctttgcgccgcttttgattggctcgaagaagcttcaaacgttgaaggttattgggtgcacgggggattgggatgagactctggttagggttggatgttccaacaatgggttggttgaggttcacttggagaagcttcaggttaccgatgtagggcttgttgccgtgtctaaatgtttagggttggacactttgcacgttgtgaagaccgctgagtgctccgacgtggggctttgtgcggttgctgagaggtgtaagttattgaggaaggttcacattgatgggtggaggactaataggattggtgatgatgggttggttgcgattgccaaacactgtcttaacttgcaggagcttgtgttgatcggtgtttatcccactttttcgagcttggcggcgattgcgtctaattgcgggaatctggagaggttgaccctttgtgggattggaaccgttggtgatgcggagattgagtgcattgctgataagtgtgttgcactcaggaagctttgcattaaagggtgccctgtgtctaatgctgggattggggctctagcttcggggtgtcccaatttggttaagcttaaggtgaagaagtgcaaaaggattactggtaaaggggtagagtgggtgagagaacagagggtttctttggcgtttaattatgatgatagtgaatttgaagctttggatgggggtgcaagtgatggggttgggggagctcagcataatacggtagagtttctaccaaacatcatcaaccaaactaccgtggccgaggctgaggcttcttcaagtaataataacaaccgaatgacaatgttaagatcaaggtttgggttttcggctggtagaaatttagtaccgggtgccttcagaaggtggtctaacagtgataatgtctccagtagcagttttggatgatggttgctatgtgactttttgtttttgcctgagtagctgatagcagcagcatttcttttgttgactagatttgtcagtcaccctcattgatttgtcagcatttctggttatatcaccttagtaaaaagtctgttttatttcctatt

SEQ ID NO: 11220 - DNA, 2045 bp, Glycine max
  Clone ID: 701042080_FLI
ggccattggtaccggcatttttgactatgtctgggtacaattctataacaacccttcgtgcagttatagccaaaacaatttagataactttctaaaatcatggagagagtgggccacatcattgaaagtaggtaaactgtttctggggttaccagcagatgaagctgcagctccggccggaggttatgttccggctgatgtattaatgtctaagatcttacctgaaataaacaagtcaacaaattatggaggtctcatgttgtggtcaaggtactacgataaaattagtggatacagtacccgcattcaaaatcctctaagaaatgggacagcaaaccctctatgcacacggaaaagtcaagcatgtaggagccatgagggcggtttcgcggagcttcttggttacatgtccacgctcggtatcaaagtttatgaagacgacaacaatggaacacagtgctgtgagatcatatgtaggaacaactgttcctgcgacgcgtttgctcccttaaatcacattaacaatactagtactggatgtcagatatggctcaaaggaaccaaatttgttagagcttctggaaatatagctctgccaatcaacgtttctgttgcattgctggaacacaaagtaaacagctggtggatttggctcatcgttggggtgggagcagcttttgtaatacctgtgatattctatttatcgcgtgccttcctgagaaaatacaaagcaaaagtggagagaaaaaagatgcagaagaagttattacatgacattggaggtaatgcaatgcttgcaatggtgtacggcaaaaccataaaaagtaataacaagggaaagactaacaatgaagttgaactatttgcttttgataccatcgttgttgccacaaacaatttctcagctgcaaataagttaggagagggtggttttggtcctgtttataagggaaatctaagtgatcagcaagaagtagcaataaagcgactttctaaaagttcgggacaggggctaatagagtttacgaatgaagccaaactcatggccaaactccagcacactaatctggtaaagcttttagggttctgcatccagagagatgaaagaatattggtctatgagtacatgtctaacaagagcttagacttctacctatttgattcggctagaaaggatttgctagactgggaaaaacggttgaacatcattggaggaattgctcaaggacttctataccttcataagtattcaagactaaaggtgatacatcgggacctaaaggcaagcaatatattgcttgatcacgagatgaatgctaaaatatctgactttggcatggctcgaatatttggagtaagagtatcagaagaaaacacaaatagagttgttggtacatagtaagtttataaacgatagtgaattttcaaattttttaaaattttggtctttgatatatgtttatgaaaacatctgcctttgcagtggatatatggctccagagtatgcaatgaaaggtgttgtgtccatcaaaacagatgtgttcagctttggtgtgttgctactagagatacttagtagcaaaaagaataatagtcgctatcattcggatcacccactcaacctcataggatacgcgtggcagctctggaatgcaggcagagctctggagcttatagactcaacgttaaatggattgtgttctcagaatgaagttttcagatgtattcatattggcctcttgtgtgtacaagatcaagcaacggatagacctacaatggtagatattgtttcatttctatcaaatgatacaatccaacttccccaaccaatgcagccagcatacttcatcaatgaggttgtggaagagtcagagcttccttacaaccagcaagaatttcattccgaaaatgacgtaacaatttctagtacgcgtgcaagataattggacaattgtgtacaccaaatttcactttttaatactgcatcactctggcggtgggagttcttggtattattgtttgtgccaattttacttcttttagat

SEQ ID NO: 11221 - DNA, 1169 bp, Glycine max
  Clone ID: 701042188_FLI
attttttcacctctccccaaaaccctcgcgccgcttttttttctctttcattatttttttaccattttttttatggacctcttcaccggcgaccacttccccgtccccgaccacgtcgctccgttccccgattccggcgacctcctcttcgccgccgacctcctctcccaccgccacaacccccagaagttccgccccatcaggtccgtccccaccgcccccattgccaacccttctcctccccctctctcgcacgatccgattccctccgggtcgggtcacgccccatgccacgaatccagcttgtcttttgatgctgaggatgaagatgaggatgatgacaattcatcagcaagtaccaaaggacatggccctagaaagaaaaggagaaagatggtgagaaagctcgaagattttgcgaaggatttggtggtgaaggtgatggaaaagcaagagcagatgcataaacagttattggaaatcatagaaaacaatgaaagggaaagaataaagagagaagcagcttggaagaatgaggagatggagagaatcagaaaagatgaagaggctagagcccaagaaaattctcgaaatttggccctcatatccttcattcagaacctgttgggccatgaaattcaaatcccccaacaacctgcaaaaccatgcagcaaaagagaagaggatgaagttgaggcaagtgctagaaaagaactgaacaatgatccaggtgacaatagatggcctgatgttgaagtgcaatcactcatcactgtgagaacttcattggagcacaagtttcgtctcatgggatcaaaagggacaatatgggaggagatatctgaagcaatgaatggcatggggtacaaccgctctgcaaaaaagtgtaaggagaagtgggaaaacatcaacaagtactataaaaggacaatagggagtggcaagaaaaggcgtcaaaatagtaaaacttgcccttactttgatgagttggacattctgtatagaaagggtctcttaagtattggaaatgccttgagcaatacctgcggtgttccccagattgaagtaaaggagttgaatgaaacttgaataggtagtacttgatagtcgtagatacggcttatgtaaaagctccttcattcagcatttatttagccattcttcctttc

SEQ ID NO: 11222 - DNA, 1645 bp, Glycine max
  Clone ID: 701042232_FLI
aacgatatcagtcttccattcatcaacaaccactctctctcccctctctgcagcaaaaccaattctccggcgacatctccggtcaggttccggcagcctctccggcgactcggcatggcaactcaatgaatgcggaatcaccgccggggctcctcatgtcggtttcctgcctctccgactacgacctcctctgcggcgaggactcctccggaatcctctccggagagtcgccggagtgctccttctccgacatcgactcctcacctcctccgccgtcgccgacgacagaggattgttattcgatcgcgagcttcatcgagcacgagcgcaacttcgttccgggattcgagtacctgtcgcggttccaatctcgctccctggacgccaacgccagagaagaatcagttggatggattctcaaggtacacgcgtactatggctttcagcctttgacggcgtacctcgccgtcaactatatggatcggtttttggattctcgccggttgccggaaacaaatgggtggcctctgcaacttgtatctgttgcatgcttgtctttggcagcaaagatggaagaacctcttgttccatctctcttggaccttcagatagaaggtgccaagtacatatttgagccgagaacaattcgtaggatggagctacttgttctcggtgtcttagattggaggctaagatcagtaacaccactttgcttcctcgctttctttgcgtgcaaagtagattcaactggaacttttatccggttccttatttccagggcaacagaaatcatcgtatctaatatccaagaggctagctttcttgcttactggccttcatgcattgctgctgcagccatactcactgcagctaatgaaattcctaattggtctgtggttaagcccgaaaatgctgagtcatggtgcgagggactaagaaaagaaaaagtaatagggtgctaccagttgatgcaagagcttgtgattaacaataaccaacggaaactccctactaaagtgttgccgcagctgcgagtaacaactcggacccgaatgaggtcaagtactgtatcatcattctcatcatcctcttcaacctccttctccttgtcttgtaagaggaggaaattaaataaccgtttgtgggtagatgacaaaggaaactccgagtgaagagaaaacgaacaacaataataaaagaagggaagaaaaagagagggaataaggtgggccaagttgtctagaaacctcaacattttttagagggtttttgcaattaaaaaatgacttgagtgagggtgtagattataatagtatatatatgatatatctctatcgtatatactaagagagtttgatgggtttggagtaatttttatttttatgttggtgacttattaatattgagtttgcagaattcacctagggaagagggattttgcgacatgttaccgtgggagaggaaatgagagaagaaagaagtgaaacactgaaacaggggtagaagaatttaatgtgatttgttcttgtaacctgtgagtgtggaagaaagaagtgagttgcgggctggaattcaaagtttgcattaattattggtgaaggagatgaaagatggtgggggcaacgctgtagagattgagaagaag

SEQ ID NO: 11223 - DNA, 846 bp, Glycine max
  Clone ID: 701042306_FLI
ggcggaaggtggtgtctccggtgaccggaaaatctaccggcggtggcgttaacatctcggcgtcccactcccggcggcgacgacatggggtcgacatcgacgggatcgatggaggcggcaacggcggcgggcgctgatatatcgggcgagaacgagaaattgaagaaggacaacgagaaattgagcggcgagttagcgctggcgaagaaacaatgcgaggagttggtggcgtttcttagagactcgctgaacgtgagccccgatgtgatagagcgcatcattcggcaaggaacgtgtgtgtccagcaacaatgatgcggtgcgttttgatgctattattaataatgatcttgatgacgacgaaaatgcggtaggtgagtgtgaaccacaacaaccaccacccaaaggtgacaatggagaaagtttgaaactatttggggtttggttgaagggtcaaaatgggaaagagaattcaattggtaaatgccgcaagagagggcgccaagactaccctattgctgccactgccaaggaattgaagaccctagtctagtacaacatatcatattcttgttaattaattaccttttaagaaacaactattgtagccagatctagaacacaaagaaaaatactctccttagtcatcatggaaaatgtatggctctttccatggtatttcgttgtttggtttgatggtgcaagggacctaataaaggatactaatgatgatgattaagattatgtttatagacattaatttgtatgattggaaataaatgtgcttgtttaaggaatttgacattgacggtctcattattacgtgggacagagctattgtagtacc

SEQ ID NO: 11224 - DNA, 1429 bp, Glycine max
  Clone ID: 701042317_FLI
ataagagaatctaaagaaagaaaaagccaggctcaaaaagttgtgttattgtatgcatgagaattgaaggagagaggtgaagactcattatcatcatcatcatatcatcgtcatgtatagcatggattcatcatcttctggatctcagttttctcagcacccacaactccctccagggtttcgattccaccccacagatgaagagctagtggttcagtacctcaagaaaaaagcagactctgttcctcttcctgtttccatcatcgccgaggttgatctctacaagtttgacccatgggaactcccaagtaaagcaacttttggtgatcaagaatggtactttttcagcccaagggataggaaatacccaaatgggacaaggcctaacagagctgctacttctgggtattggaaagcaaccggaactgacaagcccatacttgcatctcatggtcaccacaacaaagttggagtcaagaaatcacttgttttctatggtggaaagcctccaaaaggtgttaaaaccaattggatcatgcacgagtacaggcttgctgatagctcctcaaactctagctcaaaacctccttcttcggcttcagatcatgcacacagtggcaagaaaaactccttgaggcttgatgattgggttttgtgccgaatatacaagaaaagcaacagtacccacctgccaaggttacctttgatggagcagaataaggagatttctagggagatttctatgctaccaatgatgtcaactttgtcaatggctaatgataacaacactcctcaggattccaaaactgcgtcttctagaagcacaagttatggaccccttggagtagaaaatgatgataatttctttgatggaatctttggagttgatcatcagagcatgcagcaagatgtttctgatcattcccaacaagtgtcttcaaagggaaacttccctatgaaaagggaactttcgtcacagttttggaatggcacagggtcatcctcttcaagcaggcaattccattacgatcttaattatgctggaaacagcactactgttgaggaagacaattccttcgtttctctgcttagccaccttccacagaacacaacaacgtttcacccaaatgcgcttcttggccctgttggtaatggtgtattgaggcaacagtttcaacttccaagcatgaattggaatacttagggtggttaatttggcttagggtatatataccgggtaagggttggataatgtagctgccattgtaggtttatattataagttaatttaacttgggttttattagccatatatacataacatactagagagagagagagatcatgaccgtacgcttgtatttttgtgagtttttttttttgaagcttatattaaactgaatacgatataatactgctgttctgtatc

SEQ ID NO: 11225 - DNA, 1164 bp, Glycine max
  Clone ID: 701042328_FLI
aggttcacgaagacacactcaagtacatgaatgattttgagctgtacgactttgttgctgattcaaattttgatcagttcatcaatttgatccgaggggagaatgaagatgccaactgtgatcatttcggttctgaccttatcaatgattgctttgttaacaatcagcagcagcccctttcatctcctgcaaacccttttgatcagaacaacaacaataataataatgatgctgtgaatgtctatgatccaagctccacattcagttccttctcttgttttgatggggagctcaagggagaaggagaagaagaaaatgatggagagcattcttctgggacaacgacaacgacaacgaagaatgctgatggcaaactgaaactaaaaactgataggtcaaaaactctcatttctgaaaggagaaggagaggccgaatgaaggagaagctttatgcattgcgttctttggtccccaacataacaaagatggataaggcttctataattggagacgcagtgtcatacgtgcatgaccttcaagctcaagctaggaagctgaaggcagaggttgcaggacttgaagcatccttattagtgtctgaaaattatcaaggatcaattaacaatcccaaaaatgtgcaagtgatggcccgtaatattagtcatccaaactgcaagaaaatcatgcaggtggaacatgtttcaagtggaggaaagagggtacttagcaaaaatagtgtgcaataaaggagaaggggtggctgcttcactgtacagggctctcgagtctcttgcaggttttaatgttcagaactcaaacttggctacagttggtgagagttttctacttacatttacgttgaatgtaaaaggaactgaacaagaaattaacctgccaaatttgaagctatgggtgactggcgctcttctgaaccaaggctttgaattcgtggcatcttttcctgcttgactcactgcaccaagtatgacgtagaagcaattgcattttagagaatatgatgagccatgaaatattacgtataatatccacgtcaacatcttgagctagtatgatatcacttagtattaccgcaacaccgttgctaccttcgttctgtgtaattctccagttttcagaacaaataataacactacaaagactagc

SEQ ID NO: 11226 - DNA, 1591 bp, Glycine max
  Clone ID: 701042337_FLI
gtttttttgttgttgtgtaatgatactcattgtcaccaccaacacgctttcactttactgaacaacgacttcatcttcactcttccttcaaatttccaacaagggttcaagggtattatgcttgctggattcattctcttgctgaaatgcagtctttctagaaagtttgttcaactgtccctttattggcgttagctatgctacctactggagcaaaagagacccaattacgtgagaacaacagccagaaggtccatcctcaaccaatggaagaggccatgaatcagaatccagaagcaatggaaaccctaatatctaaagtttttacaaatatctcttccttgaagtcagcttatatccagcttcaagctgctcatactccctacgaccctgataaaatccacactgctgataaacttgttattagtgagctgaaaaatctgtctgaactcaagcatttctacagggagaacaacccgaaaccagtgtgtgtttctccccaagactcacgtttagctgcagaaattcaagaacaacagagccttcttaaaacgtatgaggtcatggtgaagaaattccaatctgaaatccagaataaagattcagagatccatcaattgcagcagcagatcgaagaggctagacagaagcgagcaaaactagagaaaaatctgaagcttagaggtttgtcaaccaaagaatcggaagatgaaattggctttttccctgtcgatctaactccagatctcttcacctctgccgtggaagcagctgcaaaagccattcatgatttttctaaacctttgatcaacatgatgaaagcagctgggtgggaccttgatgctgctgccaactcaatcgaacctgatgttgtttatgcaaagagagctcataagaaatatgcatttgagtcttacatatgccaaagaatgttcagtggctttgagcaggaaaacttctctgtcaaatcagacaatattactgtaactaaagagagcttctttcaccagtttctcgcattaagagagatggatcccttggacatgctggggcaaaatccagattccatttttgggaaattttgcaggagcaaatacttggtggtagttcatccaaagatggaggcatcattcttcggaaatttagaccagcgaaattatgtgatgggtggagggcatccaaggacccctttttaccaggcttttcttaaactgaccaagtcaatttggcttttacacaggttggcttattctttcgagccaaatgtcaaggtatttcaggttaaaggagggagtgagttctctgatgtttatatggaaagtgtggtcaagaatttgataatggatgacaatgatgaaaaacctaaagttggtttgatggttatgcctggattttggattgggggaagtgtgattcagagtaaagtctatctctctggtatgaaggtggctgaatgattcctgaacacactcaagacttcagaaaatgcatagttgattgtatgtggtttgtttgaattgttgtttctttatcttgtaagataatgctgttgtctgtaatttttaatatcctttttagtggttgtaagagt

SEQ ID NO: 11227 - DNA, 880 bp, Glycine max
  Clone ID: 701042534_FLI
aaaaaatgaaacaggtgatcatttaatcatatttttacaacaactcttataaactattaatgaatccaaagaggatttacctctctcagtacaaaaaaatctactagggtgtaactaaattctttttcatatcctccgtaaaggaaaaaaagaacacgctcctaaaaagttgccactttcctagtatgtactcgtcccaactctccttccaaacccagaaataaaaacacacacacataaacgcaacccaacacaacagcatcaaaacaaacaaacaacacagtttttcttgtctctatattcttccggccaccgcagatggcggcggagcacgacagctgctgctcgcgctgtgtcaccttcctaataaccataggcctcacagcgctcttcctatggctgagtctccgcgttgacgaaccaaaatgctacctcgactacatttacgttcctgccctcaacaaaaccctaaattccaattccactcacaacaaaaacaccacaatactcttcgctctcaagctcaccaacgggaacaaggacaaaggcatccaatacgacgacgttctcctctccttcagagtcttcgagagcgtcaacctcacgcgcccactcggcaacgccaccgtgcaaaggttctaccagggccaccagaagaaggccaccaagcacggaaacttcagcggcggcggcggaaacctcaccgcggcggtggctgggagaatgtggtaccgtgtggactatgctactgcggtgaagtacaagattctcttctggtacacgaaacggcaccgtttatggggaggggcaaatgtggaaattggcgattcgggaatgaaggtgtatcgtaaagccgttaggcttggagggaagaaccccg

SEQ ID NO: 11228 - DNA, 917 bp, Glycine max
  Clone ID: 701042666_FLI
gcgagagcagaagctacagcgaggcaagcctgcttccgcggcttgccacgtggtacaaatccaaggacgtagcgcagaggatccttctctcagttgaatgccaaatgaggaggtgttcctacacgctgggtttgggtgagccgaacctagcgggcaaaccgagcctgctctacgacctcgtgtgtaagccgaacgagatccacgcgctgaagacgacgccgtacgatgagcgcgtagagaatcacgagaaccacgcgttgcacgcgacgcaccagatcgccgagtcgtggatccacgcgtcgcggaaggttctagagaggatcgcagacgcggtgctctccagaaccttcgagaaggcggctgaggactgctacgccgtggaaaggatctggaagcttctcgcggaggtggaggacctccacctgatgatggatccggacgatttcttgagactgaagaatcagctctcggtgaaatcctccggcggcgaaacggcttcgttctgcttcaggtcgaaggagttggttgaactgacgaagatgtgcagagatctgaggcacaaggtgccggagatattggaggtggaggtggatccgaagggaggaccgaggattcaagaggcggcgatgaagctctacgtttcgaagagcgcgttcgagaaggttcacttgttgcaggcgatgcaggcgattgaggcggcgatgaagagattcttctacgcgtataagcaggtgttggcggtggtgatgggaagctccgaggctaacggtaaccgagttgggttgagttgcgactcggctgactcgttgactcagattttccttgaaccgacgtattttccaagcttggatgccgccaagacttttcttggatacttgtgggataataacgataataacaaatggatatgataaggg

SEQ ID NO: 11229 - DNA, 1662 bp, Glycine max
  Clone ID: 701042683_FLI
gtgtatttgtagagagaaacaaagttctcttctactttctgtctccagcaggctcagaatctttttgcaactgttctctggattttcgttcattattttagtttcctcttttgttttctctcctttttctttgaagcaaagtgaacttgtggtatacctttccaattgaggtttctagcgaaagagaaaggatgtcaagtgggacaacatactggtgttacacatgcaggcagccaatctggcttgaagggagggaaggcttttgcccctactgcgatggaggctttgtgcaagaactcaacgagatgcgaggagttgcgcgccaacacggcttctcaacgcggatggaagatgttcatcaaatgcctgacattatggatgctgtaagagctgttatggagcaaagaggttctgaaccgagcattcgggttagagatgctgttgataactttatgaggcagagaatggccggaagatacacaaactttgatgtgagaaggaggtctgattctggttctggttctggttctattcttattcctgatgagacttggggtgtctttagttctggtccttatttgatatttcatggtcaagcaccagggttcaccaattctaatgggagctcaagagggggtcctaggggtgttgattttggtgactactttcttggtcctagactagaaggactcattgaacaacacatttcgaatgaccggcttggtccaccgcctgcattgcgctcttcgattgatgcaatgccaactatcaagatcacacatgagcaccttgagtctgattcacactgtccagtttgtaaggaacgatttgaacttggttccaaggcaaggaagatgccatgtaaccacatttaccactcagattgtattgttccatggttagttcttcataactcgtgtcctgtgtgtcgtgttgagctgccaccgaaagaacatactagttctcgaggtagacgtatttggggaggtagaaatggtaatgacagtggtagtgacaatgatatctctaggggaagggagaatacacagatgaacaatggaaggagaaatctgctatcatatttgtggccatttcggtcctctagttcaagtacttagtgtgtgtttgttttacctgaatcacgtgttccaaagcatgttgaacgtgatttctatgagactgattttgaatttgattcaacgtcaaacctaacaaagccttaatcattatgctgagtctgggaagctactcttttataattctttggccagaacaatgacagaagttaaaaagtttcatttcttctccaggacaagtgtaattagctgtcaaaaaatgcttgtaatttaaatgacatgaagaaagtttctgtagattgtgctttgaacttgatctcctagatactagatcatagaagtatgtgaatatctttgtaaatacaatgttcttaaaaacaatttttgttttacattttcagtagcttagaagctttcactttggtgcataaggaatccaaggggaaggaaaggtgaatgatgaaagaaaactatggataaatcctttcccatatttagatattaccaatttataaggaaaggaagagttaaacgtttgataataatgtaatttaggaaaaaaattatttggtaatctagaactaac

SEQ ID NO: 11230 - DNA, 1063 bp, Glycine max
  Clone ID: 701042751_FLI
gcaagaatggcacttcgttgcttggtgatgtccctttctgttctcttcactcttggtcttgcgagagaaagccatgccagagacgaagatttttggcatgctgtttggccaaacactcccattccaagttcattgcgagatcttctaaagcctggccctgcaagtgttgaaatcgatgatcaccctatgcaaattgaagaaacacagtacccgaaaaccttcttctataaagaagaccttcatccaggcaaaacaatgaaagtacaattcagcaagcctccctttcaacaaccatggggtgttggtacatggttaaaggaaattaaagacactactaaagaaggatatagttttgaagagctatgcatcaagaaagaagccattgagggagaagagaagttttgtgcaaaatccttgggaacagtaattggttttgccatttcaaagctgggaaagaacattcaagtactttcaagttcctttgtcaataagcaagaccaatacactgtggaaggagtgcagaatcttggagacaaagcagtgatgtgtcataggctaaatttcagaactgcagtattttactgccatgaagtccgtgaaacaacagctttcatggttccattggtggctggtgatggaaccaaaactcaggcacttgctatttgccactcaaatacttctggaatgaatcatcaaatgcttcatcaacttatgggagttgatcctggaactaaccctgtttgccatttccttggaagcaaggccattttatgggtacccaatttatctgtggacactgcctatcagaccaacattgttgcttaattagtccatgcatcttgagcaccatgagaatgagattgtgtataaaataaattatcatgtgctgtgtgttgtgcaagtactaccttctctagctagattgctagagctagaatttcaacctacctatgtgtactgataagatctgcttccctacttaaagagagcatcatcctgtgatcagtgtgcttcgtattctctctctctatatatatatggtaaaaagtggttatctcgtgcc

SEQ ID NO: 11231 - DNA, 2035 bp, Glycine max
  Clone ID: 701043069_FLI
ccttaaccatcactggcacataggtgtttattgctacacactagaagaattatggaagctctcaagaccctcttcttagccatttttgttgtcttggcttccgcattgtattcagccaatgccaaaatccaggagcatgaatttgttattcaagcaacgccagtgaagaggctgtgcaacacccacagcaccatcacagtgaatggacaattccctggtccaacattggaagtcaacaatggtgacactttggtcgtcaaagtcactaacaaagctcgttacaatgtgactattcactggcatggaattcggcaaatgagaacaggatgggctgatggaccagaatttgtgactcagtgccctattcgtcctggagaaagttacacctatcgttttaccattcaaggacaagaaggaacactttggtggcatgctcatagctcatggctaagagccactgtttatggtgctttaatcattcaccccagggagggagaggcgtatcctttcactaagccaaagcgcgagactccaattcttcttggggagtggtgggacgcaaacccgatcgatgttgtgagacaagcttcacaaacaggagcagcacctaatatttctgatgcatacaccatcaatggtcaacctggcgatctttacaagtgttctagccaaggcaccaccattgttccaatagattctggcgagacaaacctcctaagagtgatcaatgcagcactgaaccaacccttgttcttcacagtggccaaccacaagctcacagtggttggtgccgatgcctcctaccttaaacccttcaccaccaacgtcatcatgctgggaccaggccaaaccaccgatgtcctcatccaaggtgaccaacctcccacacgctactacatggccgcacgtgcctaccaatccgcccaaaacgcaccgtttgacaacaccactaccaccgccattctcgaatataaatccgcaccgtgccccgccaagggttcttcgatcaaacccgttatgccgtctctcccagcctacaacgacaccaacacagtcactgctttcagcaaaagcttcagaagccccagaaaagttgaagtccccgcagaaattgatgacaatcttttcttcaccattggccttggactcaacaattgcccgaaaaatttcaatgcgaaccaatgccagggaccgaatggaacgcgtttcactgccagcatgaacaatgtctcgtttgttctcccaaacaacgtttcaatcttgcaggctcatcaccttggtgtgcaaggagtgttcaccactgattttcctacgcaacctcctgtcaagtttgattacactggtaatgtgagtcgttctctgtggcaacctgttcaagggaccaaagtgaccaagttgaagtttggatcgagggtgcagattgtgttgcaggatactagcattgtgacccctgagaaccaccccattcaccttcatgggtatgatttctacatcgtggctgaggggtttgggaattttgatccgaacaaagatacttccaagttcaaccttgttgatccacctatgaggaacactgtggctgtgccagtgaatggatgggcagttatcagatttgttgctgacaacccaggagcttggatcatgcattgtcacttggatgttcacatcggatggggtttggccgctgtgcttttggtggataatggagtaggcctgttgcaatccatagagccccctcctgaggatctgcctctatgttaggataatcaaaatcaaaattattgaatttgttaccatagttcagttccaaaattttcctagttcattgttgtttccctgtattggaggtatttctccttttgcttttattttgttgttcttttcatatagagataacccgggtttaaaagagacggtggtgtgtgatttcaacacggaatgccatcttatatggtcacaagcccgattgattaaattgatgtcggttgttttcttccccttgtggttaatgttattaagaaagatgattttgact

SEQ ID NO: 11232 - DNA, 3285 bp, Glycine max
  Clone ID: 701043122_FLI
atttgttcatgtggggttattggttatttttctatgatcggttgatcacaggtgagggactgaaaggtagcaatggcgaccaggaacttggaaaagatggcatccattgatgcacagcttaggcaattggctcctgccaaagtgagtgaggatgacaaactgattgagtatgatgctcttctgctggatcggttccttgatatccttcaagatttacatggggaggatctgaaggaaacagttcaagaagtgtatgaactttcagctgagtatgaaggaaagcatgaccctaagaaactggaagaacttggaaatttgataaccagtttggatgctggggactctattcttgttgccaagtccttttcccacatgcttaatttggccaacttggctgaagaggtccagatttctcgccgccgaagaaacaagttgaagaaaggggattttgcagatgagaacaatgcaactacagaatcagacattgaagaaactctcaagaaacttgtatttgacttgaagaagtctcctcaggaagtttttgatgcactgaaaaaccagactgttgatttggttcttactgctcatcctactcaatcaattcgtagatctttgcttcaaaagcatggaaggataaggaattgtttatctcaattgtatgccaaagacattactcctgatgataagcaggagcttgatgaggctctacaaagggagattcaagctgccttccgtacagatgaaatcaggaggacccctccaacaccacaagatgagatgagagcagggatgagctacttccatgaaacaatttggaacggtgttcccagatttctgcgccgtgtagacacagctttgaacaatatcgggattaaagagcgtgttccttataatgctccccttattcaattttcttcttggatggggggtgatcgggatggtaatccaagagtaactcctgaagtgacaagggatgtttgcttattggctagaatgatggctgctaatttgtattattcccagatagaagatcttatgtttgagctctctatgtggcgctgcaatgatgaactacgcgttcgtgcagaacaacttcacaggtcttccaagaaagatgaagttgcaaaacactatatagaattttggaaaaaggttcccccaaatgaaccatatcgtgtggtactcggtgaagtaagggataggctctatcagactcgtgagcgttctcgccatttgccttctaatgggtactctgacattccagaggaagccactttcaccaatgttgaggagttcctggaatctcttgaactatgttacagatcactatgtgcttgtggtgatagagcaattgctgatggaagccttcttgatttcatgagacaagtctccacttttggactgtcactagtgaggcttgatatcaggcaagagtcagatcgtcacactgatgtgctggatgccattaccaaacacttggaaattggctcgtaccaggaatggtctgaagagaaaagacaggaatggttgttgtctgagttaagtggcaaaaggcctctatttggacctgaccttcctcaaactgaagaaattagagatgttttggacacatttcatgtcatagcagaactaccaccagacaactttggagcctatatcatatcaatggcaactgcaccatctgatgtgcttgcagttgagcttctacaacgtgaatgtcacatcaagcatcccttaagagttgtgccattgtttgagaagctagctgatctagaggctgctcctgctgctctggcacggttgttctcgatagactggtacagaaataggatcaatgggaagcaagaagtgatgattggatactcagattcagggaaagatgctgggaggttctctgcagcatggcagctatataaggctcaggaggaacttataaatgttgccaagaaatttggtgttaagctaaccatgttccatggtcgtggtggaactgttggaagaggaggtggacctactcatcttgcttattctgtctcaacctccagacacaatccatggatcacttcgtgtgacagtccaaggtgaagtcattgagcaatcatttggagaacaacacttgtgctttagaacactacaacgtttcactgccgccactctagaacatggcatgcaccccccaatttcgccaaaaccagaatggcgtgctttgatggatcagatggctgtcattgctactgaggaataccgttccattgtattcaaggaaccacgctttgttgagtatttccgcctggctacaccagagttggagtatggaaggatgaatattggaagtcgaccagcaaagagaagacctagtggaggcattgaaacactgcgtgcaataccttggatttttgcatggactcagacaaggtttcatcttccagtgtggctaggctttggagcagcatttaaaaaagtcattgaggaaaatgttaagaatctcaatatgctgcaagagatgtacaatcaatggcctttctttagggtcacacttgatttggtggaaatggtgtttgccaaaggagatccgaaaattgccgctctgaatgatagactccttgtttcaaaggatctgtggccgtttggggatcaattgaggaacaaatatgaagaaactaggaaactcctacttcaggtggctggacacaaggaaattcttgaaggggacccttacttgaagcaaagactcaggcttcgtcatgctcccattaccaccctcaatattgtccaagcttacacattgaaacgtatccgtgatcctaactacaatgtgaaggtgcgcccccgcatatcaaaggaatctgcagaggcaagcaaatcagctgatgaacttgtcaaattgaacccaacaagtgaatatgcccctggtttggaagacacactcattctcactatgaagggtattgctgctggcatgcagaacactggttaagtttgtttgaatactgaaagtgagtgctctagttttgttctcagatacactttttttgttttgttattatgttgccccacctttctgtacaatttggtatgctgctctagaattccagaagagctagctaccacacaaatgaatcaatgacattgatctgttatgtttcttatgcttagtaccgttactacacccttctatacttctttgtatcttggttccataaggtcttgttttgtttgacatcattaaatcaaggatgtgtttagtactatctatatgtattactaatagagggtttgtagtct

SEQ ID NO: 11233 - DNA, 910 bp, Glycine max
  Clone ID: 701043125_FLI
ctcataggctcgtgtaagaagtaccgatcctgcatagtattaacttggcttgactcctctcatcagaagaaagcgaaaaaagcaaaaatgcaatctatgtccctgacgctgagcaagaggctctccaattcaaagcctctcttcagaatctcttccaacctcgtcgctcacgcatcctccgccacaacctctccgccgccaccttcgccgccagtcccctctccatccgccctcaacagcctcctcaccgctccgtggtccgccactcagtcacgcggaatcacgctctctggatctgatgttcgagtcgggaatctcattggaaaccgaggacgcgctcacgaggttctcaaactgtatcgccctcttgaaggaacgggcaaagccactcttgaggttccgcctcaaagtgtagctggttatgccacagttgctactacagaggatggcgccgaaaggaaggaacgaaacagtggattgagtaaggcaacgaagacaaagagagagcagctcctaaaagctactgcagttgcctctcttcttctaatatacccgaacacttattcattgctcttcgcaaatttctttgtgttctggcacttatatgcagggatcggagagattttggcagactatgttcaccatgaaatgaccagagaatttgtcatgatttctctcaggttgttcttgataatggcattgaaggatgtatgcttaaattttgtatttgtataatcagatagtgcatgggttgtgctgacattactttccaataagaggccatttagggtcaaacttggcaaaaccttaatttgtagtttctagtcgttttctcaaacttaagaggcgaggcaacgtgataacttgatgatttatcatggtaatggatgaattttagcgtgtcttgcat

SEQ ID NO: 11234 - DNA, 1558 bp, Glycine max
  Clone ID: 701043180_FLI
cagtgacatcagggctgccaatgaattgctaaagcagattaggcaacactcttctcccattggggatgcatcacagaggttggctcattactttgccaatggcctcgaggcacgcttggttggggatggtacaagtacccaaggaatgtatacttttctgagctctaagaacaacactttttctgagttactcaaggcataccaggttttcagttcctccagccctttcaagaagtttgcatatttatttgaaaatacaatgattatgaaagcagctgcaagtgcagaaaccgtccatattattgattttggcatcctacacggtttccagtggccaatgctcattaggcttttgtcaaatagggagggtggacctcccaagcttaggatcacagggatagagtttccccaacctggctttcgtcccacagaaaaaattgaggaaacgggtcgccacctggctaactattgtaagcgttacaatgttccctttgagtataatgccatatcatcaaggaactgggaaaccattcagcttgaagccctcaaaattgcaagcaatgagctagttgctgtctactgtcaccagaggtttgagaatttactggatgagtgtactattgaagtgaacagtcctagaaatgcagtcctgcatttgatcaggaagataaatccggatatttttactcactccatcactaacggatcatataatgcccctttctttaccacgcggtttagggaggctctctttcattattctgccatttctgataagaatgacactgtcatatctcgtgaaaacgaaaggaggttgatggttgagagagagctctatggcagggagattatgaatgttatagcatgtgaaggttctgacaggattgagaggcctgagacctacaaacggtggcaggttaggaatatgaaggctggtttcaagcagctaccactgaatgaggaattaatggccaaatttaggagtaagttaaaggaataccacagagattttgtcttagatgaaaataacaactggatgcttcaaggttggaagggccgcattttgtttgcttcctcttgttgggtgccggcataatgagatgctactgtgactcggttcagaattcatactatactaaaggtatgattccaagaatcagtcattggctttaactctatccacttctttttttccctggttctgatattcttggtctggctacctacttactctaccttcagcttttgtgatgaagattgtaccaagctttgcaccaagttccttggtaaaattatagcatcacttttctggtagattaagacttgtgaaggtaatacaatttcgttagtgatattgataagaagggcatattagtcatcagagtaggagggccattatagcatgtttgcccaagtacttgcaatcctattattgagttattttctctttaaccaacatgtatcaggcatttcacgtccttctatttaagtttgttaatttcttttacaggatacttgtcttttgagacaaattagttgagaagatgtgattaatttg

SEQ ID NO: 11235 - DNA, 567 bp, Glycine max
  Clone ID: 701043406_FLI
tagaaagagaaggaaaaaaaaaaacttgtgtttcttgggaagccatgagcaccaccgagagtcaaagatataagggcacagtgaaatggttcaacgaggagaagggtttcggtttcataactcccgaagatggtggctctgatctcttcgttcactacagtgcgatccaaaccgacggcggcttccgcaccttgtcggagggtcagtcagtagagtccctcgtcactcaggacgacagcgggcgagccgcggccgtcaacgtgacgaccaccacggttaaatctagtgacagcggtaacggggaaaactctggtggtgatgctgccaatgttgagaaataagtgagaatgaattattggagtttcctgaattgcgagtatgatatttatattgatagttggacaatatactagtccattggtattttatattttattatattatctctggttattggcatttggttccaaacttgtaatacatttatcatgtgtttaacgtggttatgtagtaagttgttggatgtgtcgaattaatgtcaaataaaaatatatttatattattttt

SEQ ID NO: 11236 - DNA, 1220 bp, Glycine max
  Clone ID: 701043546_FLI
gcaattttgcctcattgagtgaatactacttacttatatacacattcattcttcaacaaacattttagtttattttttctctctttgatcaaattcccttcccatggtctctctctcttcaattaattccatttagctttccccaaatcccaaaccctttttcgcttagatcccaatccaattgggttatggacatggcttccagtccccgcaccgtagaagagatcttcaaggattacagcgccagaagaacctctgttattcgcgctctcactcacgacgttgatgaattttacggcctctgtgatccagataaggataacctgtgcctctatggacatccaaatgaggcctgggaagtaactctgccagcggaggaagttccgccagagctcccggagccggctcttggaatcaattttgctagggatggcatgaaccgcagggactggctttctctggttgctgtccacagtgattcatggttggtttctgtggccttttaccttggggctcgtcttaaccgcaatgaaaggaaacgattatttagcttgatcaatgatcttccatctgtttttgaagttgtgactgacaggaaaccagttaaggacaagccaactgcggatagtggaagcaagtctaggggaagtgccaagagatctagcgatgggcaagttaaaagcaacccaaagtttgtagatgagggttatgaggaggatgaagatgagcataatgaaacactttgtggaagctgcggcggaaattacaacgctgatgagttttggatttgctgtgacatatgtgagaggtggttccatgggaagtgtgttaagattacccctgcaaaggctgagagcataaagcaatataaatgtccatcatgcagcctgaggcggggcaggccttagactgaaagaggcgatggaatgggtacatgtgaggtgagtgttgtttcatggctgacaagatactgtaattttgttacatcacttacagaagttaatgtaatgggcatagtatcgatgctcaagggcaaatttatcagggattaagtttgtttttccagatgaaccattggtgcatgccacagggtatagaatagaacatgacaaattttaattttatgattagtttatatttagtagaatatttgcttgaactttaaatattgtaatttttttatttttaacattgtttaagaaaacaaaccttttcaacag

SEQ ID NO: 11237 - DNA, 818 bp, Glycine max
  Clone ID: 701043646_FLI
gaaaaaagaggcgcaagatgagtggtagggtttctgggaaggtgaagtggttcaacgatcagaaggggtttggattcataacccctgacgatggcagcgaggaactcttcgttcaccaatctcagatcaaatctgacggtttccgaagcctagctgaaggagagtccgttgagttcgctattgaatctgaatctgacggacgcgccaaggctgttgatgtcactggccccgacggcgccagcgtccagggaaccagacgcggcggtgatggttgccgaagctatggcgggggacgaggaggtggtggaggtggatatggcggtggcggcggctacggtggtggcggtggctatggtggaggcggtggctacggtggtggtgggcgaggcggtggtggcggggcttgctacaactgcggtgaatcgggacatctggctagggactgcagccaaggaggcggtggagacaggtacggcggaggcggtggtggtggtggcaggtatggaggcggcgctggcgggaggtacggtggtggtggaggaggtggtggcggcggaggaagctgctacagctgtggagagtctgggcatttcgccagagattgcccatcaagtgctcgttgaaattactgttatggtggtttatgttatgcggattgttttaagtttttactttaacatgttgtagggattttaatggtttctgtcaaagctgtggcttcttataagtagatgcgtgagatttttcttttttttggttatttaaatgaaagtttctgtgttatcgttacaatctgcaaacaaaatctgtttggacct

SEQ ID NO: 11238 - DNA, 827 bp, Glycine max
  Clone ID: 701043688_FLI
ctcgatcactcccacgcgctcctatatcctctccttcaccgtcgctctctccaacgatcacaacaacatcgtcatcccatggcaaacgccgcatctggtatggcagtccatgatgactgcaagttaaggtttttggagctgaagacaaagaggacacaccgtttcatagtttttaagattgaggagcagcagaagcaggtcattgtggagaagcttggtgagccagcccaaggctatgaagatttcactgccagccttcctgctgatgagtgccgttatgctgtttatgattttgagtatctgactgaagggaatgtccctaaaagcagaatttttttcattgcatggtcccctgacacatcaagggtgaggagcaagatgatctatgcaagctccaaagacagattcaagagggagctggatggaattcaagtagagctgcaagcaactgatcctactgagatgggtcttgatgtgttcaaaagccgggccaactaaaatgattatagaaaatagtaggctttctggtgggagcagcactccttaagccttagttactcatggaaaatatcctagtttgtgggatggtcaacttgggtagttatggtcccaaactctctcaattttccaagttgtggcataaattctattgcaccttttaacaagctttgcttgttccagtgtgttttattatgatttgtgatttatacaaccttgcgtttgagtgccattttagtcgtcttatcccttactagttgaatttgtaactgtttgtgttatcagacaaaaaatggggtttcttcacttattgacactcgtcatccact

SEQ ID NO: 11239 - DNA, 734 bp, Glycine max
  Clone ID: 701043841_FLI
aaaaaaaacacctaatctgatctgagttcctgacatgtccatcgaatttgattctgaatccattcccactcccacggcccaagcccaagcccaggagcgatccaactctcgctgcgccttgttattttcttcctacaactgcttcggcggccaacgacgtcgttcctcatggtgggagcgcgtccgctcccactcccactccgctccagcctcagccggtgaccggtggtggtcgcgtgggctcagggcgctgaagaagcttcgcgagtggtcggagatcgtagcggggcctaagtggaagaccttcattcgcaggttcaaccgcaaccgccccaacaaacgcatacccacgtaccagtatgaccccttcagttacgccctcaacttcgacgaggggcctaacggggatttcaaccaccaccacgacgatgctgcgcttcgcaatttctccacgcgctacgctgccgcgaacaacgtcaagtcgctttcccccaaggcccgtgactgcgatgacgccgttttggtgtgagtggtgtggagtggccacgcggtgtttggtttgtggcttagcttcagtccgaaaaggggcaggagtgggtgccccttcgcgtcattatttagttttatttttttgcttaaattacttattttttctttatattttcatgatttttttaattttttttagtcttgtaataatttttttgaaagtgatatttttagcttttacagtt

SEQ ID NO: 11240 - DNA, 1132 bp, Glycine max
  Clone ID: 701043865_FLI
taaagttttcgcctttaggatccaaaccatgttggtgaaacaaacaaggacaatgggagtggtcctatttcttccccagttccacagccacaaccacaacctttgcccaaagtgatgaagaatacaaatgatgatataaaaaaggacaatgattcagctcctccagtgagtatacctcctccaccgaaaaatgatgatggtggtgacacgggtatgcataaagggaaggacaaaactgagggcatgaagttttcacatcatagcaccactgagacttgtgacgggttcaagaagtgcaccgacgatgatgggggcatggttgcttgcatttcgaaaattggtcaacatcacacgaagtagcagtgaaagtacccaactgactttaaatgctggaaaaggggattgtgtgcttcacatggtttcaaatatacctgaagagaatttcattctgcgtcttccttcttatgacaaaattttaacaccagtaaatggtgcctatttcctcatattgatggtactagtctttggagggacatgggcttgctgtgcatgcaggaagaaacatcgcaatgaggttccatatcaagagcttgaaatggcactgcccgagtctgcttcagctaccaatgtggaatccgccgaaggttgggatcaggactgggacgatgattgggacgtcaatgtggcagtgaagtcaccggcagcacttgcaggaagcatctctgcgaatggccttacttctagatcttcaaacaaagatggatgggagaataactgggatgattagggttatcaggaggcaaaggataagggagatgataggattaaccaaaaagtggaaaaggaaagaaaggggaagcatcagagttggggaagattaagagcaagggatgtgagaaatgtggctgtgctggggcctaattttgatgcatgtccatgcaagggactgcaaaaaagaaaagaggaagtgtaatagttttaacacattggaattttttatttttttttgtattgaacgtgtaatagtgaatgccctggcccaaacgggaaactaaagaaactgtaaatgaaatataggaggtaaagtatattttggctttatcaaatttatatacacactattccagtgatc

SEQ ID NO: 11241 - DNA, 601 bp, Glycine max
  Clone ID: 701044364_FLI
cttgcttcccggagctctgaacttgaccgacgccattttcacatcaaaacgcttcaactaaaaaaatggcgttcttgtggaacaaaactagtatcgcttcccattttcgatctcactctcagaagactgagggtttggcttcttttccgcgccgtcgattccacgtcgaacccggggctcgtgaaaaagctctcttggcagaagatgcaacgctgaaaccgttcaaatcatataagaagagtgtcaaacagctcagaaaaattgggaatgctctgacagttgttgttgttgcaggatgctgttacgaagtatatgtcagagcttttacaagagaggaagctcagaaactgtaatgtcctgaaagttctggatgaagcaaatattgggagttagttttctgttttgttgtatttttgtggcaacaatttggacgttatgattagccatgtcagaataagcagaaaagcatttgaacaaaaaattgcttgcttgtgcattagttttttcaccattccaaatgtatactgtctgatgataatgctgattggctgatcacaaatctgtggcttcaggtgtgagaaatagatagaattcgttcaac

SEQ ID NO: 11242 - DNA, 1074 bp, Glycine max
  Clone ID: 701044385_FLI
gagaaattgagaagatgggaagaaaggccaactgtgacaatcaatatgctatgaacagaggtccttggtctgctgaagaagacaaaattcttatgaactacgttcaagtccatggagaaggaaaatggagagagctttccaaaagagcaggcttgaaaagatgtgggaagagttgtagactccgatggctgaattatctcaagccagatatcaagagaggaaacatttcttcggatgaagaagatctcattattagactgcataagctcttagggaatagatggtctctaattgcgggacgcttaccagggcgaacagacaatgaaattaagaactattggaatacttatttgagaaagaaggcagagcacaagcatgacaaaattcctagccataacgataacattcctatcaaattaagaattgaatctccgggttgctcaaaaaattcctttggtaatgttcttgatcctacaaaatcccctcacccaatgaggtgtaccaaggttatgatgccagtcaatgattcagtcaacacaacgaatttgattacaacgagctgggacaatcataacccttcttctgcatccatgcaactagatgactataatcattgcttaacaggtgtcctccaagaatttgacatcagtgacttgttaatgtcgtatgaggatgattttcgttttaatggatatgcttgtgtcgaaataccccaacatatttttgaagatgagacttgcaggcttgatgattcgttgggtgaagaagcatggtatgagaattggaagaatgacccctattttccacaagatcaagatatgggtttttcttccttttaaagtgtttaaaatttaggcacattaccttaaagtgtttttagtattgttctttaatcaaaattagaatttcattttagtatcatgtgcaattaaggttgacatgaaatgttggtactaagatgaaattttaattttgaatcaagaacaggtctaaaatcccttaaagtattgtggctaaatagtctccttttaaaaaactgaacttgaatgaaatggttgaggatgttaaattaac

SEQ ID NO: 11243 - DNA, 1224 bp, Glycine max
  Clone ID: 701044403_FLI
attacctttctctgagtccaagttccaacgaaatgtgaacagtgaaagaaacaaaaaaaacaccatgatgctgaaggcggcaccgcgtgcagtaatctactacctctcggagcacccggctatcgtggggttccggtggagccacgcccaatcatggggcgccacgtggtccttcctcttctcctcaattgcctcctacctcttcctctcagtcttcctatacttctctctttctctcctcttccgccgccgtcaaatccctctcggcccccttcccgccgtccacagcctctccatgtccctcatctccgccacgatcttcgccggcatcctcctctctgccgccgccgagatcagcgacacgcggtggttctggcggcgctccaaaacccccctacagtggctcctctgcttccccttgggcacgcgcccctcggggcgcgtcttcttctggtcctacgtctactacctctcccgcttcctccacatgctccgcaccctcctcagaatcctacgccaccgcaggctatcattttttcatctgttgagtaactcaatctccgcactcgcctccttcctctggctcgagttctcgcagtcctttcaagtcctcgcaattctcttcgccacgctcgtgtacgcagccgtctacggctaccgcttctggaccgccatcggcctccgcggcgcgtgcttccccttcgtcctcagctgccagatcgtgctcctcgcctgcaatgttgcctgccacgtcgccgtcttcttcctccacttcttcctcaagggcgggtgcaatgggatcggcgcgtgggtcttcaactcaatcctcaacctcgctcttcttatgctctctcttaacttctacgtgagaatgcacgttcacaagaggaggaggaaagttagggatgttactgttactgttgctactgcactgtcttaacgagcgcgtgagtgcaacaaatattgaagtttaattgtggaaatatatattagacacgagttggttgttgcaatttggggtcccaagtgtgttccctttttaatgttcatcatttttagcatggaacaggtgaacaagatattatagtatagtgttgttggaaagcaaatattatagtagtaatatttttgtggtacggattatgattttgtgaatatgttgtagtatatatgaatcatgattagttagttcatttctatactaggatctaacacagttaatag

SEQ ID NO: 11244 - DNA, 1685 bp, Glycine max
  Clone ID: 701044439_FLI
gggcagagatgtttccctctatgattgctagagctatcaacctcgatgttatatctaatggcatgggtggaacaagaaatggtgctctacaagtgatgcatgctgaggttcaattgctttcgccactagttcctgtccgtcaagtaagattcatccgattctgtaagcagcatgcagaaggtgtttgggctgtggttgatgtttctattgagattggtcatgatgctgctaatgcacagccagtcatgagctgtaggaggcttccttctggctgtattgtgcaggatatgcccaatggttactccaaggttacttggcttgaacactgggagtatgatgagaatgttgtacaccaactttatcgcccattgcttagttctggtgttggatttggtgctcatagatggatcgctaccctccaaaggcaatgtgaatgcttggctatcctcatgtcctcttccatttcaagtgatgatcacacagcattgagccaagctggtaggagaagcatgttgaaattggcacaacgcatgactagtaacttctgttccggggtttgtgcttcgtccgctcggaagtgggacagccttcacatagggactcttggtgatgacatgaaagtgatgactaggaaaaacgtggatgaccctggtgagcctcctgggattgtactcagtgctgccacttctgtttgggtgccagtgtcacggcaaaggctgttcgactttctacgtgatgaacgcttgagaagtgagtgggacatcttgtccaatggtggaccaatgcaggagatggtacatattgccaaaggacaaggacatggaaactgcgtttctcttcttcgtgctaatgccgttaacgccaacgatagcagcatgctgattctgcaggaaacatggatggacgcgtcgtgctcagtggtggtatatgcaccagttgacgtgcaatcactgaacgtggtgatgagtggtggagattctgcatacgttgcactcttgccttcaggctttgcaattctccccgatggccactgcaacgacaacggctgcaacgggactttacagaagggtggcggtggcaatgacggcggcggaagccttctcacagtcgggttccaaatactggtgaacagtctcccaacagcaaagctcacagtggagtcagtggacactgtgaacaacctcatctcctgcaccattcagaagatcaaagcttctctcagagttgcatgatgatgacaacaacaaccattttgttaatgcagtaataataatgcaagttaagttaccttaaattattattttgtggtctttatatttttggtttctaagatgaatatttattcggagaggggttatataatttggctgggtgtataggaattataattatatagagagtagtggaagaggaggctgaggcagaaaggatcgcgtaagaaaggtttcgagtcaagaacgaaccgcgatggaggaacttgtttgcatgcagtttttctgctcatagtggttcgggtattgactcgttcacctgcgagttagtctctgtgctcttgtttggataacattagaaaaaaacaacacatgtgcctgtgttactacttaaattattactagtgcccatcctatcatacacatttgcaaattgctcaactaatgtattttcgaattatgcattttcatcat

SEQ ID NO: 11245 - DNA, 664 bp, Glycine max
  Clone ID: 701044503_FLI
attttggtgcatgcgagtgaggggctttgtaaattaatttgttctagtaatagtacggtagctaatagtagtatttctgtgattggtgttgcagattgatcaagtgaatataatattggtaatgatggatctgaaggaatggtcatcatcttctgaggaattgaatgtgaacaggaaatgttgcgctgattgcaaaaccaccaagaccccactctggagaggaggaccagctggacccaagactctatgcaacgcttgtggaattaggtatcggaagagaagggcatgttggaggaagggagagttgaagaaacagaaacagaaacagaaacagaggtggaagatgctgggggaagaggaacaagcggcggtgtgtttgatggccctgtcctgtggttttgttttcgcttgagcattccttaatttagctcattcgaggtaacctaagacaatcctttttgatgtcgtacgtatagtatagctaacccttttgggagttgtaaagctcaaaatgtgaaacgtagtgtagcctttgtttctttttaggcttttcccctttctttgtttatagaggatgatatgatattataggttcagttagttagtgatgtaagtatttcagattaatgggtgattattacaatatagtgttctctgttccttt

SEQ ID NO: 11246 - DNA, 794 bp, Glycine max
  Clone ID: 701044506_FLI
agaaaagttagggttcacaacttttccttttccttttgcttgcgaatctgaatcaaataatcaatcatccattcattattcatcatgtcgtcggcgaagaaaatcacgctgaagagttcggacggcgaggctttcgaggtggaggaggcggtggcgctggagtcgcagacgataaagcacatgatcgaggacgactgcgccgacagcggcatccctctgccgaacgtgacgagcaagatcctggcgaaggttatcgagtactgcaagaagcacgtcgaggccgcgaatcccgaagacaaaccctccgaggacgatctcaaggcctgggacgctgaattcgtcaaggtcgaccaggccacgctcttcgatctcatcctggctgctaactacttgaacatcaagagcctgctggaccttacatgtcaaactgtagccgacatgatcaaggggaagactccagaggaaattcgcaagacctttaacattaagaatgacttcacccctgaggaggaagaggaagttcgtcgggaaaaccaatgggcatttgaatgattttgttaatctcaaaaaatctgaatcaaagatctgccatgtggatttatgctatgcttgtttgtttatcaaagatctctcttgtagatttgcctatgctatatacttgtttgttttatattcaagactatttccgttgactgtgttcactacaactagtcataagaattatcttccttcatgaacttaagagcactttgaattgtaagtaatagttatgatgagggatgcgttgattctga

SEQ ID NO: 11247 - DNA, 1892 bp, Glycine max
  Clone ID: 701044837_FLI
gtgaagtgcgggttgaaggattagagacattggattatcttgacaacttgcagaaaagggaacgctttactgaacagggggatgctttaacatttgaatcagaagtaagattgtttaccttgttctactttgctttagaaaacacacgtgggtattacaataaatatgctgtgagtaatgaaatatgacaatttccaagaaatggagcttctgatgataaattaaataaattgctatgaataaaaatcatgtttctattctttttagggttgtacatttaaatagtacttttcatttcaaacgacggtaaaaaaaacatgttttgaattaaagaaaaaggaagtgataggcctgcttaaatggagtatcagaccaatttatagattttgaatgttttttttccttttgttgctcatgttaattcaggcataaagtgggccataaacaccaatgcccaaacaacattttccatttgattgctgctttttctatcgtgtatggatgaagagaggcagtgtttaactgtttcggaagctgtttactttctttattcaggcaaacaattgaacagttgcttcccacacccccaacaaaagcctcactttttctctttttgacttttcctgtagcacaggtggcaacttcccacaccccatccatttcaattgagttttgactactgtacttaacccatatctgaaacatatttgcatcgaaaatataataaaaaagaaagaaaaccatctaactagtttgtattgttgtgcccaatttgtagtaatgtgacacatctaggcacatgtgtgtaacctgtcctgatgtactggcatttcatatgctttgatgagttgaaactggcacttcactttttctttgaatgatagtttgacaggatatatctcagcactcctacaaagattgcaattcttgatcatgagaaaaagagaacaattgtattgcgtaaagatggtcttcctgatgctggtgattatcatcagactcatcttgtgtacttagttttttacattgataaagtttactggtggcagtgggactatattattggaaactattttaagagcaaaaaaatgttcgttgtaaatgtgtaaataaagcttaaagtccttacctgtattcattttcatgtctgaattcttcctgttaactagagtattacataaacctttttcttacaagtgagtaacttcccattccaaatttaagaaacatcttgagtagttggtatatttaacatttgtgttgcttttggattggacataaaactttttctttctcatttattattttatctgtgcagtggtgtggaatccttgggataagaaagcaaaggctatatctgatttcggtgatgatgagtataagtacatgctttgtgtagaggctgctgctattgaaaagcctatcactttgaaacctggtgaggaatggaagggaagactagaactttcaactgtttcttctagttattgtagtggacagcttgatcccaaaagagttattcaaggaagctgaaagatcatcgttgtgttttgtgtcctgtacaggtagcttgttgccaccacgatgaacgttgaaaggaaagtgtctccaacaatttccccccttcatgttccacttaaaccttcttcatgttggacggatgaactcatgtatagagttttgttaaataatattttcctgtaacggatgactagttcggtcataattgacgtataagtagaatagccttcagttgtttatggaaaatcaaactaaaatctcaaattttatttgattttcacgttgggttctcgtactcatatgaaatgtttattatcacatatcataggcaatgaatgcatgtatttgacaggatcgttttacaacactac

SEQ ID NO: 11248 - DNA, 684 bp, Glycine max
  Clone ID: 701044843_FLI
cctgcgtgtacctagtaattagcaacgttggagaatgtggacattgacattcgtcctgtttctgctccataggctgaataaaaaatgtggttaagcatgtgtgaatgcttctaggacgttgaaagcatcttgagattgaagacataaaaaatgttattcgagttgaacaatggttcccggttgcaaatagtggagcatgaaggagaagctgtgcgggcaaagtgcatacctcggaagtctaagacactaccaacaaaaaaagaagagggtgcttccatgcatattgttgtcagtagccaacatgggagcaaaagattcgacacacaacaataaactgatgatactttgaatgaatataaagcgaaaggaaaccttgtgaatggaggtttgtaggctgatagtggagaagagggcaaaagcttagagatgtgaggttagaacgagaagtgtggaagaatgtataaatatagggaagcagataggatctgtactaatcaagtaagtacagtatagtgatctagagctttgcaatttgcatgtcacggcatagtgggcagatacgtcgagggaacgttacctatggaaagaaagtaactactagtttgtagcccttgtccattttgatgtttaggttttggcctaaagtcagtacatgtaagggtgatctgatatctgtttccatta

SEQ ID NO: 11249 - DNA, 589 bp, Glycine max
  Clone ID: 701044845_FLI
atccaactctctttctccctatcccaacaatctcactcatacctcttcaatctaacaaacttaatttcttttgttttgagtttcttagagaatggatgaaaaaggagcaagaagtagcaacacccttttaagttgtgaggacgagatggaccttcgaagaggcccttggaccgtcgatgaagacctcactcttatcaattacattgccactcatggcgaaggtcgctggaacacgctcgccctctctgctgggctgaaacgaacggggaagagttgcagattgaggtggctgaattatctgcgtcctgatgttcgacgtggaaacatcacacttgaagaacaacttttgattctggagcttcattctcgctggggaaaccgttggtcgaaaattgctcaatatttgcctggtagaaccgacaacgagataaagaactattggagaacccgtgtccaaaagcatgccaagcaactcaaatgtgacgtgaatagcaagcaattcaaggacaccatgcgttacctttggatgccaaggctcgtggaacgcattcaagcagcggcgacggcccccgtaaccaccaccgtaact

SEQ ID NO: 11250 - DNA, 3068 bp, Glycine max
  Clone ID: 701044945_FLI
cttcctccctctccctcctcccccaaccacgcccttctctcttccaatttctcttctctgtccaactcaatcgattagtttagcttccgcggacagttcagggatcatggctagggttttagttcagtctactggtatgcctggcctactgagtgggcaaaggcacgggaagcataagggatcaggaaaatcgaaaagatctgtcaaaatgatgagcaccttacgaatgcctgctttaagaatgtcgagtttctccggattacgtactcttaatcctatggattctctgtcgagaccacgccacacttttccgttgaatacaacttctaggcgcgagagggctaaaagatgtgtacctaaagctatgtttgagcgtttcacagagaaggcaatcaaagtcattatgctagcccaggaggaagcaagacgactggggcacaattttgttggaacggaacagattctattgggtcttattggcgaaggaaccggcattgctgctaaggttctgaagtcaatgggaattaatcttaaagatgctcgggttgaagtggagaaaattattggaaggggtagtggatttgttgccgttgagattccgtttactccccgggcaaagcgtgttttggaattctcactggaggaagctcgccaacttggtcataattatattggatctgagcacttgcttcttggtctccttcgagagggtgagggtgtagcagcacgtgttcttgaaaatttgggtgctgatccaaacaatattcgtgctcaggttatccgcatggttggtgagggtgctgacagtgttggtgctactgttggccctggaagtagtaataacaataagatgccaactttggaggagtatggcacgaatttgaccaagctagcggaagagggaaaattggatcctgttgtgggtaggcagcaacaaattgaacgtgtcactcaaattttgggtcgtcgtaccaaaaataatccttgtcttattggggaacctggggttggcaagacagctattgctgaaggtcttgcccaaaggattgcaaatggtgatgttcctgaaaccatagagggaaagaaggttataacccttgatatgggtctactggtggctggaactaaatatcgtggagaatttgaggagagattgaagaaactaatggaggaaatcaaacaaagtgatgagataatactttttattgatgaagtgcacactctaattggagctggagcagctgagggggcaattgatgctgcaaacatattaaaaccagctcttgccagaggtgaactgcagtgtataggagccacgacactagatgaatataggaagcacattgaaaaggatccagctctggagaggcgattccagccagttaaagtgccagagccaactgtcgatgaaaccatacaaatactgaaaggacttagagaacgctatgaaattcaccacaagctccgttatacagatgatgctctcgtagccgctgctcagctgtcacaccaatatattagtgatcgatttttgcccgacaaagctatagatttaattgatgaagcaggttctcgagtccggcttcaacatgcccagttacctgaagaagcaagagagcttgacaaggaggtcaggcagattgtgaaggagaaagaagaatttgttcgcaatcaagactttgaaaaggctggagagctaagagacagagaaatggatcttaaggcccagatatctgcacttatagaaaaaggcaaggagatgagtaaggcagaaagcgaggcaggagatgaaggtcccatggtgactgaagttgacatacaacatattgtctcctcctggactggtattcctgtggagaaagtctcaactgatgaatctgatcgtctcctcaagatggaagagactttacacaagcgagtcataggtcaggatgaagcagtgaaagccataagcagggccatccgtcgagccagggttggactgaagaaccctaaccgtccaattgccagcttcatcttttctgggccaactggtgtggggaagtctgagttggccaaagcattggctgcatactactttggttctgaagaagccatgattcggcttgacatgagtgaattcatggaaaggcacacagtctccaaactcattggttcacctcctggatacgttggttacactgagggtggtcaactgaccgaggcagttcggcgtcgtccctacactgttgtactctttgatgagattgagaaagcccatcctgatgtattcaacatgatgcttcagatcctggaagatggaagattaacagacagcaaaggaagaactgtggacttcaagaacacgcttcttataatgacatcaaatgttggaagcagtgtgattgagaaaggaggccgtaaaataggatttgaccttgattatgatgagaaggatagcagttacaaccgaatcaagagcttggtgactgaggaactgaagcaatacttcaggccagagttcttgaataggttggatgaaatgattgtcttccggcaactcacaaaattggaggtaaaggagatagcagacataatgttgaaggaggtgtttgatagactgaaagccaaggaaattgatctctcagtaacagaaagatttagggagagggtggttgacgaaggatataatccgagttatggggctaggcctctaagaagagctataatgcgacttttggaggacagcatggctgagaagatgcttgctagagagattaaagagggtgactcagttatagttgatgctgactccgatggtaatgtgattgtgctcaacggtagtagtggtgccccagattcattagaagaagctcttcctgtgtaacgtggttgtcttagttagttgagttgtatttttttctctcttttatttgttaaaagaaaacatagcaatagtttgtttaagttgccaatagacatcaagcttttaattgaatgctgatggcctcagccacgtttgcccataacataatgaacacagcaaggtttgggtggaatgaaaaaatgacattatttctgttggtcct

SEQ ID NO: 11251 - DNA, 1874 bp, Glycine max
  Clone ID: 701044954_FLI
tagagagcttgactgttcttattcagttggaatgaggttcaggatgcgttttgaaactgaagatgcggcagatcgaagattcactggattaattgctggaattagtgatgttgatcctgttagatggcccggatcaaaatggagatgcctactggtaaggtgggatgacatagaagctgctaggcacaatagggtttccccatgggaaattgagccatctggttctgcttcaaattccagtaacttgatggcagctggtttgaagaggaacaggattgaaatgacttcagcaaagctggaatttcccaatcccaatgggattcaaacatcagactttggggaatcgttaaggttccggaaggtcttgcaaggtcaagaaattttgggtgttaatactcccccctttgatggtattaatgctcagagtccctggttatacgagttagggaggtgctatcctggttcaaactgttctgggattcctccaacaggaaataacatcagagtgccgcatccggcatctgatttttcctgcaatggcataggctttagtgaatctttccggttccagaaggtcttgcaaggtcaagaaattcttccaagccaaccatatggaagagccttatctattgaggaggctcgagccaatggtcgctatggattttatgatggctgtcagttacttaactccagaaaaggatggtctgcacagagcatgacaatgcttcacatttgcatgcatctgttacacctgcgcaagtgtcatctccatcatctgtgttaatgttccagcaagcagttaatccagtttcaaactgtgattataacattaacaaatgtaataaggaaatggagggtagaatccattatcaaggcttatacacatctgaaatgaaaggtagaacattggcatcttccccatctgacgatcttattgtatctaggcgagctccagagggtgctagttctataggtatgttttgatgttcataatcagttgggtagttcacagttacatgaatcagtgtcagcattgagaagcagtcaaaagttggtttcctcatgtaaaagtagttgcagactctttggtttttcattgactgaggacacacatgttgcaaatgaagaggtatcagcctctaccatcactttaccattgagttctggaccttcgtttactagacttgttgaagatgagttccatcctggccattcgcatccgagtaaggcggttgggaagtaactgcaccaagagtgtattgcagtattgagcttagaatcatgatgtgtgctggctatatgacacactgggaatgagataagctgaagaacgggtccatagtttgctctggttacgtgctttgctataatatctttggatttaagtaaggaggaaaattgttattatttgtgccatatttgttggctgaccaagttgaagtgcttgtgtattaacggtttgctcatgggcaatatgacctgtaaaagatgcatactccgaagtaaaaactatttgctgtaatcttaggcatatttatcctccatttggcacttctaaagttgaatgtatttgttagacgcaagaagttaaaatttcaatggaaaggccatcgacccatcttggaggatctcgaaacactatagcctatagggtggaacgttcttcaactgaactttctcagtgatttcttgacacctgaaagtgggttagtatttcaattgacactggattaagtttcgttttttttctcttaaaaactattcctccccaagtcctaatataatacattgactggccttttaagttttgattgtataaaatgagtgaaacctccagtaatatatagggaaaaatggttaattttattttgggg

SEQ ID NO: 11252 - DNA, 518 bp, Glycine max
  Clone ID: 701044955_FLI
ggaggaatcagagggcaagttgaagggaattcttggttacactgaagatgatgtggtctccactgactttatcggcgatagcagatcaagtatttttgatgcaaaggctggaattgcattgaataagaactttgtgaagcttgtttcttggtacgacaacgagtggggatacagctcacgtgtcattgatcttcttgtattcgttgccaagaagtctctttaaggtgttacttcaaagtagcttgtcttcacattattaccgtatgtttatgtttagctgcgatttagtgtcttgctcgagcaaaaaatgagaggtctgaataaatcggtttctgaaaccagtggtgttacttgttggaggagcattagctcttttttggacttttgatgttttctcttgtggagggggatcgagtttttggatttttatatactcgctgatgtacttggcttgaatacttgctaatgtacttgttattgattgttatagtagatatttgtccgtcctttttttcatt

SEQ ID NO: 11253 - DNA, 760 bp, Glycine max
  Clone ID: 701044964_FLI
gcgagagagagagagagaatggcagcacttggtggcaatcgtgatgtggcaggaagccagaacagccttgagatcgatggtttagctcgctttgctgttgaagaacacaacaaaaaacagaatgcccttttggagtttgaaaaggtagtaagtgcaaaacagcaagtggtttctggtaccttgtacaccatcactttggaggcaaaagatggtgggcaaaagaaggtttatgaagccaaagtttgggagaaggcatggttgaacttcaaggaggtgcaagagttcaagcttgttggagatgcacctgcatagtctagtgcttaattaggtatttgataacattacacagttgcccctgcatgattttcaagtatgaaatgtttcacttatgaacttctttcttgtttttgctattcttaagatggatcaaaaaccgaggttaaaatgaatggggaactaagtggggtagcggagtttaaagaactagaacttgaagtttggatcagttttcgatttacacattgggcattttgtcagtacagtgcttgtgatattaatgattgataatgctcattcattttactatctggtgtataggtttctatataacctgtcaataagttgttgattatcattgctataagtttgcgggaaattcatttttcatttttcctgatgaatcagctttgagggtaacgacagtgatatattgtgatcacgaattttgttaaacattttatgaaattatattattcatttc

SEQ ID NO: 11254 - DNA, 346 bp, Glycine max
  Clone ID: 701045076_FLI
caccagcgtgagaggctgcccagcacgcaaacacgtggagcgtgctgtggacgattccaacatgctcgttgtcacctacgaaggagaacataatcactcgcaaatcgcttctgaggtggcaaatgttatccttgaatcatcttagtcaaccttaagactagtgcatgccaatgctttacttcatttatatgatttcttaattctattggtctttgtctttttttctttctttcttgaagtatttattttaaaattcattgaaatattaaattaattagatacaagagtattggttggtctttgtaagacttattattatatagaaaatgtaaagaaattaaacagc

SEQ ID NO: 11255 - DNA, 980 bp, Glycine max
  Clone ID: 701045116_FLI
ctgcagcttcggtttcctcaagtaggctatagttaggtgaaagagtgatggcagctgcaacatctagtgctgtgttaaatgggtttggatctcacttcttgtgtggaggaaagaggagccatgcccttcttgctgctggcattggaggcaaagttggtgctgttgttagtccttgaagagttattgtggcagttgctgctgcaccaaagaagtcatggatcccagctgtaaaaggtggtgggaatttcattgacccagaatggcttgatggctcgctaccaggtgactacggtttcgacccattaggactaggaaaggacccagcattcctcaaatggtatagagaagctgaactcattcatgggaggtgggcaatggctgcagttgtaggcatctttatagggcaggcttggagtggagttccatggtttgaggctggagctgatcctaatgcaattgctcctttctcctttggttctcttctgggtacccagttactcctaatggggtgggttgagagcaagagatgggtggacttcttcaacccagattctcagtcagtggagtgggccactccatggtcaagaactgctgagaactttggcaactctactggcgaacaaggctaccctggaggaaaattctttgaccctttgggatttgctggcacaatcaaggatggtgtttacattccagataccgacaagctagagagactgaaattgactgagattaagcacgctaggattgctatgttggctatgctgattttctactttgaggctggccagggcaagacaccccttggtgctcttgggttgtaagcaaaataatgtacactagggagataatcattgtcctgtatagccagatttctcccttgagaagtttcaaattttatgctcttatcttgtatgcattcaccttgtatctgcattataaatttataatatcgacacctcatataaatacttgcatct

SEQ ID NO: 11256 - DNA, 1046 bp, Glycine max
  Clone ID: 701045355_FLI
cttccctttctttctttctttaaaggtcttgtgagtgaaggagagtagtgttgttgagaaattaaacgtctgcggaaagcaacaatgtcaggacctgagtgttgctcaaacccaccagttctgaaccccaatgcaggagctggccatgttgaaaaactcgctggtctcaattcctatctctccggttcccctaattccattgccattcttctcatctccgacatttatggctatgaagcaccaaatttgaggaatattgcagacaaggttgcagctgctggttattatgtggttgttcctgacttcttccatggtgatccatataatcctgagaatgctagcaggtctatccctgtttggttaaaagatcatggcacggacaaaggatctgaagctgcaaaatccataattgaagctttgaaaagtaaaggtgtgatggctattggggctgctggattttgttggggggctaaagtcgtggttgaacttgcaaaatccagactaatccaagctgccgtgctattacatccatcgtttgtctctgtggatgatatcaagggtgttgatactccaactgccgtgcttggagctgagattgacaaaatgtctcctccagagcttgtgaaacagtttgaacaagtcctaactgctaaacctggggttgattgttttgttaaaatatttcctaaagtttcacacggttggactgtgagattcaaccctaaagacgcagaaactgtgaaggctgcagcagaggaagcccatcaggacatgctaaactggtttgctaaacatcttaagtgagaaattttgttatgctaagaacataggacttctacgtggattattgtcattttctgcggtggaggatgtaaaacatctaatcattcagtgtagttgtagtttacaagaaaataagtgctgtatttttgcttattgggaatacatcacattactgaaagttttattgtactgctatacctccgtttatattgcagaaagggcattattgaacaatataatattatttcttttcttttattctc

SEQ ID NO: 11257 - DNA, 1529 bp, Glycine max
  Clone ID: 701045367_FLI
tttgggagttaggttctgcacgctctgcttccagcgagtgttctttcttcgtttcaacaccttaatttgcacacgctgcttcttcagcttgagaaatggcacaagaaacctttctattcacatctgaatctgtaaacgagggtcaccccgacaagctgtgcgaccagatctctgatgcagtgctcgatgcgtgccttgaacaggaccctgacagcaaggttgcctgtgagacatgcaccaagaccaacatggtcatggtctttggagagatcacaaccaaggccaacgtagactatgagaagattgtccgtgacacatgccgcgaaattggattcatctctgatgatgttggtcttgatgctgacaaatgcaaggtgttggtcaacattgagcagcagagccctgatatcgcccagggtgtgcacggtcacttcaccaagcgcccagaggaggttggtgctggtgaccagggtcacatgtttggctatgccactgatgaaacccctgagtacatgcccctcagccatgtccttgcaaccaaactcggtgctcgcctcaccgaggttaggaaaaatggtacctgtgcttggctgaggccagatggcaagacacaagtaactgttgagtactacaatgacaatggtgccatggttccagttcgtgtccacactgtcctaatttccacccaacatgatgagactgtgagcaatgaccaaattgctgctgaccttaaagagcatgttatcaagcctgtcattcctgagaagtacctggatgagaagaccatcttccaccttaacccttctggccgttttgtcattggtggccctcatggtgatgctggtctcactggaagaaagatcatcattgatacctatggtgggtggggtgctcatggtggaggtgccttttcagggaaggaccctaccaaggttgacagaagtggtgcctatatcgtgaggcaggctgcaaagagtgttgtggcaaatggccttgccagaaggtgcattgtccaagtttcctatgccattggtgtccctgagcccttgtcagtgtttgtggacacttatggaactgggaagattcctgacaaggagattcttcaaattgtgaaggagaatttcgacttcagacctggaatgatcaccattaacttggaccttaagaggggtggccataggttcctcaagacagctgcttatggacactttggaagggatgaccctgacttcacctgggaagttgtgaagccactcaagtctgagaagcctcaagcttaagattgttgtgaagttaatcactcccttcaatggatgtcttgctaggtgtggatgaataatttgcgtgttccatgactactactacttcattcataggtctaatgtcatctcatcaatacttaaactgtttttttttttccttttctccttttactcacaatttattttttggttatgcaatgttaccgttttgatgcaatggaaattttatcagaattttgtaccaattgattgcattttgagagggtg

SEQ ID NO: 11258 - DNA, 2071 bp, Glycine max
  Clone ID: 701045506_FLI
ctgttttccgctgcttgtttgtgcctgcgtagttacaaagtaaaaagagggaggactaggacaaaagttgttggcagtcatcatgtcgagcgcttcgttgaaggagatgaggaacggtggtgaggattatagcaatggtcatggtggtggtggtgtgagggacttgtatggagaggattgtgccactgaggaccagcttatcactccatggactttctctgtggccagtggatgcagtttactgagagatccacgctacaacaaagggctggcctttaccgagggagagagagatgctcattacttgcgtggccttttgcctccagctatcttcaatcaagaacttcaggaaaagaggttgatgcacaatcttcgccagtatgaggttcctctgcataggtacatggcaatgatggatcttcaggagagaaatgaaaggctgttttacaagcttctgatcaataatgttgaggaactgcttcctgttgtttacactccaacggttggagaagcatgccagaaatacggaagcatttttaggcgtcctcagggtctatatataagtttgaaggagaaaggcaagatccttgaagtactgaaaaactggccagaaaagagtattcaagttattgttgtgactgatggtgagcgcatattaggacttggagatcttggttgccagggaatgggaattcctgttgggaaactttctctttatacagctttaggaggtgtccgcccgtcatcttgcttgccaataaccattgatgttggcacaaacaatgagaagttgctgaatgatgagttctacattgggcttaaacaaaagcgggcaactgggcaggaatatgcagagcttctagaggagttcatgcacgcagttaagcagaactatggggagaaagttctcatacagtttgaggatttcgccaatcataatgcatttgatctgctggaaaaatacagctcatctcatcttgtttttaatgatgatatacagggtacagcatctgtggtattagcaggattgcttgcatccctgaaattagttggtggaaccttagttgaccataccttcttattcctgggtgctggagaggctggaactggtatagctgagctgatagctcttgagatttcaaagcagactaaagctccagtggaagagacccgcaagaagatctggctcgtggactcaaagggacttattgttagctctcgtttggaatcacttcagcagttcaaaaagccttgggcccatgagcatgaacctgttaagagtcttctggatgctgtcaaggcaatcaagccaaccgttttgattggatcatctggagcagggaagacatttactaaggaggtggttgaaaccatggcatccttgaatgagaaaccacttattcttgctctctccaacccaacttcacaatctgagtgcacagctgaagaagcttatacatggagcaagggtaaagcaatctttgctagtggaagcccatttgatcctgttgaatatgaaggaaaactttttgttcctggacaggctaacaatgcttacatatttcctggttttggcttgggtttgatcatctctggtgcaattcgtgtgcgtgatgagatgctcttggcagcctctgaagctttggctgcacaagtatcacaggaaaactatgataagggactgatttaccctccattctcaaacatcagaaagatatcagcccacattgctgctaaagtcgcggctaaggcatatgatcttggtctggcttctcatctgcctcgacctaaggatcttgtcaaatatgcagaaagttgcatgtacagcccaggctaccgaagctaccgttgagttttttgaatattgtgaggtctacaccctacagtgatacacaatgagattcttcttaggagcagatttattttattgcttgttagctttgttgtataaggccaatatgaactttgaaaagttgcttattctttcaaggtttttatttgtattaaggaggaatattattatttatatttaaattccaatttattctgaacgaaatatgatttttgtagt

SEQ ID NO: 11259 - DNA, 1195 bp, Glycine max
  Clone ID: 701045582_FLI
gaaaaattctggggtttagaggagaaaaggggagaaagggtgggtattgcttcacacaaacacaacagtgtctgctgcaccttgcaatggtttcgctatcaacatggtttcgctacattgcccacaagctcgaatactccttctccctcagctggaagaactacaaaggaggtcaaattacagacagagaggtacgtgatgttgtttggaaaaacttctttcaaggaaagctgacgtacttgcactggaataaaggagaggagatggcccctactattgatggaaaagcagtaactcttgttcggaaattaccagttgtagacccaacgcgtgtttttgtaggagatgttgtggttgtgaaggaccctgagaagccagataactacctactcagaagattaactgcagttgaaggctatgaaatggtttctactgatgaaaaggatgaagcctttgttctcgagaaggatcaatgctgggtagtggctgaaaatgaaaaattgaaagccaaggaagcgaaggatagccgaacatttggtccagttcagatgacagacattgtaggcagagtcatatattgcctgcgaagtgctgtagaccatggccgggtacaaaacagttatttcggcatgcgaaaggatacaccagtgctggaagtggaacttgatgttgatgagatggcaaagagtcacaaagcctgaaacatttgtcccgagaaacactaactagtttgctttacgcatgccttagtttcttcttgtggattttccttgaagcacagattgaataataaaaaatatgatttttaaattgttgcaatgggatgatggtgttatgtggatgtcctctgcatgctaggcaattggctagctcttcccaagcagaaattggaagcggtctgtgttaaagcttgagttcgacattattgtatgctaagttctagcaaggactcctctgccctttgttctattcatatttggctgtaaaattgaccgagttttggtcatttttgttaatagtcgaggatgatagaaaaaaaggctgcattgttagaaataatagtttcagatattttcattttatgaagacctagtgcctcgactgagtgttcacttcttgccaatttgtctttctagggaacaatcgttgatatctgttctctttagtcagttgagtgaaaaagaacgtttaagtg

SEQ ID NO: 11260 - DNA, 1006 bp, Glycine max
  Clone ID: 701045693_FLI
gcttcctactcctccctttcaccacttttctgctcccccttgagaaagaatttgaatcatcaaaattaaaaactcgcaccaacaatggccccaagagacagccgagccaccgcgttcgccggaccaggcccaggcccatcaccggcccacaaagagatccgctaccgaggcgtccggaaacgcccctggggccgctacgccgccgagatccgcgaccccggcaagaaaacgcgcgtctggctcggcaccttcgacacagccgaggaagccgctcgagcgtacgacaccgcagcgcgtgagtttcgcggtgccaaggccaagaccaattttccgacaccctcggaactcatccttaacaacaacattcgcagtcccagccagagcagcaccctcgactcttcctctcccccgtcaccgccaccgccgcttgaccttaccctaacccctctctccgtggccgtcaccgtcttcccggtggctcgtccggttctattctttgacgcgttcgcgcgtgcggacgccatgatcgccgtctcccgccgcgagatgtgtggctttgaacgccccgccgctgatttccgccgtaacgactccgattccgattacaaccgccgcgtgctccttgatcttgacctgaacgtgcctcctctcccggaggttgcctgattcatgcagggagatctggttttccgcaatttttttcgtactacttttttaagcatctgggaacactactacgcatttttttgtgacgaaattgccctcgagaaattatagtgttacggagagggagcagcagctaagtgtgagtagtggatgacatgatgctcggaattgttgttgaccattttgtgatgaagatataatcggcacgttatgtaaatacacgttataaccgaaaagcaaacgcgctttttcttgcttttttttgcaactgagaacttaacagagtatctcatggttgtttctgtaatttctcaaatatataaatatttccatttccatc

SEQ ID NO: 11261 - DNA, 837 bp, Glycine max
  Clone ID: 701045760_FLI
ggcatcatcgtttcctccatggtttgcttaaatccagtccaatcttaataatattattttcctagttattgaattgaatcgcattcgcaggagaacgggactcgccccgaattccaattggcctccgacggtgttcatcaagcacaactcgctgcacaatcattccaaaaggaactagaggctaataatatcccgcttgctaatgtacgcatttgctactcccccttttcaagaacaacccataccgctaacgttgtttcaactctcttgaatctcccttttgatggaccccactgtaaggtcatccaagatcttcgagaacgctattttggtccttcttttgaactcctttcgcatgataaataccaagtgatttgggatatagatgaaaaagatccatttcttgggccagaaggaggggaaagtgtcaaggatgttgcttgtcgacttgcaactgcaatggccactatggaatcagaatttcaaggatgtgcagttttggttgtcagccatggagatcccttgcaaatcttgcaaacaattctgcatgcagctaatgaacacaaggaacccacatataatgacttagcatcaatactgactgcagttcaggtggcaccaatcttgtcccagcaccgcaaacatgcgctgcttactggagagctcagggcagtcatttgagatgtcagacccctatatatggtttcatttcaaaatacaaaacacctccccagtcatttttttaggaacagggatctaaattcgttttgctccctattccatttattactttatagattatttagcaaataaaatttcaatcacgaataacatggc

SEQ ID NO: 11262 - DNA, 609 bp, Glycine max
  Clone ID: 701045770_FLI
catttggtgagaacatggtgatgtctgagctagtggagtgctgcaaggagttggatgaagtgcatcatgctttggccgggcataagaaggaggcagcatggcggttaagcagggtggagctgcagttggagtctgagaaggccgggcgaaggagggagaagatggaggaaatcgaagcgaaaatcaaagctctgagggaggagcaaacggctgcattggatagaattgaagcagaatatagggagcagttggcagggctgagaagagatgctgaaagcaaggagcaaaagttggctgaacaatgggctgcaaaacacttgcgacttactaagtttctagaacaggtagggtgcagatcaaggctcactgaaccaaatggaagatagagtgacatcaatcattcacaaattgggaaaatctagtttgcttttacttattattatgtcttgaatttatatgatatgaactttatagtcatagtagttttgttcctgtcatttttctaaaatatgttgttacatatggttattgatatcatccctatcttttcatacaacttgaggacttgcattagcggttgagttatgtttaaatataacatcctttatg

SEQ ID NO: 11263 - DNA, 628 bp, Glycine max
  Clone ID: 701045904_FLI
gagcgatatcttcgactgtgggaagcttctttttctgatcttttacgtgtcaatataaattcccttcaaagaaataagctttccactctttttcaatcaatcaccaatggctccttctttcacttacgtcaaaatcttctcttctctcgtcgcagacggattctccaacgctctcaccagacgcgggtacgctgttgcatcacaaagtgcaacaaagggaggagtggcctcaatgagcggcaagatggcaccaaagtcaggggaagataacaaaggggtgtctacgtacaaggtttcgtgggtgccagatccagtcactggttattacaaacccgaaaacatcaatgagattgaccctgcggaattgcgcgctatgcttctcggcaaaaaattcaacaactaatgaaatattgattccacggaatattgattccgatatgctctgttttctacttcatgaagagaagaccttgattcgcgtttgggggggttttccttgtccatttatttgctttagttagttttagaagtcagtagaatgaccaccattagcagctgatcgattgtaatgtcttctaattctaatgttattgaatattgattatatcaagtttcatatttttcaaat

SEQ ID NO: 11264 - DNA, 2755 bp, Glycine max
  Clone ID: 701045907_FLI
atcaatcttctgagagtgtttggttgaaagtagcaaagatgtttcctttcgggcaaaagggtcaaaagataaaggggactatggtggttatgcagaagaatgtgttggatatcaacagcatcaccagtgttggagggatcgttgaccaaggcttaggcttcataggcagtgcagtcgatgcacttacttttgcagccaccaaaatctccatccagttgattagtgctaccaaggctgatggtgggaaaggaaaaattggaaagagtacaaatttaagaggaaagataacattaccaaccttgggagctggcgaacaagcatacgatgttaattttgaatgggacagtgacttcggaattcccggtgcattttatattaagaacttcatgcaaaatgagttctacctcaagtctctaattctcgaagacattccaaaccacggaaccattcacttcgtatgcaactcctgggtttacaattcaaaaaactacaagactgatcgcattttctttgccaacaatacatatcttccaagcgagacaccagctccacttttgaagtacagagaagaagaattgaagaatgtaagaggggatggaactggagagcgcaaggaatgggataggatctatgattatgatgtctacaatgacttgggcaacccggatagcggtgataaatatgcacgccccgttcttggtggttcagccttaccttaccctcgcagaggaagaaccggaagaggaaaaactagaaaagatcccaacagtgagaagccgagcgattttgtttaccttccaagagatgaagcatttggtcacttgaagtcatcagattttctcgcttatggaatcaaatctgtatcccaagatgtcttgcctgtcttgactgatgcattcgatggaaatattttgagccttgagtttgataattttgctgaagtgcacaaactctatgaaggtggagttacactacctacaaactttcttagcaagatcgcccctataccagtgatcaaggaaatttttcgaactgatggcgaacagttcctcaagtatccaccacctaaagtgatgcaggtggataagtctgcatggatgactgatgaagaatttgcaagagaaacgattgctggtttaaatccaaatgtcattaagattatagaggagttcccactaagtagcaagctagatactcaagcctatggtgatcatacctgtataatagcaaaagaacatttggagcctaacttaggtgggctcactgttgagcaggctatccaaaacaagaagttgttcatcttagatcaccatgactatctcattccttatttgaggaaaataaatgcaaataccacaaagacttatgctacaagaaccatatttttcttgaaagatgatggaactttgacaccattggccattgagttaagtaagccacatcctcagggtgaagaatatggtcctgttagcgaagtctacgtgcctgccagcgaaggagtggaagcttatatttggttactggcaaaggcttatgttgttgtgaatgatgcatgctaccatcaaatcattagccattggctaagcactcatgcaattgttgagccatttgtcatagcaacaaacaggcaactgagtgtggttcaccctatttacaaacttctgtttcctcactaccgtgacaccatgaatattaattcacttgcccggaaagccctggtcaatgcagatggtattatagagaaaacattcttgtggggtaggtactctatggaaatgtccgctgtcatttacaaggactgggttttcactgatcaagcattacctaatgatcttgtaaagagaggagttgctgttaaggacccatctgctccccatggagttcgtcttttgattgaggactatccttatgcttctgatgggctagagatatgggatgccatcaagtcctgggtgcaagaatatgtctcattctactacaagtcagatgaggaactccaaaaagaccctgaactccaagcttggtggaaagaacttgtagaggtgggtcatggtgatttgaaagataagccatggtggcaaaagatgcaaactcgtgaagagttggttgaagcttccgctatcctcatatggattgcttcagcccttcatgctgctgttaactttggacagtatccatatggaggtttaatcctaaacaggccaactattagcaggagattcatgcctgaaaaggggtctcctgaatatgatgcgttggctaagaaccctgagaaggagtttttgaagactattactggcaagaaggagaccctcattgaccttacagttatagaaatcttgtcaaggcacgcatctgatgagttctaccttgggcagagagatggtggtgactactggacttctgatgccggtccattagaggcatttaagaggtttggaaagaagcttgaagagattgaaaagaagcttatagagaagaacaaagatgagacattgagaaaccgctatgggccagctaaaatgccttacactctgctctatccttctagtgaggagggattgactttcagaggaattcccaacagtatctctatctaaggaccctatggttgcttaagtactgttcctggttttaaataaatgtgaaattgaaggaaccagattccttaatcagttgtgtatgcttaagtcatgtatttggagtggctgaatgtatttgtatttgtcattaataaagagagttgtgttagtat

SEQ ID NO: 11265 - DNA, 933 bp, Glycine max
  Clone ID: 701045922_FLI
tggacacaagaaaggagcgagatagcgaggaaatttggttcttacttcttacccgcagacagaggaaggaagggaaatagatggaagctgtgtgtggaagtggaagcagtgtttgggtcacatcctcccttacatgctcacccaagatcacactccctctattccgcgccagttaccagcacctaacagcatttccttcacaatcccttcttttctcctatcacccttctcgctatgctaatgctagaaccctccgcgccagaacctcctccaaacccattttccttccccacttaattgcttctctggaacaagttgaccagacttacattatggtgaagcccgacggcgtccaacgtggcctcgtgggagaaattatttctaggtttgagaagaaggggtttaagttaactggcttgaagctcttccagtgctcaaaggaattggccgaggagcattacaaggacctaaaacaaaagtcatttttccctaagctgattgactatattacttcaggtcctgttgtgtgtatggcttgggagggtgttggagtagtggcatcggcacgcaagcttataggggctacagatcctcttcaagctgaaccaggcacaataagaggagaccttgctgttcaaacaggaaggaatgttgttcatggcagtgacagccctgagaatggcaagcgtgaaatagctctatggttcaaggaaggcgaagtatgcgattgaccccagtccaatcaccatggctgagagaataataaaccacagatgcccaattagaatgattcttgccgtttctaggttcaataactgcattaatcgagtttaaacagtaactcaaattttgtaaaattttgctttttgactcggattctccaagcctattcctggcattacattttctgtttctatcagatttgaatgggtc

SEQ ID NO: 11266 - DNA, 1076 bp, Glycine max
  Clone ID: 701045948_FLI
gttttagaagctaaagctaagcaagctgctgagaaggaaaagagaaaaactgaaaaggatctggaggatgagaatggtggggcgggtgtatactcaatgaacttgaggaagaattacattttagccgatgatgaatggaaagaggatgtgctgccagaaattttggatggacacaatgtgtatgatttcattgatcctgatattctgcatagggttgaagagttggaaagagaagaagggatgagacaggaagaagctgaggatgatgattttgagattgatggaactgaattgacacccgagcagcaagcagctttagctgagatcaggaaaaagaaaagcttgctcatccagcagcataggatcaaaaagagcaatgcagagaatcggccaactgttccaaggaagtttgataaggacaagcagttcacatcagaaagaatgggaaggcaactgtcatctttggggcttgatcccagtttggcaattaagagaatgcacagcagatctgtctctagaggtcggaaaagggatagatcgcctgaaacaagaagtgctgatggtatggatactgatggtgacacacctagcaaaaaacagcgtctgagtagatcactgtcacggtccaggtcagtgtcacgcccaccacatgaagttgtgcctggagaaggcttcaaggattctgctcaaaaggtcaaggcaatcaaacttgcaaagaaatctgtcaagaagagaaacaaggatgcccgtcgtggagaagctgatagagtcatacctaatctgaagcccaagcacttgttttctgggaagcgttccaatggaaaaactgagagacgctaggacaggggatgctgtttaatgcattttagaggacacctgttggcatttttcagggctgccaaaaaaaattgttatttaatgtaagtgttttgttggagtttaaggttctgtgctggcaacatagtttacttatacatctctgcattttattattgttatcaaacttgtcattctataagttgcaactttacagctttctttgaatcaaggaagctgctgtttgaattttttgaccc

SEQ ID NO: 11267 - DNA, 1074 bp, Glycine max
  Clone ID: 701046215_FLI
gaaaggcagagttttactgatgaaatagagaagcttaaacacgataaagagcaactcctcgtggaattacagaaatatcagcatgagtggcaggcatatgagatacaaatgcattcctcaaaagatcggttggaaaagttggaacagaatcaacaaaagatggtttcttctgtttctcatgtattgcagaaacctgtgatttctgtaaatatcttgcctcttacagaaaccatggatagaaagcgaaggttgccgagaagtggccacttttatgatgaagctagcgttgaagatgctatggaaacttcccaaatgttaccaagagaaaatgcagacaataccactgtcttgacgttaaatgtggagcgactggatcagcttgaatcatccatggcattttgggaggctattgtacatgatattggtgacaccttcgtccaaattcagtcaaacatggattttgatgaatctacaagttgtgctgatagtccatctatatcttgtgcacaattagatgttgaagttcggcctaagtcacctggaattgacatgaactctgagccaactacagctgctgttcctgagcctgttgcatcaaaagaacaacctgcgggaaccactgttgcagcaactggtgttaatgatgtattctgggagcagttcttgactgaggatcctggtgcatcagaaacacaggaagtgcagtcagaaagaaaggaatatgatggcagaaagaatgaaggaaaacccagcgaccttaacaaattttggtggaacaaatggaatgcaaataatcttccagaacagatggggcatgttggtcaagcagagaaaacatagtggcaattgattattcttcttgcttgtactgttctacaatcacatgtaataaatataggtatgcacagttttctgatttttctctacaatagatacatattccatattttgggtgggatgaatgtttcatccttcattgattcattagttaagtatgccgctcttttgtctcttctagttctattatgccttgtacagaacggtcgtttggttcaagcttttaaattatagacc

SEQ ID NO: 11268 - DNA, 1399 bp, Glycine max
  Clone ID: 701046270_FLI
cttgaaactcagaccaactgacacacagagaaagagagagagagagagagagagagaagcatagcagacatgggaagagctccttgctgtgacaaagccaacgtgaagaaaggtccatggtcacctgaagaagatgccaaactcaagtcttatattgagcagcatggcactggtggaaactggattgccttgccccagaaaataggccttaagaggtgtgggaaaagctgtcgtcttagatggctgaattatcttcgcccaaacatcaaacatgggggtttctcagaagaagaagacaacatcatctgcagcctctatgttagtattggaagcaggtggtcaattatagcagcacagttacccgggcgcacagacaatgatataaagaactattggaacactaggctgaagaagaagctccttggcaaacaaaggaaggagcaacaggctcaagctcgccgagtcagcaacaaccagcagaagcaagatgtcaaaagagaaaccgagaatttgatagtggcttctgaagtcatgatcaatcaagttccctattggtcttcttcagagttttcttctgtgcctatgccagtgaccaatgcttcttcatttcaacactatggtctgaacaatcaaacatctctcaggagcatgatggttaacaaactagagggaattacattttcacaacgatcatcatcagcagccacagcaaccatacaccaatggatgtgaaattccctacctacaagaccaggtttttccaaccatggtaaatcatgtaaccgtggtgagtaatgaaaacaatagtgtcacctatcagccatcaaatatatttcaagggtttgaaaacttcccaagtgatttttgtgaactggtctgtgtcaacccgcaacaaatggagggttttaattatggaatggaatcaatggacatgagtatgagcaatggtggtagcacgaacacgacttcaacagaaagcactagttggggtgaaatgagttccttggtttattctcctttggttgctgactatgaaggttgccgacaaggaataattgctcaagatcatgttgttgctttcgaagagtgtaagtactttggaatgcagatgcaataacggctctgaatacgaggtgtgtacatgtaaatttgtgccgctaaaaaaaattggtactggctaaaaccctaatgagttcactttgcctcacataattatttgttggttttgtagtttcttgtttcattcaaactgtgcaagtttctgccatatgtgttgatacatattgagcacaactcttttgttttgggtttcttaacgattatgtttatagtcttatatgtatggatgctacagaaggaagaatcttaattagtaatagtgcgaggcccttgaattcct

SEQ ID NO: 11269 - DNA, 1772 bp, Glycine max
  Clone ID: 701046292_FLI
ataagaacctacacaaagcagctactacttggactcgagtacttgcacaaaaatggaatcatgcacagagacattaagggggccaatattcttgtagataataaaggatgcataaaacttgcagactttggggcatccaaacaagtcgttgagctggcaaccatttctggtgccaagtccatgaagggtactccatattggatggctccagaagttattctccagactgggcatagcttctctgctgacatatggagtgtgggttgtactgtgattgagatggccactggaaagcctccctggagtcagcaataccaacaagaggttgctgctctcttccatatagggacaactaagtctcatccgccaattcctgatcatctctcagctgcagcaaaagatcttctgctaaaatgtttgcagaaggaaccaattttgaggtcatcggcatcagaactgctgcagcatccctttgttactggtgaacatatgaattctcttcctctgtcatctaatgtcacggaaaactttgaagcttcttcaccatcatgtgccccaaatgatgatgaatccttccttttccgttcaactgtaaatcctctggactcgggaaataaacagtcgtggggaatgagcaatgatgatgatatgtgtgtgattgatgacaaagaagatttctcgcagagtgattccaaatacaaatcatttatgtcaactaataatattgagagtttcaacccaatgtctgatccctctgatgattgggggtacaaatttgatgcaagtccagaactggaaaatagaggggttagttttggcactgatgtaagttacatgccacctgatcagtcaggggatgatgataaggggcagaaagatttctcctttccaggtgtgccatctctgtcagaggaagacgatgaactcacagagtcaaaaattaaagcttttttggatgagaaggctcttgaactgaaaaaattgcagacacctttatatgaagagttttacaacagtttaaatacatcttgttctcccaatgtgattgagagcactagtgaggatactgcttgtcgaaaatatttgaaattacctcctaaaagcaggtcaccaagttgggtaccaattagcactccatctaaagccgttgataattctgaaagtcctggaagtaatggccggtcatcatcaactgttggccatgtaaataaccatagtccacaggatattccagcatctccccttaatgaatggaaaggactgacagttgactctcagcagcagcccagtagcccaagtctaagcttttctgagagacagaggaagtggaaagaagagctcgaccaggagcttgagagaaagcgagaaatgatgcggcaagctggcatgggcggaaagacatcttcaccaaaggatcgagctttaaatcgacagagggagaggacaagatttgcttctcccagcaaatagagactcgttagagcattcattctgctttaactactgggattgcaaacatgtcttactgcagttttgttggggttgttaatgttatatattcatccaatttggccgttttgccatatgaaaaatctcacatgctttatcttgtccgtgttgttgtgccatgtaaagcgtttttatacgtgtgttgcttgaaatttttttactttcctttggggttttgagagatgcatggccgtcaactttatgccctttctgtattatgaaaatagaaataatcagaactatgtggcgcaagattgcctaag

SEQ ID NO: 11270 - DNA, 1926 bp, Glycine max
  Clone ID: 701046458_FLI
gttggaaagagccatttaattacttttttcagtactgagtggacattggcaccaaacaagcatggatacaatcaagtccttcaagggctacggcaaagtagacgagttggagcagcaagcctatcagaagaagacacgtaagcgcctcataatcatcgcagtctcttccatcgttctatttgcggtgatcatcgccgcggtcgcaggggttgtgatacacaagcgcaacacctcatcatcgccctcctctgactcgcccccgcaaactgagttaaccccggccgcgtcactcaaagcggtttgccacgtgactcagtaccctaactcgtgcttctccgcaatctcctcgttaccggaatccaacaccactgatccggagctcctcttcaagctctctctccgcgtcgccattgacgagctctcgaagctctcgagctttccttcgaagctccgcgccaatgcggaacacgacgcgcgtctccagaaggcgatcgatgtctgcgggaacgtcttcggcgacgcgctggaacagctcaacgactcgatctccgcgctcggaagcggcgccgctgaggccggaaagattatctctccggcgagtgttggcgacgtggagacgtggatcagcgccgcgctcacggaccaggacacgtgcctcgacgcgctcgccgagctgaactccaccgcctcgcgcggcgcgctgcgcgagatcgaaaccgcgatgaggaactccacggagttcgcgagcaatagtttggccattgtcacgaagatcctagggttgctttcgaagttcgattcaccgattcaccaccggcggctgctagggtttccggagtggctcggcgcggcggagcggaggctgcttcaggtgaacagcagcgaaacgacgccggacgctgtggtggcgagtgacggtagcggacagttcaggacgatcggtgaggcgctgagattggtgaagaagaagagcgagaagaggttcgtggtgcacgtgaaggaagggcgttacgttgagaacatcgatttggataagaatacgtggaatgtgtttatcttcggtgacggcaaggagaaaaccgtcgtcgttggtagccggaacttcatggacggcacgccgactttcgaaaccgccaccttcgctgtgaaaggcaagggattcattgccaaagacataggattcgtgaacaatgcaggtgcatctaagcaccaggctgtggcattgagatctggctcggatcgttctgtgttctttagatgctcatttgatggcttccaagataccctctatgcccattccaaccgccagttctaccgtgactgtgacattacaggcaccatagacttcatattcggcaatgcagctgctgtgttccaaaactgcaaaataatgcctagacagcctctaccaaaccagttcaacaccatcacagctcagggcaagaaggaccccaaccagaacaccggaatcataatccagaaatcaaaattcattccccttggaaacaatctcacagctcccacataccttggtaggccatggaaagatttctccaccactgtgatcatgcaatctgatattgggtcattcttgaagccagtggggtggattagttgggtctccaatgtggaacctgtaagtacaatcttctatgctgaataccaaaatactgggcctggagctgacgtgtcccagagggtcaaatgggctggttataagcccactctcacggacgtggaggcagacaagttcactgtgcagtcctttatccaaggccctgagtggttgccaaatgctgctgtggagtttgattccaccttgtgattttaacactatagaaagatatcaactgctaatcatattttacatgtctttaatcacactcttgtaacatgtattacactctacacgcatttttttgacct

SEQ ID NO: 11271 - DNA, 1415 bp, Glycine max
  Clone ID: 701046638_FLI
aacacaaagaagagtgacccttcttcttgttattccacttgcgttagttgttgtgggattcaggtattggtgtgattgtttgtaccatccggtggtggagcttgttggaaattggagatgagtcagaggggtttaatatatagctttgttgccaaaggaactgttgttttagcagagcacacgcaatataccgggaatttcagtaccattgccgttcagtgcctgcagaagctgccatcaaatagcagcaaatacacgtattcctgtgatggtcacaccttcaatttcctcctagacaatggatttgttttccttgttgttgctgatgaatcgattggcaggagtgttccttttgtatttcttgaacgggtgaaggatgactttatgaagcgctatggtgctagcattaagaatgacggtgcccatccacttgccgatgatgaggacgatgacgatttgtttgaggacagatttagcattgcatataatctcttctccaagatggacgtatacgccgccgtttcgctctccggtgaccctctccaccctcagggcgccaccacccacgtccacaaagacgccggcagcaaccccacgtggaactaccccgtgaaattctctgtcaacgaatcgctggcgaaggaaaatcgtttatctcttgagatcaagctcatctccgaccgcaccctcggcgacaccgtcatcggcaccgtccatgttcctctcagggaactcctggataaccccggcgatgacagctccttccgccaagtcagttatcaggtgatgaagcaatcaagaaaatccaagggatccttgaatttctcctacaaattcggcgaacatgttcccgccccggccgccaagacacccaaagcggccaaggcgggacaagagcctgtgatggcttatcctcctgctggggcgggatccagttcgatgccctatggtacgccacaccctcccccgccgcagcaatatgcggcgacgggatatgggtatccacctcagcaggtgcatggtggatacccacctcaagcagcatatgggtacccacctcagaccggttatggatacccacaacagtcgggttatggatatccacaacaatccggatatgggtacccacctcaggctcagaaaccaaagaagaacaaatttggaatgggattgggagcaggattgcttggtggtgccttgggtggaatgttgatcggagacatggtatctgatgctgctgaatatgatgcgggctatgatgctggctttgatgatgctggtggatttgatttttaattttcagtttttcaattaaccctgtatttttttttttcttttatatttctggatttcactttttgcctttttcggttgcgtaatgatgttctatgagattgcttattagtatttgtttc

SEQ ID NO: 11272 - DNA, 988 bp, Glycine max
  Clone ID: 701046646_FLI
gatttttggcatgctgtttggccaaacactcccattccaagttcattgcgagatcttctaaagcctggccctgcaagtgttgaaatcgatgatcaccctatgcaaattgaagaaacacagtacccgaaaaccttcttctataaagaagaccttcatccaggcaaaacaatgaaagtacaattcagcaagcctccctttcaacaaccatggggtgttggtacatggttaaaggaaattaaagacactactaaagaaggatatagttttgaagagctatgcatcaagaaagaagccattgagggagaagagaagttttgtgcaaaatccttgggaacagtaattggttttgccatttcaaagctgggaaagaacattcaagtactttcaagttcctttgtcaataagcaagaccaatacactgtggaaggagtgcagaatcttggagacaaagcagtgatgtgtcataggctaaatttcagaactgcagtattttactgccatgaagtccgtgaaacaacagctttcatggttccattggtggctggtgatggaaccaaaactcaggcacttgctatttgccactcaaatacttctggaatgaatcatcaaatgcttcatcaacttatgggagttgatcctggaactaaccctgtttgccatttccttggaagcaaggccattttatgggtacccaatttatctgtggacactgcctatcagaccaacattgttgcttaattagtccatgcatcttgagcaccatgagaatgagattgtgtataaaataaattatcatgtgctgtgtgttgtgcaagtactaccttctctagctagattgctagagctagaatttcaacctacctatgtgtactgataagatctgcttccctacttaaagagagcatcatcctgtgatcagtgtgcttcgtattctctctctctatatatatatggtaaaaagtggttatctcgtgcctcgccttgagct

SEQ ID NO: 11273 - DNA, 806 bp, Glycine max
  Clone ID: 701046730_FLI
attttaggtcggtaaagctggtggtgacaaatggaaatcgctgtctgatgctgtgagtattaagattttgagaattcttttttcattattagtttttgcgtatggttctatatgatttaatttattgaccatatctacttatttgtaacctagtttgcgttcatttaatgtttcaggaaaaggcccccttcgttgccacggccgaaaagaagaaacaagagtatgagaaaactattttggcttacaataagaaattggtgaatactttttaccctatactacttactcttattttatagtataatgtaatgtaatgcaataattgattgagcttgttattttgatgtgttaggaggggaagaattcagaggaagacgagtctgacaagtcaaagtctgaagtcaatgacgatgaggaagatgaggtagatggagattaacctgttattatgatttgtgtcttgtttaactagtttgttcctttgtataactaattgtataattaatgtgttgtttgctgtttattctgtaggaggaggaggatgatgatgacgacgagtgaagatggtgatacaagatgaagcgtaggaggatgtgggaaaagaaaattgttttgcatagtagttgttgggtttagaatttcataggatggttcccaacccacatccctttatgataattagtttctgaatttttattttgtcctcccttactagggttagattagcgcacaatcgtaattagggttcagtatcatgatcatgtacttaaaagtcaatgctatgatacgtttcaattctattctcg

SEQ ID NO: 11274 - DNA, 795 bp, Glycine max
  Clone ID: 701046755_FLI
gttactacaaatgcgtagccccgggttgtccagtgagaaaacatgttgagagagcttcacatgacatgaaagctgtgattacgacttatgaagggaaacatatccatgatgtaccattaggacgaggaaactcaagctatagcatgaacagaaattctctaaacaacacctccaacaacaccaacaccagcaatgtaacagctcctgctcctataaggccctcagcactgactaactattctaactcagcaagtttcacaaactcacttcatgacacaaagcaaccaacatctgcaggtcaagaaccttttccaatggacttgctgctgagccctggaagcatcggattttcggctaatgactcattccttcagtcttttttgtcaaagaacttttaaatttggaagcagaagaacactagaacgttacacataaaaatatcactgatatgtttatgtatagcataggggaatagaataagaaaatcatgagcatctactaattttagtgcactaagattagagactagaactacagcattctaaagcttgacaagagttagtccttgtttcaactttcaatttagaacaccagaacgttacaataaaaatatcactgatatgtttatgtatagcatataggaatagaataagaaaatcatgagcatctactaattttagtgtactaagattagagactagaactacagcattctaaagcttcacaagagttgggcattgtttcaactttcaatttagtaataggagagacagaaaacatgttgaccttgaattc

SEQ ID NO: 11275 - DNA, 1298 bp, Glycine max
  Clone ID: 701046813_FLI
acctcttcttcttactctcttacgttaattcttcgttgtctatgatggcattggatatgattgatgttgttcccaggacgaggatggaagaagaaaatatagcaatacaagaagcagcttccgctgggttaaagagcatggagcatctcattcgtctcctttctccttcttcttctcttcacaacaaccttaataatctcaatctcaaccacctcgactgctccgaaatcaccggcttcactgtctccaagttcaaacaagtcatcaaccttctcaaccgcaccggccacgcccgcttccgccgctctccaccccaagcccaagcccaagcccaaactaatcctcaaccacaacctcagatccaacaacaagggttcagtttagatttcgtgaagcccaccattctaaactcaaagcccatcaacaaagacgaaactttgactctttcaacaacctcttcttccttcatgtcctccgtcaccaacgacgccagcgtctccgacggcaagatcggacctttcctccctccctccgccgccaaaccccctctctcctccgcccaccggaaaaagtgccgcgacgccgccgcagcactctccgccaaaccctcctgccactgctccaagaaaaggaaatcacgcgtgaaacgaacgattcgggtgccggcgataagctcaaagatcgcagatatcccaccggacgagtattcgtggagaaaatacggtcaaaaaccgatcaagggctcaccttaccctcgagggtactacaagtgcagcaccgtgagagggtgtccggcgaggaagcacgtggagcgagcgcaggatgaccccaagatgctaatagtgacttacgagggtgagcaccgtcacgtgctgccgttaacttccgctgccggcgttagtttcggccattgagttaatcgacggcgtcttttggaaacttggcgggggacgttaaatgagcgtcggatcgtgaagtaacggcggatgcgaacaaggatcgattcggttcgaggacggaaaaagaaaagtggcaactaaagtcaactttcgcgttgtggaatgattttgttgacgaggacttttgtgtaaatttgaccccaagtaaagtagtgcaggtctcaaagaatgaaaattatagtgatctcatctgtttttctttatttctatttttttttaaaaagagacatttatttatttatttatttgatgttagagttgaattggttgaaggatggggctgcaataattttcttggtagaagaataaaaaaatattaatattgggagatctaagttg

SEQ ID NO: 11276 - DNA, 594 bp, Glycine max
  Clone ID: 701046815_FLI
ctccctccatggaactacaatcttgtggggcttgctcaaagctattgaccgagagatcaacatggagcaaccagaagtttattgccaacagtgtcctctcagttgttgctgtactagtctgtggtcattcatatcatgcagaatgtttagaggctatgacatcagaggcagataggtatgatccagcatgtccaatttgtatggttggagataagaacttgtcaaagttgttgtccagaaaaggtcttcgggctgaatcagagatgaaggccaagaaccacaagatatccagaaaccgtgtagttgatagctaccttgatggtggttttgatgtttttgatcgtcaaaaagatatagatttgagaggaaaagtgtcaaaaatggaacctagctgcagtgcaaggagctcatttggaaagcctttcttgaggagacacttttcacttggatcaaagtggagccgatccctgtccgagaatgattctgccaggaagaaaggcttttgggcaagatatcgttaagatttagttccatttgctgtaagagtcaatcattctctaattatagttgtaataacaccatcaatttagaatg

SEQ ID NO: 11277 - DNA, 822 bp, Glycine max
  Clone ID: 701046951_FLI
ctttctctctctctctcttaattcctgaaaagcaagtagctaaggaaaacaaaaacatcatcacagaaactcacaaaggaaaaacaaacaaacaaacaaaatgtcttctccaagcaagcggcgagaaatggacttgatgaaactgatgatgagtgactacaaggtggagatgattaatgatggaatgcaagagttttatgtgcacttccatggacccaatgagagtccttatcatggaggtgtatggaaagtaagagttgagctgccagatgcttatccttataaatctccttccataggctttatcaataagatctatcacccaaatgttgatgagatgtcaggatcagtttgtcttgatgttatcaatcaaacctggagtcccatgtttgatcttgtcaatgtgtttgaggtgtttctaccacaacttcttctgtatcccaatccatcagaccccttgaacggagaagctgcagctttaatgatgcgtgatcgagccacttatgaacaaagggttaaagagtactgtgagaagtatgctaaacctgaagacataggagctgccacagaagagaactccagtgatgaagagctaagtgaagatgaatatgattctagtgatgaacaggttgctggtaaggcagacccctagccttgcatgcatgttcctgttcttctcattctatcttaacttgtgcatgatgttctagtcatgttaatttacctcattaaatgaaatgtacttggttgtggataggggaaaattctccttcctgttatttagtttaccctgtaaataatgtatcattgatttcctgatgc

SEQ ID NO: 11278 - DNA, 1640 bp, Glycine max
  Clone ID: 701046954_FLI
gaatttcagttatggccttttgctgtcttttgttttttattcttttgaaatttggatattttttcagggtattggagtggttaaacaaccgatggaaggttcaaagcctcctcctcctcctcctcctcctatgttggagagaagggcaaggcctcaaaaggatcaagctttgaactgcccaaggtgcaattcaacaaacaccaaattctgctactacaacaactatagcctctctcagccaaggtacttttgcaagacatgtagaaggtattggactgagggtggttctctcagaaatgttcctgtgggtggtggctctagaaagaacaagagatcaaccccgccagcaccaccatcagcaccagcaccaacaaagaagctttctgatctcgcaacaccaaatttccctcaatctgcttctcaggaccctaagatccaacaaggccaagaccttaacctagcatatccaccagctgaggactacagcactgtctccaagttcattgaggttccttacagcactgaattagacaagggtactactggtcttcatcaaaaccctacttcctcatcaacaacaacatctgcatcttctcagttgtctgccatggagcttctcaagactgggattgcagctgcttcctcaaggggtttgaactccttcatgccaatgtataattcaacccatgggtttcccttgcaggactttaagccaccacatggccttaacttcagccttgaggggtttgaaaatggttatgggggtcttcaggggattcaagagggtcccactggtggtgcaaggatcttgtttcctactgtggaggatttgaagcagcaagttccaagcacaaatgagtttgatcagcagaatagaagtcaagagggttcagctcacgggtattggaatggcatgttaggtggaggatcatggtagatattattagtgaagaaaaaagagaacaaggggttgctgttttagcctttatttttattttattttcttaatggggggagtgtggttgtgtttggagtgtgtgatctgaaccactaacaaaaaataggatacattgcttcttctgttttgcttctctttaatccatttcattttttttggtcttcttttcctttccttagtagtcccactttgatttttagcttttggtcccgaagaatgtggctgtattttgaagctacctttcattttaatttttaggttaaatttcagcagcttcgaatccataacctatagtatatcatatatcataatcaagagtaggactgatttttcatttttggctttcccgtgagaaaaactcttattctcttattcttgggggtttgctaagatctccgcccttattcttggggtttgctaggatctcggcttggggtttgctgctaccacagcaaggaaaggattccccatcaataactattgtcaggtatcaagagagtttggtcggtcttgcataatccttgaaatttaatggccttctaagtataatttatttaggttataaaataaggacactttagaagctagtgcaacaaattaactagtttttagtatttatatctgtaaattccaaacttggatttcgggtaatttatatagtcctgggacataaagtgagttg

SEQ ID NO: 11279 - DNA, 2929 bp, Glycine max
  Clone ID: 701047409_FLI
ggcttccctccctcctttgaagaaacaaattagaagagtgtgttgtgttgtgttgaagtatcaagctagcaaagatgtttggcatcttaggaggcaataaggggcacaagatcaagggtactgtggtgttgatgagcaagaatgtgttggacttcaacgaaatagtgtccactactcagggtggtttggttggtgctgccaccggcatcttcggtgctgccaccggtattgttggtggagttgtcgatggtgctactgccatcttcagtcgcaacattgccatccagttgatcagtgccaccaagactgatggacttggaaatgggaaagttggaaagcaaacctatttggagaaacatcttccttcgttaccaaccttgggagacaggcaagatgcattcagcgtttattttgaatgggataatgattttggaattccaggagcattttacatcaaaaattttatgcaatctgaatttttcctcgtgagtgtcactcttgaagacattccaaatcatggaaccattcactttgtttgcaactcatgggtttacaatgcaaaaagttacaaaagggatcgcattttctttgctaataagacatatcttccaaatgaaactccaactccactagtgaagtacagaaaagaagaattggaaaatctaagaggagatggaaaaggagagcgcaaggaatatgataggatctatgattatgatgtctataatgatttgggtaacccagacaagagcaatgatctagctcgtcctgttcttggagggtctagtgcctatccatatcctcgcaggggaagaactggtagaaaaccaacaacaaaagaccctaagagtgagtcaccatccagcagcacctacatcccaagagatgagaactttggtcacttgaagtcatcagatttccttacatatggaataaaatccatagctcaaaccgttttacctacatttcaatctgcatttggtttaaatgccgagtttgataggtttgacgacgtgcgtggactctttgaaggtggaattcatctccctacagatgcactcagtaaaattagccccctaccagtgctcaaggaaatcttccgcactgatggtgaacaagtcctcaagtttccaccacctcatgtcatcaaagttagtaagtctgcatggatgactgatgaagaatttggaagagagatgcttgctggtgttaatccatgcctaattgagtgccttcaagtgttccctccaaagagcaagctagatcccacagtgtatggtgatcaaactagtacaataaccaaagaacacttagagatcaaccttggtggactctctgtggaacaggcactgagtggtaacagattgttcatattagatcaccatgatgcattcatcgcatatctgaggaagatcaatgaccttcccactgcaaagtcttatgccacaaggaccatccttttcttgaaagatgatggcaccttaaagccattggccatcgaattaagtttgccacatcctaggggagatgagtttggtgccgttagtagagtcgtcttgcccgcagaccaaggtgctgaaagtacaatttggctaattgccaaggcatatgttgttgtcaatgactcctgctatcatcaactcatgagccactggttaaatactcatgctgtgattgaaccatttgtcatagcaacaaacaggcatcttagtgtgctccaccctatttataaacttttgttgcctcactatcgtgacaccatgaacatcaatggactcgcaagacaatcactcatcaatgcaggtggcattattgagcaatcatttctgcctgggccatttgctgtggagatgtcttcggcagtttacaaggggtgggttttcactgatcaagcccttcctgcggatcttatcaagagaggaatggcagtggaggatccatcctctccctatggccttcgccttgtgatagatgactacccttatgctgttgatggactagagatatggagtgctatccagacatgggttaaggactacgtctccttgtactatgccacggatgatgcagttaagaaagactcagaactccaagcttggtggaaggaagctgttgagaagggtcacggtgacttgaaagacaagccatggtggcctaagttgaacactcttcaagatctgattcacatttgctgcattattatatggactgcttcagcactccatgcagctgtgaatttcggacaatacccttatggcggtttcatcctaaatcgtccaactctaaccagaagattgctcccagagccaggaaccaaagaatatggtgaacttaccagtaatcatcaaaaggcttatttgagaacaattacaggaaagactgaggcccttgtggacctaacagtgatagagatattgtcaaggcatgcttctgatgaggtctaccttggacagagggacaatccaaattggactgatgacacaaaggcaattcaagcctttaagaagtttggaaacaagctgaaggaaattgaggacaaaatctcagggaggaacaagaattcaagccttaggaaccgtaatggaccggcgcagatgccctacactgtgcttcttcctaccagtggggaaggccttactttcagaggaattcccaacagcatctctatctaatgagagtgtgtggtgtgtggtgtgtggttttctttccttccaacgtacctctcattgacaaataaacgtgcaaacttatgtgtgcataattttcttatgtatgcttaagttttgtaattggatgctatctagtttttcatatctaatagggtgttgtgtcagtttttatgtatagtattgtgctcctatcatgttcacccgtatgtaagtctgatatcctgatctatgaatgtcaaatcaaatttctctatgtcacc

SEQ ID NO: 11280 - DNA, 1561 bp, Glycine max
  Clone ID: 701047614_FLI
atttttctctctcccttagtcaaagggattcatcgttcttcttcccaggttatttagaaaagcaaaatggtgaagatttgctgcattggtgctggatatgtggggggtcctactatggcagtcattgcacttaagtgcccatccattgaagtcgctgttgttgatatctctaaatcccgcattgcagcctggaacagcgaccagcttcctatctatgaacctggccttgatggtgttgtgaagcaatgccgtggcaagaacctcttcttcagcactgatgttgaaaagcatgtctttgaggctgacatagtgtttgtctctgtcaacaccccaaccaaaactcagggtcttggagctggcaaagcagcagatttgacatattgggagagtgcagctcgcatgattgctgatgtctcgaagtctgacaagatcgtggtggagaaatccacagtccctgtcaaaactgctgaagccatagagaagattctgacccacaatagcaagggaatcaaattccagattctatcaaaccctgaattccttgcagagggaactgcaatcaaagatctctttaacccagaccgtgttcttattggaggcagggaaaccccagagggccaaaaagctattcaaacattgaaggatgtttatgctcaatgggtccccgaagaaagaatactgaccacaaatctttggtcggcagaactgtctaagcttgctgctaatgccttcttagcacaaaggatttcatctgtcaatgccatgtcagcactttgtgaggctactggggcaaacgttcaacaggtgtcctattctgttggtacagactcaaggattggacccaagtttctcaatgccagtgttggttttggtggatcctgcttccagaaggatatcttgaaccttgtttacatctgtgagtgcaatggccttccagaggtggctgagtattggaaacaagtgatcaagatcaatgattatcagaagagccgatttgtgaaccgtgttgttgcatcaatgttcaacacagtttcaaacaaaaagattgctattctgggatttgccttcaagaaagacactggtgacacaagggagactcctgccattgatgtatgccaggggctactaggtgataaggccaacctgagcatatacgacccgcaagtaaccgaggaccaaatccagagggatctatccatgaacaagtttgattgggatcatcctatccacttgcagcccacaagtcctactactgtgaagaaggtcagtgttgtttgggatgcctatgaagcaacaaaggatgcgcatggcctttgcattctaaccgagtgggatgagttcaagactcttgattaccagaagatatttgacaacatgcaaaaaccagcatttgtttttgatggcagaaacattgtggatgctgataagttgcgtgagattggcttcatagtttactcaattggtaagccactggacccatggctcaaagacatgcctgctgtggcataaaatagatcattgatcaagtacaatgcaatatcagtcaagtgttgaggcagtc

SEQ ID NO: 11281 - DNA, 1290 bp, Glycine max
  Clone ID: 701047646_FLI
tgaaaaactcctatataaggcaaagctgcctctggctgtaaccctaatagcacaggtagcaccgtttggctcttcaagacttgcttctttaccatttcattcctaaaaccctattcttcttcgctcattcatcagcactgccatcagccccaacctccccacaaggtcacagggactaaagaggtgtaccaccatgtcggacgatgaaagggaggagaaggagttggatctctcttctgcagaagttgtaaccaaatacaaaaccgcggctgagatcgttaacaaggccttgaagctagttatttcagaatgtaaaccaaaggcgaagattgtggatatttgtgagaaaggggattcatacattcgagagcaaactggaaatgtgtacaagaatgtgaagaggaagattgagagaggtgttgctttccctacatgtttgtctgtaaacaacgttgtctgccatttctctccactagccagtgacgaggcagtgttggaagaaggtgatatattgaaaattgatatggcatgtcatatagatggattcattgctgccgtagctcacacccatgttcttcaggaaggtcctgttacaggaagggcagctgatgtcattgctgccgcaaatactgctgctgaggtggccttgaggcttgtcaggccaggaaagaagaacaaggatgtaagtgatgcaattcaaaaggttgctgctgcctatgactgtaaaatcgttgagggtgtcttagccaccaaatgaagcagtttgttattgatgggaataaagttgtgcttagtttgtctaatccggacacaagggttgacgaagcagagtttgaggagaatgaagtttatgcaattgatatagtaacaagcactggggacggcaagcctaagctgttggatgagaagcagacaactatctataagagggctgttgacaagagttatcacttgaagatgaaagcgtctaggttcattttcagtgaaataagccaaaagtttcctatcatgccgttctctgctagggctttggaagagaaaagagctcgacttggtttggtggaatgcgtcaaccatgagctcttgcagccatatcctgttttgcatgaaaagcctggtgatttggttgcgcacatcaaattcacagtcttgttgatgccaaatggatcggatcgaatcacaactcatccactccaagaattgcagcctacaaaaacaatagatgatcctgatattaaggcctggctagccttgggcacaaagacaaagaagaaaggtggtgggaagaag

SEQ ID NO: 11282 - DNA, 1488 bp, Glycine max
  Clone ID: 701047779_FLI
tgcttttctcacccttcctcactctcactttcttcctcctcttctcttcttccgttgctgagataccgcagcgacagaatctccataacggacttcggtggtgtcggcgacggccgcacgctgaacacgaaagcgttcagagcggccgtgtaccgcattcagcacctgagaaggcgcggcggcacggtgctttacgtgcctccgggggtttacttaacggagagcttcaacctcactagccacatgacgctttatctggctgctggtgctgttatcaaagccacgcaggagttggggaattggcctttaattgcgcccttaccatcgtatggaagaggaagggagctccctggaggaaggtatatgagttttatccatggagatggacttagtgatgtagtaattacaggtgagaatgggacaattgatgggcaaggagatgtgtggtggaacatgtggaggcagagaacacttcaatttacaagaccaaaccttgtagaatttgtgaattcgcaagatattattatttcaaatgtgattttcaagaattctcccttctggaatatacacccagtttattgcagcaatgttgtggttcgatatgtcacaattttggctcctcgtgactctcctaatactgatggaattgatccagattcaagttcaaatgtctgcatagaggactcatacatatctaccggagatgatcttgtggctgtaaagagtgggtgggatgagtatggtattgcgtacggtcgccctagctacggtatcaccatccggcgtgtaacagggtcatctccatttgccggcattgcaattggcagtgaaacctctggaggggtggagaatgtgctagcagaacacatcaacctcttcaacatgggagttggtatccacatcaagaccaacagtggcaggggagggcttatcaagaacataacagtggctcatgtgtatgtggagaatgcaaggcagggaataaaaattgcaggtgatgtaggggggcacccagatgaaaaatttaacccgaatgctctccctgttgtgaagggcatcacaattaagaatgtttggggagtgaaggttaaccaggcaggtttgatacatggattgagaaattccccattcactgatgtttgtctgtctgatatcaactttcatggcatggaaggaccaagatctccctcttggaagtgttctgatgtgtttggatttgctcatcaggttagcccttggccatgttctcagctgagcagccaagagcctggatcatgtgctatttagatattttcactctcttcaagtattgtagtaattgagtgcttctttcattgatttcttatacttaaagccattgaatcaccactttagaattgtatgatatcatgtgaaattaaatttagtcaaacatgttgaggatcatgtgtcaaacatacattgtgagagccaatttatataaacaatttaattaagtacttatttaat

SEQ ID NO: 11283 - DNA, 687 bp, Glycine max
  Clone ID: 701047813_FLI
aagaaaaagaggcgcaagatgagtggtagggtttctgggaaggtgaagtggttcaatgatcagaaggggtttggattcataagccctgacgatggcagcgacgatctcttcgttcaccaatctcagatcaaatctgacggtttccgaagcctcgccgaaggagagtccgttgagttcgccattgaatctgaatctgacggacgcgcgaaggctgttgatgtcactggccccgacggcgccagcgtccagggaaccagacgaggcggtgatggtggccgaagctatggcgggggacgaggaggtggtggaggtggctacggtggaggcggtggctacggtggtggtggtggctacggtggaggcggtggttacggtggtggtggaagaggcggcggcggaggaagctgctacagctgtggagagtctgggcattttgccagagattgcccatcaagtgctcgttgaatttactgttagggttgtttatgttttgcggattgttttaagtttttactttaatatgtcttagggattttaatggtttctgtccaaactatgggttcttatgagtagatgtgtgggatttttcttttttggttatttaaatgaagggtttctgtgttatcgttacaatctgcaaactaaaatctgtttgaacttacattttgctataatgaatcgtatgat

SEQ ID NO: 11284 - DNA, 1660 bp, Glycine max
  Clone ID: 701047921_FLI
tgccttgcttggaagagaaaaatggcaacaaatggcaagacacctgcgataggaatcgatttgggcacgacatactcatgcgttgcagtgtggcagcgtgatcgagtggagatcatcgcgaacgaccaaggaaacagaacaacaccctcttatgttgctttcaataacacccaaaggatgattggtgatgctgccaagaaccaggctgctaccaatccaaccaacactgtctttgacgcaaagcgcctaattggtaggagatttagtgatcaagaggttcaaagtgatatggagctatggccattcaaagtcattgctgatgttaatggcaaaccaatgattgctgttgattacaattgtgagaaaaagcaattttctgcagaagaaatttcatccatggttttggcaaagatgcttgacattgcagagtctttccttggatcaacagtgaagaatgctgttatcactgtgcctgcttacttcaatgattctcagcgacaagctactaaagatgctggtaaaattgctggcctcaatgttttgagaatcctccatgagccaactgctgctgcaattgcatatcggcttgaaatgaaaaattgtaataatgatagaaggaacgtttttgtgtttgatcttggtggtggtactttggatgtgtctcttcttgtttttgagaaggatcatatccgagttaaggcaactactggagacactcctctttcccttgggttgcaagaagatggaggtatcatgaaagtaatcattcctaggaatactagcattcctacaaagatggaagatgtactcacaacacattttgataaccaaaccaatatcttgattcatgtatacgagggtgagaggaaaagaactagagacaacaacttgttgggtaagtttgtgctagaaattcctccagttccacgtggtgttcctcaaattagcgtttgctttgaacttgattatgatggcatcctacatgtttctgccgaggaaaaatctaggggaatatccaagaagctggccataacaaatgacaaaggaaggctttcgaagaaagaaattgaaaggatgatatcagaagcagagaagtacaaagctgaagatgagatgtataggaacaaggtacaatcaaggcatgcattggagaagtacgcttacaacatgagggatgctataaacattaaggagattagcttgaagctttctccagaagacaagaaaaatatcaatgatgcaattgattctgccttagagtggctcgaggtcagcatggatgcaaacccaaatgattttgacaacatgcggagcactctttctagcgtttttaatccagttattgtgaagatgataaaggatgaggataatgttgcgcctccagatactgttgctagctctggtagcaatagtgtgaagaatggcttgttatcaatattggcaaattttgctctcgatgcagtgtattcagctgctacaggtgatatcattggatttgcttccgtgattgttgactgtttgtcaatttagttagtttattaaaacttggtaaaatgtcaatagagcaagcggtaaataaacagcttcttattcaaagtgtgagtttctgactaggaactattatgagattaattaatgtgtaagacttgttttctggtgt

SEQ ID NO: 11285 - DNA, 1515 bp, Glycine max; identical to SEQ ID NO: 8286
  Clone ID: 701048324_FLI

SEQ ID NO: 11286 - DNA, 548 bp, Glycine max
  Clone ID: 701048414_FLI
gaagaatatggtgtgtaatgtgattgaagggaattttgatgaagcttgttcaggcctcaagcaactgtatgacttgggatattcccccacagatatcatcacgacactttttcgtataataaaaaattatgatatggctgagtacctgaaattggaattcatgaaggaaactgggtttgctcatatgagaatttgtgatggagttggttcttatcttcagttgtgtggtctattagctaagctttctcttgttcgtgagacagctaaagctgtatgagctggtcctgagtgcaactgagatgccattatatttaacttttcaaatgtcctactgatgtagctttatttatggccagattctaactgatacatcaatgcttcggcttctataaatatgttgtgtttagcttggatcagtaactctcacttttgaaaatgttttatctgtatattatttagttatgatctcaatgttcaaatctatgacgaatcaagcatcacttctcaggatattcgagttactgagctatatagaaaggtttgtctgc

SEQ ID NO: 11287 - DNA, 1043 bp, Glycine max
  Clone ID: 701048573_FLI
aaaaattgaaagtgcagactctataccaaacttgcattcaattattacagcgtctgatggggccatggttgcaagaggagatcttggtgcagagctccctattgaagaggttccacttttgcaggaagagataataagcatatgccgtagcatgggaaaggctgttattgtggcaacaaatatgctggaaagcatgattgttcacccaacaccaaccagagccgaggtatccgatattgcaattgctgttcgagaaggttctgatgcaataatgctttctggggaaactgctcacggaaagttcccgctaaaagccgtgaaagtaatgcataccgtagcattacggacagaagccaccatacccggtggtcagatgccaccaaatattggtcaagtattcaagaaccacatgagtgagatgtttgcttaccatgcaaccatgatgtctaataccctcggaacctcaactgttgtcttcactagatcaggcttcatggctatccttttgagccactatcgaccttcaggcaccatatttgcttttacagatcaaaagaggatacaacagaggttggctttgtatcaaggagtctgtcctatttacatggaattctctgaagatgctgaagagactttcacaagggccttggatttgctgcagaagcaaggaatggtgaaatcaggagaagaagtagcactagtacaaagtggcaggcaacccatatggaggttccaatccactcacaatatccaggtccgaacagtgaaaacaaaataaaaaaaggtgaagatggccatgaaccaagtttcagcctttcaggacaatatatttaattttagaagagcatgttcccttttggtgggttgatgccaatttgctaagtccggcattttagttgtttgtttgttgcctaggtttttcattttttcttcatctattactttcttgttatcattatttttgggtgattgttctatattaatcacggacattagacatatgatagtaggtgacattgaaattttgattagaaattggaatg

SEQ ID NO: 11288 - DNA, 1951 bp, Glycine max
  Clone ID: 701048816_FLI
cgaaaacaaacacaaaacgcaaaaccagagcctctctctctctctcgctctgtttctctccacagaagcagagaatgcatcgcttcatcgtcctcaccattctcctctccctcaccctcgcagatggaggttccattggagttaactacggtcgaatagcgaacaaccttccctccgcggttaaggtcgttcacctcctcaaatcgcaaggactgacacgtgtcaaagtctacgacaccgacccagcagtgctccgggcactatccggatccggaatcagagtgacggttgatcttccaaaccagcaactcttcgcagcagccaaagctccctcctttgcatcctcatgggtcgaaaggaacgtcgccgcatactacccacacacccaaatcgaagccattgcggtcggcaacgaggttttcgtggacccacacaacaccaccaagttcctcgtacccgccatgaagaacatccaaaaagccctcaccaaacacaacctcgacaaagacattaaggtttcctcccccattgcactttccgcactagcaaactcttacccttcctccgccgggtcgttccgacccgaacttgttgaacccgttttcaagcccatgctagacttcctccgcgaaaccgggtcataccttatggttaacgtgtacccgttcttcgcgtatgagtccaacgctgacgtcatctctttagactacgctctgttccgtgataaccccggagtggtggatcccggtaacgggttgagatattataacctatttgacgcccaaattgacgccgttttctccgcgctaagtgctttgaaatacgacgacgttaagatcgtggttaccgaaacaggttggccttctaagggagatagtaatgaggtgggtgcgagtgtagacaacgctgctgcgtacaacgggaatctcgtccgtaagatcttgaccgctggtgggacccctctcaggcccaaagcggatctcatcgtttttctgttcgcgctttttaatgagaaccagaagcccgggcctacttccgagagaaactttgggcttttctaccctgacgagaggagggtttacaatgttccgttaacgacggaggaactcaaggactaccacgatcgtccggcgccggtgagcggcggcggacagcagaagggaacgccggcgccggcgccggttgtgagcggcggggtctccaagagtaccactggaaacacgtggtgcgttgcaaacccggatgcggataaggttaagctgcaggcggctctagatttcgcttgtggtgagggaggtgctgattgccgtccgattcagcgcggttccacgtgttacgatcctaacacgcttgtggcccacgcttctttcgcgttcaacagttattaccagaagcagtcgcgcaagggtggtagctgctatttcgggggtacgtcgtacgttgtcacgcaggagccgaagtatggtagctgcgagtttcctactggatactaaaagctgaagaggacagagatattcccgcatgagaatatgcgtctggctgattttgctttgtgtaaagtatgttatgaggtgtctggaagtgtgaaactaggaagagaagataaattacttcttggtggttatattagttttaagattttttggggttatggattatgttagttaataaatgttgacttttcttccagttggtgggaactgggaatggggtagctaaattaatttaacggttgggactaaagtaatttgtatctaagttttttttttttttttttactttgcagtagactttatctttatgattcctgaagtggtcatagttgttcttcaggtttcgtcatattttaagccaatagtttaagagaagtacctttttcttccactgcatcccatgacctttttaaatttttgttccgaaggattatatgaaagaaatattaacttccagc

SEQ ID NO: 11289 - DNA, 503 bp, Glycine max
  Clone ID: 701049278_FLI
atggaatcgaaaagagtttcattcccaaaggagcagccaatgaggatatactcaagcctatggaatgctgatgactgggcaacaagaggtggcattgtgaagactgattggagccaagctccattcacagcatcatataggaacttcaatgccaatgcctgtgtccattctggagcatcatcttgcacttccaactctgcctcctccaatgcctggttcaaccaacagttggattcaacaagccaagacagactgagttgggtgcagaagaattacatgatttacaattactgcactgacaccaatagatttccacaaggccttcccccagagtgccaagcatcatgattgaattggttttcatttgtatggatgttcattcttttattctttgatacttgcaagttagtatatcttgaaacttttacacttaatttacatcatgattgtattacaagaaacggaaagaagcctcactaatatatcttgaatcttttacactt

SEQ ID NO: 11290 - DNA, 1766 bp, Glycine max
  Clone ID: 701049385_FLI
aagagacagaacaacagatgaagcattttgccttggtgtttcttttggccattttggtccctcaggagtgtttccatgtcagtgtggaagcaagggatgattttgtcagaactagaggcatccacttcacgctgaatggatacccttactatgcaaatggcttcaatgcctactggttaatgtacacagcttctgacccatctcagagattcaaggtttcaaatgcctttagagaagcagcaagtcatggccttactgttgctagaacttgggccttcagcgatggtggctatagaccactacaatattcccctggcttctataatgaacaaatgttcacggggttagatttcgttgtatcagaggccagaaagtacgggattaagctcatactgagcttggtgaacaactacgaaaattttggaggcaagaagcagtatgtgaactgggctagaagtcacggccagtaccttacttcagatgatgatttctttaggagccctgttgttaagggttactacatgaaccatgtcaggactgttctcaacagatacaacagatttactggtatgcattacaaagatgacccaacaatcatggcctgggagcttatgaatgaacctagatgcacatcggatccttcaggaaggactattcaggcgtggatcacggaaatggcttcgtttttgaagtccatagacaggaaccacttattggaagctggactagaagggttttacggacaatcaacaccacaaagaaaaacaatgaatcccggtttcaacatagggacagacttcatcgcaaataaccgaatcccggccattgattttgcaacagtccactgctaccccgaccaatgggtatcgagctcaaatattcagtaccagctttcattcttgaacaactggttgagtgcccacttcatagacgcgcaataccatataaagaaaccaatactggtggcagaatttgggaaatcatttaagggttcgagttcctacgagagggatgaggtgttcaattcagtgtattacaaaatatacgcttctgcaaagagaggaggtgcagcgagtggagcactgttctggcagcttctaacggagggcatggagtctttccaagacggttacggaatcattcttgggcagagttcctctacggccaatctcattgctcgccagtcccgcaagctgtacctgattcggaagatcttcgcaagggtcgcgaacatgcggcgatggcaaagggccagagccagaggattttctggctccggaggtggaaacggaggcagatacattgacgactgagaacatgtttggtttgcagtttcaggattttatctgttaaatttacattgaagcgcgcgtcacagtatttttaactgaaaagcttgtttgtgttgggaagacagacatctttcatatacgagtttctctaccgagtgtttggaaggcgatggaggagggcccaccggaaccaacggaagaccttggagatgaatcataatgttttcttataactacgttgacatatgttttcattgtttcagcttctctctattttttgtttatacagagcaaagcagctggtaagtttttccatggcgtctacttgtaggttactcaacctcactttagtttttaactttggaaagaatgttatttgtgtttagtacttgatatctgtagaaaaagaatgcaaaacaaagcgcaaatgtaagtttgaatcaaaataagttataaactcaagtttatactaac

SEQ ID NO: 11291 - DNA, 1323 bp, Glycine max
  Clone ID: 701049402_FLI
ctcaattctcaaacttgttacagataaaaaccctttcttgaaacctttctccaaaatttctcacaacccacttctactctactcattccacacccaacttacaaaaacccattcttttgctcactcattttcttaacgtagattaatcattatgtgtggcggtgccatcatcgctgacttcataccccgccgtggaggccgccgcctcacggcctccgagctctggccaaactccttcgccaaagacgatgactttgacttggattactcccacatcgctacccaacaaccctccactctcaaaaggtcccaacctcccaaagttagcgagcaggttgagaataagccggtgaagaggcagaggaagaatctctacagagggattcggcagcgtccgtggggcaaatgggccgcggagattcgcgatcctagaaaaggggttcgtgtctggttgggcacctttaacaccgcagaagaagccgcgagagcctacgatcgtgaagctcgaaaaatccgaggcaaaaaggctaaggtgaatttccccaacgaggacgacgaatattccattcaagctcgtaatccaattccaccccttcctttcgctccacaacaccctcccctgtaccagcaacagtaccgttgcgatctcaacaatgcccctaaaaatctcaactttgagttcggttacgacctgaaccacgcggaggcgttcccatcccgcgtggacgccgtcaacgctgactcggtggttgtctccgttgatgaaaattcggggtcagcgtcgggttcagagggtgcttattcgacaacggagttcatggggtccgttcagaacgggaacggttatttgggtggcacggtaatggagaagaaggagaaagagacagaggttattgaagctgaagaagaaaagaacaaagtgctggagctttctgaggagctgatggcgtacgaaaattacatgaagttttatcagattccgtactatgatggacaatccacgacgaataatgttcaggaaagcttggttggggatctctggagtttcgattagcgaggaatatatcaaggatgttcttttcatgcatgtgttttgtttcttcgtcaatgctgtgaaagcttttgctttctccctccattctgctgactaaactaacatctctggcgttttggcagggatgcacaggaatttaaattgagtgcttcggtagaaatggtctcattagttagtgctatgctatcatctggttttgttgaattgtaattttttgttttggtggtatgttgaacagtaattttactggatatattcaagtctatttg

SEQ ID NO: 11292 - DNA, 809 bp, Glycine max
  Clone ID: 701049876_FLI
gaatgctcttgccatgcctcagaacccagtatctgttcttcacaatcgacgaggcatcatcgtttcctccatggagaacgggactcgccccgaattccaattggcctccgacggtgttcatcaagcacaactcgctgcacaatcattccaaaaggaactagaggctaataatatcccgcttgctaatgtacgcatttgctactcccccttttcaagaacaacccataccgctaacgttgtttcaactctcttgaatctcccttttgatggaccccactgtaaggtcatccaagatcttcgagaacgctattttggtccttcttttgaactcctttcgcatgataaataccaagtgatttgggatatagatgaaaaagatccatttcttgggccagaaggaggggaaagtgtcaaggatgttgcttgtcgacttgcaactgcaatggccactatggaatcagaatttcaaggatgtgcagttttggttgtcagccatggagatcccttgcaaatcttgcaaacaattctgcatgcagctaatgaacacaaggaacccacatataatgacttagcatcaatactgactgcagttcaggtggcaccaatcttgtcccagcaccgcaaacatgcgctgcttactggagagctcagggcagtcatttgagatgtcagacccctatatatggtttcatttcaaaatacaaaacacctccccagtcatttttttaggaacagggatctaaattcgttttgctccctattccatttattactttatagattatttagcaaataaaatttcaatcacg

SEQ ID NO: 11293 - DNA, 1911 bp, Glycine max
  Clone ID: 701049961_FLI
acaattcatcgtccatcgagaaaggaagaaaagaaacaaggtgacatcatcatggcttgctcgttttctcgcgggtctctgcttcctctcgccatcatcgtttccttaggatgtctatttgcgatttccattgcaaaggaggaagccaccaagttggggacggtcattgggattgatcttggaacgacctattcatgtgttggtgtttacaagaacggccatgttgaaatcatagccaatgaccaaggtaaccgtatcaccccttcttgggttgctttcaccgacagtgagagactcattggggaggctgccaagaatctggcagctgtcaacccagaaagggtcatctttgatgtcaagagacttattggaagaaagtttgaagataaggaagttcaacgagacatgaagcttgttccttataagattgtcaacaaggatggaaaaccttacatacaggtgaaaattaaggatggtgagaccaaggtgttcagccctgaggaaatcagtgccatgattctgaccaagatgaaggaaactgcggaagcattccttgggaagaaaattaatgatgctgtggtcactgtcccagcttacttcaatgatgctcagaggcaggccaccaaagatgctggtgtcattgctggtctcaatgttgctagaattattaatgaacctactgctgctgccattgcgtatggattggacaagaaaggtggcgagaagaacattcttgtttttgaccttgggggtggaacatttgatgtcagtatcttgacaattgataatggtgtttttgaggttcttgctacaaatggagatactcatcttggaggtgaggactttgatcagagaataatggagtacttcattaaattgatcaataaaaagcataaaaaggatattagcaaggacagccgagcacttagcaagctgaggagagaggctgaacgtgcaaagagagctctcagcagccagcaccaggtccgcgtggaaattgaatcactttttgatggtgttgatttttctgagccactcacccgagctcggtttgaggagttgaacaatgacttgttccggaagaccatgggaccagtgaagaaggctatggaagatgctggattacagaagaatcaaattgacgagattgttcttgtcggtggaagcacaaggattccaaaggtacaacagcttttgaaggactactttgatggaaaggagccaaacaagggtgtcaaccctgatgaagcagttgcctatggtgctgcagtgcaaggaagcattttgagtggagagggtggtgaggaaaccaaagatatccttctcttggatgtggctcccctcacccttggaattgaaactgttggtggggtgatgacgaagttgattcccagaaatactgttatccctaccaagaaatcccaggtgtttaccacctaccaggatcagcagagtaccgtctccattcaggtttttgaaggggagaggagtctcacaaaggattgccgtctgcttgggaaatttgaactgtctggaattcctccagctccaaggggtacccctcaaattgaagtgaccttcgaagttgatgcaaatggcattctaaatgtgaaggcagaagacaagggcactggtaaatcagaaaagataacaattacaaatgaaaagggacgtcttagccaggaggaaattgagcggatggttcgcgaagcagaagagtttgctgaggaagacaaaaaagtgaaggagaggattgatgctcgtaacagtcttgaaacctatgtctacaacatgaaaaaccaggtcagtgacaaagacaagctcgctgacaagttggagtctgatgaaaaagagaaagttgagactgcagtgaaagaagcattggaatggctggatgacaaccagagcgtg

SEQ ID NO: 11294 - DNA, 497 bp, Glycine max
  Clone ID: 701050009_FLI
tgaacgatcagtttgttcttgatgcttaccgaaagggtgataaattgaagtttgcgaaccattctcctgatccaaattgctatgcaaaggttattatggttgccggagatcatagggtaggcatttttgccaaggaacggatttgtgccggggaggagctgttctatgattatcgttatgagccagatagggctcctgcgtgggctcggaagccagaggcatctggatcaaaaaaagaggacggtgctccttcaagtggtcgtgcaaagaagcttgcttaatgggagtttgttctttaaaagtcaattctttaggttattctttcacacgtaggggaagcaatctcattggtagcggaaagaagtattgcttttagcttttgttcgtagcaaggccgtgtaattgttgctgcataggtaactaactacatttaaacagttcattttgatattaacagactgtattcatcattccaaacggaaaatataagcttaatc

SEQ ID NO: 11295 - DNA, 2270 bp, Glycine max
  Clone ID: 701050039_FLI
aaaaaaaaaagcaaacttttctctttctctcttcttcatgctcgagtgcttggtctcgctcctttacaaaaaaagctatggaccacaacatctaatctaatctaaacaaacaaacaaacactcctcttaattattcttttgattctcaaattcttcttcggtttttttccctttctttttggtttcattgagtatgggttcggtggactgttatccttctcgtacggacgatgctgccgtggtgtctttggattcgctgcctttagggttccgattccgacccaccgacgaggaactcgtcaattactacctgcgacagaagatcaatggtaatggtcgccaggtttgggttatccgagaaattgatgtctgcaaatgggagccttgggatatgcccggtttgtcggtggtacagaccaaggatccggaatggttctttttctgtccacaggaccggaagtatccaaatgggcatcgattgaacagagcgacaaataatgggtattggaaggcaacggggaaggatcgtagaatcaagtctgggaaggatttaattggaatgaagaagactttggtgttctacactggtcgtgcacccaaagggaataggaccaattgggttatgcacgagtatcgtcccactttgaaggagcttgatggtactaatcctggacagaatccatatgtcctttgtcgtttgtttaagaaacatgatgagagccttgaagtttcacactgtgatgaagcagagcagactgcttccactcctgtggcttactccacagaggaaatacaatctgatctggctgttgttgcaggatccccctcacaagttaccgaagatgataagcaccaggcaatgatccctgcacactctgaggaagcaatatccaatgttgtaaccccggttgtttgccgtagtgacagatatgatgcttgtcatgcaccaaatcaaattgtattaccaactgcggaggagtttcaaccattgaactattatgacccaagaaacgagctattggatgataaattattctcccctgtacttgcacatattcaaccagaatttcattatcaagcaaacatcgaatcagatgattggtatgggcttcaatatggtacaaatgagacaaacatgtcagactttttgaattcagttgtgaattgggatcaagtatcctttgaggatctcaattgtcaacagcagagctaccccttgtttaatgttaaggatagcgtattaagcagcgatctagattctgaacttgccattatgacatgtatgcatgctggttctgcggaggggccaaataacggaaggaaacctttggtgataacttcagaatttcgcagcaccactggcatccctgttgactgtggtggtgacgagcaaaaaagcaatgttgggttatttcaaaacaattcccagagagcttttactgatgttaatataggccaagtatataatgtagtcgatgattatgagcaacgaggaatctacagtgcagttgctagtggcaatactggaatcattaggaggcatcgtgaggtacaaaatgaacagctaagctcaaattcaacccaaggtactgcacagagaagaattcgtttgtcaatggctacacatggctcaaataagatggtgaaaagtggaagttgtgcacaagaagagcttaatttaaaatccgtcattgctatggtaagaattttgtttttttagcttctgtccaagagaagagattgtctttgcatgcgaaatgaggtttgtttttcttttgtaggaggagaaagcttcagaaagccatatttctgatgaaagttctactcttactaatgacgggaatgaactgccgaagacatccaaatcatccggcaaaagaaagatttctcgacaagctacaaaagcaggctcaaccttggggttgaaagactttttattgctcagaagggtgccttacatttcgaaggcttcctcaaatcgtgccaagtgctcttctgtttttgtagtttctgcctttgtaatggtcaccttagtggtctttactgacatctggggatatcttaaattttaaactgctaggagatcattcctttgttgttttttttgcctccatttcttttttgggccatgagtggaggtatgtagggtcttcttagatttgttgatagttcaatttataggtgagtgcacttgtagttggtatatgtatgctcacctggttggcttgtctgtttctgttgctgtacatcatgtatacatttttttttcc

SEQ ID NO: 11296 - DNA, 1255 bp, Glycine max
  Clone ID: 701050070_FLI
cttaaactgcttatcccggaaaatcacgacgacaacacaacacccaactggtctgtgactgaggcagcaatggtgctgatgacagcttcataagtataatgggcttggtcactgttacatggacaaattatctaaaaaagcgtattccactaagaataaggtttcttcataccttgaaaggtaatcaaataggccaaattttaatgtctccacctcttgcatctctggaccttcctgacatctggagtcctatttcttcatgtcggagtattccagcaatacataaaagctttaatgagcagactactgtagtgcttgatggaaagttgatatccatggaaatcagatcaaaaatagctgctaaggtaagacaaatgaagaaaggcctaggaaaagttcctggattagctgtaatcttagtgggccaaagaagggattctcaaacttacgttcgcaacaagataatggcctgtgaagaagttggaatcaagtctttggtgactgaattacccactgattgtgcagtaacagatgttcaaaatgccatcatgagatttaacaaagatccatccattcatggtattcttgtgcaacttcctctaccgcaacatctagatgaggaaaaagttttggatgctgtatgtctagaaaaagatgtggatggtttccatccccttaatatggggaatcttgccataagaggaagggagccactgtttactccttgtactccaaagggctgtattgagttattgatcagatcaggagtcgagattatgggaaaaaaagccgtagtgattggaacaagtaatattgtgggtttgccagcatccttgttattgcagagacaccatgcaacagtcactgtcatacatgccttcacacaaaaccctgaacagatcacctcagaagctgatattgtagtttcagctgctggagtgcctaatttggtccgtgggaactggataaaacctggtgcagctgtgatcgatgttggtacaactccggttgaggatcctggctgcgaggatggttatcgcctcgcaggtgacgtatgctatgaagaggccgtaaaagtggcatccattattactcctgtgcctggcggggttgggcctatgaccgttgctatgctactatgtaatacattagattctgcaaagcgcatgctcaattttagttgacccctacccctcttgaaactacaatacttcgttcaaggtcatttttagcatggattgagtttaaaaactgg

SEQ ID NO: 11297 - DNA, 1282 bp, Glycine max
  Clone ID: 701050088_FLI
aaaattttcaaatggaaggcccaactagagtgatgaatcagttgcgagcattatggcatattcttgaactgttagacaaagaaatgtttgcccacctgtcaaaaattggtgctgaaagccttcattttgcatttcgtatgttgctagttctctttcgaagagagttgtctttcaatgaggctctttcaatgtgggagatgatgtgggcagctgactttgatgaatccatggcttatgatttagaagagaactgtctggaagcattggagttacaacttcctagagactcaagcaatgatatgagagaagaaattgcagatagtgatggtggtagtgtgaagagtggttcacggtcaaatcataatgaaaatgacaacacaaaagccagcccacagtcaaatcatgaaagagctgatcactcagtatatgacagcaaattgaagtcgctctcatcccataccttttgtggcttggcaaggaatatctggcctagaaatcatcaagttcaaatgagcagtatttccttaacaaggaaaggaaataatgagttggccatattttgtgttgcagcaattcttgttttaaaccgtcagaagatcattcgagaaactcattcctttgatgatatgataaaggcaggtaatcaagaaaatgaactatgttgcagagaaaggggactaaggtaatatcattgccattatacttgagacagaagcactgagtatcacttatatggctctgcatttccaaattggagtttggtgttaagactttagtcattacttatccactttggatgggagactttgcagcttaaagtggttttgctttcagaggttcatccagctgctgtatgtccattgtcttcattactcttttttacgagccagtgaaaagattgacaaggggatttttcatcactctggttgctcccaggtttgatcaatttgcagtcttggatacctggcacaggttacgcaaacaattctctttctttgaacttttggttcagctcatttctggagaaagtcgtacaaaatttatttctacccagaggatttggagttcggaaaaagcacacgcatacaagtagaaatagagggtgaatatgtcacgggattgttgtaagatatggaaacaatgtagtcaatttttgtgggtgtttgaattgactgaggataggatttatgttttatacatacatactacatcaagaagattttttagtgacttgaattgctggaactcataaattacaaaggataaagagggtattattcat

SEQ ID NO: 11298 - DNA, 703 bp, Glycine max
  Clone ID: 701050091_FLI
ggatttacaatcttgtggggcttgctcaaagctcttgaccgatagatctgcatggggtagccagaaatttattgccagcagtgacctctcagttgttgctgtactggtctgtggtcatgtttaccacgcggaatgcttggagactataacgccagaggcagatagttatgatccagcttgtccaatttgtatggttggagaaaagtacatgtcgaagttatccaaaaaaggtctttggaccgagtcagagactaagaccaagaactacaagatatccagaaaccgagtagttgatagctacgtagatggtgggaatgatgtttttgatcgcctaaaagatatagtttcaaagatggagcctagtagctccagtactaggagttcatttggaaaacccttcctgaggcggcatttttctttgggatcaaagtggagccggtccttattggagaatgattctgccaggaagaagggcttttgggcgagatgtcgcagagactgatttcccctagccatagcttttagtcgcaggagttcttcaattatactagtaacaccaaccaagttagaattttatattttctatgcagtctagctttagtaatagtttagatttatttcaaattttattttaacttgtcaccaaaagttcccaccatgttgacgtggatcatattgattgtatgaatgaagcgtcttttgg

SEQ ID NO: 11299 - DNA, 1259 bp, Glycine max
  Clone ID: 701050111_FLI
tgtgtatgaagagagagaaaggaggagcacagcactacacagctccgaaataggagggggagaaattttgtatgcgttggatttcgtagatctgattcatggtcagcacatagattgtggtggcagcacaatggatcctggcagtggaggaaacagtcttggcaacaactctaatctcgcttcaaaacaacgtttacggtggacacatgaattacatgagcgctttgttgatgctgtggctcaacttggtgggccagatcgtgccacacccaaaggtgtcctcagagttatgggtgtacaaggcttgaccatttaccatgtcaaaagccatttacagaaataccgacttgcaaaatatttacctgactcctcatctgatgaagggaaaaaggctgacaagaaagaaacaggggatatgctttccaatcttgatggttcatctgggatgcagattactgaagcactaaagcttcaaatggaggttcagaagcgactacatgaacaattggaggtgcagagacagctacaattacggatagaggcccagggtaaatacctgaaaaagataatcgaagaacagcagcggctcagtggcgttctttcggagactcctggctctggggttgcagccgttgctccaggggatgcatgccaagaacctgataataagactgacccgtcaacccctgaccctgaaaaggccgccaaagaccgtgctccggcaaaaagtctttcaatagaatctttttcatctcaccttgaaccgatgacaccagattctggctgccatgttggttcccctgctgaaagccctaaaggggagagatcagccaagaagcaacgagtaatcatggatggcgtgtattctaaaccagaaatggtgcttccacatcagatactggagtcaagcatgtcattataccagcaacctaacactgtttttcttggccaagaccaatttgatccttctttgggtatatctaccagaagtggtgaggaattggataaggttggtggtggtaatctgtgatttgctataatatgtaggttgtgttcaaggactcattctatcttccttctaagcttagtttgtgttatatgtattccttaatagatgagggaacctgttcttcgtagattcccaagggaaccagttcaaatgttcaatacttgactaaacatccagcctttaattactatttagataactaagttgaattggattaatagaaagaatcttggcatcggctatggtgatt

SEQ ID NO: 11300 - DNA, 1234 bp, Glycine max
  Clone ID: 701050303_FLI
catgcagaagagatcggcgcgtttcatttgatcagatcataacaatggtgtccgaaggcactctcctgggcatgggtaaccctctcctcgacatctccgccgtcgtcgatgaagacttcttaaaaaaatatgatatcacctcgaacaatgcgattcttgcggaggacaagcacaagcctatgtatcaagaattggctgagaaatataatgtggagtacattgctggaggtgccactcagaattcaatcaaggttgctcaatggatgctccaagttcctggtgcaacaagttacatgggtggcataggaaaggataagtttggggaagagatgaagaagaactcaaagcttgctggtgtaaatgttcactattatgaagatgaaactacacctactggaacttgtgctgtttgtatagttggtggtgaaaggtctcttgtggcgaacttagcagctgccaattgctacaagtctgatcatttgaagagaccagaaaattgggcactagttgaaaaggccaagtatatttatattgccggctttttcctcactgtatcaccagattccatccagttagttgctgagcattctgctgcaaataacaagatcttctcaatgaacctttctgctccttttatctgtgagtttttcagggatgtacaggagaaagctctaccgtatacggactttgttttcggaaatgagactgaagcaagaacattttctaaagttcatggctgggagactgataatgtcgaggagatagctgtaaagatttcccaatggccaaaggcatcaggaacacacaaaaggataacagttatcacacagggtgcggatcctatttgtgttgctgaggatgggaaggtgaaaaagttccctgtgaaacttttgcctaaagagaaactagttgatacaaatggagcaggagatgcatttgttggaggatttctttctcaattggttcaggagaagcccattgaagaatgtgtgagagctggctgttatgcagcaaatgttatcatccaaaggtctggctgtacgtacccagagaagcctgattttcattgagtgtttctctcggttctgttcccattatgaagttttgattgttaggaaaccttttgttgtatttcgatagttgcagtataacaactgcatttggattttttcaatcccgactggggaaagcggggaaaaagtttcagtgaaaggaaacaaataattaatctgtt

SEQ ID NO: 11301 - DNA, 1506 bp, Glycine max
  Clone ID: 701050489_FLI
tttgggagttaggttctgcacgctctgcttccagcgagtgttctttcttcgtttcaacaccttaatttgcacacgctgcttcttcagcttgagaaatggcacaagaaacctttctattcacatctgaatctgtaaacgagggtcaccccgacaagctgtgcgaccagatctctgatgcagtgctcgatgcgtgccttgaacaggaccctgacagcaaggttgcctgtgagacatgcaccaagaccaacatggtcatggtctttggagagatcacaaccaaggccaacgtagactatgagaagattgtccgtgacacatgccgcgaaattggattcatctctgatgatgttggtcttgatgctgacaaatgcaaggtgttggtcaacattgagcagcagagccctgatatcgcccagggtgtgcacggtcacttcaccaagcgcccagaggaggttggtgctggtgaccagggtcacatgtttggctatgccactgatgaaacccctgagtacatgcccctcagccatgtccttgcaaccaaactcggtgctcgcctcaccgaggttaggaaaaatggtacctgtgcttggctgaggccagatggcaagacacaagtaactgttgagtactacaatgacaatggtgccatggttccagttcgtgtccacactgtcctaatttccacccaacatgatgagactgtgagcaatgaccaaattgctgctgaccttaaagagcatgttatcaagcctgtcattcctgagaagtacctggatgagaagaccatcttccaccttaacccttctggccgttttgtcattggtggccctcatggtgatgctggtctcactggaagaaagatcatcattgatacctatggtgggtggggtgctcatggtggaggtgccttttcagggaaggaccctaccaaggttgacagaagtggtgcctatatcgtgaggcaggctgcaaagagtgttgtggcaaatggccttgccagaaggtgcattgtccaagtttcctatgccattggtgtccctgagcccttgtcagtgtttgtggacacttatggaactgggaagattcctgacaaggagattcttcaaattgtgaaggagaatttcgacttcagacctggaatgatcaccattaacttggaccttaagaggggtggccataggttcctcaagacagctgcttatggacactttggaagggatgaccctgacttcacctgggaagttgtgaagccactcaagtctgagaagcctcaagcttaagattgttgtgaagttaatcactcccttcaatggatgtcttgctaggtgtggatgaataatttgcgtgttccatgactactactacttcattcataggtctaatgtcatctcatcaatacttaaactgttttttttttttccttttctccttttactcacaatttattttttggttatgcaatgttaccgttttgatgcaatggaaattttatcagaattttgtacc

SEQ ID NO: 11302 - DNA, 604 bp, Glycine max
  Clone ID: 701050604_FLI
agaaaaccgaccctctcctttccctcttcaccaaccaatggctcccccaaggccgagaagaagcccgcggagaaaagcccgcagagaaggctccggcggagaagaacccaggccgagaagaagatatcgaaggaaggaggaagcgagaagaagaagaagagaacaaagaagagcgtggagacctacaagatttacatcttcaaggtgctgaagcaggttcaccccgacatcggaatctcaagcaaggccatggggatcatgaacagtttcataaacgacatcttcgagaagctcgcccaggagtcgtcgcgattggctaggtataacaagaagcctaccattacttccagggagatccaaacggcggtgcgtttggtcctccctggggagttggccaaacacgctgtctctgaaggtaccaaggccgtcaccaagttcaccagctcttgattggttttgtttcctgtgtttcgattagggttttctgttgaccccgatttgattcgcatttttaaattagggttttattttcctttttgttgcttttgagggtgtagatgtaaaattaaagctttatttttaaataatataaatgccgtttttt

SEQ ID NO: 11303 - DNA, 795 bp, Glycine max
  Clone ID: 701050612_FLI
accaagttgaagcagactgaagtggattgtgaatacttgaagaactgctgtgagaatctaactgaagagaataggaggcttcaaaaggaagtgcaagagcttagggcattgaagttatccccacagctttacatgaacatgaaccctcccaccactctcacaatgtgcccttcgtgcgagcgtgttgccgtctcatccacatccttttcctcatcggccaccatgccctctgccccgcctccagctaatctcaacccggcaggccctaccatccagcggccggtgcccgtcaacccttgggcagcaatgttgaatcaacaccgtggccggccataattgatcgctcccggccttaggtagtagggtaaagttcaggatggcagctaggacattttagttttgtagacagaaatgaatcaatgaaataggaatcttatgggttggtttacttttactaggactttgagagctcatggtttgggaaattctatttgcacccctcttttttttgcaccttccattttcttttacaaattagtttttgccttttcggaatctacaatactattgtagaaattaatttttgaaatgtaaaagaaaaggcagagactgtgaagagaaaaaaaaagggggggctgggggggatgcaattagaatgatcctcatgcttttggttattaactcttttttgtcttggcctattttattttgagcatagatagaacatgttttagtcaactttaggatgtgtaaagtttggtgttttcatatgctgaacagtgtttgttatttgtt

SEQ ID NO: 11304 - DNA, 3090 bp, Glycine max
  Clone ID: 701050680_FLI
ccggccccggggagcgggtgtattgagataagccagcgactgaatccgatggcgaatgagggaagcgacattgacgaagtgaactatgcgttggatggcgtgggagaagaagaagaggacgaaaatgcagcacaggaggaggatgacaatgacatggaagaagatgaagaggaatatactttcaggttcaaaaccgggatgaatcctttggactttgttgatgataatgatgattctggcattcaaccctaccagcggttcgtgcgtcttgaacgggaagcccttgctgataaaaagcgaaaagcacctgaacaatgccatagtgaagaaccaccttctaagatggccagggaaggtgatatttctggggcaaagatagctgagataatggaagcaatggattattatggtatgcgcaagagatcgagaaagcctaaaaaaagaggcaggcgaaaaggatcaaagaatagagttgaccctaagctaacacagatgcagggtgatgccacgtttcactatgcatgtggcgattatgaccgggctaaagctgtgttgtgtgaagttattaggctggcaccaaatttgcatgagtcgtatcacacccttggacttgtctatacttcactccaggattataaaagagctatggccttatacttgattgctgctcatttggatccaaaagagtcacctctttggaaaacgatttttacctggtccatagaacaaggttatgttgatcaagccggttattgtcttttaaaagcaataaaagcagatcccaaagatgttactcttagatttcatcttgcaaggctttatgctgaacttggacattatcaaaaagctgctgtgacatatgagcaagtgcataaactctgttgtgagaatattgatgcactgaaagcagcagctaagttctacaaaaaatgtggtcaagttgaatactccattcaaattcttgaagactatattaagagtcaacctgttggagcaaatgtaagtgtagttgatctgctgggtaccgtattgatggaaactaaggcacatgatagagctctgcagcatattgaacatgctcaaacagtaaatgcgaggaaagaattacctttgaatttgaaaattaaggccggaatttgccatgctcatcttggaaacatggagagggctcaggctctctttaatgatttgaaaccagagaatgcaagcaagcatattgacttggttactaaggttgcagactcattaatgggtcttgaacattataatcctgcattgaattattatttgatgttggaaggaaatattgaaaaagaaaatggtcttctatatctgaaaattgctaggtgttatatgtccctgaaagaaaggtcacaagcaattctcttttattccaaagctcttgaaacactacaggatgatgttgatgcacgcataactctagcttcgcttctgcttgaagaggcaaaagaagatgaagcaatttccttgctgtctcctccaaaggattctgattttggtgaagcaccttctgaaaagtcaaatagatggtgggctgatataagaataaaattgaagctctgcaacatttattggaatagagggacgcttgatgattttgtggatacaattttccctttggttcgtgaatcattgtatgttgcaactcttcgacagaagggtaaatcaaaaaagcgactctccaaaagagatctggttgaaagggttagggtcctggatggtccggaaaaggataatgtatttcgaggatttagaccagtagctgcaccatctgacctgttgaaagcttccagggcaaaaaagttgctccagaagaaggcaatggaaaaggagaaaagaaaagctgaggcactggcctctggaattgactggctaagtgatgattcagatgatgagcctcagaaagaaaacagagaacctcccttgtgtaatcttctcaaagatgaagaacatcaccagctaataatagatttgtgcaaggcattagcatccttgcaaaggtattgggaagcactggagattattaatctctctctaagattggcccatacatctctgtctactgaaaagaaagaggagcttcgatctcttggagctcaaatggcatacaacaccacggatcctaaacatgggtttgattgtgtaaaatacattgttcagcaacatccacacggtgttgctgcttggaattgctactacaaggttatctcaagattggaaaaccgagatacaagacattacaaatttgtacgtggtatgcaaggaaagtttgtggattgtgtgcctcctatcctcatttctggacatcagtttaccatatgtagccatcatcaagacgcagcaaggaaataccttgaagcttataaactattgccagagaatcctttggttaatctttgtgttggaacagccttgatcaacttagcattgggtttcagacttcaaaataagcatcaatgtgttgtacaaggtttagcattcctctacaataatatgagaatctgcgagaacagccaggaatccttgtacaacatagctcgggcattccatcatgttggacttgtaactctggcggctttttattatgagaaagttattgctatttgtgagaaagactatccaattccaaaacttcccaatgaaaatcccgatagcatcgaaactcacaaacctggttactgtgaccttcgcagagaggcagcttacaatttgcatttaatctacaaaaaaagtggtgctcttgatcttgctaggcaagttctcaaagatcattgtaccttgtgagtttacatgtaccttaatatgtacaaaattttagaagcatttgcattgcaatataatttattaggttttcatatatgataatggtattcatttattaagttactacagataccgagcaatagtgatttaaagacctactgcagtgcttatgtattttatttgattttttcttgaaactttgctttctgtatatattgagatgtctcttgggcgtcaaacatgagtcagactagcttgggtaagctgtctatattgtttgacaatacagaacacgtttttccactc

SEQ ID NO: 11305 - DNA, 510 bp, Glycine max
  Clone ID: 701050725_FLI
gcgcgagcaagcatcccaaaaccctagctcgcgttctgctttcgtcttttacatcaggatggagtctcaggtgaagcacgcacttgttgtcaaagttatgggtcgtactggatccagaggacaagtaacccaggttagagtgaaatttttggatgatcagaaccgtcacatcatgaggaatgtgaaaggacctgtgcgagaaggagacattctcaccctactcgagtctgaaagggaagcaagaagattgcgctagatggtttcttttggcttgcctccaaattcgaacaaaacagtgtgattttgttgattttaatggtagttggtggatgtcaaaggttttagcaccctatcttattgtctgtctttggtctatttttattcgaattatggcgtgaactttggatgatttgagtttaagcttcaaggttttagtatgttttggtttagtatatgatttgaatcatggcttgaattttggattaatatatatgatctggcttctatatg

SEQ ID NO: 11306 - DNA, 649 bp, Glycine max
  Clone ID: 701051067_FLI
gtccttgatgagataattaattatattcaatctcttcagcgccaagttgagtttttgtcaatgaagcttgaagcagtgaattcaagacttaactctggtattgaagcgtttcctcctaaagattttggtcagcaagcatttgatcctgctggcataccattcggttcgcaagctccaagagagtatagcagaggttcttcaccagactggttacatatgcagataggaggtagttttgaaagaacaacgtagtctacgagatcccttggtaataaatacataaaccagtggtattccattcttcagtagcacccagaaaacatcaatggtatactcagggaagcaagtacaatgggcacctcattcccattttctacactaggcatggagctgtcactgtttttcacaggactgcttcagtttctatttaagcatctccatatgttggtgtgttggaaaatgaattcatttactcaatatatgtagtatagtggacttttaggctttgtattctgctactcaacataacccttaaaatgatcattcttcttgtaaaagaatgctgcttcatcttaatacatgatgcttacagattgtgtaatactctcaatattggggtttgtgaagcaatgttgaataaattaacctc

SEQ ID NO: 11307 - DNA, 962 bp, Glycine max
  Clone ID: 701051166_FLI
caaagctcagacccaaacctttcttttgctcttcatccattccacaccaaaaagtaacagtttcagtttcggagggaaacacaacacaaaaagccccctccccccaaagcaaatcacctttttttctttcagttattcaaaaaatgttcgccgaagagaatggactcaagggagaccctagactccaagccatttcccaagccatcagagtcgtccctcacttccccatacatggaataatgtttcaagacataacgacattgttgttggatcacaaggcgtttaaagacactgtcgacatttttgtcgatcgttacagagacacgcacatttccgttgttgccggaattgaggctagggggttcatgtttggtccctcaattgcgttgggcattggtgcaaagtttgttcctttacgcaaaccacggaagctgccaggtgaagtaatttcagaaaaatatgctctagaatatggaactgattgcttggagttgcatgttggtgctgtccagcccggtgaacgggccataatcattgatgacttggtggccacaggtggaacaatgtcagcaggagtaaaacttctagaacgtgttggtgctgaagtggtggaatgtgcctgtgtcattggtgtgcctgatgtcaaggggcagtgcaggcgtattggaaagccactttatgttcttgttgagccgcgtaaagcagataaatgttacccagattgacatactaaaggacgctgggtgtgagaaacacaggccataatgtgatccttaagttttaggctgatggagtcgtgttcatggcaattgtcaaatatcatcctgggaaatgttcatcctgtttcatatctttatcttctttgtacatgttagccatcatgttatgtggccagcagtttagaacaataacaatcattaaagaagggatggattttatggcattttataaaatgtcaattt

SEQ ID NO: 11308 - DNA, 1803 bp, Glycine max
  Clone ID: 701051187_FLI
caaagagtgcgtcagttcagaccgtggtgtgttttccctatcagaaaggcgttattgagataggcacaactgaactggttactgaggatcctagtctcatacaacatgtcaaggcttgcttcttagaaatctcaaagcctacatgctctgataaatcttcctctgtccttgataagccacatgatgacaaatatccaacatgcaccaagggtgaccaaagggtgttagaagcaatggctctggagaacccatgttcccttgaagaaaatatcaaatttgatcatgaccccatcaatgaattgcaagatggcaacaacgaagattctaacatggattctcctgatggttgtcagcatcatttccctatggatggatccatgattgagggtatcaatggtgtgccatctcaagttcattttgtgaatgaagccttagtcattggtgctccagattctttgagttcttgtgattgtatgtctgaggcttctgagaaccaaggcaatgattccaagaatgtagaccaaactcaacttatggaacttcaatattgccataaaccaaagagaagctccatggatgttggagctgatgaggacttgtgctacataagaacactttgtgctattttggggaactcatcaacttttaaaccaaacccttatgctggtaactcaaattgcaaatctagttttgcgaaatggaagaaagggagagtttctgaaaggaagaggccaaagttgcaccaaagcatgttaaagaagactttgtttaatgtcccttttatgcatagaagttactcttctctcaagtcacaaaaagagaatggcagaatgaaatggactagtaaattggaaaatgctaatgatggtttcatggagaaaacattctctgataagaaaagagaaaataaaaactttcatgttgtcaaaccaatggttccatcttctataagtgaggtagaaaaaatttcaattcttggagacacaattaagtacttgaaaaagcttgagacaagagtggaagagctagaatcttacatggaagttacagaccctgaagcaagaatcaggagaaaatgccctgatgttccagagcagatgtcagataactatggcaccagaaagatttgcatgggaatgaaaccttgggtgaacaagaggaaggcttgtggtattgatgagatagacacagagctagaaagaattgtttctgaagaatcaaaggttttggatgtgaaagtcaatgtgaaggagcaggaggttctgattgagatgaaatgtccttacagggaatacatactgtatgacatcatggataccattaacaacctacatttagatgctcaaacagttgaatcatcaacaagtgatggtgttctcacattgacacttaaatctaagtttcgaggagcagcaacagcaccaacgaggatgatcaaagaagcactctggaaagtatctggaaatacttgacatgcctatttggatttcacatgatagtattagtagtagtaatagtaaatatttatgattaaacaactttagctctagaacagtgatttgtttcctaacaaaatatgtatgccttgttgtatgaaccatgattttggctattgtgcttaagtgctgacttgttagagttaccagagctccactctgtaatttttaaaccacttcagccaatctgttagcatgcatttgcaagattttgtttgcttttactgccagcagtatagaactgtttccttgcatttagaaagtgaagtgtgaatgtaaggtttcaatgtgatcaagaaggtgcttt

SEQ ID NO: 11309 - DNA, 951 bp, Glycine max
  Clone ID: 701051337_FLI
atttggaatgcaatcaggtttggcacagattcattttgattttttatttttctttcaattgattgccagtgttggaaaatgtggtgtttgatgagcatgatcgagaagttgattactctgacaagtcagttacagaaaatactcgtgcagcttatcctatagagtacattccaaatgcaaagttaccttgtgttggccctcacccaaagaatgtcatacttttggcatgtgacgcatttggtgtactcccacccgttagcaagctaaacctggcacagaccatgtaccatttcatcagtggatatactgctttggtggctggcacagaagaaggtattaaggagcctcaggcaactttttcagcttgttttggtgcagcattcattatgctacaccctacaaagtatgcagcaatgcttgctgaaaagatgcagaagcatggtgctactggatggcttgttaacactggttggtctgctggaagctatggtaatggaagccgtattaaactacaatacacaaggaaaatcattgatgctattcactccggaagtctcctgaatgcagagtacaagaagactgaaatttttgggcttgagattcccaccgaagtggagggtgtcccttcagaaattctggatcctatgaacacttggtcaaacaaaaaggcctacaaggagacactattgaagttggctggattgttcaagaacaattttgaaaccttcaccaactacaagattggcaagggaaacaacaacctgacagaagagattctcgcagctggtccaatcttttgagacaatgttatgcaacatgttgtgtggttgggaatgttagggtggtagataaaatctttccttagaataaaatattgtaccattggtttggttgggctcaaaatgtcatttctagtcttcctccaaaaatgaagtttattttctagtcttt

SEQ ID NO: 11310 - DNA, 1472 bp, Glycine max
  Clone ID: 701051351_FLI
aagcaattaccccttttcataaaaccctagcaagtaaaaaccgtcccttttcgtttctgttctccgtgcttcgaaaaccctaactaaactcgcgtggtagctccaatgggaggaaagaggaagaagagcgatgatgatgatgacgtggaagcagaagcagaagcttcaggttggaagaagaaaacgagaacgacgacggagagagagaaggagaagaaggagccattgcgtccttcgatgataaagaacaaggagaagcgatcggagctgcacgcgaaactgaagcaccagaagaagctcgagaagcgcgccaaggccaaggctcgggacgctgctctcaagaaagctctcgagctcggcgaggagcctccagagaagaaggtccctcgcactatcgagaacacgagggaactcgacgagaccgtttgcaagcccgatgacgaagagttatttgctggaaatgatgctgatgaattcggtccaattttgaatcagcaacaaactcccaagatattaatcaccacttgccgcttccattctactaggggacctgcttttatatcggagttgctttcagttataccaaatgcacattacttcaagagaggaacatatgatctgaaaaagattgtagaatatgcaaagaagaaggacttcacttctattatagttgttcacaccaatcgtagggaaccagatgctcttttaatcataggtgtacctgatgggcctactgctcatttcaagctctcgaaacttgttttgcgcaaggatatcaagaatcatggaaatccaaccggtcacaagcccgagcttgtattgaataacttcacaacacgtctagggcatcgagttggaaggttgatacagtcacttttcccacaagatccagaatttaaaggccggcgagtagtcactttccacaaccagagagacttcatattcttccggcatcatcggtatatttttgaaaccaaagaagttaaaaaagcagagtccaagggtaaaaaggacaaagatggcgagagtgagaatgttcctgaacagaaaacaattgcccgacttcaggagtgtggtcctcgtttcacattaaaattgattagcctgcagcatggaacatttgacaccaagggtggggaatatgagtgggttcacaagccggaaatggacacaagccgaaggaggttcttcctatgacttgtttgggaaggttgcattttggacatcttttttgctggaaataggttttatccggtgaagagggttaattatcttgaggttgttgggatctttcaacttaattctggtgtatcatttttttaaaattttttttatttttattttattgggggctaaagtcctatcatctctgtaagccgtgagcaattttgaccttacatctattggtggttgaggaagagataacaaaggtttcttataagcaaatatataagcaattttgtattatggtc

SEQ ID NO: 11311 - DNA, 830 bp, Glycine max
  Clone ID: 701051411_FLI
ccagtagtgacaaaagtcacaaacagcatatgtgtccagagattggctgtggaaaggtttttagatatgcatcacagctacaaaaacatgaagattctcatgttaatttggaatcagtagatatggtgtgcttagagcctggttgcttgaaacatttcactaatgtccagtgccttcaagcccatgtgaagtcctcccatcagtatatgacctgtgacatttgcgggacaaagcaactgaagaagaatattaagcgccatcttcgatcacatgaagctgaaggagttcatcagagacctttcaatgcgagtttaagggttgcagctgcacattctcaagaaaatctaatctagacaagcataagaaggctgtgcactttaatgtaaagccttttgcgtgtgggtttactgattgtggcatgagatttgcttacaaacatgtgcgagataatcatgaaaaaactgctaaacatgtttttacccttggggattttgaagaagctgatgaagagttcaggtcaaggccgaggggaggaaggaagagaacatgtcccactgttgaaatgttaattaggaagagggttaccccacctagtcaattggaacattggttatttatgcaggatagtgagtagagtgcatttagcactctgtgctcctaatactagtaggtaaaatgtaaatttaacatgttgacacgagtatataatatgtatacagtttggattattgttaacagatatataggatttaggacaacaacgtgtaataatgattgatgcttatgagttatgacagattccatagtgtagcgaatctattaaccgttgt

SEQ ID NO: 11312 - DNA, 1361 bp, Glycine max
  Clone ID: 701051427_FLI
agaagaagaagatggagatgtatcagatctggagcaggagaatagcgttgggagcgttcgcgtttgttctgcttttcctatcggcctcagcagacgacgtcgttgtgctctctgaagataacttcgagaaggaagttggtcaggacagaggagctctcgttgagttctatgctccttggtgtggacactgcaaaaagcttgctccagaatatgaaaagcttggtagcagcttcaagaaagccaaatctgttttaatcggcaaggttgactgtgatgagcacaagagtttgtgcagcaaatatggagtctctgggtacccaacaattcagtggtttccaaaaggatctcttgaacccaaaaagtatgaagggccacgcactgctgattcacttgctgagtttgtaaatacggaaggaggaacaaatgtgaagattgctacagctccttccaatgtagtggtgcttacatctgaaaattttaatgaggttgtcttagatgaaaccaaagatgtcttggttgagttttatgcaccctggtgtggacattgcaaaagtcttgctcctacttacgagaaagttgccacagcatttaaattggaggaagatgtagtaattgcaaatctggatgctgataaatataaggatctggctgaaaagtatgatgtgagtggatttcctaccttgaagttcttcccaaagggcaacaaagctggtgaagagtacggaggtggaagagacttggatgactttgtggcttttatcaatgagaaatctggaacaagtcgagatgtaaaaggacaacttacttcccaagctggtatagtagaaagcttggatgtcttggttaaggagtttgtagctgccagcgatgaagagaagaaattcgtgtttacccgaatggaagaggaagttgagaagctgaagggttctgcctcaaggcacgggaagatttacttgaaagctgccaagaattacttggaaaaaggttctgattatgctaagaacgaaatccagcgcctacagcgcatacttgacaagtccattagtcctgccaaggccgacgagttaactctaaagaaaaatatcttgtcgacatatgcggcttgactttttggtgcatcattaaccatctctcatggaagctcgtgatcaatcgcagctcctgatgattgtttgactttgatatcgaaaatgctgggagatattcaacgtggatacttgtagtgcttaatttgagtctgtactattgaccttatcttgcatggcgcttttggggttaaaaattccgaacttacgattcttctccccattgtagtctacctgagcggtttaaaattttgggagacgatagcttttgtcttt

SEQ ID NO: 11313 - DNA, 2017 bp, Glycine max
  Clone ID: 701051573_FLI
gttccatataaaagcaaggctagaacacttgcaagttcgaaagagccatttttatttatcagtcaccgaaacaactatggatacaatcaagtccttcaagggctacggcaaagttgacgagttggagcagcaagcctatcagaagaagacacgtaagcgcctcataataatcacagtctcttcaatcgttctaattgcggtgatcatcgccgctatcgcaggggttgtcatacacaagcgcaacacctcatcatctccctcatccgactcgcccccgcaaactgagttaaccccggccgcgtcactcaaagcggtttgcgacgtgactcagtaccctaactcgtgcttctccgcaatctcctcgttaccggattccaacactactgatccggagctcctcttcaagctctctctccgcgtcgccattgacgaattatccaagctctcgagctttccttcgaagctccgcgctaatgcggaacacgacgcacgtctccagaaggcgatcgatgtctgcgggaacatttttggcgacgcgctggaccggctcaacgactccatctccgcgctcggaagcagcggcggcgccgggaagattatctccccggcgagtgttagcgacgtggagacgtggatcagcgccgcgctcacggaccaggacacgtgcctcgacgcgctcggagagctgaactccaccgccgcgagcggcgcgttgcgcgagatcgaaaccgccatgaggaactccacggagttcgcgagcaacagtttggcgattgtcacgaagatcctagggttgctgtcgcagttcgcggcgccgattcaccaccggcggctgctaggatttccggagtggctcggggcggcggagcggaggttgcttcaggtgaacagcagcgaaacaacgctggacgctgtggtggcgcaggacggtagcggacagttcaggacgatcggtgaggcgctgaaattagtgaagaagaagagcgagaagaggttcgtggtgcacgtgaaggaagggcgttacttagagaacattgatttggataagaatacgtggaatgtgtttatcttcggtgacggcaaggacaaaaccgtcgtcgtcggtagccggaacttcatggacggcacgccgactttcgaaaccgccaccttcgctgtgaaaggcaagggattcattgccaaagacataggttttgtgaacaatgcaggtgcatctaagcaccaggctgtggcatttagatctggttcggaccgttctgtgttctttagatgctcattcaatggcttccaggataccctctatgcccattccaatcgccagttctaccgtgactgtgacattacaggcaccatagacttcatattcggaaatgcagctgcagtgttccaaaactgcaaaataatgcctagacagcctctaccaaaccagttcaacaccatcacagctcagggcaagaaggaccgaaaccagaacactggaatcataatccagaaatcaaaattcactcccttggaaaacaatctcacagctcccacataccttggtaggccatggaaagatttctccaccactgtgatcatgcaatctgatattgggtcattcttgaagcctgtggggtggatgagttgggtccccaatgtggaacctgtaagtaccatcttctatgctgaataccagaatactgggcctggagctgacgtgtcacagagggtcaaatgggctgggtataagcccactctcacggacggggaggcagggaagttcactgtgcagtcctttatccaaggccctgagtggttgcccaatgctgctgtgcagtttgattccaccttgtgatttttaatactaccggcctcatagaaagatatcaactgctaatcatatttttacatgtcttttaatcacactcttgtaacatgtattacactctatacgcatttttttgacctacttttgaatggtttgtaacattcttctagaaaatctcttcagaaagatatgtcaaaatttcaaatg

SEQ ID NO: 11314 - DNA, 1934 bp, Glycine max
  Clone ID: 701051641_FLI
gtgcccagcattcttttttatcttctcttaaagtgatgtttggactgtgaaataataacagtgtgttttttctctggttatttcagtagacaatatgggaagcactggtttgctacatttgatatgccttgtcattgctttagtaagtgtgtcgcttgtgcaagcagaagatgcgtataagtatttcacatggacggtgacttatgggactctttatcccttggctagtccccagcaggttattcttatcaatggtcagtttcctgggcctagacttgacttggtaactaatgaaaatgtaattctcaaccttatcaacaagctggacgaaccatttttactcacttggaacggtattaaacaaaggaagaattcatggcaagatggagttttgggaaccaactgccccattcctccaaactcaaattacacatacaagtttcaggccaaggatcagattggcacatatacatactttccatcaactcaactgcataaagcagctggagggtttggagcactcaatgtttatcacagatctgtcatcccaatcccttatccaaaccctgatggagattttactctactcgttggtgattggtacaagaccaaccacaagacactaaggcaaactttagattctggaaaatctcttgcatttcctgatggcctccttattaatggtcaggctcattctaccttcactggtaaccaggggaaaacctatatgtttaggatctcaaatgtaggcttgtcaacctcaattaacttcagaattcagggtcataccctaaaattagttgaggttgaaggatcacacactgttcagaacctatacgattcacttgatgtgcatgttgggcaatcagttgcagtgttagtaaccttgaatcagcctccaaaggactactacattgttgcctcaacaagatttaccgagacacctctcactacaactgcagtactacactatgcaaactctttttcctctgcattaggacccgtgcctgctccccccgttgataaatatgactttgattggtccatgaagcaagctagaacctacagatggaatctgacagcaaatgctgctaggcctaatccacaagggtcattccattatgggaagattactcctacaaaagtaattaagttggccaattcagcacctttgatcaatggaaagctccgttatgctgttaacagtgtctcatatgttaaccctgacacccctctcaagcttgctgattacttcaacattcccggagtcttcagtgtgaatttactccaaaactctccctcaaacggtccaggatacataggcacctcagtgttgcaaacttctctccatgattttattgaggttattttccagaacaacgaaaacaccatgcaatcttggcatcttgatggttatgatttttgggtcattggtcatggtttcggccagtggacagatgctagcagaaaaacatataatctagtggatgccctgactagacacactgcacaggtgtatccaaaatcctggactactatattggtgtctttggataaccaaggcatgtggaacttgaggtctgcaatatgggaaagacaatatcttgggcaacagttctatcttagagtgtggaatgcacagaaaagccttgctaatgaatatgacattcccaataatgttctgctttgtggcaaagctgttggacatcacccttagtatatatatcggtgtattttctggtcatgagggcttgactacacaactagaattatttttcctttttcttaagaaagaaaaggacaatgtgggagaagtcaatttctccaaatttcggatagacttgcgtatatttgagaaaaaagtcttgtattaatttttcgttgctcgtttatgtattaacaattgagttcatacttaatttatttatagctgt

SEQ ID NO: 11315 - DNA, 694 bp, Glycine max
  Clone ID: 701051832_FLI
aagaaaaagaggcgcaagatgagtggtagggtttctgggaaggtgaagtggttcaatgatcagaaggggtttggattcataagccctgacgatggcagcgacgatctcttcgttcaccaatctcagatcaaatctgacggtttccgaagcctcgccgaaggagagtccgttgagttcgccattgaatctgaatctgacggacgcgcgaaggctgttgatgtcactggccccgacggcgccagcgtccagggaaccagacgaggcggtgatggtggccgaagctatggcgggggacgaggaggtggtggaggtggctacggtggaggcggtggctacggtggtggtggtggctacggtggaggcggtggttacggtggtggtggaagaggcggcggcggaggaagctgctacagctgtggagagtctgggcattttgccagagattgcccatcaagtgctcgttgaatttactgttagggttgtttatgttttgcggattgttttaagtttttactttaatatgtcttagggattttaatggtttctgtccaaactatgggttcttatgagtagatgtgtgggatttttcttttttggttatttaaatgaagggtttctgtgttatcgttacaatctgcaaactaaaatctgtttgaacttacattttgctataatgaatcgtatgattgctatc

SEQ ID NO: 11316 - DNA, 384 bp, Glycine max; identical to SEQ ID NO: 10261
  Clone ID: 701051839_FLI

SEQ ID NO: 11317 - DNA, 525 bp, Glycine max
  Clone ID: 701051841_FLI
ttttcttctaacaattacctcacacttttagatatcaacttttgttgttttcttctgtcatcaagaaaagcaaagagctactattgattagagaagcacaaggagatgagttcatcacagagagcttggattgttgcagccagtgttggagttgttgaggccttgaaggaccaaggggtgtgtaggtggaatcacactttgaagtcagctcaacatgtcataaagagccatgttggatcattttcacaggctaagaacctttccttttcttcttctatggtttccacctcttcaagactaaagggaaagcaatcagaggagtccttaaggactgttatgtacttaagctgctggggacccaactagagaacaagggcattagggatataaagagattccatgattgtattggttcttgtgtattaaaagaggtattgtttgtctactgtgacaaattgatgtaaatgtaatagaccaaaagtcagcttttccaaattgaaaatgccttcacttgttcatttatgt

SEQ ID NO: 11318 - DNA, 1317 bp, Glycine max
  Clone ID: 701051882_FLI
tggaaggcgagggtttgaggtgcgcaagcaaacaaagatgaaagaagcggatgagcaactatgcgaggcggccattaaaggtgacacgaagaaagtgaggtctcttatatactccggcgctgacgtcacccactttgacggcgatggcctcaatcctctgatgcacgccgcaaagcacggccatgcacccgtcctcaccctcctcctctccgtcggcgctccctggaacgctctttctccctccaacctctccgccggtgactacgccatgcaagaaggccacaacgaaaccttcgagcttctcctcaacgccggatccaatctgaactgatactgggaacaattgcgaggaaggcaaacaagaacggcgattccggtcacgattatttggaagatagggtgagttttagcgaagacaagcttatggactctgaaagcaaggctgtgatgatggcatgggagaatccgttgatggaggctcatgctaaggcggtttgttccggtggtggccacgtactcaatattgggtttggtatggggctcgtggattcggccattcagcgatatgcacctgcttcacacaccattgttgaggctcatcctgaggtttatgaacgcatgcttcgctccggttggggccagaaggaaaatgtcaagattgtttttggacgatggcaagatgttctgcctcagcttgaaacatatgatggaatattcttcgacacctatggggagtactacgaagatctgagggagttccatcagcatctcccggcattgttgaagactggtggtatctactcattcttcaatggcctttgtggcagtaatgcatttttccatgttgtttactgccatttggtatctcttgagcttgagaatttggggtattccacacaattgattccattgccggttaaggattgtttgggagaacaagtttgggaaggtgtgaaacaaagatattggcagctcgatacgtactatcttcctgtctgtcaggccatagagaaccctgagtgaggcaggaaatggatctcctgcagcttagaaaagaactgcaccctgtgcagttacaaatttcaccatccatgcaagtttttttctctcctttatatattaaaattaaaggaatggttgaaatctcatgcagttttatttttaactgtagaggatcttaatcccagtgatgtatggtttgattttaataacatcgtcaattattctaacacgccatgtgtttttgcttgtgtaacgtatcaaatggaattgtaagaatacagttagagtcatattgaacttttgagctttatttgt

SEQ ID NO: 11319 - DNA, 628 bp, Glycine max
  Clone ID: 701051886_FLI
taatttgagtgtatattcagagagaaaacgagaaaacatcgtgaagcatgtctggaagaggaaagggagggaagggtctaggaaagggaggagcgaaacggcaccgtaaggttctgagggataacattcagggaatcacgaagcccgcgattcggcgtctggcgcgacgtggtggcgtgaagcgtatcagtggtctcatctatgaagaaactcgcggtgttctcaagatcttcctcgagaacgtcattcgcgacgctgtcacctatactgagcacgctcgccgcaagaccgtcactgctatggacgttgtttacgctctcaagaggcagggcaggaccctctatggtttcggtggttagagatttggggagtggattagggtttctcatcaatttcgttgttgatagttctttagctcttcttgtttgcctttgagttgtagctatgagaaattttaatatgtttatctgattaacttggatatatatatttatatcgtggcctgggtagattcattgttttctcgttattttgcttgtgccaaactgaatttaattgcaatgtttgttctttcggctaagttgaatttgattgttcaatttaattttgagtcattgcccgcgaaatt

SEQ ID NO: 11320 - DNA, 1067 bp, Glycine max
  Clone ID: 701051901_FLI
gagaaatgaggagtataagagggcagtattgaaggctaaagagcacatacgggctggtgatatttttcaaattgtactaagtcaacgttttgaacagagaacttttgcagacccatttgaaatctacagagcattgaggattgttaatcctagtccatatatgacttatttacaggccagaggaagtattttggttgcttcaagtccagaaattcttacacgggtgaagaagagaaagatcaccaatcggccccttgctggtactgttagaagaggaaaaacaccaaaagaagatatcatgttggagaaacaacttttgaatgatgaaaagcaatgtgcagagcacgtaatgctagttgatttggggagaaatgatgttggaaaggtctccaaaccgggttctgttcaagttgaaaagcttatgaatattgagcgctattcccatgttatgcacatcagctcaacagtcacaggggagttattagatcacttaacaagctgggatgcattgcgtgctgctttacctgttggtacagttagcggagcaccgaaggtcaaagccatgcagttgattgatgagttggaagtcgcaagaagggggccctatagtgggggatttggaggtatatcattcaatggcgatatggacatagcccttgctctgaggaccatagttttccctacaaatgctcgttatgacacaatgtactcctacaaggataagaacaaacgcagagaatgggttgcccatctccaggctggagcgggaattgtggctgacagtgatcctgctgatgaacaaagagagtgcgagaacaaagctgcagctcttgctcgtgccattgatcttgcagaatcttcatttgttgataaataatttggattgatccatcatcagtgatgctccttgataactgaggtgtgcatcctttttaaatggtagagaggaagtttgtggtgtgggcagatgataggggatatgaattacggagaatctgaaactttgataatgttatgacagaagtgatgaacataataaggtatttaatgataatgacagctttgtg

SEQ ID NO: 11321 - DNA, 597 bp, Glycine max
  Clone ID: 701051914_FLI
ttgagaatgtaggtgctgaggattactattgtaggtttgagtacaaagctgccactggggctttcacgcctgaccgtgttgctgtgtattgcaagtgcgagatgccttataacccagatgacctcatggtgcagtgtgaggggtgcaaggattggtaccatcctgcttgcgtgggcatgactattgaagaagcaaagaaattggaacattttgtttgttcagaatgttcatctgatgatgacatgaagaaaccccatgctacattttctgtatcaccaggatctgatgtcaaggttgagccaaagcggcggaagagatgaccatcacgaagaattaactcatcttgcgaatgcaactcttactgaatttcgcgggctatgtggtagctgttgtgtgtgtattgtacagcttctaccagaggctataaaaacatcattttatgtatttgactcaggctatgtatgtattggtcttagatttatgacagacattgatctgtttcccttgtgtccagaaagagtaactcctgtcagtgttaatgtttgagaaaacatcaggccttgaatactggagtaaaaagaaatgatcaattttctg

SEQ ID NO: 11322 - DNA, 588 bp, Glycine max
  Clone ID: 701051953_FLI
gcaatggcacgtaccaagcaaaccgctcgcaagtccaccggaggaaaggctccgaggaagcaattggcaaccaaagccgctcgcaagtcagccccggcgaccggcggagtgaagaagccccaccgcttcaggccaggaacggtggctctgagggagattcgaaagtaccagaagagcaccgaacttctgatccgaaaactcccattccagaggctcgtcagagaaatcgctcaggatttcaaaaccgatctccgctttcagagcagcgccgtttcggctcttcaggaagccgcggaggcttatctcgttggactctttgaggacactaacctctgcgctattcacgctaagcgagttaccattatgcccaaggacattcaactcgctcgcagaatcagaggcgagagagcttaagtttagggtttcgtgtcatttgacattaaaattaggttactgcttattgtaattcgtgttttcttcaaatgcctctttattgtaagattcatcttatttcatcaggtatattcccatatggatctgcacaactgagtttatgttgaaaaacgagataattctctaattttatat

SEQ ID NO: 11323 - DNA, 1489 bp, Glycine max
  Clone ID: 701052074_FLI
gtttggctctacaagtctttccttttctatttaattcctaaaatcccattcttcttcgctcattcctctgcactgccatcatccccaacttcctcacaaggttacaaggactaaagagttgtgccaccatgtcggacgatgaaagggaggagaaagagttggatctctcttctgccgaagttgtcaccaaatacaaaaccgctgctgagatcgttaacaaggccttgaagctagttatttcagaatgtaaaccaaaggcgaagattgtggatatttgtgagaaaggggattcatacattagagagcaaactggaaatgtgtacaagaatgtgaagaggaagattgagagaggtgttgctttcccaacatgtttatcaatcaacaacgttgtctgccatttctctccactagccagtgatgaggccgtgttggaagaaggtgatatattgaaaattgatatggcatgccatatagatgggttcattgctgtggtagctcacacccatgttcttcaggaaggtcctgttactggaagggcagctgatgtcattgctgctgctaatactgctgctgaggtggccttgaggcttgtcaggccgggaaagaagaacaaggatgtaagtgatgcaattcaaaaggttgctgctgcctatgactgtaaaattgttgagggtgttcttagccaccaaatgaagcagtttgttattgatgggaataaagttgtgcttagtttgtctaatccagacacaagggttgacgaagcagagtttgaggagaacgaagtttatgcaattgatatagtaacaagcactggggatggcaagcctaagctgttggatgagaagcagacaactatttataagagggctgttgacaagagttatcacttgaagatgaaagcgtctaggttcattttcagtgaaataagccaaaaatttccaatcatgccattctctgctagggctttggaagagaaaagagctcgacttggtttggtggaatgcgtcaaccatgagctcttgcagccatatcctgttttgcatgaaaagcctggtgattttgttgcacatatcaaattcacagtcttgttgatgccaaatggatcggatcgaatcacaactcatccactccaagaattgcagcccacaaaaacaatagatgatcctgatattaaggcctggctagccttgggcacaaagacaaagaagaaaggtggtggaaagaagaaaaaaggtaagaaaggggagaaggcagatgagtcagctgaagctgagcctatggactcaacaaacgaggccactcctcaagagtgacttaactctcctcccctctcctctcccccaaacaatgaaagaagttttttcatttcattttcgataccccttttcaattttggtacactgttcaccaaattgtattttgcttggatatcaattttagtatagtgttccgacattgattctaatagcaattttcatatgctcatttt

SEQ ID NO: 11324 - DNA, 1459 bp, Glycine max
  Clone ID: 701052313_FLI
aattaaacaggctgaagaattagctgcagctatggcagcaagtaagggacaacctgcacaaactgatgatgattcagtgagcattagattgctgtttttataagttgattactgttacttttcggcacaatattcaaactttattgagcttggactgttatttgagattgagttttggttttatcatattacttcatctattagcatatatactttacctgcacaaactggttattgacacaattactgcctctgtttcatttgtgaaaattgttgtttgtttttccttaaataagcatttggctttatgatctacatttgactagaaaaaaatataaatccttgaattcccaaataaattaataaatcccagtcagattctttttaaaagaaaaaactgtagttgttaagaaagacagaaaatgagcctatattatcattacataacaagctctaggacagaaaatgagccaatatttacataacaagctctaggacatttgaatggttgatggcacatatgaggattgttttgcagcagatgggatgcctgaaagaagtgatctgactaaggttgccttgtgcctatatatgcagcaactgtgaaaattaagattcattgtgtatggaattatggtattgctgattgggtttctacaaggtcctgctttggattgctcttgtatcttttctcattgtgttcttgtaagtttgtataaccataatatatatatatatatatatatatatatatagattttcaactattatggttaaaattttgatccttgaagccttgttctttcttttggtagttttattttggttgggatttatttaactttgtgtgaattagccaatatgttgtaatctgcacgttaaagggttttatttatgtgttctgttcaaatatctagtttgtgctacatagtcttttagagcacattcgcaaatactacaatatgcacgatttactttgttgattcttttgaggcaggccacaaaccaaaactcccaagcaggatttggagctgttcctcaaggacaatatgcacctacatttgcaggaggacagccaaggcctacaggcatggccccacagcctttaccactcggagggggcgacatgccgggctttgcaggtgatgatgaggaaaccaagaggctacgaactgagagggctggaggatggagtggagatattagtaggaaaagggcacttgaagaagcctttggaagcatctgggtttgctgagacaataataatcatgcaaggctggacatgcttattttaaaatggtgtttagatactttctaaatcctaagggcatgcaaattccagtgtcacagaagctattttggcatggatattgcgatgtaaatggtgtagaatgtagatttgttgaattttgttctgtgaaccatattgaattttattgtaaggggctttggcttttct

SEQ ID NO: 11325 - DNA, 679 bp, Glycine max
  Clone ID: 701052317_FLI
aacaagttcaaattacaatgggtagatcaccttgttgtaacaaaaatggcctcaagaaaggaccatggacaccagaagaagatgatcttataatcagaatgcattcacttttgggaaacagatggtccctcatagcaggaaggttaccagggagaacagacaatgaaataaagaactactggaacacccatctaagcaaaaagctgaaaattcaaggaacagaagacacagacacacacaaaatgttagagaatcctcaagaagaggctgcaagtgatggtggcaacaacaacaaaaagaagaagaagaagaagaacggtggcaaaaagaacaagcagaagaacaaaggcaaagaaaatgatgagccgccaaagacacaagtttacctaccaaaaccaattagagtgaaggcaatgtatttacaaagaacggatagtaacaccttcacctttgattccaattcagctagtggatcaacaagccaagagaaggaggaaagccccgtgacaaaagaatcaaacgtggttagtgaagttggtaatgtgggagaagaagtgatggttttggcttcttcagtgaggaccatgacttagtcaacgtctcagatattgaatgccactcttattttcccacagatcatggcacctacagcaattgtatgaagatatttcagctcttg

SEQ ID NO: 11326 - DNA, 1265 bp, Glycine max
  Clone ID: 701052353_FLI
cggtcgagtttctctcagcgttgaaacttgaaattcttcttctccgaaacctctttgaaccgggtcaagaaataaacctcgctgggaaccgttgattgggtttgtacgaataatttgaaatgaagattcagtgcaacgtgtgcgaggccgcggaggccaaggttctgtgctgcgcggacgaggcagcactgtgctgggaatgcgacgagaaggttcacgcagcaaacaagctcgccagcaagcaccagagggtccctctctctctctccgcctctcacatgcccaagtgtgacatatgccaggaaatggttggttatttcttctgtttagaggatcgagctttgctatgtaggaattgtgatgtatctatacatacagcaaatgcctgtgtctctgatcatcaaaggtttttgcttactggtgtgagagtaggccttgaagctactgagcgcggtgcttcctcgtcttctgtgaagtcacagtctggggagaaaatgtctgatgctaaatcttcatccatctccagaaatgtttcctcactgccccagccatcaaatgccaatgaagtgttacccctccaaatgcaaggagttgaggagtttccaccaagcaatttctcaggttatacttctggaaacgtctcacaatggcccattgaagaatttctcggattaaatgaactcagtcagtattataattacatggatggatcatctaaggctgacagtggtaaacttggggattctgattcttctgttttgaggtctggtgaagaggatatggatgatgacggcttcttgggacgtgttccagattcatcctggacagttcctcagatcccttcccctcctacagcttcgggtttatattggccgaaagtccctcaatatacatctgacagtgccatgtctgttcctgacatatgcttttctcatgtgcgacagccccaccatgcccagcataattctaatgtttccaaaaggcgtaggcaactataatttgttctctgatcactagctcaatatgttaaaaagattgttttttatctgttagagatggagcgaacttttgaagttctacccttctttagatcatttgaagttcagtttgctacatgtttcttctattcacggcagtcttcatttctttttgggagcaaatcccttaactctccatttgttattgggaatttgacaaagaaaatagctggaacaacaatgtaataggcttctcatttcaatttgatcttgtgcattttaacttat

SEQ ID NO: 11327 - DNA, 1274 bp, Glycine max
  Clone ID: 701052519_FLI
ctttcttttcttaagcccctcatgcatggtggcccgttcagtcccatcaatttttctctccttttttatcatcatccaaatgctgcctaaaccttaatgctttctcttccatcatggccttgattttcttgttatttccattcccctcggaacggtagttaacgagaagagaaaaacaatggatgaaactaaaattctcttagagttgaagtccgtttcgtccttatgtgttcatagcttcatcaaccttctatgcgaagaaactatttcttttctctcagtgttctcttcagatcctctgtttcattgcatcgtggcgttttgcaccttggttttcctctatttgccacaccttttcttgaaaataattctatctccagtgcccattctcactgcgattctccttctctctattctccgtctcggtgcaattcaaaggttacaacatgaaagaagggagaatcatgtgaaacacgaagaacaacccatcgtttacgaagaaaacaagggaagtaaatacaagggagagaaacagagtccatgtaccattgaacctgacgaaacaaagtccgtagaacaagtgcaccaatgggtccattcagaaacagaggtcatttccgacatgggttttgaatcaagttctcgttttgttgaatggaacgtgaaagcaccgttggaagtgatatatgaagagtatggtgaaggtgaagaagcaggggatgatgcaaacgagaacgtgggtattatgaggtacccttcgttgtcgcgtttttacccggaatcggattccgatagcgaatcggagagtgagtttccggcgatcggagattgggactcgccggaggaccttgagtttcgctggggtgaagaagaagaagaagatgatggtgatgatgatgatgaagaagaagaagacagagaagggttgattgagatagctctcgatggatgcaagaggaagaggaacttggaatttaactttgatgaagagaatttgattgagatcgatatttctccgtcgaggtacagagaactttccggcgacgacgaggtgttttccggtgagatcagctacaactaatgtgacattaattcgagattgacgtagtggattattgtgttttttgaggttggtgaaaagggaaaccagatgataggaatctgtgtttttattatttcttattgtaaaaaaatttagtgggattttggtgcttgcctgttttggacgtggttaccgttttattaaatttatgatgcatgtacaataatttact

SEQ ID NO: 11328 - DNA, 693 bp, Glycine max
  Clone ID: 701052527_FLI
gttcagcttttgactactgttgatgctgatgggggtctccctgcgagcccacgcattcgcttcaacaaggatggaacacttttagctgtctctgcaaatgagaatggaattaaaattttagccaatggggatagtctgtttccaaacagcaaaggatagcaatgaaattcttaattcatgggcagcaaacttggagaaattgcttgatcttgtggagaagagttgtcatcaaatacacaaggaaaccatggtccataaagctgctttgaaggtttaagaaggttcacatactgtcacagggcatctcaatattgatgtgattttgtactgaagttgccttttcaggaatgttctattgaactgtcactgactgagttggtgaagaatttcgctaaacgattatcgctttttcttttttatattttgtcactcatgcgttcagggtagagctggatatatgcatcatagtactgaaagtagcattgttgtatactactggtacataccttaccactgacttatgactggatcctataagatcttgattgaagcagtggctagaaattgagtgtttgctcatttatattcttttgcctggttgatgttttttcctctcgtattttttccctctattacattttcttgtgaaatttggacgtcgttattttccctgaatggcaatttcctaactgc

SEQ ID NO: 11329 - DNA, 622 bp, Glycine max
  Clone ID: 701052585_FLI
attcctggccctgtcggaatggtgccgatcaagagaacaaggttgtcgcttttggcaccattcctggccctgtcggaactccttatgaagggggcattttccagattgatatcacattgccagatgggtacccgtttgaaccccccaagatgaagtttaaaaccaaagtttggcatcctaatatcagcagccaaagtggagctatttgcctggatatcttgaaggaccagtggagcccagcactcactctgaagactgcacttctttctgtgcaagcacttctctctgctccacagcctgatgatcctcaagatgccgtggtggcacagcagtatctgaaagactatcagacatttgttaacactgctcgctactggacagaaagttttgccaaggaatcgtctcgcgggattgaagacaaggtacagaaactcgttgagatgggatttccagaagctcaagtaaggagcattttggaagctgttggtggtgatgaaaacttggctcttgaaaggttgctgtagatcatggtcaagtttaggatgacatgtctccataatatgatggaaccatatagacaaaaagtttaaattgaatatagagtcatataaatctacttggc

SEQ ID NO: 11330 - DNA, 2024 bp, Glycine max
  Clone ID: 701052595_FLI
cacacaacaaattctactttttttgacaaagcttctctccaaaaactcaagtggtgattccatttccaccatgtccaattctgaacacaacatcatcactggacatgctggctatgtccttgaagatgtccctcatctatctgactacatccctcacctcactacatatcctaatccgttgcaagataatccttcgtattcagttgttaaggagcattctgttgatgtggatgatactattgctcaaaaggcaagttgttgttctctctttcattacagtgttcctgaattgttgattcaattttctgtttctctgtctaggtagttgtacataagaatagcccaagagagactcattttcgccgtgctgggccgcgtcagaaggtctgtttgtttgttttgtttggctgccaccaatgtgtgtgtgatttatggggtgacagacaacaatgattgaatgtttcccaggtatattttgagtccgaggatgtgtatgcttgtattgtcacatgtggaggtctttgtcctggtgtaaatacagtgatcagggaaatagtttgtgggttataccatatgtatggggtgcacaaagtactgggaatagaggtaccaatcactctaagtgccttcgttatttctaaccgagacagattggcagtttcatttgaaatttttcatgagcattttcattgtgtaatatagtgttctctcttttcctccacttcaattcaattgtatgcagggagggtatagaggtttttattcttgcaatactattccattgacgccaaaggttgtgaatgacatccacaaacgtggtggaaccatccttggtacctctcaaggagaaggaggcaatgatacgttaaagattgttgatagcatccaggatcggggaattaatcaggtttacatacttggaggagatggaactcagagaggggcttctgtgatttttgaggaaattagaagacgtggcttgaaagtttcagtggttggaattccagaatcggttgataatgacatcccggttattgataagtcatttggttttgacactgctgttgaagaggcacaacgagccataaatgctgctcatgtggaagcagaaagcactgagaatggtattggtgttgtcaagttaatgggtcgtcacagtgggtttatatctatgtatgcaactctcgccagccgagatgtggattgttgcttaattccagagtcacctttttacctcgagggtccaggtggactctttgagttcattaggaaaagactcgcagaaaacgggcacatggttatagtaatttctgaaggtgcaggtcatgagcttatttcagaaagcctatctgctacaaataagcaggaagcttctggcaacaagttacttcaagatgttggtctgtggttatcccagaagattaaggatcacttcacaaaaagtcaaaagatggatataactctgaagtacattgatcccacctacatgatccgtgctgttccaagtattgcatctgataatgtacattgcactctccttgctcaaagtgctgttcatggtgcaatggctggatacacaggcttcgcagttggcacggtcaatggcaaacatgcttatattccattttatcggataaatgaaattgagaagaaggttgttataactgaccgcatgtgggcaaggttactgtcttcaaccaatcaacctagcttcttgaatcctaaagatatcactacacatcaaacgggaaattaaacctggccaatagaccagctgctagttagtgttttctttttacatgcacttgtttagtgttaactcatgagtcaatattcgttcctttgcgacgttaatcggtaagtgtaccaagtccctcgcacaagtaatataaaatggtaagaaccgagtatcgaatccagagggaacttgtttcactcccattaaaagcaaagtaaatgtcaagttggatttttgtgtgaaaatctagttaaatacaaattaaaatatttagagattgagaagt

SEQ ID NO: 11331 - DNA, 1105 bp, Glycine max
  Clone ID: 701052693_FLI
aaattattttctcttctccaaaattcaactcaataatcccttccctggttcccatcatggacgaattagaagaaaccctactcacccaaatcgactgggaatcgttcctcgacgacatacctgaacttaacgtcgatgattttttgcaggacgacaacgccgttcctgttgttaccgacaatcattcctccccgaacgacgaccccgttttgtccgagatcgagaacatgctcatgacgcaggccgaaaacgacgctgtcgttttgcccgagacgccgtcttcggaggccgggtattacaagctcttcgaggagattctggtggaggagcccaaggaaggacccgtgagcccgccttcaaaaatagagtccgaggaaggctccgacaaagacaagaccgatgatgctgcttccgatgaacccatgtcgaagaaattaaagaggcagttgaggaacagggatgctgctgtgaggtcaagggagaggaagaagttgtatgtgaaaaaccttgagatgaagagtaggtacctagaaggggaatgcagaagactggggcatttgctccagtgctgctatgctgagaacaacgctttgcggctttgcttgcaattgcgtggtatatatggtgcttcaatgaccatgcaggagtctgctgtgctcttgttggaacctctgctgttgggttccctgctgtggtgcatgggcatcatatgccatctcagtctgcctctaatgctgtgggttgcagcagtacttccaagagaaaacatcgagcagaagggcctaagaagggtaactcaaaaaggatcagaaagtaagatctctgagtgtttccagatgcaatcatttttaaagagtagaaaaagccgagcttcaagaacaaagatgaaattcaattttatagtgttctaatgttctataacttctgaagtgggggctctaaggttttctattcatctcttctttctttcgttcgttttctcttttgttttattggatttataaatacggtcgaacttgttagaggttctgtgatatgcttttttaggtgctgttcttgtaacttatattgggaccataacatgttgcgttcttatctttaacat

SEQ ID NO: 11332 - DNA, 948 bp, Glycine max
  Clone ID: 701052770_FLI
ctccatctcctctgtgttatattttgtcctcttttattctcatctgatcacacacactctgtcacgcacccaccattctactacactcctctctctcactctcactctctgctccgtgatagctgtaccacgtttttctctccatctcgaaacaccatctctgcctcagtcccaacccatcaccattctcatggctgctctagctctagcacttcttcttctggctttcaccggcacttcaagtgctacatggtgcgtttgcaaggatggaagcgacgcgatcctgcagaagacgttagactatgcttgtggagctggtgctgactgtaaccctcttcacctaaacgggccttgttttcagcccaacaccgtcagggcccactgtaactacgccgtgaacagctacttccaaaagaagggtcaagctcaagggtcatgcgagtttgcgggaacagccactgttactgcatctgaccccagctctagcggttgtgtctacccttctagcgtcagcgctgcaggcactggtacaactcctgtgactactacaccaacaatgggcactactcctacaactggaactccatcaacaagcaccggcaccggcactggcaccggcaccaccactggtaccactccatacagcacaacacctggagtattaggaggcattggcagtggcatgggaccttcaggatccggcatgaacgatgaaagtcacggtggcattagatttgttcacagcagtagtttcttctcgatcgcgatcgccctcatctctgccttcatgatgctctgctggggttgagaatgaaaatggcttgacctgggtatatggtgcaaaatgccttatttcactgtattaatgtgaatgctatttttctaggtgttgaacttgggacgttagtttttggggttcttatataatatttttctccaccttccact

SEQ ID NO: 11333 - DNA, 1697 bp, Glycine max
  Clone ID: 701052805_FLI
aaaaaaatttcctagtgtcctcatgttgtgcttccttgcttgtttcaccaaagattatagcgaaatcatttcctccttccttcttccttcctgcttgttcttcatggtgcttgagaactgatatcatcatcattcattagctgggcggtttgaaaaggctaaattctaataacaccaacgtcttcatcttgtaagctccgtctcttgacaaaatcaacgtcccatttatgcaagctttgattaaccattttcattccctttttccttcgcactactccctcattctgtgccatgtcttcctctctcgttcttccttccactcccttcttcgcccatggaacaagaaccctccctctcactcgatctaggctttccatgaccgtctccgccggatctcagccttctctccgcgacgctctgttcgccgattacaaggcctccacttcattcctcttccccggccagggtgctcaagctgttggaatggggaaagaagctcagaatgtgcctactgctgcggttttgttcaacaaggcaaacgacgtattggggtttgatcttcttgatatatgcatcaatgggccaaaagaaaagctagattcaactgttatcagccagccagctatttatgtcacaagtcttgctgctgtagagctacttcgtgcgcgtgatggaggtcagcagattattgactcagttgatgttacatgtggtttaagcctgggagaatatactgctctggcatttgctggggcttttagctttgaagatggactcaagttggtcaaactgaggggtgaggccatgcaggatgccgctgatgctgctaaaagtgctatggttagtgtgataggactggactcagagaaggtccaacaattgtgtgatgcagccaatcaggaagttcctgaagctgagaaggttcagattgccaattacctgtgcccaggaaactatgctgtctccgggggattaaaaggagtagaagtgctggaatccaaggcaaagtctttcaaggctcgaatgacggtgcgcctagctgttgctggtgctttccacactagttttatgaaaccagctgtgtcaaggttggaagcagcattggcaacaacagaaatcagaaccccaagaataccagtcatctccaatgtgaatgcacagccacatacagatcctgactcaataaagaagatattggcatgccaggttacctcacctgttcaatgggaaacaacagtgcagactcttctaaccaagggtctgaagaaaagctatgaactcggacccggaaaggttattgctggaatcatcaaaagaacggacaaaggtgctgatattgaaaatattggggcttagtgtgtgggaccttgctccttcgtgttcgaatgaacaaaactaataacattttttccaagagagaatgtgcgttagctaaatcaggagaatgcatggaacttgaaactttgaaagcaaggagcagctccagtcagatttgaatgccagttttgaagttaaaatgttataaattataattcatgagttagataagtgattgcgctcggcactagaatttttctgtttttgtaatcttagacaatgtgtctcggagttaattatgtttatgcttctttgtaacaaatatagtttttttagccttttacacaggcttaataataattagaagaaacgttttactc

SEQ ID NO: 11334 - DNA, 722 bp, Glycine max
  Clone ID: 701053435_FLI
cgacaatcacattcaacgcttctgtcatggaagaagttaatgtcgtggaaactaaggatggaactgtctcagtagctgctgcgtttgctggtcaccaggaagccgtgcaggatagagaccacaaatttttaagcaaagctgttgaagaagcatataaaggggtagattgtaaagatggaggcccttttggtgccgttatagttcataatgatgaaatagttgctagttgtcacaatatggttctgtgtaacacagacccaactgctcatgctgaggtgacagcaataagagaggcttgcaagaagcttaagcagatagaacttgctgattgtgaaatatatgcttcttgtgaaccttgccccatgtgctttggtgcaatccacctttctcgaattaagaggttggtttatggagcgaaggccgaggcagcaattgctattgggtttgatgatttcattgccgatgcactgcgaggtactggattctatcagaaagcaacattggaaattaagagagctgatggtaatgaggccatcattgctgaagaggtttttgagaaaacaaaggaaaaattccaaatgtattagatctgtgattcttttcatatctgatggcaactggctattcaggattattgccttcatttaaattattgaaactgttgatagtggattgaactcatttgagtacaacaaattatatgctacaatttggtttacatc

SEQ ID NO: 11335 - DNA, 694 bp, Glycine max
  Clone ID: 701053515_FLI
caaccattgcaaaagccatttacaataagattggtcgcaattttgagggaaggagctttcttgaacaaattggggaactttggaggcaagacgcaattcgtttccaagaacaacttctatttgatatctacaaaacgaaaagaaagatacataatgttgaattaggaaaacaagctttgaaggaaagactttgcagtaaaagggtatttcttgtacttgatgatgtgaatgatgtggagcaattgagtgctttatgtggaagtcgcgaatggtttggttcagggagtagaataatcatcacaactagagataagcatattcttagaggggatagagttgacaaaatgtacacaatgaaagaaatggatgaaagtgagtctattgagctttttagttggcatgcattcaagcaagcaagtccaagagaaggttttactgaactttcaaatgatgtaattgaatattctgggggtttgccattagctcttacagtccttggttgccatttgtttgatatgaagataatagaatggaagactgtattagacaaacttaagagaattcctcatgatcaagtacaaaagaagttaaaaataagctatgatggtttaagtgatgatacagagagagacatattccttgatatagcttgtttctttattggaatggatcggaatgatgctatgtgtatctt

SEQ ID NO: 11336 - DNA, 874 bp, Glycine max
  Clone ID: 701053807_FLI
ggattttcaagaggggcatctgtgtatagaggtgtgacaagacaccatcaacatggaaggtggcaggcccgaataggaagggttgcaggaaacaaggacttgtatcttggtacatttagcacacaagaagaagctgctgaagcatatgatatagcagcaatcaagttcagaggaacaagtgctgtgaccaactttgacataagtaggtatgatgtgaagagaatctgctcaagctccactcttattgcaggagatcttgcaaaacggtctcctaaagaatcaccagctccggttcctgcctctgacttcaattcgtgcggttcatcgccgatgccgctggtgtctcagccacctcctttggctataactgatggtgaacattctgatgagttgtccaacatgatgtggaatgccaacaacagtgatgagcaagcacagaatgagagtggtggtgctgaattcaacaacaatgtaactgaatcatcatcatcacaacaggtttcaccaagcagcaacaaggatgctttgaaccctcaaagccccaatgagtttggagtcagtggagcagattatggacatggctacttcacccttgatggaccaaaatatgatgatgggaacaatgaaaatgaccacatgagcaccaacaggcttggaaatttgggattggttaatcaagttcccatgtttgctttgtggaatgaatgaagggaatgttatgttgatgagttgagattacaaaaaacatttagcttaggaaaaaaaactaagatcagatggcagaattattgaatgattattatattgtagcttggtatggtaactttttattttatgttgaaagaaaggggatatgtcagtagtgctgattcct

SEQ ID NO: 11337 - DNA, 2215 bp, Glycine max
  Clone ID: 701053982_FLI
tttgcgcagtgccgcccatggtcggagctcatcgacctgagctccatgtccggacctgacgcaccaccccaccaaatccaaacaccgcctaacgatgctgccatgaaatccgaccagatctgacctcgattgttgttactgaacattggttgtggtagtcggagagcaagcgtggcggatcactgccacaatggagacaacgcgccgccgcacagaccgcgactcgcatacgcgcgacccaagcatgtcgccatggagttagtggcttcagatgaatcttctagaaacttccctggaacaacaataaccatagaggaaaagcaaaactgggagtatgtttggattttgattctctggtttgattcacttgataattttggcaattgatttttgaccaataggattttatttgtgagtagattgctggtgcttagatgggtgacattagttctaagcttcatgggttgcggttggacttaagaatgttgaggattttttttaatggctggaatgtttatatttttctttttagtgtgggtggttaataatcaaatggtgtaattgtttttttttttttttatgaccatttgtattcggttatgggtttttgttgtagtgaatttatttgggattcatgttgaagtgagttgttggttattgatttatggtggctgaatgggaaattagggcctgtatttggaatttttcatcatttctatcgaaaattgtttatctacctatgttggtgtagctacattcagcgtctgtttccttggattttggttcaggtgggtgttagatggtggcaggcagtgattgatgcagtgtggtgatcctggaatttgggtgtattcctgggttttggggttttagtaatgttcagatgcacttgtacgttgaggaagacaagagcaatgaggaaaaagaagacaatttgggtttttttttttttttcattaaacagcatgtgcaacatgactgtttcaggttaacagaaaagaagactgtgacggtgtaagggtgcgtgtgtaatggaataaagaggagttttgaatgtaataaattctaaacaaagggagaccagcataatttattctttctttttcatttcagaatcttagaaatcttaaaatattaggagaaacagtattaaaaataaataaataaaaattttgagatttaagttttttatcccattaagatttaagttaaatcaatgactaggatgaattgttcattaatcatttaacagcaaattaataaagtgattcgtctgttgtatcattttggatttaatataatttacatttttttaaaaaaaaaataaagtgacctatttgaataacacccatagtttaagaatcaattaggaccaactcactattgtcttcttcttcttttccctcttgttatttcaaaatcatttctcatgtaaaaggagaattgtctcctgtgaacaaatgctgcaggagatagtagcagttgagaaatgctggaataagacaaaatgtgcaaaagcagcaaggtggaggaaaggctgtttttgttcggatttgaagtggtgtggtgcaggaaacaccaggaaagttgccttagatgcattctggaattggagccttcatttgcacgtctatcttttcttttctatcatatattttttttgttggtagacaagataatataaaaaaaattacactgagtgtatatgttaattaaactcatttatatgaactaaaagaggttgtgtaacttccccaaataaaaatgaaactaaacaaccccaagataaatgattggtgcaatcaaccatctttaaagtacacgagaattacaccaataatctatgattagattgtttaacccttaacccattattactgaggataaattttttttttttttttaaccaagcagttagacaacctaaaataaatacatattttactctatcttatattagcattatttaattttgaaatacttaaagaagaaggtaagtgtgtgagggtgtccgggtcgaaattgagtaaaaaatgaagtattaaggttatattcgataatactagttaaatagttaataaaaaattgaaaagttaacgagtaatagaaaattaaaaaactaatttattaaattaaaaatgttcgataaaattagttattgaaataattaagaaatataaaatgataagaaaataataaaatcatgatttatttt

SEQ ID NO: 11338 - DNA, 868 bp, Glycine max
  Clone ID: 701054134_FLI
gagcctttggggtcttccgtgtacctccgccaaagggacatcctccaaaagttctaccaagaaagccgaggaaatgggtcttataatgttcccacttcctccttgagtaattcgttgacgaacccttgcaagaaaaagctgtacaggggagtgaggcagaggcactggggcaaatgggtggcggaaattagactcccacagaacaggatgagagtgtggttgggaacctacgacaccgccgaagctgctgcctacgcctacgaccgcgccgcgtacaagctccgtggagagtacgcgcgtttgaacttccccaatctcaaggaccccaccaagctaggtttcggtgactccgccagattgaacgccttgaagtcctccgtcgacgccaaaattcaagccatatgccagaaggtcaaaagggagagagccaaaaagaatgccgccaagaagcttcacaatagcactgaccctaaacgcggccagagtgagaagccctcctcctcgtcctcgccgtcgccgtcgccgtcgccgtcgatttttaacgataattgggcgaaccagttgttttctccggccgtttcggaggatgggttttggaagggggagaattcgcattcgccggcctcggttttgaccgagtgtcaaacagaggaaacagagttgttgttcgaaggttgttctctggctagattgccttccttcgaccccgagttgatttgggaggttctgaccgtttaattagttgatactgtcttcctttcttaggttactacttacagcgagcgctcatgtcatgtgtatatgaaaaatatatattattagtgtggtcttgttttgtttgtcggaatgggaagaggtcctttagcgt

SEQ ID NO: 11339 - DNA, 1502 bp, Glycine max
  Clone ID: 701054233_FLI
ctgtttcatacctttccctgtttttgttttttcagttgcaacaaccctagtaactctctaaaagatcaaggaaggaaggaagcaagatgttgggtgttataaggcacaagagtattcgccatgccttctccgcaataagacacttgtcttctgcagctaaagagattactgtcagggaggctctgaactccgcactcgatgaggaaatgtcagctgatcctaaagtgttcttgatgggtgaagaggttggggaatatcagggtgcatacaagatatccaaggggctgctcgaaaagtttggccccgagagggttcttgatactccaatcactgaggctgggtttgctgggattggagttggtgctgcttactatggtctaaggcctgttgtggagtttatgacttttaacttctccatgcaggcaatagatcatattattaactctgccgcaaaatcaaactacatgtctgctgggcaaatatcggtacctattgtctttagaggacccaatggtgctgctgctggggttggtgctcagcattctcaatgttatgcatcttggtatggctcatgccctgggttgaaagtcttgtcaccatattcatctgaagatgctcgtggtttgcttaaagctgctataagggaccctgatcctgttgttttccttgaaaatgaattgttatatggtgagtcattccctgtttcggccgaagttcttgattccagtttttgccttcccataggaaaagcaaagattgagagggaagggaaagatgtgactattacagcctattcaaaaatggttggctatgctctcaaggctgctgagacactggcaaaggaaggaatcagtgctgaggtcattaatttgcgttcaatccgaccgcttgatcggtccacaatcaatacttctgtcaggaaaaccaacaggctggtgacagttgaagaagggtttcctcagcatggcgttggcgctgaaatctgcacatctgtcattgaggagagttttggttatctagatgcaccggttgagagaattgctggggctgatgttcccatgccttatgcagcaaatctggaaagaatggctgtcccacaggttgaagatattgttcgtgctgcaaagagaacatgctacagatccgtgcctttggctgcatccgcttgaatgttctggaaatttttcatgccatggtcagttctttgtagaagcaaaaaatttccttaatttccaccataaaacagcaggaagaaattgtaaccaaagaatgttagtcttaactcatttgttatgttaggctttggtttaaaagattctgtcatatgcataatactgtcttaattttcaggactcacagatgctatacatttttttcccatctcatcatatctgggaggaagttaatgttaaataacttagacaacagtgacacaaggcagcaggaagttttcaatgtttttggtttctgcttggcaataactaaaagtcaactttttgaat

SEQ ID NO: 11340 - DNA, 1718 bp, Glycine max
  Clone ID: 701054306_FLI
tcttctgcgcttcttctctggtctctggcttccttggtacgggaagaactcaatcttgtccatttccctttggtttttctctcttcgatctcttcaccttccattcgaccaccctcttatcacagctcgcgttaacttaagccctctccgttgagggtttctccaggtgtggtttgattttcagtttctgatgctgaagaaataaaaaagcttgaaggctttgctcttctgtgtgaaaaatgttggaaggtggtgcgaaattcccgggaataatagatctcaacaagaataataacaactactatgatttctctcaaggcttttaccataagctgggggagggtaccaatatgtcaattgacagcgttgggagcttacagacaagtaacggcggaggatctgttgcgatgtctatcgataatagcagtgttgggtccaatgattcccatactcgcatgttggaccaccaagggttacggaggcgtgccaatgataactactctgttgcacatagtgccaatcgtcggggaagagtcacccatgctttgagtgatgatgctttagctcaagctctaatggacaatagttctccgactgaagggcttgacaattttgatgagtggacaattgatttgaggaaactgaatatgggtgagccttttgctcaaggagcttttgggaaactctacagaggtacttacaatggtgaagatgttgctattaaaatcttggagaggcctgaaaatgatccagcaaaggctcaattgatggagcaacagttccagcaggaggtcatgatgttggccacactaaagcatcctaacatagttcgtttcattggtgcgtgccgcaagccaatggtatggtgcattgtaactgagtatgccaaaggtggttcggttcgacaatttttaatgaagcgtcaaaaccgctcagttcccctcaaattggctgtcaaacaagctttggatgttgcaagggggatggcttatgttcatggccttttattgatccacagggacttgaaatctgataatcttttgatttttggtgacaagtcaattaaaattgctgactttggagttgctcgtattgaggtgcaaactgaaggaatgacacccgagactggaacataccgttggatggctccggagatgatccagcataggccttacacacaaaaagtggatgtatatagctttgggattgttctatgggaactcattaccggtatgcttccatttcagaacatgacagcagtacaggctgcatttgcagttgtcaacaaaaatgttcgtccaatcatacccaacgattgcctacctgttctccgtgacatcatgacaagatgctgggatcccaaccctgatgttaggccaccatttgctgaaattgtaggaatgcttgagaatgcagagaatgagatcatgacaacagttcggaaggcccggttcaggtgttgcatgactcaaccaatgactgctgactgatcctgtgaaagcaaatgcaaatgcaaatgcaaatgcaaaaaagtcataaaaacatagactggaatatttgggggcaagatgaaactctggtagtgaaggggtgactatattatagctttgtgtatctgtgtgttttatttatttcttctgaagaaaaaaatgaaaatcttatctggagaccttttgcttattcggtttctgtttactgaatgtctgttctgaattagt

SEQ ID NO: 11341 - DNA, 911 bp, Glycine max
  Clone ID: 701054452_FLI
gccaaatgtgagtccttcaatgcatcatcaggaaggacaggtggttcaataggtgaagatccagctctggaccagttcatggaggcctactgtgagatgctcattaagtatgagcaagagctcactaaacccttcaaagaagccatgcttttcttctcaagaattgagtgtcaactcaaagccctagcagtttcatcagattttggtcaaagtgaaacatcttcgcagaatgaggttgatgttcatgaaaacaacctagattctcaagctgaagatcgtgaactcaaagtccagcttttgcgcaagtatagtggatatctagggagcctcaagaaggaatttttgaagaagaaaaagaatggaaagttgccaaaggaagctcggcaacagctacttgattggtggaacaggcattataaatggccatacccttcggaatctcaaaagcaggcacttgcagaatccacaggcctagatctgaaacaaatcaacaactggttcatcaatcagagaaaacgtcattggaagccttctgaggatatgcaatttgccgtgatggatgcaactaactactacatggaaaatgttatgtgcaagccatttccaatggatggcatgcctatgcttctttaactcaatcctctactagaatattcaaaagcttagccgagaaaaccctatctattttaagttgcctaggtcgccaggttgctatatataatgtgtcattgatgaatgttttactttaaattgtagaaagcaggatgaaaattctctgttatccctgaactgcaatctatgtaagtgagcgtgaatctaactatatgctctattatctacactgtttgtggagatcactagagatgttgtgtatgtgttgtttcctaatttaatgaaaataatttgttttc

SEQ ID NO: 11342 - DNA, 971 bp, Glycine max
  Clone ID: 701054633_FLI
gtggaggacagaaatttttagtctcagccagcacaatttatctcttgcaatccaaaatgaaacaacatttgttcctcccccttcaacagctcggtctgtgtcaatgagagatatgggtaccgaaatgacccctattgctagccaggagccatcaagaacaggtaccccagtgagggcaacaacaccaatgcgcagccctaattcttcccggccttctactccccccagagcctcccctgcatctactttaactgatctacatagtgacaatctgaatctcaacatgaatgagttgtccgaaaaggagctacaaatgaaaacaaggcgagaaataatggttctcgggacacaactaggtaaaatgaacattgctgcctgggctagcaaagaagaggaggataaggatgcatccacttccctgaaaacaaaagcagaattacctaagagtgtcgttgaagcacgtgcagcagcatgggaggaggctgagaaggccaagtacatggccaggtttaggcgtgaggagatgaaaattcaagcatgggaaaatcaccagaaagcaaaaacagaagccaagatgagaaaaattgaggtagaagttgaaaggatacaaggtaaggcacaagataagctaacgaataaattagcagctgcaaggcataaggccgaggaaaagcgtgcagcagcagaagccaatagaaatcatcaagctgcaaaaactgaagagcaagcagagtatatacgaagaactggtcatgtcccttcctcatatttatcattttcttgctgcaattggtgctcttaaaaaaagccaatctttgtcaatgtttattttttgtttctataggtatgaaatgccttttgctgcttacacccaagcatgttaaatatgcctgttgcatttccctcctggtgtaaaatgttacattgttctgaagaataattgcaatttgaaagtgctttgctatttgttc

SEQ ID NO: 11343 - DNA, 393 bp, Glycine max
  Clone ID: 701054924_FLI
cacaaatggggatggctgcagagtcacagtttcatgtcttggctgttgatgacagtctcatagataggaaactcattgagaggctcctcagaacctcttcttatgaagttactacagttgattctggtagcaaggctttagagtttctggggttgtgtgagaatgatgagagcaacccaagtacaccatatgtttgtcccaacaaccatcaggaggtggaggtgaatcttgttataacagattactgtatgcctggcatgacaggctatgacttgcttaagaaaatcaaggaatcttcatctttgagaaacataccggtggtgattatgtcatctgaaaatgtgccttcaaggattaacaggtaagaaggagaaatatttcagtacttttttt

SEQ ID NO: 11344 - DNA, 1859 bp, Glycine max
  Clone ID: 701054946_FLI
gcaacgggctgcttcataatcgaatcgaaaggaagctgcagaatggaggacgtgccgttgccggcgctctttgagcaagcccgcaagatccacaactcagccaccgccaccgcctccgccgccgaccaggtacgctttagtcttctcattctgtctctttttttttttttttgtgttcttcatcgctttgtttttggggttcgggaggttgtgaagaaggggtgcgaggctctgcatagatgcgaggacatggtcaataacctaggtttgttctctcccaacgagaccaaagaagatatcagcaccaccaatctcaagtacattctggtgccattttatcttgcggagttgacagaaaaattagcacaggatgacaggatacatattctaaaggcttcccaggcaaaactaaaggagtttatttcattttgcgaagcaatggagctggtcccaaaagaggagttagaatcttacattgaaggggcatcaaaaactgttgctgatcagagggccaggaagatcgctaggttcaaacgtcagagagctgcagaatcaaagttgttggaaataaaagagcaaaaggaacggcgtgggcgttctactaaagcagctgccctgtccacccctgttgaggcaggagaggaagaagtattggatgatgatggggaagaagaaagagaggcttggatcactaccatatctttggcaatctgtaaggcactagatctgctggatatgttgaagaaagaggaagagatgctttctgctgttaaggatagacaatccaaggatggggataaggagttctctaaggatgttcttgatgaacgtgccaagaaagcagaagcttggcatcatgattctgcagttcgtgcacggtacactaagccatcatcaccaatcacatgtgccactttcgcccaagatgttctagaaggaagagcaaaggcttcacaagcacacgatcacaagcatcaaccactaatatttggaccggctagccttgtaaatggaaacataacaactgagagagaaagaatggcagctcaggtcttccaacctagtcataggatgccaactatgagcattgaggaagctgggctaaaagaaatggaaataatgaacaaatggcaagagagaaatgtcagactcatggaagaagccaattcatcttggcacaacgataggaagtcaaagccaggagaagacgatgatgaagatgatgctgcacaggagaaagcaagggcttgggatgactggaaggatgataatccacgaggtgcaggaaataagagacttaccccttgtgggtaaagtgggttcttccctggcttaggagtaacgggctgagaataaaactgtttttaacgaaatctcgtaatttgtagttagattgcgttaagattatgtgtataccaggattttcatttgattacatgtgcatattcatggagtgcaagtagggtcctaccccacccggttttgcatgctctccttcccaaggatgtttgtggaattagtagcttgctttgcaatttgcaccagaggttgcattatactaaattttctagaaattattgatgctatctattatgtgtacagaaaatgcgtgtgtttgcatttctctaccatcaatagaatgaacaaagccaggcgtgcacaaagatttgtgtattttgctcactgtgcaactgtgcatgaaggatgatgtatttgagttgataggtagtgactagttttctttttggaaaccgaaatagtttttttttaaaaaaattattatgcaagaatatacaatcaattcattattctgagttacattttcattttgtagtatgtatacatataataattcagtt

SEQ ID NO: 11345 - DNA, 1183 bp, Glycine max
  Clone ID: 701054978_FLI
atcggtatgatcatcatcaaaagggatttgaagaagtttttgggcatggtttttccactaaattgagtagtgctggtcttgtttataagcattttggaaaggagattatagccaaagaacttgaggtagatgaggaacaccgagatgtgcatcacatatatttggctgtttacaagagcttcatggaggcaattgatgctatagacaatgggatcaatcagtatgatacagaccagcctccaagatacgtgaataatactcatttatcctcaagagtaggaaggctaaatttggattggacagatcctgatcagtcacctgagaaagaaaatgaggcctttcaacgtgcaatggctcttgctggcagtgagtttctggatagtgttcgatttcatgtcaattcatggttaccagcaaggtcaattgtaatggagaccctagcggctagacatactgttgatcctagtggagaaattctagttttgactaaattttgtccttggaagcttcacttatttgagcttgagggagagttgaaaaatgaccctgctgtcaaatatgttctatatcaggatgaaagaagcaagcattggcgagtgcaggcagttgcagtatctcctgacagttttcagagccgaaaggctctaccctcacagtggcgggggttaagggatgaagaattgtcaaagaagtctggcattcctggatgtgtttttgtgcatatcagcggatttattggtggaaaccaaaactttgatggtgccttggccatggcaaaggctgctttgaagatgtagacgaggatcatatgaaccaagggctatcactgattttgcgcactcattcacagtacactttactgattgcgttgaagaatgcatatgaaccatggggactgggaacagtggcttaaagatggttctatatcaagttcattaactcatttgctgataggtggtctatcttatccaaattttctttcaatagtttaaccaatgtattagttaatgaatttcttgtgtctattatgttgataattgtcattgatcttattgttataagcatcttataacaaagaatttctcgtgtctatttggttcacttgagagagcattagaacttcagaaaaacgataaatcatttctaaaggtagtccaaattgataccatttacttgtttttct

SEQ ID NO: 11346 - DNA, 1727 bp, Glycine max
  Clone ID: 701055086_FLI
ctatctttacgaatcttcttcattacatggcttcttcagatcccatctcttctcgccactacacttacaacagaaaacaaaaatctctaggccttctctgcactaatttcttgagcttgtacaaccgagacaccgttcacttgattggcctagacgatgctgccacccgattaggtgttgagagacggcggatctatgacattgtgaatgtcctggagagtatcggggtactctcaaggaaagcaaaaaatcaatacacatggagagggtttgccgcaatccctctcactctacaggatctcaaggaagaggggttgaaggagaattctaattccctacgtgggcctggaaaccatgataaagtttccgacgacgaagatgacgaggaaacacagtccaatcccgccgctactggaagtcaaagtgacaagttgaaccctaattctactcttcctaaacctctgaaaaatgaaaatcgaagagaaaaatctctggctctgcttacccagaattttgtcaagctctttgtctgctctaatgtggaattgatctcccttgacgaggctgcaaaattgctacttggggatgcccataatacgtctgtaatgagaactaaagttagacgcctatatgacatcgcaaatgtgctatcctccatgaaccttattgagaagacccatacaatggatacacgaaaaccagcattcaggtggctcggttctgaagggaagacatgggatgagacacttcacaaatcaaacctaaacgactctaggaaaagggcgtttggaagtgatatcactaacatcagttttgagaggaataaagtggaattgttcacgagtggggacttgaatccgaatcctaagaagccaagaatggaaaatggtagtgggctgggtgaggcagacgaaaacaatttaaaacaaggcataaaacaagcttcaaagagctatgaatttggtcctttcgctccagcttgcgtgcccaaagttggagcctctcagaataataatatgaagcaggtgcatgactggggcagtcttgcaactgcacatagccctcagtatcaaaatgaagcttctccctctctgttgcagcaaggccactgcacggtcaaagcatctagctgtgcctcctttgtgtgattttcaaagctttctgatgcatatatcctctttgagcgagtgagagccagccgagggataggtcagcttcctccaaccgttatcctacataaaaaaactggttcttagacatatgaaccccttgagagaactcttctcccattacatggaagcatggaaattgtggtactcagaaattgctaggaagaggccattacaaattttgtaaacgtatgccaaagtcaaactataggtatgtttggatttagtaaaatttagtctggaaacttggtttcagagaagcaagacttgggatactagtgtaaacttaagtttgcaaattttaatccaaacatggggtgtaactttcctcactagagaatatctgtagtatgcattctcttcatgcgtttgtagagctgagcttccatttactgccttttcaaccgtgatgttgaccgactgaatcagcttaggcagttcttgcaaattatttatcacatttgtttgttgtatagtttctaccctttatttaatgtagcaggaaatcttgtgccctactcctgtactgcagtctggagctgctaatttaaggaaaat

SEQ ID NO: 11347 - DNA, 1663 bp, Glycine max
  Clone ID: 701055256_FLI
cacactcccacccaaagaaacaaagactatccctggttttcaatctggctccttcctctctgtccatgacgacgtcgtccggttccctaaagaacacgattcccccaggcctccaagaagtgcttctcaacagaaaacgcccccaacaagaacccaacaacaatgccggaccctcttcctccaccgaggacgctgccatcgccgacgattgctccagctccaactccaagctcatcgtgctggtcaccaacagtgacagcattgagtcaccgggccttacattcctcgtcgaagccctcgtgcgtcagggcctctacgacgtccatgtctgcgttcctcaatcggacaaatcggcttcgggccactctgtcactcgcggagaaaccgtcgaagcttgttcggtacaaattaatggcgccaccgcctttgaagtttcaggaactcctgtggattgcgtttcactagcgttatctggggccttgttttcatggtcaaagcctgtgctggttattagcggaattaaccagggatcaagctgtggtcatcacatgtgctgttgctggagctagagaggcgttattatgtggtgtaccttcattgtcaatatcattaaatcggtacgttgatttttattaattatatccggtttgaattgtattttccagctggagattatgatttagtactgttactaccttattctggtgcaggaagaaggatgaaagtcaagagactgatttcaaggatgcagtagtactctgtttacctttaataaatgctgctatcagggatgttgtaaacggaactttcctcaaaaactgctttctgaatatagaaattcctaaatcacctttaaccagcaagggcttcaaattgaccaagcaaagtatgtggagatccactccaaactggcaggcagtttcaactagccggtatcctcctggtcatttcttggccagtaaacaaggctttggtcttcagtttgcacagattggccgagatgcctctgctgctggtgcagctcggagattaactacacagaaaaagaatttggagattgttgaatcaattggagctgccggaaaagctgattccaacagggtgaagaagtacttcaggctagagtttttggataaacagcaggaagatatagatgatgatctagattacatggcacttgaaaatggatttgttgcagttactccactctctctttctcttcatactgagaccgatattcaaatggcagcttctgattggatttcatctgtgctttctggtgaacaatagcctcaagcagagttcagcttcagcgtaattatgtacatttgagatttctgatgattctttcttttctatgttcttgaaagcaaaggtcgagcagaagcggcagtcacacctattctatagttgatatcatcaatctgcactcttttttttttttgtatgcgtgtaagatattttgtattcctctcttcattgtttcatttcttttggtcgctagttatttctgatgtgtgcttcctgtaatctcctaggcatattttaaaaatgccatttcgtctgtttgtaacttaaaaaactactagcaaaacgctggtgcacgtgtcattgtaatttttcgctaaattgttgtttgaaagatagttttaagcttggtttg

SEQ ID NO: 11348 - DNA, 1722 bp, Glycine max
  Clone ID: 701055296_FLI
gaagaagcctaggtctattcttaccttgcgcggtggaccgagttgacggtgataagctcctcccttctcctccgccagatctcatcgtcgccgtcgccgaatttctccttggcgttttgtctccgcctctcactctcgttgaagcttattaagtaccgatagcatgtgccggcaaaattctccggtacaccatgccggtgaagaagaaattgcagctgatgagagccttttgatttattgcaagcctgttgaactttacaatattctctaccgccgtgctcttcaaaatccttcttttcttaggagatgtttgcgttataaaataagagcaagccgtaaaaggaggttgagagcaggaattgtgattttcaattatagggaccgctacaacattcttcgaaagactgaagtgaccgaagacttttcttgtccgttttgcttgatgcagtgtggaaactttaagggtttgcgatttcatctttgttcatcacatgatctattcaactttgagttctgggttactgaagattaccaagcagtgaatgtctctgtaaaaattgatatattgagatcagagaatgttgctgatggagtaattccacaatcgcaaaccttcttcttctgttcaagacctcgaaaacgtagaagaaaggactctgttcaaattgaaaaacgcaccaatgtaaaattcctggagttggactcaccagaaggcatacataatggatttctacaaaaagatgatgatatcttatcctgcaaaggagagaatgtgtctagaacatctcgtagtgagaagattttccctagtggaagaaatgacggaggaaaatttggtcctgatcatcctggcaccatggacaacctggagcatgtggaatccagtttcaacattccaggtgtttcaattgccatgccccaatcttctgtggaccctgaatgtagtaaatcaatatgtaaaagtgatcctgctctgcctgctaaaacaaagaagctaagcatggatcgatcagactcaagaaaccgaatgcttctgcagaagagacttttctttcactcacacagagtccagcctatggcactagaacaagtgttatcagaccgtgatagtgaagacgaagttgatgacgacattgcagatcttgaagatagaaggatgcttgacgattttgtggatgtttccaaagatgaaaaacagctcatgcatctctggaactcttttatgaggaagcaaagggtgctagcagatggtcatgttccgtgggcctgtgaggcattttccaagcttcatggaaaagagctgatctcatctccagctttattttggtgttggaggttattcatgatcaaactttggaatcatggtcttcttgatgcctgtacaatgaacaactgtagcatagtattagatagttacagaaatgagggatcgggtacaagaaaaaattgaagaccataaggaaactgactcaacaacaagaatatacagtcttctccgccttgtattttgcttaactgcaggttcccattttcgtatttgcataatttattatgattttttgaactgttattggcctgttcattgtattaatgttcccaatgtattgagattgaaatttagggtattccctcacagtaattttacttctgaattgtagcttgtctaacaaatataatatttttatataaaaaatgtataaagtactgaagtttttacatcac

SEQ ID NO: 11349 - DNA, 2299 bp, Glycine max
  Clone ID: 701055386_FLI
atcaatcttctgagagtgtttggttgaaagtagcaaagatgtttcctttcgggcaaaagggtcaaaagataaaggggactatggtggttatgcagaagaatgtgttggatatcaacagcatcaccagtgttggagggatcgttgaccaaggcttaggcttcataggcagtgcagtcgatgcacttacttttgcagccaccaaaatctccatccagttgattagtgctaccaaggctgatggtgggaaaggaaaaattggaaagagtacaaatttaagaggaaagataacattaccaaccttgggagctggcgaacaagcatacgatgttaattttgaatgggacagtgacttcggaattcccggtgcattttatattaagaacttcatgcaaaatgagttctacctcaagtctctaattctcgaagacattccaaaccacggaaccattcacttcgtatgcaactcctgggtttacaattcaaaaaactacaagactgatcgcattttctttgccaacaatacatatcttccaagcgagacaccagctccacttttgaagtacagagaagaagaattgaagaatgtaagaggggatggaactggagagcgcaaggaatgggataggatctatgattatgatgtctacaatgacttgggcaacccggatagcggtgataaatatgcacgccccgttcttggtggttcagccttaccttaccctcgcagaggaagaaccggaagaggaaaaactagaaaagatcccaacagtgagaagccgagcgattttgtttaccttccaagagatgaagcatttggtcacttgaagtcatcagattttctcgcttatggaatcaaatctgtatcccaagatgtcttgcctgtcttgactgatgcattcgatggaaatattttgagccttgagtttgataattttgctgaagtgcacaaactctatgaaggtggagttacactacctacaaactttcttagcaagatcgcccctataccagttatcaaggaaatttttcgaactgatggcgaacagttcctcaagtatccaccacctaaagtgatgcaggtggataagtctgcatggatgactgatgaagaatttgcaagagaaacgattgctggtttaaatccaaatgtcattaagattatagaggagttcccactaagtagcaagctagatactcaagcctatggtgatcatacctgtataatagcaaaagaacatttggagcctaacttaggtgggctcactgttgagcaggctatccaaaacaagaagttgttcatcttagatcaccatgactatctcattccttatttgaggaaaataaatgcaaataccacaaagacttatgctacaagaaccatatttttcttgaaagatgatggaactttgacaccattggccattgagttaagtaagccacatcctcagggtgaagaatatggtcctgttagcgaagtctacgtgcctgccagcgaaggagtggaagcttatatttggttactggcaaaggcttatgttgttgtgaatgatgcatgctaccatcaaatcattagccattggctaagcactcatgcaattgttgagccatttgtcatagcaacaaacaggcaactgagtgtggttcaccctatttacaaacttctgtttcctcactaccgtgacaccatgaatattaattcacttgcccggaaagccctggtcaatgcaggtttaatcctaaacaggccaactattagcaggagattcatgcctgaaaaggggtctcctgaatatgatgcgttggctaagaaccctgagaaggagtttttgaagactattactggcaagaaggagaccctcattgaccttacagttatagaaatcttgtcaaggcacgcatctgatgagttctaccttgggcagagagatggtggtgactactggacttctgatgccggtccattagaggcatttaagaggtttggaaagaagcttgaagagattgaaaagaagcttatagagaagaacaaagatgagacattgagaaaccgctatgggccagctaaaatgccttacactctgctctatccttctagtgaggagggattgactttcagaggaattcccaacagtatctctatctaaggaccctatggttgcttaagtactgttcctggttttaaataaatgtgaaattgaaggaaccagattccttaatcagttgtgtatgcttaagtcatgtatttggagtggctgaatgtatttgtatttgtcattaataaagagagttgtgttagtat

SEQ ID NO: 11350 - DNA, 610 bp, Glycine max
  Clone ID: 701055548_FLI
ggcaagatgtcgaagagaggacgcggtggttcggcggggaacaagttccggatgtcgctgggtctgccggtggcggcgacggtgaactgcgccgacaatacgggggcgaagaacctctacatcatatcggtgaaagggatcaaagggcgtttgaaccgtctcccctcggcttgcgttggcgacatggtgatggccaccgtgaagaaggggaaacccgatctgaggaagaaggttttgccagctgtcattgttcgccagcgcaagccatggcgccgaaaggacggcgtctacatgtatttcgaagataatgctggtgttattgtcaatcccaaaggagaaatgaaaggttctgctatcactggtcccattggaaaagagtgtgctgatctgtggccaaggattgcaagtgcagccaatgctatcgtttgagtgggaattcttgttaaatgagttttatgtttaagcttgtaggactgaaatttgtctcaggtttttttcaagcttgaaattgaattacaagtgatacagttttttttatccttcgtaacttgttatcagccagaagctttttgaagagacgagattaattcttatttaagaattttgttct

SEQ ID NO: 11351 - DNA, 735 bp, Glycine max
  Clone ID: 701055573_FLI
ggaatgttgaagacagaacttacatgagtactctgtttggtcaccaaagtgaaattttaagtattgattgcttacgcaaagaaagggtactgactgctggacgtgatcgtagcatgcaattgtttaaggttcatgaagagtcacgtcttgtatttcgtgctcctgcatcctccttagaatgctgttgttttgttagtaatgatgaactcttgtctggttcggatgatggaagcattgagctttggactgtaatgcgaaagaagcctatttacattttgagaaatgctcacgcattactggtggatagcatgaaatctgaccaaaaggacagtgaaaaactccccaatggtaacttagaaaatggttacaaccatcctgagaatcaccactgtttgtcagtattctcttgggtcagtgcggtcagtgtttgtagaaacagtgaccttgctgcatctggggctggcaatggttctgttcgattatgggaaattgaaagtgataccaaagacattaaatctctttataatgtgccattggctgggtttgtgaattccttggcttttgcaaaatcaggagaattcttagttgctggagttggacaggaacctcgtctaggaaggtggggacgtaaccctgaagctcgaaatggagtctcaattttgacatacgaaatgtaacattgagttgaatgtctgtccgtgatcttaattatatgaatcaattgcatttattttt

SEQ ID NO: 11352 - DNA, 1813 bp, Glycine max
  Clone ID: 701055604_FLI
gtttggacagtgatgtctgtgaacaataataacccttctaagggcattggggcctcttcctcatcctttggtaatgctggagtaccctccaattctataccttcaaaccctggattttcacagtcccaaggacaggcccagattcctgttggttatcaaggacagtttccactgtcccaggcccatgctattgtccaagctcagtccaaggcccaggcccaggcccaggcccaagcagcagctgcagctcatgctcaactccaggctcatttgcaagctcagggattgagtcttaatcagaaccaggctggtggtttgggggtgtcgtcaccgttgatttccacgccgggtaatgcgagtgggaaacggatccctctgaaaccccccatgcggccagttgggttttcccctcccaacagcttctccccattgagaccagtggagctcacgcctgctgctcggaggaagaagcagaagcttcctgagaaacagctgcaagataaagtggctgctattctgcccgagtctgcgctgtatactcagcttcttgagtttgagtctcgcgttgatgctgcgcttgctagaaagaaggctgacatccaggaagcgctcaaaaacccgccgtgtattcagaaaactcttcgtatttatgtatttaatacttttgctaatcaaattcgcacaattccaaagaagccaaatgcggagcttccaacctggacactgaagatagttgggaggatattggaggatggtgtagaccctgatcagccaggagtagttcagaagtcgtctcctttgtatccaaagttttcagcttttttcaaaagagtaactatttccttggatcagagactgtatcccgataatcatattattatgtgggagaatgctcgatcacctgctccacatgaaggttttgaagtaaagaggaaaggggataaagaatttacagtgaacatacggctggaaatgaattatgtgccagagaagtttaagctttcaccagctttgacagaagttcttggtattgaggttgatacccgcccgagaattgttgctgcaatctggcactatgtgaaggctaggaaattgcaaaacccaaatgacccttcctactttcactgtgatcagcctcttctgaaagtatttggagaagaaaagatgaagtttacaatggtttcacagaaaatatcatcgcatttgttccccccacagcctatacttttggagcataagatcaagctctcgggaaacaatcctgctggtactgcttgttatgatgtgatggttgatgttccttttcctattcagagggagttgtctgccttattggctaacgtggaaaagaacaaagagattgagacatgtgatgaagcaatatgtggaatcattagaaaaatccatgagcaccgtaggagacgggcattttttcttggttttagtcaatcgccagtagaatttattaatgcattgattgaatctcaaagcaaggatctgaaacttgtatccggagaacctagtcgcaatgcagaaaaagagcgtcgttcagatttcttcaaccaaccatgggttgaagatgctgttattcgttacctgaatcgcaaaccagctgtgggaagtgatgctccaggaagcacatgacaccagttcatattttaatcattcatcatcctttttggcgatgtatctcaagataaattataccttgagaatttctgaagtagctagttttccaacttccatgcttgtattagtggccggaaggaatgctgctccatagtgataatatacaatatgttgttgtatgggt

SEQ ID NO: 11353 - DNA, 1971 bp, Glycine max
  Clone ID: 701055639_FLI
gaggcttcgagggaggagaggagagaggaagtgagagaggcaaaagctgaggaggagggtagaggagaggttgttgagaatgagaacattgagaaggagggtggaagagaggagaggaggacaagggcaaggggagagaggaggcgatcttcgaagccgaatccgaggttgagcaatcctcctaaccatgttcatggtgagcaggttgcagcagggtggccctcttggctctctaaggttgctggtgaggctatcaatggattgacccctcggagggccgacacttttgagaagattgataagatcgggcaaggtacatacagcaatgtttacaaagctagggatactttaacggggaaaattgttgctctaaagaaggtccgttttgacaatttagagcctgagagtgtcaagttcatggccagagagattttgattctccggcgtttggatcatcccaatgtcatcaaactggaaggcttagtgacttctagaatgtcatgcagtttatatcttgtgtttgaatacatggtgcatgatttggctggacttgccacaaacccagcaatcaagttcacagagtctcaggtattggtgtattcaccttgagtgcatgctcttgttttgtttgaaatatatgattccagaatctttttctttttttggttgcttctggaggtagtccctttttatatgctcgtatctggctattttaggtaaaatgttacatgcatcagttattttctggactggaacattgtcacaaccgtcatgtgctgcatcgtgatataaaggggtcgaaccttcttattgacaatgatggaattctcaagattggtgattttggattagcttccttctttgatcctaatcacaagcaccctatgaccagtagagtggttactttatggtatcgacctccagaacttcttcttggggccactgaatatagtgtaggagtggatctctggagtgctggctgcattcttgctgaattgttggctggaaagcctattatgcctggtcgaacagaggtggagcagctacacaagatattcaaactatgtggttctccttctgatgaatattggaaaaagtcaaagttgcctcatgctaccatttttaagccccaacaatcatacaagcgatgcattgcagagacatataaagattttcctccatcatctctgccacttatggatacccttctcgcaatcaatccagatgaacgtttgactgccactgctgcattgcatagtgaattcttcacaacaaaaccatatgcttgtgagccctctagccttccaaaatatcctcccagcaaggagatggatgcaaagctacgggatgaagaagctaggagattgagagcagctggtaaagctaatgctgatggtgtcaagaaatctcgtccacgtgagcgagttgggaggggaattgcagttccagaggccaatgccgaactgcaagcaaatattgatagacgacggctgatcacacattcaaatgctaagagcaagagtgagaagtttcctcctccccaccaagatggagctctaggctatcctttgggttcttcacatcacatggacccagtttttgatccccctgatgttccatttagttctacaaacttctcacaacctaaagcaaatatccaaacctggtccggcccattggtagatccttctggtgtgggcgtgccgaggagaaagaagaaacatggcaagtgatgagcatcatatacaatcaaattcatcaaaggaggactcaaaaaagataggaatgagtcgggagtcaaagaaatattcttgtagtataacaccaatcaatttttttgaagtattcatgatgaagctgcaaatgttgctgagttgatgtctgtcctctagttgctaaaggcattggaggtaaaccaaattgtattttcctgcttccatttctttctcaatgatcaaaggtttattctct

SEQ ID NO: 11354 - DNA, 1556 bp, Glycine max
  Clone ID: 701055675_FLI
gaattaagcaacattttactgggtatataagtggagagtgtaactgaaattatgtggaggtgcatcaatggaagaattgccagaagatttttatccacttcttctgccagtgcccgtggttggtgggaccatgtaaggccagcaccgaaggaccccattgttcgtgtgaacgaggcatttctagctgacccttttccccataagatcaatcttggaataggtacttataagggtgatgatggcaaagctttcattcctcaaagcgttcgtgaggcagaaacaaagattcagagatgtaaattggaggagtcaaacgcttccgcagtcagatcaaaatttgttcaggagtgtgtgagattagcatatgggaatgattcaaatgttgtaagagaaggattgtttgcaggagttccaactctgtctggaaccggtgcatgtcggctttttgctgaatttcaacggcatttctatcccgattctcaaatgtatctaccagatcctacttggtcaaatcaccacaatatatggagacaggctgaaattccagtcaaaaccttccactactaccatccagatacaaagggtttagattttgctgcactcctcaatgatgtcaagaatgcaccagattgttctttcttcttgcttcatccgtgtgcccacaacccaactggtgttgaccccactgaggagcaatggagagaaatatcataccagttccaggtaaaaaatcatttcccattctttgacatggcttatcaaggattttcaagtggggatcttgacaaggatgcaatagcacttcgaattttccttgaagatgggcatttgattggttgtgctcaatcttttgcaaagaacatgggattatcagaacataaagctggttgtcttagtgttttgtgccagagtataaagcaagtagctgcactaaaaagccaactgcagctgatgtcccatgcaatgtatagcagcattccttttcagggtatttcactagttactatgatattaagcgagccagatacagaagcactttggagaaaagagataaaggtcatggctaaacggattcaaactatgcgaactaccttgcggcattgtcttgagaacttgcattcatctttcaattgggagcacataactgatcaggttggcatgttctgtttttctggattaacccctgatcaggttcaacagatggagaagctgttccatatatacatgacccctgatggaagaatgagcatgtcaggtgtgacctctagcaatgtggattacttggcaaatgcaatacatcaggtgaccagaatcgatgaggaagccctaagatcatgttacgtatagcattattagtccttttctaccttattctgatcatagggtacataaccattttttctcttttgtaattatctatgtacctgatatacatcataccaatttagtgaaaatattgaagtcaatatttttggaccatcgtggatattactctaaaaaaattatttgtaaacacagccacatattaagtgatgaatgaaataacagatttacgt

SEQ ID NO: 11355 - DNA, 865 bp, Glycine max
  Clone ID: 701055684_FLI
gtttgtgagaacaagaaaaagaggcgcaagatgagtggtagggtttctgggaaggtgaagtggttcaatgatcagaaggggtttggattcataagccctgacgatggcagcgacgatctcttcgttcaccaatctcagatcaaatctgacggtttccgaagcctcgccgaaggagagtccgttgagttcgccattgaatctgaatctgacggacgcgcgaaggctgttgatgtcactggccccgacggcgccagcgtccagggaaccagacgaggcggtgatggtggccgaagctatggcgggggacgaggaggtggtggaggtggctacggtggaggcggtggctacggtggtggtggtggctacggtggaggcggtggttacggtggtggtggaagaggcggtggaggcggtgcttgctacaactgtggtgaatcgggacatctggctagggattgcagtggaggcggtggtggggacaggtacggaggaggtggtggtggtggcagatatggaggcggcggtggcgggaggtacggtggtggtggaggcggcggcggcggcggaggaagctgctacagctgtggagagtctgggcattttgccagagattgcccatcaagtgctcgttgaatttactgttagggttgtttatgttttgcggattgttttaagtttttactttaatatgtcttagggattttaatggtttctgtccaaacttatgggttcttatgagtagatgtgtgggatttttcttttttggttatttaaatgaagggtttctgtgttatcgttacaatctgcaaactaaaatctgtttgaacttaccttttgctataatgaatcgtatgattgctatcaa

SEQ ID NO: 11356 - DNA, 942 bp, Glycine max
  Clone ID: 701056017_FLI
ctcatccacagtatcatgggcaagagggtgggttatggaagaagaaactcaatgattgatcagtgagtttcttcttcataaccaccctcatccacagtatcatgggtgggttatggaagaagaaactcactgatcaatcattgaagctttttgactttttacctcaagcaattcaagaacaattgatgcttgaaagagatccacatggaaatgttcaggttgccaagatagaaacagagaaaatgcttattcaaatggttgaaactgagttggagaagagaaagcaagaaggcaaatacaaaggcgaatttaaagggcaatcccacttcttcggttatgaagggagatgtggcttgcctactaattttgatgctacttattgctatgctctgggttatggtgctggagccctccttcatagtgggaagactggactaatatcatcagttgggaatttatgtgctccagtaaaagaatggactgttggtggaactgcactcacctcaatgatggatgtggagaggaggcatggtaaattcaagcccgtgatcaagaaagcaatggtggagcttgaaggggcacccttcaaaaagtttgcctccttgcgtggtgaatgggccctgaagaattgctacatcagtccaggtccaattcaattctctggcccaggatctgaagtaattaatcacactctactcttggagcttgaagcacaagcttaggcataatatgaggtccttgttttgacggtggcaattcatattgttttttgggatctttcaatatatatttgatctgttactgtctagtgtttgagtttacttgtgaaattaatcagttaatgattcttgagttggttgatgagtatgaattggtcaactcaaaagttgcatacaacatcggcaatttattttcatgacaatcattccgattttgcctatt

SEQ ID NO: 11357 - DNA, 579 bp, Glycine max
  Clone ID: 701056072_FLI
taatattttaacatttcagatactatatagcaccatcaggcaagagattgcgctcaatggtagaggtccagaagttcttgatggagcatcctgagtatacaagagatggggtaactctttcacagttctcatttcaaattccaaggccattacaagaaaactatgtgaggaagcgctccgctagacttacctcttcatatgaagtcagcgagcctgttgaacatcagcaagtgagtcctctagcatgggtagatccagaagggtgtggtggaagactggggcttcctccccccccattcatgggatcccatgatcttgacactactatcaatatgagtatcagccgtcctgcaaagaggcaagcaactcataaaggttccctgtagtaagatggaccctcatcaaatctctaaattcaacatccttttgtgttatgtgcagtcgattgcatcttacttacttacaaatagagaaatggtttatcttttttaatagaatagggcattttagatgtaatgagcttgcggaaaactgtgtagagacagtccacttgtcctataattagttattgaggagatc

SEQ ID NO: 11358 - DNA, 920 bp, Glycine max
  Clone ID: 701056241_FLI
gagaaggacgaggaggttgaggatttgagtttcgatggctccgggttgaactatgattctgatgacttgactgagagcaattataataatgtttctgagggtaatactgggaagaatggtggggttagttccaacgcgaacagcaccgtcatcaccggtttggatcaaaaagggaagaagaagggaatgcctgctaagaatttgatggccgaacgacgccgtaggaagaagctcaatgatagactctacatgttgaggtccgttgttcccaagattagcaaaatggacagggcttcaattcttggggatgcaattgagtatctgaaggagcttctgcaaaggatcaatgatctgcataacgagttggaatcgacaccagtgggttcttcactcactcctgtctcaagtttccatcctttgacgcctactcctcctacgctgccaagccgaatcaaggaagaactgtgccccagctcattgcccagccccaatggccaacctgctagggttgaggttcggctgcgcgaaggaagggctgttaacatccacatgttttgtgcccgcaagcctagtctgttgctctcaaccatgagggctttggataaccttggattagacattcagcaggctgttatcagctgcttcaatggatttgctatggatatttttcgagccgagcaatgcaaagaaggtcaggatgtccatccggagcaaatcaaagcagtactcttggattcagctggctacaatggcatgatgtaactagttttgacaagaaacaaactggtagctgctatttcacagtcaatttggcaagttaaatcagaatcagtttttactttgttatgttcacaattcaagtgtacgatactagctctggtaacttgagttaaagttgaggtagaagaaattttcacatg

SEQ ID NO: 11359 - DNA, 1222 bp, Glycine max
  Clone ID: 701056422_FLI
caaaaacccctcgtccgctccaaaaccctaaaacctgaaagcatacgctacttctgcttcgttgcgatgttggaaatcaaaaccgccaagacccgcaagggcaagcgggagctagagaaacgcgctcccaagctcgtggaatcggggaagaagacgctgatcctgcacggaacgaagaccagcggcgtgctgaacgccgtgctggcgcagatttatcacctgaagaaggactgtgccgtcaagtacagccgcaggaacgagaacgtcaagcccttcgaggccggcggcgagacttcgcttgagttcttctctctcaaaaccgattgcagtatctttgtgtatggatctcactcgaagaagcggcctgataaccttgttattgggagaacttatgatcatcatatctatgatttagtggaggttggagttgaaaattttaaacccatggagtcttttagttatgataagaagttggctcctaaggaagggtcaaagccttttattgtttttattggagaaggatttgaggctgtggaagagctaaagcatttgaaggaagttttgctcgatcttcttcgcggtgaggttgtggagaatctaaatcttgctggagtggatcgtgcatatgtatgtgctgccctttctccgaatcgtgtgttttttacacactgtgcattgcggctgaaaaagtcaggcaccgttgtgccaaggatggaattggaagaagttggcccgtccatggattttgttcttcgtaggcatcgtcctcctaatgaaagtttgaggaaggaagcactgaaaacgtcgagggagaagccgaagaaaaaggagaagaatgttaaaaaggatgaattacagggaaagattggaagtatttatatcccagatcagaaggttggagaaactcctttaccttacaaagcaaaaggagtgaagagggagcgccgagaatcgaagcggaaaaatgagagtgatggaagtgcttcaaaacggaagaaggaagattcttaatacttacaaattacacttgttgtctttccctggcatctgattataatagaatgatcaattgtagatcatatgatattaaactgcatgttgtttaggtgtcatgaatattcatgattttcccctataagggggggttttgccatcattttattcagcgtatttttttccccttcatattttgccaagttgaaatgcagtcctttgaaccatg

SEQ ID NO: 11360 - DNA, 2279 bp, Glycine max
  Clone ID: 701056606_FLI
gacgttattgtctccccaaatcaaatgttctgtgctggcttctttcaagttggtgaaaatgccttctcctttgccatatggttcaacgaccctcacactcacaacaacaaccacaccgtggtttggatggcaaaccgtgaaacacccgttaatggaaggctatcaaagctttccctcttaaacagtggtaacatggtcttggttggtgcaggtcaaatcactacatggtcatcaaacacagcatcagatgctccagtaaagttgcatctccaagatgatggcaatcttgtgttacttgatctccatggaaccattttgtggcaaagttttgataccccaactgatactctccttcccggtcaattacttaccagatacacacaactagtgtcttcaagaagccagactaaccattctcctggtttctataagatgctatttgatgatgacaacgttcttcgtcttatttatgatggtcctgatgtctcaagcacatattggccaccaccatggctactcagttggcaagctggaaggtttaattacaacagcagcagagttgcagtgttaaattctattggaaatttcacttcatcggataattatgatttttccacggatgatcatggcacggtgatgccaagaagattaaaactggattcagatggaaacgctcgtgtgtacagtagaaatgaggctttaaagaaatggtatgtttcatggcaattcatatttgatgcatgcaccagtcatgggatttgtggtgctaacagcacttgcagttatgatcctaaaaggggacggagatgctcgtgtttaccaggatacagagtgaagaaccatagtgattggtcttacgggtgtgaacccatgtttgatcttacttgcagcagaaatgagtctatctttttggagatacagggcgttgagttatatggttatgatcacaattttgtccaaaacagtacatacataaactgtgtgaatttgtgtttgcaagattgtaactgcaaagggtttcagtacagatatgatggtaaccaaatatttagctgctttacaaagtcacagttgttgaatggaaggcgttcaccaagttttaacggagcaatttacttgaggctgccaatcaccaataacttctccaaggaagaatctgtgagtgcagatgatcatgtttgttctgtgaagcttcgcaaagactatgttagaaagccagaaaatcgtttggtgagattttttctgtggcttgctactgcagttggggctttagaagtgattttctttttcctgatttggggtttcttgatttggaacctcaaaacgtctagtgcagatcagcaaggctaccatcttgcagcggtgggattcagaaaatatagttatttggagttgaagaaggcaacaaaggggttcagccaagagattggaagaggtgcaggagggattgtgtacaaaggcattttatcagatcaaagacatgttgcaattaagagactctatgatgctaagcaaggagaaggagaattccttgctgaagtgagcatcattggaaggctcaaccacatgaatttgattgaaatgtggggatattgtgctgagggaaagcataggttgttggtgtatgagtacatggagaatggttctttggcacaaaatctctcatccaacacacttgattggagtaagagatatagcattgctcttggaacggcaagggttctggcatatcttcatgaagaatgcttggagtggattttgcactgtgacataaagccccagaacatacttcttgatgctagttatcagcccaaggtagcagattttggcctgtccaagctactaaatagaaacaacctcaacaattcaagtttttgaatgatcagaggaaccagagggtatatggcacctgagtgggttctgaacttagcaatcacctcaaaggttgatgtttacagttatggaattgttctattggagatgataactgggaagagcccaacaacaaccggtgttcaaaacattgatggagaagagccatacaatggaaggctggtaacatgggtgagagagaaaaggagtgccacatcttggttagagcacatcattgatcctgcaattaagacaaattatgatgaatgcaagatgaaccttttggctacagttgctttggactgtgtggaggaagacaaagatgtaaggcccaccatgagccatgtggtagaaatgctacaaagccatgaaagtgatcctcgtaatatcatcaatgcttgatggtt

SEQ ID NO: 11361 - DNA, 587 bp, Glycine max
  Clone ID: 701056674_FLI
aaaacagaaagctcgtgtcactgaacgtcaacgcaggcaacgcatcgctgataacctcaaagccttgcatgaattgcttccaaatccagcagagggaagtcaagcttacgtattggacgacataattgactatgtcaaatatttgcagcttcaaataaaggaacaaagtggaagtagattattgcaagcggactcaactgctataccactagtttttcatgagggttacggccattatatcaaccaaaagatgctgaatgaaccccttgaggagataatggggaaactagttgaagatgattcagcagcagctgttcagctactagagagtaagggtcttttcctgctgcctatggcattggttgatgagttgagtgaggctgtgcaaatgtttggtgggagtgcacttgtctgacaaaagctttcttttatttatttcaaattctccattatggatcatttctagacagtggcagtagtatgattattgtttatgtttttgatgttacaacaataacatttatgacttattacaaactatcaaaatctcagctaactcgattccactagttctagtttcgattatt

SEQ ID NO: 11362 - DNA, 1105 bp, Glycine max
  Clone ID: 701056828_FLI
gtgatcgaccttcttatgatggatacaattggaggaaatatggtcagaagcaagtgaaagggagcgagtacccgcgaagttattacaagtgcacacatcctaattgtccagtgaaaaagaaggttgaaagatcatttgatgggaatattgcagaaattgtttataaaggtgaacacaaccattcgaagccacagcttcataagcgaaactcagcagcagggacacaaggatcaggggttatgtctgatggaatggttcaagatatgtggagtaatagtcacagtgagaggaacgaaggcaatgaagttagaattgagaacacaggattgtctatgcattcagattattatgtcaaagttccacagcctaatgattcttcattaaatattggtgcaactaatgctggtggaggaagcatggaaaactcttgtggtctaagtggggaatatgaggaaggaagcaagggatttgaggcacaggaagatgaacacagaagtaaaagaaggaaaaatgagaatcaatccaatgaagcagcattatcagaggaaggtttagtagagccgcggattgtgatgcaaagttttacggattctgaagttcttggagatggctttcgctggaggaaatatgggcagaaggtggtgaaaggcaatccataccccagaagttactttagatgtactaatatcatgtgtaacgttcgcaaacacgtggagagagcaatagatgacccgagatcatttgtgactacatatgagggaaagcacaatcatgagatgccactcaagaacacaggaactgtagcatctgaaagagattcacaggcttctcttagtaaagataaaccatgattgacacttcaattagttaacaagtatgattcaatagcattggcagacatctgaaataattcagaggatgcattccttttatatcctatagtatgctcagaataattgaagttgatcagaaagatcaagacattgacaatttcaaatgcagtacctacttagactaggatatttgttgataataaccgtattggtgctgataaattgtattatatatggaatcaagggcactggcttagaggactgcccttcat

SEQ ID NO: 11363 - DNA, 1306 bp, Glycine max
  Clone ID: 701056883_FLI
gtttcataataattgcgacgtggaaaatcgaaagtaaacgtttccgatggtgtcgtggaacaggttgcggctgggaatggacggtgacggcgaggagttgactgcgcaggagaccgctttgtatgaccgtcaaattagggtttggggagctgatgctcaaagaagattaagcaaatctcatgtcttagtctatggaatgaaaggaactgtagctgagttttgcaagaatattgttctggctggagtaggtagtctgactttagtagatgaccgggttgccactgaggaagtgctttcctcgaattttctcatccctcctgatgagaatgcgtatagtggaaagacccttggtgagctttgttgtaattcacttaaagacttcaaccctatggttcgtgtttccattgagaaaggtgatttgtcgagttttgatgttgaattcttcagcaaattcgatgttgttgtcgtcagttgttgctcgctttcagccaaaaaaactggctaatgacaaatgcagaaagctatcaaaacgtgtagcattttatgctgttgactgcagggattcttgtggtgaaattttcgtcgatttgcaggattataaatattcaaagaaaaaacaggatgaaactgttaaatgtgacctgaaatatccatcattcgaggatgcattatctgtaccttggagggcacttcacaggagaatgtcaaagctgtactatgctatgagagtaatagaaaagtttgaagaggctgagggacgtagcgcaggggaagtttccattgcagatctttctggtgttctcaaactgaaaaaggagatttgtactgcacaatctctcaatgaatctcatgtgcctgatactcttctagaaagattggtgacaaatgcaatagaatttccgcctgtttgtgcaattatagggggaatccttggacaggaggttatcaaagcaatttctgggaaaggagaccccctaaagaattttttcttttttgatgcttttgatgggaagggcattatagaagacctctctccgaagtgattaattaatggccgaagctttggcagtctaaagtagggatgcaaccttttgccaaaacagcacagaaaactagtaaatttcaaaagatctctaaagaaattgacccttctcccttattaactgctcatatagcttcctagtctgtatgtattttatctagactaataacagtttagggttaggatcttctcgtcatgtagtcactagacacactcatcagcgttccttttgatgttatgaagcccaattgtccttttatgttt

SEQ ID NO: 11364 - DNA, 1053 bp, Glycine max; identical to SEQ ID NO: 9150
  Clone ID: 701057038_FLI

SEQ ID NO: 11365 - DNA, 1734 bp, Glycine max
  Clone ID: 701057042_FLI
ccaaaatccagagtagtaggtggtcttcttagtgcatatgatctttcaggggacaaagttttcctcaacaaagcaatagaaattgcagacagattattgcctgcatggaatacgcctacaggaattccttacaacatcattaatttgtcacatggacgagcacacaaccctagttggactggggtaaattatagaattctgttaatgcatttcagtcttacttaacagtaggagatttgggatattacttaaatgggttgtagtccttgattttaactacctggcattgtttacatttttattacccttagagtcagagatatggctttaatgggtttatataatccttgtgtttttattttgttaagggtgagagtatcttggcagattctggcactgaacaactggaattcattgttctatcccaaaggactggagacccgaagtatcagcagaaggtggaaaatgtaatagcccagctaaataaaacatttcctgatgatggattacttcccatctacattaatcctcatagtggggcagcaggctactctcccatcacatttggggccatgggtgatagtttttatgagtacttgctcaaagtttggatacaagggaataagacttcagccgtaaaacattatagagatatgtgggagaaatcaatgaaaggtctatcaagtttgattaggagatcaacaccatcttcatttgcttatatatgtgagaagaatggaggatctctaacagacaaaatggatgaactagcatgctttgctccagggatgattgctttgggatcatttggttacagtgctgatgatgattcacagaagtttctgtcacttgcagaagagcttgcttggacatgttataacttctaccaatcaactccaacaaaattggctggggagaactatttctttcattctgggcaggacatgagtgtgggtacatcatggaacatactgaggccagagacagttgagtccctcttttacctttggcgtctaactggcaacaaaacgtaccaagaatggggttggaatatatttcaagcttttgagaagaactcccggatagagtcaggctatgttggactgaaggatgttaatagtggagtcaaagacaacatgatgcaaagcttctttcttgcggagaccctgaagtatttttatcttctcttctcaccttcttctgtcatcccattagatgaatgggtattcaacacagaagcccaccctctgaggattgtgaccagacacgaagagggacttgttaagaatttaaatgagaagcaaaaacctttttctagaataggtggcaggaaggaaggaaggtcaggttagatatccattcttctctaccattgctgatcgaaccccttttaccaaaattaaagaagagcagtttgttccactatggagcttgtaagatgtcagcatttcctcattgcgaggggtaaggggttcattcagccacagatgtcagcatttcaaatagttcttgactgaagttcttaaaatggttttattcaaggtgacctgaccttttgttgatgaatgacccttttgaaattcacggctaataggttgttgtcctttttttttttttttttttctggaaccaaatattttcagagcattatacaactgaggcctgtatctgcgcattgaatagaagataatccctgcttaacaattttctttatagtgcttttacttattacgg

SEQ ID NO: 11366 - DNA, 936 bp, Glycine max
  Clone ID: 701057063_FLI
tacattttatgcctccactgggacaacctcaataaggaagatcacataaaaagtaacacacgttatatttttattgagaagcagcaccacaagcattgaagaaacttatcttagttctgtgttgtttaattgtctgtttgatttgagtggtttccaattacagggctgtcttagcttggctttctattattgcacatcgcaacaaagacaagaatcccggggagaaattgatctccgtatctgacgttgtgatggagcactgggcaacttatggaaggaatttcttctctagatatgactacgaggaatgtgaatctgaaggtgccaataagatgatagaatacctacgagatattttgtctaagagcaagcctggtgatcagtatggaagttatgttctccagtttgcagatgattttacatacaccgatcctgtagatggaagtgtggtatcaaaacaaggtgttcggtttgtttttacagacggttcaaggattatatatcgtttatcaggaactggttctgcaggggctacggttagagtgtacattgaacagtttgaaccagatgtctctaaacatgatgttgatgctcaaattgccttaaaaccattaatagatttggcaatatccgtgtcaaagctcaaagacttcacagggagggagaagcctacagtcatcacataatggacaattccacaaccacttgatcaagttgttatatgttccaaggtgtgctctaagttgagtgcatacgcaggttgtttattgcatgcctatccatatctgagctcgctcgagttcggtcacttttggttgttcaagaattttggagcgataggtcccctgtaaaatatgctacttatatatttatgtgcaaagtatgaagcaccgacgtgcaacaaaataataataaaaaagaatagtttgctgctct

SEQ ID NO: 11367 - DNA, 399 bp, Glycine max
  Clone ID: 701057391_FLI
tgaagactttctctctccatggatctttcagaccttaattccgctgaaatgcagaagttctactctgaagaacagcaaagagccatggttaatgaaatggtggcaaagctaacgagtgaatgctgggataaatgcatcacgggtacacctgggaataaattcagttccagtgaatctaattgtctttcaaactgtgctcaccgttacttggaaatgagcatgcttatcatgaaaaggtttcagagtatgcaatgaagatcgagggatatcaacgcgctttgtcagttaacaaatgtaatattgaatttctcttttgcatgatcattcatattggaatcttattatttggcagctttttttttctttggattaatatatatttgttgagactgttgggtc

SEQ ID NO: 11368 - DNA, 847 bp, Glycine max
  Clone ID: 701057632_FLI
ggaactttaagatcatttaccgccgctatgctggcctctacttctgcatctctgtggatgtcaatgacaacaacctggcttacctggaggccattcacaacttcgtggacgagatgttcctggctggcgaaatccgagagaccagccagacgaaggtgctgaaacagctgctgatgctacagtccctggagtgagggcaggcgagccccaccccggccccggcccctcctggactcgcctgctcgcttccccttcccaggcccgtggccaacccagcagtccttccctcagctgcctaggaggaagggacccagctgggtctgggccacaagggaggagactgcaccccactgcctctgggccctggctgtgggcagaggccaccgtgtgtgtcccgagtaactgtgccgttgtcgtgtgatgccataagcgtctgtgcgtggagtccccaataaacctgtggtcctgcctgaaaaaaaaagaagctatagatgaagaagataacacaaagtaatgtccaagagtacaaaacgacctcgtgcgttgaagaggctctgagaatacaatggggtgctccggattagtgctcctcctatcgcggacatcgattccgtgccgggcattgaagggtgagaatttttactttatcaagactttgactataggttttgcaacattcagagcatgacaacgtcaaggtaaaaattgtatactgccaatatttgcaaaggcatttgctcccaaagattcaggctcaaaacggacgttgcaaattagatgcttaaaaccgttaattgcctgatgaaaaatagcggattttcacagtcaggaactcattcgtgcaaga

SEQ ID NO: 11369 - DNA, 1367 bp, Glycine max
  Clone ID: 701057687_FLI
gccatatgcacagcagtttcattccttgcaactgtacctttgggagaattattctttttccatatgatcctgatacgaaagggtatcacaacttacgagtatgttgttgccatgagaactctaagtgaaccacctgggccttcagttgatgggggtgaacagcagagtctaccatcgtctcctactagttcagctgtcactgcaatgagtggaagaagctccgttggaatgagtatacagtacaaaggtgcctggtgtacaccgccaaggatctttatggaccacccggatgaaattataccacatttggagccgggacgcctaccatccactgttgatccagatgccgtacaaccacctgacaaagggagaaaaatgaaccagcgccctgtgcgtataagtgcatggaaacttgcaaaattggattctaatgaggcaactaaggcagctgctaaggccagagcatcatcgtctgtgcttcgtccaattagttctcgacctcatgcgtatgatgttgatcatgtatccagtagcaatgtgagtggaagaagcagcccaatcagcaatcaaggatttcatataaaaaatgatacagtggggacatcaaggttatctccttccaagagctcgtaccctcctagtcaagcaagcaaggatgacatagatgcatcatgtcaacacagtatgagtaactttagcagtccacgagtctccaaccttactccttcaccaatgcagaggccaggtttgaacagagaccatttcaaccccatgtatcaacaaccatcgggaaaccagtctccttcgtcagctaaaggaagtgaagggaacataaatccagttcacgacaatgtgccacgtgtaccatgagaagcaacaccttagctgtttcagataatagaagatcgtcagtgttttgggatcaagcagctggacgctttgtctcgtcctcatcaagaggtcccggaacagaattattgtacacgggccgttctatattttttggcagccccgttgtgaatgaacagccaagtacaggaacaagaagtagcagttcagtagtagctggtattccggatagagattcttctacattaagggattttcagcaaggtagatcacataggggtggccagcttcctgtgtttgttcctggttgtggttatgcccagcaaaacaagtttccttagattgcctccttgttacggcaactgttttttatccttttttattttattttttttaaatttcctaaactttttaaatgtccgtctttttacttcatcgtttcccccttatgacggtatgagtgcattcgcctttccatctgtataggctaatgaatggatcacgaccttttactgtac

SEQ ID NO: 11370 - DNA, 1061 bp, Glycine max
  Clone ID: 701057815_FLI
gcaagaatggcacttcgttgcttggtgatgtccctttctgttctcttcactcttggtcttgcgagagaaagccatgccagagacgaagatttttggcatgctgtttggccaaacactcccattccaagttcattgcgagatcttctaaagcctggccctgcaagtgttgaaatcgatgatcaccctatgcaaattgaagaaacacagtacccgaaaaccttcttctataaagaagaccttcatccaggcaaaacaatgaaagtacaattcagcaagcctccctttcaacaaccatggggtgttggtacatggttaaaggaaattaaagacactactaaagaaggatatagttttgaagagctatgcatcaagaaagaagccattgagggagaagagaagttttgtgcaaaatccttgggaacagtaattggttttgccatttcaaagctgggaaagaacattcaagtactttcaagttcctttgtcaataagcaagaccaatacactgtggaaggagtgcagaatcttggagacaaagcagtgatgtgtcataggctaaatttcagaactgcagtattttactgccatgaagtccgtgaaacaacagctttcatggttccattggtggctggtgatggaaccaaaactcaggcacttgctatttgccactcaaatacttctggaatgaatcatcaaatgcttcatcaacttatgggagttgatcctggaactaaccctgtttgccatttccttggaagcaaggccattttatgggtacccaatttatctgtggacactgcctatcagaccaacattgttgcttaattagtccatgcatcttgagcaccatgagaatgagattgtgtataaaataaattatcatgtgctgtgtgttgtgcaagtactaccttctctagctagattgctagagctagaatttcaacctacctatgtgtactgataagatctgcttccctacttaaagagagcatcatcctgtgatcagtgtgcttcgtattctctctctctatatatatatggtaaaaagtggttatctcgtg

SEQ ID NO: 11371 - DNA, 1715 bp, Glycine max
  Clone ID: 701057895_FLI
cccagcatgccgtgggataaaacagaactttgggttggctatatttctgaaaatggtgagatctacaagcgtgtttgtattgctgggaatgatccttctcgtgtggagtctccaactgagcccaagtggtcccttgatggggagctgtttttcgtgacagacaaggaaaatggtttttggaatatccataaatggattgagtttgagaataaggttgtgtctgtttattctttggaagctgagtttacaaggcctctgtggacttatggtatgaattcttatgaatttgttgaaagttctaaacagaaaaacttaattgcttgcagttacaggcagcatggaaagtcatatctgggaattattgatgtgcagggctcaaagctaactgtgattgatttcccttgcacagacataaataacataacgtctggtaatgattgcctatacgtggagggagcatctgaggttcttccatcgtcagtggccaaggtgactttcgatgatgataaatcaaaagcagtggatttcaatattatttggtcttcgtcacccgacagtttaaagtatagttcctacatcagtaaaccagagtttattgaatttccaactgaagttccaggtcaaaatgcctatgcatacttttatccaccatctaatcctgatttccaagctagcaaagaagaaaagcctccattattattgaagagccacggtggaccaactcaagaaactcgtggaattttaaatttgagcgttcagtactggactagtcgaggttgggccgtcgttgatgttaattatggttatggcagggtgtacagagaacggcttttgcgccagtggggaatagttgatgttaatgactgttgtagttgtgctacatatttggtggacagtggaaaggtggataaggagcggctgtgtattatggggggctctgctggtgggtataccaccttggctgtccttgctttcagagatacttttcaggctggggcttctttgtatggtatagctgacttgaacttgttgagagcagaaactcataaatttgaatcccattacgttgaaaacctagttggagatgataaggatatgtatgaaagatcccctatcaatcatgttgacaatttttcttgtcccatcattatatttcaaggattggaggacaaggttgtgccaccggatcaagctcggaaaatataccaggcggtgaaagaaaaaggtgtgccagttgctcttgttgagtatgaaggagaacaacacggtttccgaaaggctgagaacattaagtttacacttgaacaagaaatggtcttcttcgcacgattgattgggcactttgatgttgctgatgacatcactcccatcaaaattgacaactttgatgactaatggctttttcggagaaattcaggaactcagatggaaattattgtaccaattaatgagctgcttctgcctcatagccataatagccctctgaggaaggtctatattaatgctcattgccaagagtgtgctgagtttctactatatattatcttgaagttcaatttaattagtcttgtatcttgttttctacttatcaatttagattttgaaagtgtgctggagatactgcatatgtttgttttctaagatacctgtcctgcatggataaagtgggtgatgatgaactttatagtattgaacttaatttttgatgtttcagc

SEQ ID NO: 11372 - DNA, 1675 bp, Glycine max
  Clone ID: 701058804_FLI
ataattgtaattgtgataccgttgcggtcgtgacggaaagcatggaatttcaaaaactagtccttcatctgttccttccaacttatctattctgtcatatagtgaagcaagtgatttctcaaatcttcccacaccgaggtccgagggtgaaatcttgtcttccccaaatcttaaggcctttacctttaacgagctaaagaatgccaccaggaactttcgccccgacagccttcttggtgaaggaggatttggttttgtttacaaggggtggattgatgaacacacacttacagcttcaaaacctggatcaggaatggttgttgctgttaagaaactcaagcctgaagggttacagggtcataaggagtggctggtaagtattttgtttccatttcgaagcctaaggtggcttaagcatactttacattacaccccttcccctgcccctaagaaatgtatatacttttttggattttactgatggtctaattagtgaagctttaatcattttctagactgaagtggactaccttggacaacttcaccatcagaatctggtaaaattgattggatattgcgtggagggagagaatcggctgttggtatatgagtttatgtccaaagggagcttagagaatcatctgtttagaagaggaccacaacctctttcttggtcagtgaggatgaaagtagccattggtgctgccagaggactttcttttcttcataatgccaaatcacaagttatataccgtgattttaaagcatccaatatcctactagacgcagagttcaatgctaaactctctgattttggcttagcaaaggctggccctacgggtgatagaactcatgtctctactcaagtcatgggaactcaaggatacgcagcacctgaatatgttgcaacaggtcggctgacagctaaaagtgatgtatacagctttggggttgtgttgcttgaactattgtccggtagacgtgccgttgacagatcaaaagccggtgaagagcagaatctagtagaatgggcaaaagcatatttgggtgacaaaagaagactatttcggattatggacaccaagttgggtggccaatacccacaaaaaggagcctacatggctgccactcttgctctaaaatgccttaatcgcgaagctaaggcaaggcctccaatgacagaggttttagaaacccttgaactgattgcaacctcaaaacctgcaggaagaaactgccaattagaacaaaagagagtccatgctcctgacagaaagtctagtgtgcaaaaagggtcccatttgaatcatactcctactgcattcccataatctgcttgcgtactctaaattttgaacatctgtatatacattccttatttttataaggttggtttttacaaggagaaatgctaggaacacactattttgaacacttcctctcttgtttgttgaaatttattgaagatgacaaaattttgttggtcctacatgatgtttaatgatcttttctcttgattttgttgtttttaatcaattttaaccaattagagataatgcatttgaaggagtgtggtagaaagtgtgttcctagcactcctctttgacaagatataatgtggcatgtacatgtacttagatgaaatttcaactgaatattagcacattatttcccc

SEQ ID NO: 11373 - DNA, 1088 bp, Glycine max
  Clone ID: 701058906_FLI
acctctaactatttatattcacatatttctctccttctcagaaatcagaattgagcaagcgtttggatttggaatttgaaggttatcatcatcatttatagatattattattattataagaagttcatcagaaatattcaatggggagctttgaaactgaactgatgaatcttaaggccacagagttgaggttgggactgcccggctgtgatgaaactaatgagaaaagttcatccagtagtggatctgttgttagaagcaacaagagatcttcaccagaacccagtgtggaagagtccaggtgcaactctaatggttcttcagattctaccaccacaagtgatcatgatcaagacagtgcccaacctgaaaaggtacaagtagtggggtggccaccaattagatcttttaggaagaacagtctgcaacaacagaagaaggtggagcagctgcagggtgatggaggtggaatgtacgtgaaagtgagcatggctggtgcaccttacttgaggaagatagatctcaaggtttacaatagctacccagaactcctcgcagccttgcaaagtttgttcacgtgcacatttggtgaatattcagagagggaaggttacaatggatctgaatacgctccaacttatgaagacaaggatggtgactggatgcttgttggagatgttccatggaacatgtttgtatcctcctgcaagaggctgaagataatcaaaggatcagaagcaaagggtttgggttgtttgtgaccaacaaaacttacaaaagcaaaagcaagatagtcatgagatcttcagagacaaataccctttgtgttgtgcaagcaagtacatggtgttttatgagaactcatatatagtttattataggaaaatagatgaatatatatatacacgttattttttctttattaatttcaacagaggcggctttgaggtctgctttctaaattatatgtaatattcctctcaaaaagaaagagaaagaaaatataagaaaagttaatgctatttcaattgtacagatcgtgaatataattataactaataataacaataataatatcattttgtcct

SEQ ID NO: 11374 - DNA, 1793 bp, Glycine max
  Clone ID: 701058910_FLI
tgattgccttcaaatcacacactctcttcaatttctagggttttgctattgctttgcctccgttccccctttctcacaaaaacaacgccttttctcttctccttcgtatctattctttgcgtttggtttttggttgattgaaggcattcacagcgtaattcgttgctgcattttaatcgatttatctaaccaggactgaatgacctaatggagtctaaaggtgggaaaaagaagtctagtagtagtagtagtaaatcaattttttacgaagctcccctcggatacagcattgaagacgttagaccaaacggtggaatcaagaaattcagatctgctgcttactctaactgttctcgcaaaccatcctgatacacatccggattgatagttcgttgcatgcaaccatagttttattaggattttttcttctttgttttcaattaggtttttttgttgctctccttcaaactccatctttccaaatcctctctttgcgattgtgttttgatctgcttcctactgcgatagtttctctactgttacatggccatggcggtttccgcaattggttttgaaggtttcgagaaaaggttggaaatatcctttttccagccgggactttttgctgaccctgaaggaaggggtctaagggctcttacaaaatcccagttgggtgagattctaacaccagctgcttgcaccattgtttcttcgctcaaaaacgataatgtcgactcctatgttctatctgagtccagcctctttgtttatgcctacaagatcatcatcaaaacctgtggtactactaagctattgcttgcaatcccacccatattgaagttcgctgaaatgctttcccttaatgttaagtctgtgaattacaccaggggaagtttcattttccccagtgctcagccatatccccatcgcaacttttctgaggaagttgctattcttgatggctactttggcaaacttggtgcaggaagcaatgcttatattttgggtggccaagacaaagcacagaactggcatgtctactctgcttctgcagattctgtaactcaatgtgacaatgtttacactcttgagatgtgcatgactggcctggatagagagaaagcacaggttttctacaaagaacaatctgcttcagctgccatgatgactgttaattccggcattagaaaaattcttccagattccgagatttgtgactttgactttgaaccatgtggttattcaatgaactctgttgaaggcgctgctgtttctacgattcatgttaccccagaagatggtttcagttatgcaagcttcgaaactgttggttatgacttcaaagcggtgaatctgaacgaaatggttcagagggtattggcatgtttcctcccaactgagttttctgttgcagttcatgtggatggtgcaagcaagtcgtttgagcagacctgctttctggatgttaagggatactgtcgtgaagagaggagccacgaagggcttggaatgggtggttctgttgtctaccaaaaattcgggaagactagtgactgtggttcacctagatcaactctaaagtgctggaatgaggaagatgaggaagagtagtttccttaagtgtctttattattctgtccttgtgaaaataagtctggttttccagatacgttattgtttttctttgttgtcttttttagcttctgttagagaccatttgggcatttagacctttattgtttctattaccatttgaacatcgaatggattaataaatcactttgtttgcgtgc

SEQ ID NO: 11375 - DNA, 1064 bp, Glycine max
  Clone ID: 701058921_FLI
caagaatggcacttcgttgcttggtgatgtccctttctgttctcttcactcttggtcttgcgagagaaagccatgccagagacgaagatttttggcatgctgtttggccaaacactcccattccaagttcattgcgagatcttctaaagcctggccctgcaagtgttgaaatcgatgatcaccctatgcaaattgaagaaacacagtacccgaaaaccttcttctataaagaagaccttcatccaggcaaaacaatgaaagtacaattcagcaagcctccctttcaacaaccatggggtgttggtacatggttaaaggaaattaaagacactactaaagaaggatatagttttgaagagctatgcatcaagaaagaagccattgagggagaagagaagttttgtgcaaaatccttgggaacagtaattggttttgccatttcaaagctgggaaagaacattcaagtactttcaagttcctttgtcaataagcaagaccaatacactgtggaaggagtgcagaatcttggagacaaagcagtgatgtgtcataggctaaatttcagaactgcagtattttactgccatgaagtccgtgaaacaacagctttcatggttccattggtggctggtgatggaaccaaaactcaggcacttgctatttgccactcaaatacttctggaatgaatcatcaaatgcttcatcaacttatgggagttgatcctggaactaaccctgtttgccatttccttggaagcaaggccattttatgggtacccaatttatctgtggacactgcctatcagaccaacattgttgcttaattagtccatgcatcttgagcaccatgagaatgagattgtgtataaaataaattatcatgtgctgtgtgttgtgcaagtactaccttctctagctagattgctagagctagaatttcaacctacctatgtgtactgataagatctgcttccctacttaaagagagcatcatcctgtgatcagtgtgcttcgtattctctctctctatatatatatggtaaaaagtggttatctcgtgcctc

SEQ ID NO: 11376 - DNA, 1311 bp, Glycine max
  Clone ID: 701059105_FLI
gcaagagcaggctgctcgtgcattggctaacttagctgcccatggagatagtaacagtaacaatgccgctgttggacaagaagcaggtgctcttgaggctctcgttcaacttactcgctctccccatgagggtgtcaggcaagaggctgctggtgcactttggaatttgtcatttgacgatagaaatcgagaggccattgctgcagctggaggagttcaggccttggttgctcttgcccaagcttgtgctaatgcctcccctggacttcaagagagggctgctggtgctctgtggggattgtcagtctcggaaactaatagtgttgccattggacgagaaggaggtgttgcacctctgattgcacttgcacggtctgaagcagaggatgttcatgaaactgccgcaggagcactatggaatctggctttcaatgctagcaatgctctaagaatagtagaggaaggtggagtatccgcacttgttgatctctgctcttcatcagtttcaaaaatggcacgattcatggctgcgttggcattggcttacatgtttgacgggagaatggatgaatatgctttagtaggcacttcatctgaaagtatttctaagagtgtgagcttggatggagcaagaaggatggctttgaaacacattgaagcttttgtccttatgttctctgatccacaagcatttgcggctgctgctgcatcatctgctcctgcagcattagcacaggttactgaaggtgcgtgtattcaagaagcaggacatttgagatgcagtggtgctgaaattggaagattcatcactatgctacggaatccatcatctatactcaaggcttgtgcagcatttgctcttctccagtttacaattcctggtggacgacatgccatgcaccatgctagcctcatgcagagcttgggagcaccaagagttctgcgtggtgcagccgcagcagcaactgccccacttgaagcaaaaatcttcgccagaattgttcttcgcaatcttgagtatcaccagatagagcaaacgctactgtagatcattcatttgttgtttacagtccccttttttaaaatcattttggacttgtaatatttcacatgtacacaaactgcccaatgtgtcataagaacactagtcggtgaccgtgatgcatgtgatgtgaagcaagttataaattgacaggttcttatttttcatctttggaactgcttagaaaacagttcttgttgagatgtatttcttccccccttgtaccaatctcttaatgtcaaggctgcaacagataggcacattgacat

SEQ ID NO: 11377 - DNA, 2795 bp, Glycine max
  Clone ID: 701059108_FLI
cttctgagagtgtttggttgaaagtagcaaagatgtttcctttcgggcaaaagggtcaaaagataaaggggactatggtggttatgcagaagaatgtgttggatatcaacagcatcaccagtgttggagggatcgttgaccaaggcttaggcttcataggcagtgcagtcgatgcacttacttttgcagccaccaaaatctccatccagttgattagtgctaccaaggctgatggtgggaaaggaaaaattggaaagagtacaaatttaagaggaaagataacattaccaaccttgggagctggcgaacaagcatacgatgttaattttgaatgggacagtgacttcggaattcccggtgcattttatattaagaacttcatgcaaaatgagttctacctcaagtctctaattctcgaagacattccaaaccacggaaccattcacttcgtatgcaactcctgggtttacaattcaaaaaactacaagactgatcgcattttctttgccaacaatacatatcttccaagcgagacaccagctccacttttgaagtacagagaagaagaattgaagaatgtaagaggggatggaactggagagcgcaaggaatgggataggatctatgattatgatgtctacaatgacttgggcaacccggatagcggtgataaatatgcacgccccgttcttggtggttcagccttaccttaccctcgcagaggaagaaccggaagaggaaaaactagaaaagatcccaacagtgagaagccgagcgattttgtttaccttccaagagatgaagcatttggtcacttgaagtcatcagattttctcgcttatggaatcaaatctgtatcccaagatgtcttgcctgtcttgactgatgcattcgatggaaatattttgagccttgagtttgataattttgctgaagtgcacaaactctatgaaggtggagttacactacctacaaactttcttagcaagatcgcccctataccagtgatcaaggaaatttttcgaactgatggcgaacagttcctcaagtatccaccacctaaagtgatgcaggtggataagtctgcatggatgactgatgaagaatttgcaagagaaacgattgctggtttaaatccaaatgtcattaagattatagaggagttcccactaagtagcaagctagatactcaagcctatggtgatcatacctgtataatagcaaaagaacatttggagcctaacttaggtgggctcactgttgagcaggctatccaaaacaagaagttgttcatcttagatcaccatgactatctcattccttatttgaggaaaataaatgcaaataccacaaagacttatgctacaagaaccatatttttcttgaaagatgatggaactttgacaccattggccattgagttaagtaagccacatcctcagggtgaagaatatggtcctgttagcgaagtctacgtgcctgccagcgaaggagtggaagcttatatttggttactggcaaaggcttatgttgttgtgaatgatgcatgctaccatcaaatcattagccattggctaagcactcatgcaattgttgagccatttgtcatagcaacaaacaggcaactgagtgtggttcaccctatttacaaacttctgtttcctcactaccgtgacaccatgaatattaattcacttgcccggaaagccctggtcaatgcagatggtattatagagaaaacattcttgtggggtaggtactctatggaaatgtccgctgtcatttacaaggactgggttttcactgatcaagcattacctaatgatcttgtaaagagaggagttgctgttaaggacccatctgctccccatggagttcgtcttttgattgaggactatccttatgcttctgatgggctagagatatgggatgccatcaagtcctgggtgcaagaatatgtctcattctactacaagtcagatgaggaactccaaaaagaccctgaactccaagcttggtggaaagaacttgtagaggtgggtcatggtgatttgaaagataagccatggtggcaaaagatgcaaactcgtgaagagttggttgaagcttccgctatcctcatatggattgcttcagcccttcatgctgctgttaactttggacagtatccatatggaggtttaatcctaaacaggccaactattagcaggagattcatgcctgaaaaggggtctcctgaatatgatgcgttggctaagaaccctgagaaggagtttttgaagactattactggcaagaaggagaccctcattgaccttacagttatagaaatcttgtcaaggcacgcatctgatgagttctaccttgggcagagagatggtggtgactactggacttctgatgccggtccattagaggcatttaagaggtttggaaagaagcttgaagagattgaaaagaagcttatagagaagaacaaagatgagacattgagaaaccgctatgggccagctaaaatgccttacactctgctctatccttctagtgaggagggattgactttcagaggaattcccaacagtatctctatctaaggaccctatggttgcttaagtactgttcctggttttaaataaatgtgaaattgaaggaaccagattccttaatcagttgtgtatgcttaagtcatgtatttggagtggctgaatgtatttgtatttgtcattaataaagagagttgtgttagtataatggaaaccaaaataataaatgcaatcatgcatgttttaactttt

SEQ ID NO: 11378 - DNA, 1100 bp, Glycine max
  Clone ID: 701059308_FLI
gtttcgtggcagtggcgagtgaagaagctatgcctgatgagtgagtcatttttttctctctggtgggtcccatcctcttctgctctgagaacctttataagtgttatatgagtcattgagaagtgaccccaggaaaaagaaaagaaaagaaaaacttcacttcacttgcatgccaaatgagaacaacctcttcttagaataatttcctcggtgtttaagccttgtcgatttccgaacaccaatccgagttaattaaacaatgagagtttcgacagaaaagttagagacagagccggagagcaaaaagataaaacgcattcgtggcggcggcggcggggactcgagcaataagcaccctttgtaccgcggcgtgcggatgcggaactgggggaaatgggtgtcggaaatccgcgagccgcggaagaagtcgcggatatggctaggcacattcccgacgccggaaatggcggcgagggcgcacgacgtggcggctctcagcatcaaaggctccgccgccattctcaacttccctcactttgccaactcgctccctcgcccggcttctctcgcgccgcgcgacgttcaagccgcggcggccaaagcggcgcacatggacccttcttccctctcctcccttgtctccgcaatggacttgtcctctgcctctgacgagttgagccaaatcatagagcttccttctttggaaagcaccgatgatggctccgtcgtcttagagaaagagtttgtttttgttgactcccttgatgcttggatgtatcagccaccctttggttttgacaccgaacaagacactggtttcgaggtttgatgtggaattactagtttcgacccatgtttctgttctattctatgtcttatgttgtataaattaatattgatcgtctctttatgttttgctttgcgtgtgtgtctataagcagtaagcagccacttgttgtttttctttcaggggctgcccgtgccactcgatcgctgtcgtattcatcatcgagtctatctgtcgtctgtcttttttcctgattcctctgtttttaattgtaaatggctagatgaataaagtaagaggagaaattttcttt

SEQ ID NO: 11379 - DNA, 725 bp, Glycine max
  Clone ID: 701059336_FLI
aaacttcttttctttcaggagccaccatggccgagactcggagatccacgggcaccgttaagtggttcaacgcgcacaaaggtttcggattcataactccccaagatggaaccgatgatctcttcgtgcacttcacttccatccgatccgacggctaccgttctttgtccgacggtcagtccgttgagtttctcctcgattacggcgacgacggccgcaccatggccgtcgacgtcacctcagccgttagatctcgtcttcccggaggatttcgcggcggcggcggtgggaggggcagaggaggaggacgctacgggggcggggaaggccgtggcagagggttcggtcggagaggaggaggccctgagtgttataactgtggaagaataggtcacttggcaagggattgttaccatggacagggtggtggtggtggtgatgatggtaggaatcggagacgcggcggtggtggtggaggaggaggagggtgttttaactgtggggaggaagggcattttgcgagggaatgtccgaatgttggaaaaggaaatgagtgagaatgtgttatggtttcttctattgaattgagtctgttactgttagttggggttggttaaatggattctgttatttttgtttctagccattggcatttccttccttccttccaaatatgtttttccagggctttgctaattgttttatctaatgcgcttcttttcaac

SEQ ID NO: 11380 - DNA, 1203 bp, Glycine max
  Clone ID: 701059432_FLI
gcatatagttttcctcctagctagatacatgatcaagtcctcctccatggcttcaattgccaaaatgcttgaaggcaaagtggcgataatcacaggaggagcaagtggcattggtgccgccaccgccaagctattcgtccaacacggcgccaaagtaatcattgccgacgtgcaagacgagttaggccagttccactgcaaaaccctcggcacaacaaacattcactacgtccactgcgacgtaaccagcgactccgacgtcaaaaacgtggtcgaatttgccgtgtccaagtatggcaagctcgacataatgtacaacaacgccggcatctccggagactcaaatcgctccataacgacatccgacaacgaaggctttaagaatgttttcggggttaacgtgtacggagctttcttgggcgccaagcatgccgctagggtcatgatccccgcaaagagaggggttattctcttcacctcaagcgttgcttcgcttctcggcggcgaaacaacgcacgcttacgctgtttcgaagcacgcggtggtggggctaatgaagaacctgtgcgtggaacttggggaacatgggatcagagtgaattgcgtttgtccaggtggaattcccactccgatgctcaacaatgcgttgaagatgaacaagaaagagacgcaggaagtgctgtgtaaggttgcggtgttgaaaggaacggttcttgaagccgaggacatagccaaagctgcagtttatttgtgcagcgacgaggccaagtttgtgagcggagttaactttgtcttggacggaggttatagcatcaccaataattctttcacttctgcgctcaacgctctcatcaacaacaaccatgcttagtaatggctagctatatatccattcccgcattttctgcccagttccatgtgctgaaataattaagctacactatctactttctctgtatttttgtggtctttctgcaagatcgatcaggatggaacacttaattaccacagtttccccctctcatgcaacaatgtagtaccaactagctagttctttttcctaagtgaaaatgtgtgttatgtgatgtataatgatctatgttgatgttgtattcacaaaaataaaataacaataatcaatccgatcgagtgaaaatgtgtgttatgtgatgtataataacattaattatttgtgaatatgat

SEQ ID NO: 11381 - DNA, 695 bp, Glycine max
  Clone ID: 701059591_FLI
ggcagttaatagcaatttcgataagaaaagttccaaaattcagctaagagaaaatgtctctcattccaaacattttcggtggccgtaggagcaatgtgttcgatcccttcaaggattttcctttcccaaattccgtctctacttccttccctgagttttctcgggaaaattctgcgtttgtgagcactcgtgtggattggaaggagaccccagaggcgcacgtgttcaaggccgatattcccgggctgaagaaggaggaagtgaaggtgcagattgaagatgataaggtgcttcagatcagcggagagaggaacgttgagaatgaagataagaacgacacgtggcatcgcgtggagcgtagcagtggaaagttcatgaggaggttcagattgccggagaatgcaaaagtgaatgaagtgaaggcttctatggaaaatggggttcttactgttactgttcctaagaaagaggttaagaatcatgatgttaaggccatagaaatctctggttaagcagaagcaaatgttgttggtcttttttgtttgaagtcgtgtgcttttctttgttctaatatgatgtgagtgggagttgtgattgtacaaacaaataaaatagttgtataaacttggaagtcgtgtgcttttctttgttctaatgtagtgaattagatttgggacaaaaacgtgttctagttt

SEQ ID NO: 11382 - DNA, 1460 bp, Glycine max
  Clone ID: 701059606_FLI
gctcctttccctctctaataagggttcctctttccttctctagcacaatttacaatctcaatggctggaatttgctgtggtgttgttggagaaggtgacactccggctccactcgagcccactcctcgcccctccaggcgccggagtttggacatcttacctttaaaatatatcgccgacatgcccatgccgccgccggaggctttacggaagcgtcccaagctcaacctcagggactgcgataacgcaattgaaaattgcgacgaatccactggacacaaggtgacgaagaaggaatccaaagtagactacgacgacgacgtcgtttcggaaactaagaacgtaactgtttcggaagttgaagaagaatctcccaagttcggcgtgacgtccgtttgcggcaggagaagagacatggaagattccgtctcggtgcggccttgcttcacccaaggcttccactacttcggcgtcttcgacggtcacggttgctctcatgttgcgactatgtgtaaggagcggctacacgagatcgtgaatgaagaaattgaaagcgcgcgcgagaatttggagtggaaactgacgatggagaacggattcgctcgcatggacgacgaggttcatcgccggagccagagcaaccagaccttcacctgcaggtgtgagctccagactcctcactgcgacgccgtcggatccaccgccgtcgtcgccgtcgtcacgccggacaaaatcgtcgtctctaactgcggcgactcccgcgccgtcctctgccgcaacggcgtcgccatccctctctcctccgatcacaagccggatcgacccgacgaattactccgagtccaatccaagggagggcgcgtgatttactgggacggtccgagagtgcttggtgtgttagcaatgtctcgagccataggtgacaattatctgaagccgtacgtgatttcagaaccggaggtgatggtgacggagcggacggaggaggacgagtgtttgatactggcgagtgatgggttgtgggatgtggtatcgaatgagaccgcatgtggggtggtgaggatgtgcctcaaggcgcagaagccgccggggtctccggggagtgacgtggcggctgacggttccgaccgtgcttgctccgatgcgtcgattctgttgaccaagttggcgctggcaaggcatagttcggataatgtgagcgtggtggtggttgatttgaggagggatcaacgacaatcatcaaactacaacgacgttaattaattgattgattaacggagacgagaaaccaaaccaaactaaggaatcacaaatgaatgagatcgcccttttaaccataatgggcacaccctttgttttcaggacttcgttaaggacgggaagaccaaatcagagggaggaggggcgtgtggcttttgcttaatcaaatgttgattgtaatgtaatgggattttaggttt

SEQ ID NO: 11383 - DNA, 308 bp, Glycine max
  Clone ID: 701059739_FLI
ggaaaactgaatcattcaaaggatcctgatggctttaaagagtatattcaaccgatgcttaagcaacaactacgtaatgctaggctctagttcattttgtggctatgatgctctctttgcatccaagaaacttatccactattctaatgcaagtatgcaactgttaataaagttgtgtggaacgataaataaaattgcttgagtacatacgaatgggaatttgttacccagctaatttccatcgcaattaggtgtatctggaaccggaaaaactcatttatttattacattaacgatccttgatgtct

SEQ ID NO: 11384 - DNA, 1986 bp, Glycine max
  Clone ID: 701059742_FLI
aaattctctctctctctctctctcaaatctcaattcactcattcatttcccctttcttctctttctcaatttcgctttgtattgtcttcaattcagtaaaccgcaccaattccgatggcggcgtcgcggcggctccgggacctccaatcccaaccggcgaacaagatctgcgtcgactgttcccagaagaacccgcaatgggcctcggtttcctacggcgtcttcatgtgcctggagtgctccggcaagcaccgcggcctcggcgtgcacatctccttcgtgcgatccgtgacgatggattcgtggtctgaaatccagatcaagaagatggaagccggaggcaacgacaaactcaacgcgtttctcttgcagtacggcatccccaaggaaaccgatatcgtcgccaagtataactccaacgctgcctccgtctaccgcgaccgcatccaggccctcgccgacggccgcccctggcgggatccccccgtcgtcaaggaagccgtccgttcctcctccgctgcattcaagggcaagccgccgctctcggctagcagcaacaacaacggcggatgggataattgggacgccgacgacggattcggatcggccaggggcgggtcggatctcaggcggaaccagtccaccggggacgtgaggggattcggcggcggcgggaacgtggcgaggtcaaaatcgacgcaggatatttacacgcgggctgaattggaagcttctgctgccaacaaagaagaattcttcgcgcggaagagagcggagaatgagtcgcggccggaggggcttccgccgtcgcagggtggcaagtatgttggattcggatctggccccgccccgccccagaggggtaatcagcaaaacgattatttctctgtcgtttctcagggacttggtaaattatccttggctgctgcttctgctgctaatgttgttcaggccgggacaaaagagttatccgctaaggtaaaagagggtggttatgattacaaggtcaatgaaactgtcaatgttgtctctcagaagacaacagagattggacaaaggacatggggtatgatgaaaggggtcatggcattggcttcacagaaggttgaggaattcgctagagataacccgaattggacgtctgataactggcaacgaaatgaaagtgatagaaatggtttctaccaggagttcaatcgagagaataatggccggaattcttctaccagagaaggacaacattcttcaggtggacaaactaatacttttcactcaagctcttgggatgattggggccacaatgattttaggaaggaagagccagctaaaggatcagctcctcagtcatcaggtgggaagtttgataattataactcgagctcctgggatgattgggaccaggaagatacaaggaagaaagaaccagctaaagggtcatctgcccgtagcagtgatggttgggctggatgggataatgccaaagatgatggatttgatgatatctatggaagtgcatctaatagtaaaggtgtcactcataatgacaagtcaggtgctgcctggacaggaggaggctttctctaaggtttgacccgatctctatcagcaggatcaaagttttgttggaaatgacctcttggactggtggcatgcaaaccgagcaggggtgttgtttagtatgatggatgtgacctgattgtcaactataagtttgttggtcactattaaattcatgccccatatgtactggatgaatgattattttgaggtcagtgtattgtctacaagtatttatttttcaacattctcccatcctcccttgtgtaatcttttcatgtgattttttggggacttctgtatggttggaaacttattttaaatgtacaagtgtctaaagaaagggcaaattgcccaaatttatgattatttttactggaagtgtgatgaaacattattgtgacacgaaaaaatttcataattattttg

SEQ ID NO: 11385 - DNA, 1676 bp, Glycine max
  Clone ID: 701059813_FLI
gaaaacccaaagtgcttctctcctctgtctttttctctctcttgctatccttttggctagtggcactgctgcaagtgcaactccaagaagcgcagtgccaagccaccatgtttcaacattcaacagaagcctttttccttccacttttctctttggaattggttcttctgcttaccaggcagaaggagcagcaagtgtagatgggagaggaccaagcatatgggacacctacactagacagcatactgaaaagatttgggatcatagcaccggtgacatgggagctgatttttatcatcgatacaagggtgacataaaaatagcgaaagaaattgggctggactctttcagattctctatctcatggtcaagaatattcccaaagggcaagggagcagttaacccccttggggttaaattctacaacaatgtcatcgatgagatcctagcaaatggtttaaaaccttttgtcactctttttcattgggactttccacaagctcttgaagatgagtatggaggattccgtagtcctaaagtagtggcggattttcgtggctacgcaaacttctgcttcaagacctttggagacagagtcaaatattgggtcactttgaatgaacccttatcatttagtctcaatggctacaatggtggcacctttgcaccaggtagatgttctaaatacgttgccaattgtagtgctggcgattcatccactgaaccctatatcgttggacactacttattacttgctcatgaatctgctgccacattatacaagacaaaatatcaggctcgtcaaaaaggacaaattgggatcactaatccaacacactactttttgccaaaatctcaaagtgctgcagattacaaggcagcaagtagagctctggacttcttctttggttggtattctgatccggttttctatggtgactatccggagagtatgaaatcttcagtaggttctaggctcccaaaattcacaaaagctgaatctgaaggtctaaaaaattccatagattttcttggtgtgaattactacaccacttattatgcggaacatgctgaacctgtcagtgccaaccgaaccttctacacagacatactagccagtctcagtacggaaaggaatggtctacatgttggaaccccgactgatttgaattggctctttatctttccaaagggaattcatcttcttatggcacacataaaggataaatacaagaatcttcctatttacatcactgaaaatggcatggctgaatcaaggaatgactcaataccagtcaatgaagcccgcaaggatagtataaggattagataccatgatggccatcttaaattccttcttcaagcgatcaaggaaggtgttaatttgaagggctattatgcatggtcattttcggacagttttgaatgggatgctggttacacagttcgattcgggctcatatatgtggattacaagaacaacttgaaaagataccccaagttctctgctttttggttgcaaaagttccttctcaagtgatctgaatttagtgttcctttgacatgtctagtgtttttcttgtttatttccctagatttcatcgtatatcacttgtgttggatgtaatcaagagatcattttatcaaataaataatgccaaatggcatgtcgaagt

SEQ ID NO: 11386 - DNA, 1268 bp, Glycine max
  Clone ID: 701059838_FLI
tgctcctccttcatctttctttgtcaatatcaacaccatcatctccaacaccaacaaaatctttccaatttaggaaactcttctctcagccttccttccccttctctcttttccaaaactaatggaaggttctgtccttgaacgtcttgattttgggaagatgggatacgggtgcaagcattatagaagaagatgcaggattagagcaccatgttgcaatgagctctacttttgccgtcattgtcataacgaggcaacgagcatgctgagcaacccttttgatcggcacgaactcgtccgccaggacgttcaacatgttgtttgttcagtttgtgacacagagcagccagttgctcaagtttgcacaaattgtggtgtcagaatgggagaatatttctgcaatatctgcaaattcttcgatgatgataccgggaaaaaacagtttcattgtgatgattgtgggatttgtagacttggtggtcgtgagaattattcccactgcagtaagtgtgggtgttgctactcaaatactctgcgtgataatcatttgtgtgtggagaactccatgaggcatcattgtcccatttgttatgagtatctttttgactcattgaaagacattgctgttatgaaatgtggtcacacaatgcatagtgaatgctacctagagatgctaaagcgtgacaagtattgttgtcccatatgctccaagtcggtgatggacatgtctagggcatggaagagaattgatgaagagattgaagcaactgtcatgcctgatgattatcggtacagaaaggtttggatactatgtaatgactgtaatgacacaactgaagtttacttccacattcttggacaaaaatgtggtcactgcagttcatataatactcgtgctatagctcctccagttctttctcaatgactagattcttgcggttttggagacagattttttagggcagaaaattaaaattatgactcaattatgcagagccttatttgattcatcatcaagattaatgatgtactgtgccctgaaacttttctagggttactcttcctccaccatttggagtaggactagtggtgttgttatgagccactaattgagttgatataaacatgtgtatattgtaatatagggtaatgtggtttagccatcatgagctgctagtaatcatgtttgctagtgacgtgttgatgttggaggttgcatggattggcttgtctttgccattattgaatttaatcaacacaacagactc

SEQ ID NO: 11387 - DNA, 506 bp, Glycine max
  Clone ID: 701059852_FLI
agagggcaagttgaagggaattcttggttacactgaagatgatgtggtctccactgactttatcggcgatagcagatcaagtatttttgatgcaaaggctggaattgcattgaataagaactttgtgaagcttgtttcttggtacgacaacgagtggggatacagctcacgtgtcattgatcttcttgtattcgttgccaagaagtctctttaaggtgttacttcaaagtagcttgtcttcacattattaccgtatgtttatgtttagctgcgatttagtgtcttgctcgagcaaaaaatgagaggtctgaataaatcggtttctgaaaccagtggtgttacttgttggaggagcattagctcttttttggacttttgatgttttctcttgtggagggggatcgagtttttggatttttatatactcgctgatgtacttggcttgaatacttgctaatgtacttgttattgattgttatagtagatatttgtccgtcctttttttc

SEQ ID NO: 11388 - DNA, 833 bp, Glycine max
  Clone ID: 701059890_FLI
gaggcagcaaacatgatgaagaagattggccttcttgaagctgcaaaacggaagttcttgggggaagggttgggggcttgctccattgaggaactgcaatggatagaacaacagttggagaggagtttaagtaatgttagaacaagaaagatccaggttttcaaggaacaaatcgagcaactaaaagaaaaggaaaaagtcctacttgatgaaaatgtcaagctcactgaaaatggcaggctctctgagaagcatggaatcaatctacaaacagaaacaaagaaacagaatgtgaatcaaccccaatacaatgcaggtagtccaagttcagatgtggagaccgaattgatcattggacttccggatacaagaacaaggcgcatcgttcatcaggtctagtagaagattatttattccctggctatggaaaataaaataagggtaaaaataatgatagaataattccaaatcctcttacaatatcttcctgataatccttctaattattaataaaatgaagaaggtattaatttttttttctgtttccaaagtgttaaaatgtttttacaattttcctttaaaactttctttatgaagtattaagaagagtattgggaggatgcatgttataggaggatatattattataaatggcagtggtaattatgggaatgatttgttttgcttgataatatcctcaaaacctatggtctaatgacccgttgtattgatacttatactttagactcagcagttgtatagttgccctcctggggtttgataaatggatgactttccttgagtcttgagccggccccgctggcttttcttcg

SEQ ID NO: 11389 - DNA, 1263 bp, Glycine max
  Clone ID: 701060018_FLI
caatgtcaaccaaccccgccatttctgcaagaattgtcagagatactggactgccggtggagtgatgaggaatgttcctgtgggtgctggtcgcaggaagaacaagaattttacttctcagtatcgtcagataactgttcctgaagcagcactcttgagttctcagccggacttgccaaatggagtcagtcatccttccttgaactgtaatgccacactccttgcatttgggtctgatacacccttgtgtgaatcaatgacatctgttttgaaccttgctgaaaaagcagtgaacaattccacaacaaatggatttaatggctcagaagaactagaaattccttttgcttatgttgctggagaaaaagtgaatgatgattccaataaatcttctgacatgtcaacaaagccaatggaaggtgaaaccaccaataggtcccaagaacaagtcatagagaattgtcatcccttcccacctcatgctccctactttcctggtgccccttggcctttcccatggaatccagcactgtggaactccccggtaccatcaccacctgcttttttcccacaaggatttaccatgcctctctatcctgcagcagcttattggggtcttactataccgggtgcatggagcatcccatggctagcgcaaccatcattaccaaatagcacagtgtctaactctggtccagaccccattgcccgaaccatagccatgtcttgattgccacgtcccaaaaagttaacaggaggaagtggggtttcaacaagaggactcttattgctgttcaaccatattgcaatggaaagtgagggaaagtgagataaggcttctagacccaaccagttactgttgatgtctccttgatccattagccaacaaagaatagtgggtttcctcttgggggaatgtacagggcagtgggatatgcctaaggggaaaagcaaaagtggtgaggaaaagaaagtgctctatggatgtgttgaaagcaaaatgaaatgacaatgtccaagataattagcttgatgcagaagatgtgattcaaatgtgaaagctaatgaagatagggttttgcgtgactcttgtggtagtttcaaggaacaatcctaacaaaaagaaaagcgtgagccatatcagcaatactcacaagatattgtcaaacatatttcttttaacacactttatattatgagtttaatatcatattaacagtataaaataattttacattattatttaattataatttattgttt

SEQ ID NO: 11390 - DNA, 1705 bp, Glycine max
  Clone ID: 701060269_FLI
cctgactctcctctgtggcaccaccgctctctctgcgttgttggagaacaatcagaggaaaaagattggagggtgaaccgaaaaaaacaattcagaaaatggagaacaacgcattcagagatcaaatcatggaggacaatgaacatgaagaaatgcctgattcctttgtttgctgcgtttgtctggatctattatacaagcccattgtgctatcttgtggtcacatgtgctgtttctggtgtgtctataattcaatgagttgtctgcgggagtctcaatgtccagtatgtaggaatcaatactatcacttcccaacagtttgccaattgcttcactttttgcttctcaagatctataccgctgcttacaagagaagggaaagccaaactcttgaggaagaaaagaaatcaggattctactcccctcaatttgatcctgatacatgtgaatcacaagctaagtttggtcattctggtatccctagttcatcctctattttgaatttgacgtccaactcatgcaatgtgggaacttctgaatgtctggagcaatcagggtcaactgccaatgaaggagatgaaggcaccatcttttcgaaccgagagcctgatattattggaactcctgctaaaggaaaaaaattgcctcaggaagagctttctctacaacagaaattatcagttgcagatgtgacatgtacaatgtgcaagcaactgctctttcatcctgtagttcttaattgtggtcatgtgtactgtcaaatttgtgtcatcaacatagatgacgagatgctcagatgtaaagtttgtcaaagtccacatcctagaggattaccaaaagtgtgtttggagttggatcactttttggaggaacaatttcctgaagaatatggacagcggagagatgccattgaactacagcaaatcaaagtcaaacctgacaccccttcttcttgttcattggatggtggtaagaaaccagaaaatacagattggtggtctgatcctgactcaaaagttcacattggagttggttgcgatttttgcgggatgtttccaataattggagatagatatagatgcattgactgtaaggagaagatgggctttgatctttgtggtgattgctacgcaagccgctccaagcttcctggtcgatttaatcaacaacacacctcagagcacaagttcaagcttgtacaacccaacattattcataacataatgttgaggctggccacagcacagttaggggaaggttcgattgacctggagtctataggaaacatagaagttacttcagacggcgctgcattgtttggtgatggagaagataaccacaatgattctgaagccgccaattgaaaaattgagctcaacaaaagtccattgtctaaaaattggtgttttggtggggggtttaagtggataactcctaatagtaagaggagcaaataatgcaatgcttcaaggaagtttgctagtcaattggttgaggaattctcaattctacatggtctctgtgattttctaatgcatgccaacttgatagtgtttttatgtctcaactgaatttgtctccagcttgtggctattttatgttattgcattcgggaatgtatatattctaggagtttgtctgagatctatgatgatgtgtttgttacaataatattaataataattggtacatcattgtgaataat

SEQ ID NO: 11391 - DNA, 1418 bp, Glycine max; identical to SEQ ID NO: 9350
  Clone ID: 701060335_FLI

SEQ ID NO: 11392 - DNA, 543 bp, Glycine max
  Clone ID: 701060413_FLI
gttaattctgatatatatccaggtgaatattcagagagggaaggttacaatggatctgaatacgctcctacttatgaagacaaggatggtgactggatgctggttggagatgttccatggaacatgtttgtatcctcctgcaagaggctgaaaataatcaaaggatcagaagcaaaggggttgggttgtttgtgaccaacaaaacttgcaaaagcaaatcaaatcaaaatagtcacatgaggtcttcaaagacaaataccctttgtgttgtgcaagcaaatacatggtgtttatgagaactcatatatatatatatatatatatatatatatatatatatatatattaggaaaatagatggatattatctatgtatacattatttttgctttattaatttcagcagaggcggctttgaggtctgctttctaaattatatgtaatcctctaaaaaagaaagagaaagaaaatataagaaaagctaatgctatttcaattgtacagataaaaaatataataataataataatctcactttgtctt

SEQ ID NO: 11393 - DNA, 842 bp, Glycine max
  Clone ID: 701060463_FLI
accactcaaacatttttcactaaaacacacactttctgaaaagaacaaggatccattttctttcccccaacatggccagaccacaacagcgttaccgaggtgtccgacaaaggcattggggctcttgggtctccgaaattcgccaccccatattgaagactaggatatggcttggtacatttgaaacagctgaggatgctgctagggcctatgatgaagcagctaggctaatgtgtggtgcaagggcaagaacaaacttccctttcaatccaaatgtgtcacactcatcatcttctagttcaaagcttctctcagcaactttgactgcaaaacttcacaggtgctacatggcttctttgcaagtgacaagacaagctttggcatctgagtctcagagaacaccaccctcagtgcaaaatgcaacaacctccacaaccacaccaattagcaacaacttcagtgtgaagagtgagcaaactcatgcagtgttgccacataagagaccagaggaggagcaagagtcagaggcaaataggggtgtgaaaagggttaaggctgtggaaaatgttcctctgcaattcaagcctcttgaggaagatcacatagagcaaatgattgaggagcttcttgattatggatctattgaactctgctctgtcatttcaccccaggccctctaattgaatgtgcatgtttttgagctgaatttaaagtcacaattgtaggttgccttgtgattaacaaaattatgggtaaaatttgactgaaattgctgctgtggttgtgaagagcacaaaaagagtggccacaattgcaattacataatgcaatttaaatcggac

SEQ ID NO: 11394 - DNA, 2033 bp, Glycine max
  Clone ID: 701060532_FLI
tagattttctcattgtgggctctcagtcctttaaggttgggtggtctgaactttacaactgatgatgttggcaatgttcttgcaatatcaggtcttgctattctagtcttccagcttaccctgtaccgattggtgcaaaaagcttgtggacctgttgctctagttcgtatagcaggggtgttatccatacctctcttgcaatgttatcccctcatgacaatgttatcaggcttcacactggacatagtgatcaatattgcctccattctgaagaatgttttgattgaggcaattgctactagtttattcattctgcaaaataaagctgtggtaaatctttggttcctttcatcagatttcatttatttccaaaagttaagattttttttatagaattgtggcacatatgatatgttgatttggaaaacaggaacaacaccaaagggggaccgctaatagtattgctatgactggtatgtcagcattcaaaacaattggtcctgctagtgccggtgcattgtaagtgtccattttatttctttagcatttgaaatttatctactgtatacgattaattatatagataaatcttaattagcatctgaaaatccatgctatatatgttcatatatcacatggtcctgtcatccatgtattctagatttccaaaattcagaatttcagacttactggtgattcaataataagcatattttaggcacattattgaaaaatttaaggacttagcaagaggtaatggtggataacatttcgaaaatttaggcatacaagtagattgtgccttcagcgttaaggataaacctatgaacactattaagggatttaataaaagctatacaagtaattatgtacggaatagatgctacataagatggcactgtcgtgttcttgtaacattttatttcattaatcatgaagggattttcatatgaaaatagttatttagattttagaatggtttttctggacaaggacataatacaaaaaccgtaagtgtactgacatcaataggttttgttactgctttcaaaccaaactgtcaattggtttatgtagcttagcctatttcttgtcaatatatactttgagccccgtctgttagagttaactgaggctactctctatactctatggtgtaattgcagttaacaaatcttgcattaataaaatattttgtgatgagagtatgccgtatagcattgattaacaacactttctaactacaatgacatactgaaaattatatcaagttttctaatattgctactggtcaatgtagattatcttggtcgcaaaagcatataaatgattctttcctgccaggtatgttgattaaaaaatttgcttgaattggtttctatttcatatacagaatatgggaatccttaatctaagtgttatttctggttcacttattgttccttaattgaaaagaacataataggccatttctattacagcatggagttttgcctagaaccaaacccaagaatgaaaatgcaactttagaacaaagagtttgaacttagtctaacctcttcatgtatgcttaatttcaatcttttcttttgctagctgcattgctggaagctcactcttttacatttaactgcaggcacccatattgtcttccttgccctgaatattgttgaaggacttggagtactgttaatgttcaaaccattcttgagtgtaaagaattaaataccatcagagaagttacactgatatcactaaattttgtacaaggggtgaagaatttgtgcgttaattgcgtgcattggttttgagatcgtagccactatgaatgatgaaataattagagatgattgtgtgttgtacacttgcatcatgtaagtttggactttgattattgagattttaggatgtgtgaactgagtagagttagttaaagtttggacctttatgttgcaatttatgtaacagagtttttttaatatgttctttaaaatctttcattaaaattatgtttatagaattctctttttttt

SEQ ID NO: 11395 - DNA, 666 bp, Glycine max
  Clone ID: 701060534_FLI
gggatgctgttctgaggttgattaagaatgcaaatccagacatatttgtgcatggcattgtcaacggatcctatgatgtaccattctttgtgtcacggttccgggaggctctctttcattacactgcattgtttgacatgcttgacaccaacgttgctcgtcaagatcccatgaggttgatgtttgagaaggagttgtttggacgggagatagtgaacatcatagcttgcgaaggttttgagagggttgagagaccacaaacatacaagcaatggcagcttcggaacatgagaaatgggtttaggctgcttcctctggatcatcgaatcattggcaaattaaaggataggttgagagatgatgcgcacaacaataatttcttgcttgaggttgatggcgactgggtgctacaaggttggaagggtcgaattctatatgcttcctcttgttgggtacctgcatagcataggccttgaacattatttattccagattacaaaaatctagtcttacacacaactattagtacgtctccttcaatctccctagctcatttgttgttttttatgataaggaaaaaccaaagttatagttagtttctttcaatgtgtagtttgtttagtacttacatatctaacaaattcagcaaatacaattgagagccgc

SEQ ID NO: 11396 - DNA, 1234 bp, Glycine max
  Clone ID: 701060550_FLI
aactctttgagaggttggtgtagtagctttttggagggttgacatggaagaacggtatgagccattgaaggagcttggtgctgggaattttggtgtggcaaggttggcaaaagacaagaaaactggagagcttgttgcggtcaaatacatagagaggggcaaaaagattgatgagaatgttcagagggagataattaaccaccgatctttaaggcatccaaatataatcaggtttaaagaggtgttactgacccctacacatttagctatcgtcttggagtatgcttcaggtggtgaactttttgagaggatttgtactgctggtcgatttagcgaagatgaggcaagatatttcttccagcagctaatatctggggttagctactgtcattcaatggaaatttgtcatagagatctaaaattggaaaacactctcttggatggaaatccatctcctcggcttaaaatttgtgactttggttattccaagtctgctctactgcactctcaacctaaatcaacagttggaactcctgcatacattgctccggaggttctgtcgcgaaaggagtatgatggaaagatttcagatgtttggtcctgtggagtgactctttatgtcatgttagttggtgcatacccatttgaagatccagaagatcctagaaatttcagaaagactattgggagaataatcggtattcagtactccatacccgactatgttcgtgtttcttctgactgtaggaatcttctctctcgcatctttgttgctgatcctgccaagaggatcaccatcccagagataaaacagtatccttggtttctgaagaatatgcctaaagagatcatcgaagctgaaagaaaaggattcgaggaaacaaccaaagaccaaccaaaccagaaggtggaggaaatcatgaggataattcaagcggcaaggataccaggacaaggatccaaagctggagaaggtggacaagctggcactggatcattagatattgaggatgatgaggaaattgatgttagtggtgactatgaacaagtgtgatcgagaacttgattagttgatatggctagattgtctataagacatagtcagcattattaacatctatcacagtgtgcaacactggtgttctaaagatacttgttataccaggcttgaaataggattttgtgtttatttaaatgaataatattaagaaaaggctgctatttcagtttcagt

SEQ ID NO: 11397 - DNA, 2098 bp, Glycine max
  Clone ID: 701060593_FLI
gtcggtgtttacaagaataggttgttccaagatcaatgccgatgaccgtccctaacttggtggcttcctccttagcaatggacggtcatcggcattgatcttggaacaactattcatgtgtcggtgtttacaagaatggccatgttgaaatcatagccaacgaccaaggtaaccgtatcaccccatcgtgggttgctttcaccgacagtgagagactcattggggaggctgccaagaatcaggcagctgtcaacccagaaaggaccatctttgatgtcaagagacttatcggaagaaagttcgaagataaggaagttcaaaaagacatgaagcttgttccttataagattgtcaacaaggatggaaaaccttacattcaggtgaaaattaaggatggtgagaccaaggtgttcagccctgaggaaatcagtgccatggttctgatcaagatgaaggaaactgcggaagcattcctcgggaagaaaattaatgatgctgtggtcactgtcccagcttacttcaatgatgctcagaggcaggccaccaaggatgctggtgtcattgctggtctcaatgttgctagaattatcaacgaacccactgccgctgccattgcctatggattggacaagaaaggtggcgagaagaacattctagtctttgatcttggtggtgggacctttgatgtcagtatcttgacaattgataacggtgtttttgaagttcttgctacaaatggagatactcatcttggaggtgaggattttgatcaaagaataatggagtacttcattaaattgatcaagaaaaagcatggaaaggatattagcaaggacaacagagcacttggaaagctgaggagagaggctgagcgtgcaaagagggctctcagcagccagcaccaggtccgcgtggaaattgaatcactttttgatggtgttgatttttctgagccactcactcgagctaggtttgaggagttgaacaatgacttgttccggaagaccatgggtccagtgaagaaggctatggaagatgctggattacagaagagtcagattgatgagattgttcttgttggtggaagcacaaggattccaaaggtacaacagcttttgaaggactactttgatggaaaggagccaaacaagggggtcaaccctgatgaagcagttgcctatggtgctgcagtgcaaggaagcattttgagtggagagggtggtgaagaaaccaaagatatccttctcctggatgtggctcccctcactctcggaattgaaactgttggtggagtcatgacaaagttgattcccagaaacactgttatcccgaccaagaaatctcaagtgttcaccacctaccaggaccagcagactaccgtctccattcaggttttcgaaggtgagaggagtctcacaaaggattgtcgccttcttgggaaatttgatctgtctggaattccaccagctccaaggggcacccctcaaattgaagtgaccttcgaagttgatgccaacggcattctaaatgtgaaggcagaagacaagggaactggtaaatcagaaaagatcaccattacaaacgaaaagggacgtcttagccaggaagaaatagatagaatggttcgtgaagcagaagagtttgccgaggaagacaagaaggtgaaggagaggatcgatgctcgcaacagtcttgaaacctacgtatacaacatgaagaatcaggtcagtgacaaggacaagctcgcggacaagttggagtcagatgaaaaggagaaaattgagactgcagtgaaagaagcattggaatggctggatgacaaccagagtgtggagaaagaagattatgaagagaagctgaaggaggttgaagccgtttgcaacccaatcatcagtgctgtgtatcagagatcaggaggagccccaggtggtgcaggtggcgaaggcgaagacgaggatgattctcacgatgagctctagattagtctaaatttttatcatatatgggaaattaagaattcccctgcgctctgcgcttgcttttttggtgccgatgataagatacttgtgaaattacttttactttgttttttttgctt

SEQ ID NO: 11398 - DNA, 1500 bp, Glycine max
  Clone ID: 701060595_FLI
aaaagcattaattaaacaacatgaaggcatggaccattaattctctccctatcgatcactgatcattcactgcaattctccattcatccatccacggcaccaccatgcttcttcttctttacctctcccttctgtgttcccttccccacattgcattgtcatcccattgcaccgtggaaaccgccacgaaaacgtttaaaaaatgcatgaacctcccaacccagcaagcctccatagcgtggacattccaccctcacaactcaaccttagaactagtcttctttggaagcttcatatcaccttctgggtgggttggatggggcatcaatcccacatcacccgaaatgaccggaacacgtgccttaatagccttcccggacccaaactcaggccaaatagtgcttctaccgtatattcttgaccccacagtgaagcttcaaaaatctccactactctctcgcccactcgacatccacctcctctcctccaccgccactatgtacggcggaaaaatggccaccgtgcacaacggtgcagccatccaaatcttgggcacggtgaagctgcaaacgaacaagaccaagattcacctcgtttggaacagggggctgtacgttcagggctactctcccaccattcatccaactacttccaccgatctgtcttccattgttacctttgacgtattgtcgggttcgtcggctccacagcacacggatctcacgacgttgagagtgatccatggcaccgttaacgccatatcgtggggcattttgttaccaatgggagccatcaccgcacgctaccttaggcacattcaagcactcggccctgcatggttctatgctcatgcaggaatgcaagtgtttggtttcgttctgggaacagtggggtttgtgatcggaatcaggctggggcaactgtcgccgggagtggagtataggctccaccggaagcttggaatggcggtgttttgtctggggggtctgcagactctggccttgttatttaggccaaacacaaggaacaagttcagaaaatactggaagtcctaccatcactttgtagggtactcgtgtgtggtccttggctttgtgaatgtctttcagggatttgaggttatgggggcaagcagatcttacgccaagttgacttactgcttagggctctccactctcattgggctttgcattgctttggaggtcaactcttgggttgtcttctgtaggaaatccaaggaagacaagatgaggagagagggactcattggaacttcccacaaacccatccacaattaacattcatcattattcttattatatattattacatttcattcctctttaatttctcttttactaatacattacattttctctccaattaatgccaaggtctgcaattatatataaagattaattttgtcgtttcgattcatgtttcttaccaaatagttcagacatatgacgcatgaatgaattcatgatcaattgggagttc

SEQ ID NO: 11399 - DNA, 472 bp, Glycine max
  Clone ID: 701060596_FLI
gaaccaccaatcaatctgttctaccctggcattgtgttgtttctagttggcatcattggcaacttctaccaccattaccttctgtccaaattgaggggaaagggtgaaaaggagtacaagattccaaagggtggcttttttgagcttgtgatttgcccccactacttctttgagattactgtgttttatgggatcttcttcatttctcagacattatattcattcgctttcgctgtaggcactactatgtacttggtgggtaggagttactcaactaggaaatggtatctttctaagtttgaagatttccctaagcatgttaaggctgtcatcccatttgtcttctaaatgttgtaatgaacatctaattctacttgagttgtaagtgtgctgctagattgtgtttattggaattgcagctctccaacatccaagtttgagtgatttaataaactattttttaactttggtt

SEQ ID NO: 11400 - DNA, 1312 bp, Glycine max
  Clone ID: 701060607_FLI
caattatggtttccaatttattaattgtgtgttgagtttttgtttttggattttgggtactaaaaattatgtattggggtttaaatttcatagggttttagaaaaattgatccagataggtgggagtttgcaaatgaaggattccttagagggcacaggcacctgttggcaaacataaggagaaggaaacaaccttcttctcagccttcttcttcttcttcttcatcctcttattattattattcttcttcttctcaacaagcacaacaaggtcactgtgttgaagttggtcgctttggacttgatgaagagattgatcgtttgaggcgtgacaagcacgtgttgatgatggagcttgtgaagctgagacagcagcaacagaacaaggtcataccttcaagcaatggaggagaggctaagagggacggaaattaagcagcaacaaatgatggctttcttggctagagctttgaaaaatccaacctttattcagcagctacttcagcagaaggagaagaggaaggagcttgaagaggccatgtccaagaagaggagaaggccaattgagagagggccaaaccatggggttgttggagaagaatcaagcagtgttaaggttgagtctcttgtgtttggtgatgaatatggttttggagtgtcagagttggaagtgttagctatggagatgcaaggttatggtaagggaaggagggaacaagaggaggagcctgatgaggcactagatcaatcacaagagaggctggagaaagagcttgatgaagggttctgggaagaacttttcagtgagggttttgagggtgaattggatactaatccaactaattcccaagcccaagatgaagaagaagaagatcatgtcaatgtgttggccaatcgctttggttacttgggttcaagtcctaaatgaaaccaaccacatatagtactcaagattattattggttaacattgttcattaatttggttcaagtggaggcactcatgtggtgaatggaggaggaggcatcccatttggcatgatacatgtggaaatgatttactttttggtgtttctaacccccccattatatgatgatgcatgtccttttgtagaacctaaaaaatttctcacttttctctgtttgattaggtaggttgcagctgttgcttggacaagaatctatggtagtgatagcaatcgttatttactcaaggttcagttttatgtgttttttttttttttttaaccactcaaattaaaccccctctcctttgtaatgttcatcttaattaattatattatatatcaacc

SEQ ID NO: 11401 - DNA, 1182 bp, Glycine max
  Clone ID: 701060646_FLI
ctttctttcaagtttcatctcttttcctcatttcattcttctaactttctctccgtttacttcacttcatgacggattcttctcctcttatccctccctcaccggtcacagtcaccgagatcgacctcgaagagggaccctccgaacaaattcaatgccggatttgtcttgaaactgatggtagaaatttcatagttccttgtaagtgcaaaggtacgtcaaagtacgtacatagagagtgtttagatcattggcgagccgtgaaggaagggtttgcatttgcccattgcactacttgcaaggctccataccatttgcgtgttcatggtgcttatagacaatggcgtactttcaaatttcggttttttgtaacccgagacattttgcttatatttctggctgttcagcttgtcattgcttcacttgcttatttggtttaccaaatagatggttacgagaagtattggcttcgtcttgtttggggttttggtagtgagctgagcttttactatatatgtggagcactggtgttttttgtgttgcttggcctgtctgggtgctttattacttgttctgatccaagaattcgcagtgatttgggtcagccttgtcgagaaatatgtctttgttgctgtcaacctggagtttgtgctgatcgtcatttgcatggtactccttatatgtacggtactccttatatgtcgactgattgcaatgcatgctgtgagaattgtggaactgaatgctgtggttgcacttgcatgagaggttctgaggacgaagcagggctaccattattattcataatggttttgttttttctggtactctttgctgtacttgggatattttacagtgtattagtggctacaatgataggacaacggatatggcagcgtcattatcacatacttgcgaaaaggatgctaacaaaggtgcccatgccttactttattgtcttttgcacatttggtacagtgcagttaaccttcaattagtgtttcactgcagctgctgagtcaacttaaatacctttttgatatgtacaactagcctatttagtgatttccttagtctactgaggaacgtatatagaaattgctgcaagatgtaatgagaaggttttctgcttgtttggcctttaaatccaagataatatatatctgcaaagattttattatt

SEQ ID NO: 11402 - DNA, 1442 bp, Glycine max
  Clone ID: 701060682_FLI
tgctgattggctacgtaaaaactactcagataaatatgtcattcttgcagttaacaagtgtgaatctccacgcaaaagaattatgcaggcatctgaattttggtcccttggatttgaaccacttccaatatcagctatctcagggactggaactggagagcttcttgaccttgtttgttctggcctacagaaaattgaggaatctaataatcttgttgaagaagattatgttccagcaatttcaattgttggtagacctaatgttggcaaaagtagcattttgaatgcactggttggtgaggacagaacaatagtcagccccatcagtggcactacccgtgatgctattgatactgaatttactggaccagatggacagaagttccaacttattgatactgctggaatcaggaaaagaacagccattgcttcagctgggagtacaacagaggctttatcagtgaatcgagcatttcgtgctattcgtcgttctgatgttgttgctcttgtcatcgaggccatggcttgtatcacagaacaggactacaagatagctgaaaggatagaaaaagaagggaaaggttgtgtgatagttgtaaacaagtgggatacaataccaaataaaaaccagcagactgcatcatactatgagcaagatgtcagggagaagcttcgctcacttgtctgggctccaattgtttattctactgctgtagctggtcatagtgttgacaagattattgttgctgctattgaagttgaaaaggagagatcaagaagacttgggacttctatattgaatcaagtagttcaggaagcagtaggttttaagcctcctcccaggacacgcggtggaaaaagagggcgtgtttactattgcactcaggctgctataaggccacctacatttgtgttcttcgtcaatgatgcaaaactttttcctgagacttaccggcgctatatggagaagcaactgcgtacagatgcaggtttttctggtacacccattcgacttctctggcgcagcagaaggaaaatgggaaaagatgaaggcaaacctgtaacaaagacccgagaaaatcttacatcaaatgatcgaaaattggtgtcaactacaccataggatcagacattttctcatggaagtactggttgttctgtttgtgttggaaaaatgaagtagctttttatctgggattacttaattacataaatgcacgtgcttcctggaaatccatcaaggttagtaaaatctctacaaggaccaaatgggggcctggagtttggatgagaatatgtcacatatttacactgatcgtaatcattctgtaattctttagtaagcactttgtatttatggggtcggaggctcgtagtacattccctgtcaacaattgcattgtacatttatccagacaaatgaataaaaatgtttcgtagtc

SEQ ID NO: 11403 - DNA, 634 bp, Glycine max
  Clone ID: 701060684_FLI
ctaattcagtttttttctcccatcataaaaaaccgaccctctcctttccctcttcaccaaccaatggctcccccaaaggccgagaagaagcccgcggagaaaaagcccgcagagaaggctccggcggagaagaagcccaaggccgagaagaagatatcgaaggaaggaggaagcgagaagaagaagaagagaacaaagaagagcgtggagacctacaagatttacatcttcaaggtgctgaagcaggttcaccccgacatcggaatctcaagcaaggccatggggatcatgaacagtttcataaacgacatcttcgagaagctcgcccaggagtcgtcgcgattggctaggtataacaagaagcctaccattacttccagggagatccaaacggcggtgcgtttggtcctccctggggagttggccaaacacgctgtctctgaaggtaccaaggccgtcaccaagttcaccagctcttgattcgttttgtttcctgtgtttcgattagggttttctgttgaccccgatttgattcgcatttttaaattagggttttattttcctttttgttgcttttgagggtgtagatgtaaaattaaagctttatttttaaataatataaatgccgtttttt

SEQ ID NO: 11404 - DNA, 774 bp, Glycine max
  Clone ID: 701060690_FLI
caagagtatcctttcacttcctttaaatacctcgagtgtccccattgacatcatcaaacaagagaagagttacagaatttcctgtttacgatcttattgcaattttgcaactttcaaagcttattagctaaagtaacatcaaaagatgtcattgattccaagtattttcggtggcccaaggagcaacgtgttcgatccattctcactcgatatgtgggatcccttcaaggattttcatgttcccacttcttctgtttctgctgaaaattctgcatttgtgaacacacgtgtggattggaaggagacccaagaggcacacgtgctcaaggctgatattccagggctgaagaaagaggaagtgaaggttcagattgaagatgatagggttcttcagattagcggagagaggaacgttgagaaggaagacaagaacgacacgtggcatcgcgtggagcgtagcagtggaaagttcatgagaaggttcagattgccagagaatgcaaaagtggagcaagtaaaggcttgtatggaaaatggggttctcactgttactattccaaaggaagaggttaagaagtctgatgttaagcctatagaaatctctggttaaacttggtttcactgaaaatcgtgagagcttttaaatttgctttgttgtaataagtgtcctttgtcttgtgttccaatggtgattttgagaaagatcatacaattgtgccttgtgttgttgtgcaagtgtaattgaagtgaataaaaattaacacctgctttcag

SEQ ID NO: 11405 - DNA, 1485 bp, Glycine max
  Clone ID: 701060705_FLI
attttgccctacctcctcgattctagggtttcaacaatggcgctgttccttctctacgaatccgcttcgggctacagcctgttcgaggttcacggcgtcgatgaaatcggccagaacaccgaagcggttcggaactccgtttcggacctcaacaggttcggcaaagtcgttaagcttcgctccttcaaccctttcacttccgctctcgatgctctcaaacagtgcaacgccgtctccgaaggcatattaactgatgagctgaggactgtcttggagaccaacttgcctaaagtgaaggaaggtaagaagtccaagttcagtttaggtgtgtccgatcctaagattggttcccagatatctgaagtgactaagattccttgccaaagtaatgagtttgtgagtgaacttcttcgtggtgtgcgattccattttgatacgtttgttggtgatctcaagtctggagatttggaaaaggcacaacttggtctgggacatagttacagcagggcaaaggtgaagtttaatgttaaccgtgtagacaacatggttattcaagctatcttccttcttgatacacttgacaaggatattaattcattctccatgagagtcagagagtggtattcttggcattttcctgagctggtgaaaattgtaaatgataattatctgtatgccaaagttgcaaaatttattgaggataaggcaaagttggctgaagacacgattccaggcttaactgacatagttggagatgaagataaagcaaaggagattgtggaagctgccaaagcctccatgggacaggatttgtccccagtggacttaatcaatgtccatcaatttgcacagagggtaatggacctatctgagtacagaaagaacttatatgattacctggttgctaaaatgaatgatattgcaccaaatttggccactttaattggtgaagttgttggtgctcgtttgatttcccatgctggtagcctcacaaatttggcaaagtgcccctcttcaactcttcaaattcttggtgcggagaaggctttgttcagggcattaaaaacaagaggaaacactcccaaatatggtttgatattccactcttcttttattggtcgggcatctgccaaaaataagggcagaatggctcgatatcttgcaaacaaatgctcaattgcatcacggattgactgctttgctgaaaggggtactactgtttttggggagaaactgcgtgagcaagttgaggaacgacttgacttttatgacaagggagttgcccctcgcaagaacatagatgtcatgcaggctgctattgaaagtgctgaaaacaaagatacagagatggaaacagaagcacctgccgaagtttcaggcaagaaaaccaaaaagaagaaacaaaaagctgctgctgctgaaggtgatgacatggctgtagatacaaatggtgatgctgtggaggatcataaatcagagaagaag

SEQ ID NO: 11406 - DNA, 2396 bp, Glycine max
  Clone ID: 701060719_FLI
ctcagaattatactgcattggtattttaaaagaaaactggaggaggtaagtgcaattatggatggagagttctgtgatgatgcatctcaaaataaagatggcatgaatttagatgaaaaaggaaaaatatgcaacaaagttggtgaaatggatgttgatgagtgctatagcgaccataggttctcggaaaacagtagacttgtgaagaacattggaaaagttgttcttgatcttaggaatcttggatttacttccatggctgaagatgcttatgcttctgctatatttttactactgaaggcaaaagtacatgatgtagctggtgatgattttcggagttctgttttacaatctattaaaagctggatacaggctgttcctcttcagtttcttcatgcacttcttgtctatcttggtgatgtcgttagttatgagagtacttcatcaggtctgaaatcacctttggcaccacagccatcttcatgctgtcctggaattgatactccctctgaagggcttgtaaggtggaagttgcggctggaatattttgcatatgaaacactacaagatttaagaatagccaaattattcgagataattgttgattatcctgagagctctccggcaattgaagacttaaaattgtgtcttgaatacactggacaacattcaaagctggtggaatcatttatttcagcactgcgttatcgcttgcttactgcaggcgcgtcaaccaatgatatattgcaccaatatgtttcaactattaaagcccttaggacaatagaccctgcaggtgtttttcttgaggcagttggtgaacccataagggattatctaagaggaaggagagataccataaagtgcatagtaaccatgatgacagatgggactggtgcacattcaagttcatctggaaatcctggagatagccttcttgaagagttgaacagagatgaagagattcaagagaatgctggtgttgatgattttaacactgatgataggcaagcatggatcaatgccatgcgatggcaacctgaccctgtggaagcagatccattaaagggaagcagaaaccaaaggaaggttgacatacttgggatgattgttagcataattggttccaaagatcaattagttcatgaatatcgaactatgcttgccgagaaacttctaaataaatcagattacgatattgattcagagatacgtactctagaactcctcaagatacactttggagagagcagcctacagaaatgtgagattatgctcaatgatctaattggctcaaagagaaccaacagtaacattaaagctaccataaatcagccatctcagacaagtgttgaagtgggagacaatgcaatatccatggatgcaatttctgctactatcatatcttctaatttctggcctccaatacaggatgagccccttaacctgcctgagcctgttgaccagctcctatctgattatgcaaagagatttaatgaaatcaaaactccccgtaagctgcagtggaaaaaaagtcttggaaccatcaagttggacctctaaaaaccttgcagctgctattgggatacctgcagatgttttaaatcggagaataaatttctggataagcaagggaatcattgcagagtcgcaaggggcagattcctctgaccatgtatacaccattgtggaaaacatggctgagacaagtaagaatggagctagtactggttgtgctcaggaacttctaggaggtgaagaggaggaagagagatctgtggcatcggtggaaaatcaacttcgtaaggaaatgactgtatatgagaaatttatcctggggatgctcacaaactttggtagcatggcattagaccgaattcacaatactctcaagatgttttgcattgccgatcccccatatgacaagtcactccagcaactacaaagctttttgtctggtctagtttctgaggagaagttagaacttcgggatggaatgtactttctaaagaagtagtttgacttcggagttgaaatggaatcaatttggtcatgagttctgagcaaaaatcttgagctccatttttggtggcatctttgtgttgtcctgaggaaattgctatatatgcttccactctagggataacacaaattcaagcacaccaaagataatctttgttccaggagatgaggatttgaagacattatttgctcttttggctttcatggtgtgctactcctggttttgctaatccttttccaaagattcctcttttttatattatctattctcactgagtcacctaccgctatgtaaatgtgtattatttactgctaatttagtgttgtggataaattatattatattgaataggagaaaatattttatatggccc

SEQ ID NO: 11407 - DNA, 337 bp, Glycine max
  Clone ID: 701060761_FLI
gcttagtgtcatagtgcagaaattgcctccaccggaacctaagaaacctaagactattgaggttaaggttgcttgaacaacttgtagaacgaagttaaataaacgtttgtttccctctctagtagaagcaggggaagtaatgttttttctgatttgaaggtttttctgttctcaaagcaatggttttatggtattgtgattttgtgatgttgtaatcagatgatgctatatcagttgtttagtatttgctgatcttagttatttctaagttactctgtgctgtccaatttccatcccaatctccaaataacagaatttaacagaatgcgtttagatg

SEQ ID NO: 11408 - DNA, 1671 bp, Glycine max
  Clone ID: 701060856_FLI
tgaggcctctgagtctcagtctgacggagctaacctcctatgtcctatgcttcatcatcctcctgcttctcctggaacagatctcctacatactaaaaaaagcttccatcccaggaccctcctttgtacttcccttcataggcaacgctatcccattggtccgagacccaaccaatttctgggacctccaatcctcttttgctaaatccaccccctcgggcttctccgccaactacatcatcggcaacttcatcgtcttcatcagagactcccatctctcccacaaaatattctccaatgtccggcctgacgcctttcacctggtgggccaccccttcggtaaaaagctcttcggccaacacaacctcatctacatgactggccaagtccacaaagatctccgccgtcggatcgcccccaactttacacctaaagccctctccacctacaccgcgctccagcagattatcatcctcaaccacctcaagtcatggctcaatcagtcccaagccccagactcccattccattcctctccgcatcctggctcgtgacatgaacctccagacatcccagaccgtcttcgtgggcccctacttgggccccaaagcccgagagcgtttcgagagggattactttctattcaacgtcggcctaatgaagctgccgtttgacttccccggcaccgcctttcgaaacgccaggctcgccgtggaccgcctcattgcagcactgggcacgtgcaccgagatgagcaaagcacggatgaaggcagggggagagccttcgtgcctcgtcgattactggatgcaggacacgctcagggaaatcgaggaggccaagctcgccggagagatgccgccgccgttctccactgacgtcgagatcggaggttatctctttgacttcctcttcgccgcccaggacgcgtccacgtcgtcgctgctttgggcggtggcgctacttgactcgcacccggaggtgctcgccaaggtgagaaccgaagtcgctggaatctggtcgccggagtccgacgagcttattactgccgacatgctgagggagatgaagtatactctggcggtggcgcgtgaggtgttgaggttccggccaccggcgacgctggtgccgcacatcgcggcggagagctttccgttgacggaatcgtacacgatacccaaaggagcgatagtgttcccgtcggtcttcgaatcgtcgtttcaggggttcactgaaccggaccgcttcgaccctaaccggttctccgaggaaagacaagaggaccaaatatttaaaagaaactttctggcgttcggggctgggccccatcagtgtgttggtcaaaggtacgcatttaatcatcttgttctcttcatcgccttgttcacgacgttgatcgatttcaagagggacgaatccgacggctgtgatgatatcgtttacgtgcccaccatttgccccaaagacgactgcagagtatttctgtccaaacggtgcgcacggtatccttcttttccttcggtggaggacttcgtcaaatgaaatgcaatactattgttttaaaaatgttttaataattatgaaaattaaaatttatcccagtgaaatgtaataggtggagatgttttgtttacattttagttattgaaattttcataataaattaaatttg

SEQ ID NO: 11409 - DNA, 719 bp, Glycine max
  Clone ID: 701060859_FLI
gaaggatatagttttgaagagctatgcatcaagaaagaagccattgagggagaagagaagttttgtgcaaaatccttgggaacagtaattggttttgccatttcaaagctgggaaagaacattcaagtactttcaagttcctttgtcaataagcaagaccaatacactgtggaaggagtgcagaatcttggagacaaagcagtgatgtgtcataggctaaatttcagaactgcagtattttactgccatgaagtccgtgaaacaacagctttcatggttccattggtggctggtgatggaaccaaaactcaggcacttgctatttgccactcaaatacttctggaatgaatcatcaaatgcttcatcaacttatgggagttgatcctggaactaaccctgtttgccatttccttggaagcaaggccattttatgggtacccaatttatctgtggacactgcctatcagaccaacattgttgcttaattagtccatgcatcttgagcaccatgagaatgagattgtgtataaaataaattatcatgtgctgtgtgttgtgcaagtactaccttctctagctagattgctagagctagaatttcaacctacctatgtgtactgataagatctgcttccctacttaaagagagcatcatcctgtgatcagtgtgcttcgtattctctctctctatatatatatggtaaaaagtggttatctc

SEQ ID NO: 11410 - DNA, 1063 bp, Glycine max; identical to SEQ ID NO: 11230
  Clone ID: 701060963_FLI

SEQ ID NO: 11411 - DNA, 1054 bp, Glycine max
  Clone ID: 701060990_FLI
caatctctcaatcgttttctacataatacaaacctctctaatttttgaagcttattatacccaatctcgatatgcagatcttcgtgaaaaccctaactggcaagacgatcaccttggaggtggagtcctctgacaccatcgacaacgtgaaggccaaaatccaagacaaggagggcattcctccggatcaacagcgtttaatcttcgccggaaaacagctcgaagacggcagaaccctcgccgactacaacatccaaaaggagtccacgctccacctcgtcctccgcctccgcggcggcatgcaaatcttcgtcaaaacccttactggcaaaacaatcacgctagaggtggagtcctccgacacaatcgataacgtgaaagccaagattcaagataaggaagggattcctccggatcaacaacgtttgatcttcgccggaaaacaactcgaagacggcagaaccctcgccgattacaatatccagaaagaatcgactctgcatttggtgcttcgtctccgcggagggatgcagatcttcgtgaaaaccctaaccggcaaaacgattacgctagagttagagtcctctgacacaatcgataacgtgaaagcgaagatccaggataaggaaggtattccaccggatcagcaacgtcttatcttcgccggaaagcagttggaagacggcagaaccctcgccgattacaatattcaaaaggaatcgacgcttcatctggtgcttcgtctccgcggagggatgcagatcttcgtgaagacgctcaccggaaaaacgattactctggaggtggagagttctgatacgatcgataacgtgaaggcaaagattcaggataaggaggggattccaccggatcagcagcgtcttatcttcgcagggaagcagcttgaggatggacgcacgcttgcagattataatattcagaaggagtccacgcttcaccttgtcctcaggctccgtggtggtgatttctagttcagttgaatcttgctaatgagatgtttcagttctaataataatttctctttcctttttcc

SEQ ID NO: 11412 - DNA, 1053 bp, Glycine max; identical to SEQ ID NO: 9150
  Clone ID: 701060995_FLI

SEQ ID NO: 11413 - DNA, 1327 bp, Glycine max
  Clone ID: 701061002_FLI
ggcatttattattcacctgagaattgtatgaatcaggatggatgtgattcaccacctgggatgcacaaagaccctggaatgtcatctttggaagcatgccaacatcagacgttacgaagcataggttctcatgtgaatcttaggatcaagtcatttagagtgccagagctttttatagaggttccagaaactgcaacaattgggtccttgaagaggacagtgatggatgcagtgactgctgtgcttggaggtgaattgcacattggtgtttttctccagggaaaacaagttaaggatgacagtaaaactctacttcaaactggaatttctcatcataacgagttggatgctttgggtttcaccctggagcctaattcttcacaaagcctaccgattgtatgtgcttcacattctcctcgtcctaaagctgacataactgagcctgtaataaggtatccctccagtccagctgtaattcatcagaggattcaaggcaactctgacatgttacctgagcatcaagtaaccagtttaggtagacattttgaaagtgaccatgattcagcaccttctcctgtcaatgcgtctgttgacaaaaatatgaaagattccaaagaactggttactgttcctgaaatggatgaggaactagctatggtacctgtacaccagaagccaaagcgatctgagatcgtccagcgtcgaatacgcaggcctttttctgtagatgaagtagaagcactggttcaagcagttgaaaaactaggaactggaaggtggcgtgatgttaagctttgtgcttttgataatgcaaagcatcggacatatgtggatttgaaggataaatggaaaacactggtgcacacggcaagaatatcccctcagcaaaggaggggtgaacctgttccccaagaacttttggacagggttctagtggcccacgcatactggtcccagcaacagactaagtcacagcacaagcaccatccagaaactgaaactgtcttctccttttaataataataagggccagggtcaggggttgtcagcagcaagtggccatgtggatgatgagggtgccttggtttctgacttttgttattaatgtcttttccttttttgctttcaataaaacatttatgaagcctctctgtttatcaaccatgtaaaaagtgatgatgacatggaaaatgtaaaaattatctttgctcatgatgtggatgcttccctgtgtggagaggctgctgcttcttgtaaattgattgatgtaataaagtgctcgctaacacaattcttttgcttgtaaatatttgaaattgttctgtat

SEQ ID NO: 11414 - DNA, 1729 bp, Glycine max
  Clone ID: 701061102_FLI
attttctggttatctcccttacactttgcaacctctgattgaaccaaacgttatctttcttcatcatcgtctcatacacacatacataccctttagaaagttcttcatactcttccagaagcagaaaaaagtgcctttttttttttacttctttacttgaagctttctgtgttgtgctgccatggccgtgacacagttcaaccccacttgctcaaaaactcatcttcactcatctcagctcccttttctatcgaggactcttcctagacatcgccactgcactattgcgccacttcatagaactcaacaagctaggatttgttgttctgttgccccaaatgaagtgcaggtgccagctgtgaaaacctcggatcccaagagtaagcctgagtgctatggtgtcttctgccttacctatgatttgagggctgaagaagagacaagatcctggaagaaattaattaacattgcagtctcaggtgctgctggaatgattgcaaatcatctacttttcaagcttgcatctggtgaagtttttggcccagatcaacctattgctctcaaattattgggatcagaaaggtcaatccaagctcttgaaggtgttgcaatggaattggaggactctttgtttcctttgttgagggaggttagtattggtatcgatccttatgaagtgttccaagatgcagaatgggctttgctaataggtgcaaaacctcgaggacctggaatggaacgagcagacttgttagacataaatgggcagatttatgcagcgcagggaagagcattaaatgccgttgcatcccgcaatgtcaaagttatagtagtgggaaacccttgcaatacaaatgcattaatttgcttgaagaatgctcctaacattcctgccaaaaattttcatgctttaactcgtttagatgagaacagagcaaaatgtcagctagccctcaaggcaggtgtgttctatgataaagtgtcaaatgtgacgatatggggcaaccactcaactactcaggtccccgacttcttaaatgctagaattgatggtttgccagtcaaagaggtggttaaggatcagaagtggttggaggaagagttcactgaaaaggttcaaaagagaggtggtgcacttattcaaaaatggggaagatcatcagctgcatcaacttctgtgtcaattgttgatgccataagatctttagtaactcctactcccgagggtgattggttttcttctggtgtatatagcgatggaaatccttatggaatagctgaaggtattgttttcagtatgccatgccgatcaaagggtgatggcgattatgaacttgtcaaggatgtcatatttgatgactacctccagcagcgaatagctaagacggaagctgagttgttggccgagaagagatgtgtggctcacctaacaggcgagggaattgctgtttgtgatctacctggtgataccatgctccctggagaaatgtaacaagcctaaatctcctgaataccaaagcagatattgaaataggtcctgccaacttgtgtcttaaaggtactagttagggaatcaataaataaaatgtttttattcagaatcacggtagggtacgttggtaaatgttgtattttttcctaaaaacttctcacttttgattccttaactagtgtcttaaggtactgttagcattctattattgaaataagatcacacaaatttatgtag

SEQ ID NO: 11415 - DNA, 1050 bp, Glycine max
  Clone ID: 701061118_FLI
gaactttgttactctcacacatgtctcgctccgtgcctttggtttcaaccatttttgtcttgcttctgcttctggtggccactggtaggcctttctttcttgacgctaattaatatctacacttttgggtttcttttattgtgatcttagttagttaacaagctattagctactgttcttacaccttaatttcttcacgtacttgtgtgtaatattttatttttcttgatcaatatttcttgtatgtaatattttagtgtacgaggtttcctaattgtaccatcaagtgtttaatatatatatatatcctgacgctaccatgttaaggttcagttaaattgacttctctcttacatataatttttaatttccaagttacaaaatcgtgtagtgaagacttttttatgataaaaaaaatgttgaatattacaaatttaaatgagaaatcttttaaaaaaaagttaagatgggtaaagtttattttaatttatattaaaaatttgtgcgatacctagcttcttcattattttacttttatctctttctgatgatttgttaaagaaaatcaaatttgtggtacatcaacttggtagtgtcaaattgttaataacttgtgttggtttatgacttgagcagagatgatggggccaacaatggtggcagaagcaagaacttgtgagtctcagagccaccgtttcaaggggccatgtttgagtgacaccaactgtggctctgtttgccgaaccgaacgtttcactggaggacactgccgtggcttccgtcgcagatgcttctgcaccaaacattgttaattttaaaaaattaattaagagtgctttgatagaagatgatagatctatcatctttctactcgtgttgttaattaaccactttgtgtttgagaataagggttacccattctactatgggtttctttgtttgcctcttattttatctagttagagatccttttatgaaacgagtgatcagtgtgaaggaattatgttatctgtgttgttaatttaatattattctagtaaattttattcc

SEQ ID NO: 11416 - DNA, 1014 bp, Glycine max
  Clone ID: 701061120_FLI
gttaagtagtaccccgactaagagaaagcgagttccttttgcatcaagtggtgaaacaagtacaagaacagatcttgttgttatgccatctaaacaatcttggtggagtaagaagtttgatgagttcagggagaaggtgaaaggccatccagtatccaagcgattccttaagtatagtgacccagtgaagacaaagggccaggagatagtagaggacttgcgggaaagatatgagaccagtgacagccccattattcacaaaatacaggatatcaatgacagtatgtttcaagagacagatgctgcaatttcttacaaggaaatacgtcaacgggatccttatttttcattaccagaatttgttggggaagtacaggaggcaataaaaccagtgcttaatgcttacatcaagggagacgttgaaacattaaagaagtattgtagccctgagctgattgaacgttgtaaagcagagcataatgcttaccaaagtcatggtatattctttgataacaagattctgcatgtatctgatctggaaataagagagaccaagatgatgggctcatctccagtaattattgtaatgtttcaaactcagcaaatctattgtgtacgtgataggaatggggcaattacagaaggaggcaaggatacaatccacactgtattctatttttgggcattacaacaaatggaccaagaagatcgtggagaagatggtatttacctaatgtggagactcagagagatgcaacagcaaggcatccaagctctcatctagattttgtcatgattttcagggatttgtataattgaacctttatgtcatatactacatttactgatttcatttcttggggcaaagttgtatcccgatgatacatcctttaattttttttattactaactagaaaaataatttgcacttgagttcattgatgtatgttagatgagctagacaacgtttttattctgctctcaagccagaaatgacaaattgttaatatagtc

SEQ ID NO: 11417 - DNA, 1532 bp, Glycine max
  Clone ID: 701061133_FLI
ggcatggattgttgagcattcacatgcctgcatattctgattctattattaagggggtctctacagtcatggtttcatactccagttggaatggtgtaaggatgcatgcaaatcgtgatctagtcactggtttcctcaagaatacccttaagtttaaggggtttgtcatctcagattggcaaggtattgacagactcacatcaccacccagttcaaattacacatactctgtccaggcttccattgaagctggtgttgatatggtgatggtcccatttgaatatggtaagttcattcaggatcttacactcttggtcaagagcaatatcattccaatggagcgcattgatgatgctgtggagagaattttgcttgtaaagttcaccatgggtctttttgagaatcctctagctgataccagcttagtcaatgagcttggaagccaggaacacagagacctagcaagggaagcagtgagaaaatctcttgtgctgcttaagaatgggaaaaatgaaagtgcttctcttctgcctcttccaaagaaagtcccaaaaatcctagttgctggatctcatgctgataatttgggttaccaatgtggtgggtggacaatcaaatggcaaggattcagtggcaacagtgacacaagaggaacaactattctcaatgccataaaatcagcagttgatacaagcacagaagtagtctttcgtgacaaccctgacaatgagtttgttaagtccaataacttcgaatatgccattgttgtagttggtgagcctccttatgctgagactgctggggacagtacgacacttacaatgatggaatctggcccaaatgtcatcaacaatgtctgtgggactgttaagtgtgttgttgtcatcatttctggcagaccgattgtcattgaaccatacatttcttctatagatgcattggtggctgcatggttaccaggcactgaaggccaaggcatgacggacgtcctttttggtgactatggtttcactggtaagcttgcgaggacatggttcaaatccgtagatcaactcccaatgaatgttggggatcctcactatgatcctctttttccttttggtttcggactaacaaccgaatccgtcaaggacctggtagcaaggtcaacctcagctgctgttggtgcaagggcttgtatatttaccattatagtgaccctaatcatcagcttatacttacctggttaagcacaatttatgggagctttattggagcgggaggctagagaactaacttgggatacttcccggcttagtcttattctagtgtaattcattgtataccattgagacattattattcataaactagtaatttgagcacattctttttcataattggaacttggtttatcagactatttaggtattaaatctactaggcgttaagtagttaagttatttgttagagtactgcaaaaatgttgatttgtgttccgtgcctctactcgaatcaccggaattaattcttcaaatgcaagtcttttttgt

SEQ ID NO: 11418 - DNA, 1009 bp, Glycine max
  Clone ID: 701061195_FLI
taattgcaagaatggcacttcgttgcttggtgatgtccctttctgttctcttcactcttggtcttgcgagagaaagccatgccagagacgaagatttttggcatgctgtttggccaaacactcccattccaagttcattgcgagatcttctaaagcctggccctgcaagtgttgaaatcgatgatcaccctatgcaaattgaagaaacacagtacccgaaaaccttcttctataaagaagaccttcatccaggcaaaacaatgaaagtacaattcagcaagcctccctttcaacaaccatggggtgttggtacatggttaaaggaaattaaagacactactaaagaaggatatagttttgaagagctatgcatcaagaaagaagccattgagggagaagagaagttttgtgcaaaatccttgggaacagtaattggttttgccatttcaaagctgggaaagaacattcaagtactttcaagttcctttgtcaataagcaagaccaatacactgtggaaggagtgcagaatcttggagacaaagcagtgatgtgtcataggctaaatttcagaactgcagtattttactgccatgaagtccgtgaaacaacagctttcatggttccattggtggctggtgatggaaccaaaactcaggcacttgctatttgccactcaaatacttctggaatgaatcatcaaatgcttcatcaacttatgggagttgatcctggaactaaccctgtttgccatttccttggaagcaaggccattttatgggtacccaatttatctgtggacactgcctatcagaccaacattgttgcttaattagtccatgcatcttgagcaccatgagaatgagattgtgtataaaataaattatcatgtgctgtgtgttgtgcaagtactaccttctctagctagattgctagagctagaatttcaacctacctatgtgtactgataagatctgcttccctacttaaagagagcatcatcctgtgatc

SEQ ID NO: 11419 - DNA, 716 bp, Glycine max
  Clone ID: 701061389_FLI
gaaaagagttatttgtttacgatctcattagtcattacaatctgccaagtctctaatctaagctaacaaatatcaaaaagatgtctctgattccaagtttcttcagtggcccaaggagcaacgtgtttgatcctttctcacttgacgtgtgggatcccttcaaggattttcactttcccacttctgtttctgctgaaaattctgcatttgtgagcactcgggtggattggaaggagaccccagaagcacacgtgctcaaggcagatattccagggctgaagaaagaggaagtgaaggtgcagattgaagatgatagggttcttcagataagcggagagaggaaccttgagaaggaagataagaacgacacgtggcatcgagtggagcgtagcagtggcaagttcatgagaaggttcagattgccggagaatgctaaagtggagcaagtgaaggcttctatggaaaatggggttctcactgttactgttcccaaggaagagattaagaagcctgatgttaaagccatagaaatctctgcttaagctctgttctcttttgctgaggatcttgtgagtgattttctttctttgtttttcttttttttgtgagtggtttgtgtaagaaagatatcatggactgtgtactgtaattgcaaatacaagtaatggtttacagtggtttttgaaatataaaataaaatcttagcttgtaataat

SEQ ID NO: 11420 - DNA, 1135 bp, Glycine max
  Clone ID: 701061473_FLI
ccttcaacatccttgctgcttgctatagaaggccatggtgagaaagaaagattgcgccgcaaaatgatggtttttcacaagcttcatgatcatgatcttacgttggaagcagcatggcctcaattatttgttgaccacaaaggaaaatattgggatgtccctgagtctttatctgttgatttgtcatcccttgtgtctgaatctggattgcgatatcactttgggatacataaaaatggtggtaatccccaggcaatgaatgcaaccgatggtaacccgccactgtctctactgccagggttatgtgcgaaggttgctgttagttatgagaagatcaaatacttctggagagataaaggtgctgcagaacaagagaatgaagaggcgcttccatatgatgtgcgtcttaaggaacctcacgcagcagtatctggaattattggtagcacctttgcttcctggatttggaatggaaggagcttgtctagcgtcgattcaagagaagatcaagaggtgtcaacaagcaagagatctcgacataatgctgatttgtttggctcagtttgctactcctttcagcatggaaaattcacaaaaaaatatggggacttaaccagggtagatgctcgtctagatatatcttcagcttcagcatttgcaaagaagattctgaatggttccagtagttcaactgctgatgttagcaaacaaccatcagcctcaccccggctaaatttaatctttcaacagcaggttgcagggccagttgtttttcgagctgattcccggattgcccttgagtctttcgccaggaaaaacggtgtgtcagtagaggattttatttgcagcctgagttactccttgaaggatcttcagtctggaaagatcgttgcttggtattctccaaaaagaaaagagggaatggttgaatttcgcatgtatgagttttagcagaatgcaacaaccctcacatttttgtaacttacgcttagagatcttacaatgcaagaagccccacatggttgctttataagattcatttattatttaacatttgatctgctaaaacttaacatcactgattttgtaatgccaaaaggtgtttagttagatgttttgttttttattcatcttt

SEQ ID NO: 11421 - DNA, 1255 bp, Glycine max
  Clone ID: 701061555_FLI
gcatataacaagatggcttcttttcatatccttgtgctcgtggttgctatggtcacattgatgatccctacgaatgcaaacctctctccccatttctatgataaagtatgccctcaggcattgccagtcataaagtcagtggttcaacgagcaattatccgtgagcgacgcatcggagcatctcttctgcgcttgcatttccatgattgtttcgtaaatgggtgtgatggatcaatattgctagatgacacccgaaacttcactggcgagaagacagcattgccaaatcttaattcagtcagaggattttcggtggttgatgaaatcaaagaagcggtggacaaagcctgcaaacgccctgtggtctcatgtgcagatatcttggccattgcagctcgtgattctgtagccatatatgggggtccacactattggtaccaagtattgttgggcagaagagatgcaagaactgcaagcaaagctgctgcaaattccaatcttcctcctccatctttcagcttctcacaacttgtttccaacttcaaatcccacggcttaaacgtgagggaccttgtggccctctctggaggccacaccctagggtttgcaaggtgcagcaccttcagaaacagaatctacaacgcaagcaacaacaacataatagacccaaaatttgcagcatctgcgaggaagacatgtccgcgaagcggaggagacaacaacttgcatccatttgatgctactcctgcgagagttgacactgcatattacacgaatttgctgcacaaaaagggtcttctccattctgatcaagagctgttcaagggaaaaggcacagaaagtgacaaattggtgcaactgtatagtagaagccctttggtttttgctagagattttaaagcttccatgatcaagatggggaacatgaagcctctcactgggaagaagggagagatcagatgcaattgcagaagggtcaattaattaattagaattgcaaattgcaaggtctggattacaatagtggtacatacagtggaaagaataagaaatcgtattatattataagcttagtcatgccaattttacttttttttttatgagcagatattagtttgttatttttattaaaaatatcaattgagagatttccaacttatcatttctcttcttttttcttttttcatccttttccaataactggatcaaccttatattttctatcaattttaatgtgatatgtgtatatttaaat

SEQ ID NO: 11422 - DNA, 1519 bp, Glycine max
  Clone ID: 701061673_FLI
ggaagtttgggctgaccaccgctcagattcttagggttgtgaagaacctggacctcgcgggcatgctggattgcctgcaactgctgcattttcatattggttctcagattccctcaacagcgttgcttgctgatggtgtgggagaggctgcgcagatctactgcgagttggttcggctcggggcgaacatgcgagtcatcgatattggaggtggactgggcatagattacgacggttccaaatcgtgtgactctgatatttccgttgagtacagtctcgaggattatgcagtcgcggttgttcacgcggttcagtgtgtgtgcgaccgaaggtccgtgaaacacccagttatctgcagcgagagtgggagagccatcgtgtctcatcattcggtcttgattttcgaggcggttggcaccagcagcaccaccgggggaggagcttcccctgcattgtccgctcaatatctggcggaggagctgtcggaggattaccgcaatctgtcggagctggcttttagaggggaatatgaaacgtgtctggtgtacacggaggagatgaaggagcgatgcgtggaacagttcaagcaggggacggtgtgtatggaacagctggcagcggtggaaggattgtgcgagttggcgaggaaggcggttggggcgggggaatcggttcggagatatcacgtgaacctgtctgttttcacgtccgttccagacgcgtggggaattgaacaggtgtttcccattatcccaattcaccgtttggacgaaaagccttcggtgaggggtattctctcggacttgacttgtgacagcgacgggaagattgacaagttcatcaacggagagtccagcctgccgcttcatgagatggaaggaggaagaacttactatctgggaatgtttttgggtggggcttacgaggaggcgctcggtggagtccacaacttgttcggcggccccagcgtggtcagggtgtcgcagagcgatggccctcacagctttgcggtcacgcgtgccgtgccggggccatcctgtggagatgttcttcgagtgatgcagcaccagcccgagctcatgttcgagacactcaagcaccgcgcgcaggagtatgtcagccacgacaacgcagcagcgcttctggctgctggccttgctcgcacctttgacagaatgccttatctgctgtctctgtcttcctttgtggctgacgatgttgccgctgctgttcctgctgctcaagatctgggggagcagtggtcttattaatggatgtgcttcaattcaaatagtctcgcactagtcatcattccctttgtttctgttgcttgcttggttgttcttcttcttcttgttgatcgtcgtggtcgttgaggtcttcaattttttttttattattattccgttttcgctgtttttagttttgtcctggatgcaatgcaggataaagacagggtcagtcagttattgttctctgcattttgttcccaaatgaaatgtctatgactttcgtcgtc

SEQ ID NO: 11423 - DNA, 418 bp, Glycine max
  Clone ID: 701061686_FLI
ctgagatatttcccatacatttgaaggggactgctggaagcttggtggttttggtggcttggctaggagcttgggtagtttcatatactttcaactttcttatgagctggagttctcctggtacattgtttttgtatgctggatgttccctcttaactattctatttgtagcaaaattagtcccagaaaccaaaggaaaaactttggaagagatccaggcttgtattagttcatagagataaaagatcaaaaacgcactgcaggacccagtcaaaccattaccaccatttttcaaattcttttacatccatttaggaccgtcaaggcataaaataacataatgttgccatatcgatccatttttgttgttgtataataataataataataataataatgtatcattagcttatttgat

SEQ ID NO: 11424 - DNA, 201 bp, Glycine max
  Clone ID: 701061722_FLI
ggggcaaatcactgttagctttggctgtaataagcatataatgctttgtattatgaaatcttagttcaattcatctcatgtcatgccgatggctggctcaataaaccttgccataggaacagtatggcttgtggtaccatgcattggtttttaacaactaattcatgtaattaatataagaatgaccagcatattgcattt

SEQ ID NO: 11425 - DNA, 1083 bp, Glycine max
  Clone ID: 701061761_FLI
gtttcaaatcttacattcttgaatgctccagcttatagcatacacccagtttattgcagccatgtacatattcaaaatgtttcaatctctactcctccagaatccccttatactgttggtatagtgccagattcttctgataatgtgtgtatagaagattgtattgttgccatgggatttgatgcaatttctcttaaaagtggctgggatgagtatggcattgcttatggcaggcctactgagaatgtacacatcagaagggtgcatctacatgcattttctggctctgctcttgcatttggcagtgacatgtctggtggcatttcaaatgttctagtggagcatgctcatcttttcaactcaaaaagtggcattgagttcagaaccaccaagggaagaggtggttatatgaaagaaattgttatgtcagacatacaaatggagaatgtccacacagcaattgctgccacaggtaattgtgggtctcatcctgatgacaagtttgatccaaatgcactcccacatttggatcacattaccttgaaggatgtcacaggtacaaacatttccattgctggaaacatagctggaatagaagaatcccctttcacaaacatatgcctctccaacataaccttgtccacaaattctgtttctccaattacttgggaatgctcaaatgtgtctggtttttcagactcagtgctcccagaaccttgtcccgaacttggcaacccctcatatgattcttcctcatcatgtttctacctgctgagtgtcagtggcaaaactgtagtgcagtgataataataatcctttctcaacagaagaagattcttattcttgagtaccctgctgcttgaagttgatgaaaaagtgaatggccatttcccatccaaagatttaagctacattcttttccaataagacagttgtgaggattattcattttttcatccttttagatttgcattcttgcatgttcctaccatcacattatttgtacagcttcttcatttcttcattcatgtgtaaggaaattttggtagtgccgccacaaatggactcaaaaagaagtttgat

SEQ ID NO: 11426 - DNA, 1450 bp, Glycine max
  Clone ID: 701061832_FLI
tcaccctctattcacttctctctctcaaaacaagttatggtagtatttgtcattcatttcacaaaaccggttcacctttggacccatggcttctaaaacccctaccttattccactctcgtttcttcctcttcggcttctattgctgggactgggaatttctcaccgctctcctcctctttagttcttcttcctaattaattaaattacatacaccttttctttttttttttttacctaaatttctcattactacaacatcaacaaaagaggcataggttttttttttcttttcttcttttattaaaataataatagtttctgtgaggtaggtggagggtagatcgggaagaaaaaaaaaatgtcacagcagcagcgttcgacgccggcgccgttcttgacgaagacgtatctgctggtggatgaccccgccaccgacgacgtcgtttcgtggagcgaaggtggcaataccttcgtcgtttggaaacacgccgatttcgctaaggacttgcttccgaagtacttcaagcataataatttctccagcttcgttcgccaactcaacacctatggattccgaaaaactgttcccgacaaatgggaatttgccaatgagtatttcaagcgaggacagacggatcttctcgccgagatcaggcggcggaaggtggtgtctccggtgaccggaaaatctaccggcggtggcgttaacatctcggcgtcccactccggcggcgacgacatggggtcgacatcgacgggatcgatggaggcggcaacggcggcgggcgctgatatatcgggcgagaacgagaaattgaagaaggacaacgagaaattgagcggcgagttagcgctggcgaagaaacaatgcgaggagttggtggcgtttcttagagactcgctgaacgtgagccccgatgtgatagagcgcatcattcggcaaggaacgtgtgtgtccagcaacaatgatgcggtgcgttttgatgctattattaataatgatcttgatgacgacgaaaatgcggtaggtgagtgtgaaccacaacaaccaccacccaaaggtgacaatggagaaagtttgaaactatttggggtttggttgaagggtcaaaatgggaaagagaattcaattggtaaatgccgcaagagagggcgccaagactaccctattgctgccactgccaaggaattgaagaccctagtctagtacaacatatcatattcttgttaattaattaccttttaagaaacaactattgtagccagatctagaacacaaagaaaaatactctcttagtcatcatggaaaatgtatggctctttcatggtatttcgttgtttggtttgatggtgcaagggacctaataaaggatactaatgatgatgattaagattatgtttatagacattaatttgtatgattggaaataaatgtgtcttgtttaagg

SEQ ID NO: 11427 - DNA, 2826 bp, Glycine max
  Clone ID: 701061862_FLI
cacaatctaagtaagtgttgagagaagagtgcgtttgtttgtttgaaattaagtagtaaagatgtttggaatcatcggaggaaacaagggtcacaagataaaggggaacttggtgattatgcgaaagaatgtgttggatatcaacagcatcaccagtgttaagggtgtcattggaaccggcattaacatcattggaggtgtcgtcgacaccgttactgctttggcgtcccacatctccatccagctcatcagtgccaccaaggctgatggacatgggaaaggtaaagttggaaaggctacaaatttaagaggacaagtgtcgttgccaaccttgggagctggcgaagatgcatacgatgttaattttgaatgggacagtgacttcggaattcccggtgcattttacataaagaacttcatgcaagttgagttctatctcaagtctctaactctcgaagacattccaaaccacggaaccattcacttcgtatgcaactcctgggtttacaattcaaaaaactacaagactgatcgcattttctttgccaacaatacatatcttccaagcgagacaccagctccacttttgaagtacagagaagaagaattgaagaatgtaagaggggatggaactggagagcgcaaggaatgggataggatctatgattatgatgtctacaatgacttgggcaacccggatagcggtgataaatatgcacgccccgttcttggtggttcagccttaccttaccctcgcagaggaagaaccggaagaggaaaaactagaaaagatcccaacagtgagaagccgagcgattttgtttaccttccaagagatgaagcatttggtcacttgaagtcatcagattttctcgcttttggaatcaaatctgtatcccaagatgtcttgcctgtcttgactgatgcattcgatggaaatattttgagccttgagtttgataattttgctgaagtgcgcaaactctatgaaggtggagttacactacctacaaactttcttagcaagatcgcccctataccagtgatcaaggaaatttttcgaactgatggcgaacagttcctcaagtatccaccacctaaagtgatgcaggtggataagtctgcatggatgactgatgaagaatttgctagagaaacgattgctggtgtaaatccaaacgtcattaagattcttgaggagttcccaccacgtagcaagctagatacacaagcctacggtgatcatacctgtataataacaaaacaacatttggaacctaacttgggtgggctcactgttgagcaggctatccagagcaagaagctgttcatcttagatcaccatgactatctcattccatatttgaggaaaataaatgcaactaccacaaagacttatgctaccagaaccatatttttcttgaaaagtgatggaactttgacgccattggccattgagttaagtaagccgcatcctcaaggtgaagaatatggtcctgttagcgaagtctacgtgccttcgagcgaaggagttgaagcttatatttggttattggcaaaggcttatgttgttgtaaatgactcgtgctaccatcaactcgttagccattggctaaacactcatgcggttgttgagccattcgtcatagcaacaaataggcatctgagtgtggttcaccctatttacaaacttttgtttcctcactatcgtgacaccatgaatattaattcacttgcccgcaaatccttggtcaatgcagacggtattatagagaaaacatttttgtggggtaggtacgctttggaaatgtctgctgttgtttacaaggactgggttttcactgatcaagcactgcccaatgatcttgtcaagagaggagttgccgttaaggatccatctgctccccatggagttcggcttttgattgaggactatccttatgcttctgatgggctagagatatgggatgccatcaagtcctgggtgcaagaatatgtgtcattctactacaagtcagatgcagcaattcaacaagaccccgaactccaagcttggtggaaagaacttgtccaagtgggtcatggtgatttgaaagataagccatggtggcaaaagatgcaaacttgtgaagagttgattgaagcctcggccaccctcatatggatcgcttcagcccttcatgcagctgttaactttggacagtatccatatggaggtttaatcttgaacaggccaaccattagcaggagattcatgcctgagaaagggtctgctgagtatgctgctttggctaagaaccctgagaaggagtttttgaaaactattactggcaagaaggagaccctcattgaccttacaattatagaaatcctgtcaaggcacgcatctgatgagttctaccttggggagagagatggtggtgacttctggacttctgatgctggtccactagaggccttcaagaggtttggaaagaagcttcaagagattgaacataagcttatacagaagaacaaggatgagacgttgagaaaccgcactgggccagctaaaatgccttacactctgctctatccttctagtgaggagggattgactttcagaggaattcccaacagtatctctatctaagggctctctcattgaggttgctgtactactctgcctgtttttcaataatgtgaaataggaggaatatgattccttcatctacctacgtatggtcaagttacatttggggtggttgaatgttctcgtgtttgctgtattctgtttttataacagatcgaagagaaagcaataaaggcaatcacgcatgtttcaac

SEQ ID NO: 11428 - DNA, 302 bp, Glycine max
  Clone ID: 701061985_FLI
ggggtgcttagtgtaaccgtgcagaaattgcctccacctgagcctaagaaacctaggactattcaggttaaggttgcttgaacaacttgtggaacgaagtttaataaatgattgttttccctttctggcagaagcagggcaagaagtaatgttgtttgaaggataagatggatcttatcttttagttgtttcaaggtttttctgttcttattgcaatggttctatggtgttttcagtttgtgatgttgtaatcagatgatgctattgctatatcagttgttcagcatttcttgatcttagtt

SEQ ID NO: 11429 - DNA, 1520 bp, Glycine max
  Clone ID: 701062053_FLI
acgccatcgagcatcaacgcaaatcgatggcggcgatgggttccctcgcaaaactcatcatcgttcactgatgaaaccaaaacctaaaccctactccttcctccctctcaaccgatttcttcgcgcgctacaatctcgtcccctcatggcccaaaccccaacatctctcgatgcagagcacccctccgacaacgaccagcacatgggctttcgggcgcggagcctgagcggagagtctcgggcggagcaagcgtgggcccattggaccaagctgggccggcccaggttcatagtggccccgatggtcgacaactcggagctgcctttccggatgctgtgccgcaagtacggtgcccagggcgcgtacacgcccatgctccattcccgcattttcaccgagaccgaaaagtataggaacgaagagttcaccacttgcaaggaggatcgaccgttgtttgttcaattctgtgccaacgatccggatgtgttgttggaagctgcacgcaaggtggaacgtttttgcgattatgttgatattaatcttgggtgtcctcagcgcattgctaaacggggatactatggtgccttcttgatggataaccttcctcttgtgaaatctctggtggaaaaattggctgttaaccttcaggttcctgtttcatgcaagattaggctctttccaaatttagaggacactttgaagtatgctaggatgcttgaggaggctggttgtatgcttttagctgttcatggcaggacaagagatgagaaggatgggaagaaatttcgagcagactggaaagctatcagggctgtgaagaatgcagtcagaatccctgtccttgcgaatgggaacataaggcatattgatgatgttagagactgcttagaagagactggggtcgaaggggttctttccgctgagaccctgctagaaaatccagctctctttgctggatttcgaactgctgagtgggtgtctgaaagtgaaggtaccaatgtggatggaaagctggaccaggcagatctgctaatagagtatttgaagctttgtgaaaaataccctgttccgtggagaatgattcgttctcatgttcataaattgttgggagactggttcagccttcagcctcacatcagggaggaacttaacaaacaatctaaattgacttttgaatttctttatgacatggtggatcgacttagggctacaggtataagaattccactttacaaagatacccaagtggaacttacagcaggcagttacccagattaacagagctgcacgccaacatttggagttcaaatttaaatcaatgaaatatcttatgcggtagaggtggtgcggccagccaaagctagcatgattgcacatcatttagatacaattttgtagtgattagaagtgagaatagttaaaatttctaatatgtgctgtatttgtgttcattcttattgcaattgccaattgacagtgttgtaccctattaaaacgcttatgtttgctcagagcagat

SEQ ID NO: 11430 - DNA, 2026 bp, Glycine max
  Clone ID: 701062116_FLI
atcgtcttctagggtaaccacggcgccactcgaacaagtgcggcaattcccaacgcttctcttctcagggggagttcgaatcctgtgagctttcaatatgacgtcgttcttgaagcctgagaatgctctgaaaagggcggaagaattaatcaatgttgggcagaagcaggatgctttgcagactcttcatgacctcatcacctcaaaacgatacagagcatggcagaagacacttgaaaggattatgttcaagtatgtggaactttgcgtcgacatgcgaaaaggccgttttgctaaagacgggttaattcagtataggattatatgtcaacaagtgaacgttagttcactggaggaggtcataaagcattttatgcagctttctaccgagaaagctgaacaggcccgtagccaggcacaggcactagaagaagcccttgatgttgatgatttagaggccgataaaaggccggaggacctgatgttgagctatgtcagtggcgagaaagggaaagacagatctgatcgggagactgttaccccctggtttaagtttctttgggaaacttataggacagtgctggaaatattgaggaacaactcaaagctggaagccttatatgctatgacagctcatcgagctttccagttctgtaagcaatataagcgaacaacagagttacgcagactgtgcgaaatcattagaaaccatttggctaatcttaataaatatcgtgaccaacgagaccggcctgatctttcagctcctgaaagcttgcaactgtatcttgatacaagatttgagcagctgaaaattgctactgaacttggactctggcaggaagccttcaggtcagtggaggatatacatggactgatgtgcttggtcaagaaaacacccaagccatccttgatggttgtttactatgtgaagctgacagaaatattttggatatcgtcaagtcatctgtatcatgcatatgcttggttcaagctctttttattacaaaaaagcttcaataagaatctgagtcagaaggatctgcaattaattgcttcatctgtcgttctggctgcactttcagtgcctcctcatgatcgaacccatggtgcatctcatttggaactggagcatgaaaaagagagaaatttgaggatggctaatctcattggctttaatcttgaaactaaacctgagagcagagaaatgctatcaagagcatcacttcttgctgaactggcatccaagggtgtgatgtcttgtgtaactcaggaagtgaaggacatttaccatcttttggaacatgagttttatccctcagatcttgcattaaaagcactgcccttaataactaaaatctcaaagttagggggcaagctttctactgcgtcatctgttccagaagtgcaattagctcagtatgttccagcactggaaagactggctaccatgaggttgctgcaacaggtgtctaatgtgtaccaatctatgaagattgagaccttatcagggatgatccccttctttgactttgctcaagtggaaaagatttctgtagatgctgttaagcagaagtttgtatcgatgaaagttgaccacatgaaaaatgctgtgatttttagtaaaaagagtctcgagtctgatggcttaagggatcacttgggcaattttgctgaacaattaaataaggcaagacaaatgatttatcctcctgatgggagaccatcaaaacttggagctttacttccaactttgacagaggttgtggccaaagaacacaagaggcttcttgctcgaaaatcaattattgagaagaggaaggaagaacaagaacgacagcttcttgaaatggaacgggaggaggagtcgaagaggctaagacttcagaaaataaccgaagaagcggaacaaagaaggcttgccactgagtatgaacagagaaagaatcagaggatccttagggagatagaggagagagaaaatgaagaagcacaagctttactccaggaagctgaaaagcgtatt

SEQ ID NO: 11431 - DNA, 1501 bp, Glycine max
  Clone ID: 701062193_FLI
gttttgagtataggtacatcacctcagattgtgatgctgtggccacggtttatgagtatcagaaatacgcaaaatcccaggaggatgctgttgctgacgttctcaaagcaggtatggatattaattgcgggacgtttatgcttcgacatactgaatctgctattgagcaaggaaaggttaaagaggaagatttagatcgagcacttcttaaccttttctctgttcaactgcgccttggactgtttgatggagaccctataagaggtcggtttggcaaattgggaccaaaggatgtttgcacccaagaacacaaaacactggcacttgatgctgcaaggcaggggattgtactgctgaagaatgacaagaagttccttcccttggatagggatattggtgcctccttagctgtcattggtccattggcaactacaaccaaattaggtggtggctactcaggtatgattttcatattgggacattgtaatttttccatcttcatttggtttgtttcatttaattttgcttgcagtagatacctcatgcctgtggtcaggctattcttttatacaaccctacactccaatggcattgatatatgtacacaggactttcacactgaaatgccaaatactttttctattctgaaataattgctgttttatcaatttattatttgtcatttaacaattgtttaggccatcatcttttaaatgtttctctatcttttagaagacccctcaaaaccctgacatcgaactgtatgatgttgtacctactacctaataatgtaggaattccttgctcctcatcaagcttatatgaaggacttggagagtttgcagagaggatatcatacgcttttggttgctatgatgtaccatgtgattctgatgacggttttgctgaggccattgacactgcaaagcaagctgattttgttgttatagttgctgggcttgatgcaacgcaagagacagaggatcatgaccgagttagtcttctcttgcctggtaaacaaatgaaccttgtatcatctgtagctgatgctagtaaaaatccagttattcttgttcttattggtggaggacctcttgatgtctcttttgctgaaaaaaatccacaaatcgcaagtattatttggttgggataccctggtgaagctggtggaaaagctctagctgaaattatctttggagagtttaatccaggtatgtatacttataaatgaatatgctgttagacaaggccgtctttatgcattgggaacatttgaaattagatgaggctctatgctctcccagagtgatagttgttatttttaactttacactaactactgtcaagtgtactttttctaaaaaattatccttaattgaatgtgattggatatgggttcgaatccggaaacagcctctttgcatatgcaagggtaaggctgcgtacaacatccctcccccataccttcgcatagcgaagagcctctgggcaatggggtacg

SEQ ID NO: 11432 - DNA, 1920 bp, Glycine max
  Clone ID: 701062315_FLI
gcagaatggaacaaaatgcgtgcgaggaattgtcgaaaattgcttcggatttcaagtgcgagaagaaggttctcgaaacagttgatgaatcaatcgtatgccccactccacagaagaacgaggaacccttaatcgttaaattcagagagggacaaaccaaccttcctgaaaaatactctgcacttgtagatttgtttggtcacacaagctgttcactcaggttgctgcgtctgtgtaaaaagtctccaacttttcaaaatgtttgccgacaggttgaagttctttcgaagagggaattctcccatgcccatcttgcgcagatgaagtatatactccctaaaagtgtgtgtatagataaggtgcttgttcatgataagaaaagcttgtgtatggtgcctgatatgaagatcacgttgagatttgaggttgtgaaagattgctctggcgaatctgatgatctggctcttcgacgatattttaaatctaagctgattgatttctttgatatgcatcctgaggttgctgacattccagaggccccactgccagaaccctttggcaaaaaaacttgtagattgaattttgaagaatttactggccaatccccacatgtaaattcttcaacggaacttttgtcaatttccaatcaaactgaaatgttgccagagcaattgcaactgtatccatctttccgtagacacttttctaggaagaataataccgaccaggcagaaaaggctcaatgctttttacccacaaaaacttctccatcatctcatgcatctgattgtctggataatgaagaaagtgaaaaaacactgcagaaagaatgtgtaccattatttgatggggtggctaatcctattactgaaagagggcaccagaaggaatcattttctatgtctttgcagcctagctttattaatacaccagtacagatgatccgccctccatattctgttacgtgcagtaattctgaaagcccggatatgaaaaatatctcctgtgttgctgatagttttattgcagagacacctgcccagtcagcacctgcaagattattgcccatttccgatgttaagcttcaggacatgcctacccaaaagtcaacatcatctcataagccagcaaaaagagtgcttgacttttcactcatgggggacaatgatggcttgggcattggagtagacaagttagaatctagcagagctctgcatgaatttgatagcttccctgaatctagcagaggatgttatgaggattgcaattcttttgggtctgtttctgcacctcaggaggcagaagagagcctcaagcaagctgatttagatacacagcataaaaaatcttcaccattgctggatctggttaatgtgatacactctatatttcaatctgtccaaagaattccaatcaccaaagaggagctcctgcataagatacttgtgaacactttggattttgttgagattagagcagttgaagaacaaattgagtctctagaaaagttggtgccagattggatctgcaagaaattggttgctactggagatactatgtactgcatcaataaagtgtcggatttagactctgtacgatcacggctttccaccaacgtcgtttgagagaagggcgtttagttaatatttgctgcctttaatacctgtaattagagattggattttcttcataattgtttttgaatcacatttgaccgatgtctaaaactggtgttctacatattaaaaatgataaaattgaaaaggatacgatttataattttgttagtttttgctgcctttaatacctgtaattagagattggattttcttcataattgtttttgaatcacatttgacggatgtctaaagctggtgttctacatattaaatacagtagtttaacgcatcttcatacttc

SEQ ID NO: 11433 - DNA, 870 bp, Glycine max
  Clone ID: 701062335_FLI
atctgcttcaaaatgctgagtttgatatcaagaaagaagctgcttgggctatctcaaatgctacatccggtggttctcatgaacaaatcaagttcctagtaagccaagggtgtattaagcccttgtgtgatcttctcatctgtcctgatcctagaattgttacagtttgtctggaaggccttgaaaacatcttgaaggtgggagaagctgataaaaacataggaaatactggtgatgtgaatctatatgcccaaatgattgatgaagctgagggattggagaaaattgagaacctccagagtcatgacaacacagagatttacgaaaaggcggtcaagattcttgagacatactggttggaggaggaagatgagactatgcctccaggggatgcttctcagtcagggttcaactttggtagcagtgacgctcctgctgtgccgtccggtggattcaactttaattagaagatattcatgctctactggggagttttggttggtctatctgtgaagtcctcctttatgacacgacagcagttgggggacaagtcaacgtcttgtcattgtcctaatgtccttgggttgtacgaggtccagcaagtaaatacatggttgctggactgccttgggtttttgcaatgcctgatatttcatatctcatggtgtaaaatgctttgtggctatatttttttgccaccgtagagaatactagagtcttctttctgccaagtgatcatttcatagaattaatgaatgctcagtctcgtgatttttttttcctttgttatatatgtcctagattggagtaaaaagttacgattgttggtttttttggcaaatgccaaatgctactgcctatccattagtt

SEQ ID NO: 11434 - DNA, 703 bp, Glycine max
  Clone ID: 701062352_FLI
taaaggccatccccattaatggtcatatgagccagtcaaagagacttggagccttgaataagttcaaatctggggaatgcaatattctcctttgtactgatgtagctagtagaggactggatattccgactgtagatatggtgattaactatgacattcccacaaactccaaagattatatacatcgcgtgggaaggactgctcgtgcagggcgctctggggtcgccatttcccttgtaaatcagtatgaactggagtggtacattcaaatagagaagcttataggcaagaagctaccagagtatcctgcacaagaagaggaagttctgcttttggaagagcgtgttggtgaggccaaaagattagccgtcatgaaaatgaaggagactggagggaagaagaaacggaggggcgaagaagattatgatggagaggatatagacaagtacttgggtctcaaggaaggaaaatcatccaaaaagtttagaagaagatgagatcatatcactgccaatgagtgaattaatgcgacggataaatgaatcatatgaagccatgaaaaattgaggatagactgagatgtcaagcaacttgtgcgttgtagtacaattttgagcaaatttttgcattaaattaaaaaaaattgtatactaattgattgactatataaacaattttctagttatatttttgaaacgattgt

SEQ ID NO: 11435 - DNA, 756 bp, Glycine max
  Clone ID: 701062361_FLI
aaattctcaaaggcaccaatttcattgctcagagttcccaaattctccccaagagataaaatgtctctaatcccaaacttcttcggtggccggagaaacaatgtgttcgatcctttctcactggacgtgtgggatcccttcaaggattttcctttcccaaatacgctttcttcagcttccttccctgaattttctcgggaaaattcagcatttgtgagcacccgtgtggactggaaggagaccccagaggcgcacgtgttcaaggcagatattccaggactgaagaaggaggaagtgaaggtgcagattgaagacgataaggttcttcagataagcggagagaggaacgttgagaaggaagataagaacgacacgtggcatcgagtggagcgtagcagtggcaagttcatgagaaggttcagattgccggagaacgctaaagtggagcaagtgaaggcttctatggaaaatggggttcttactgtcactgtccccaaggaagaggttaagaagcctgatgttaaggccatagaaatctctggttaagcaaaagcaaattgatgtttggtcttttatgttttaaattttgtgtttttctttgttctaatgtgagtgatatgcgtgggaaaaatgtagtgggagttgtgattgtataaagaaataagtcgttgtcgtgcgttggtgagatattatgtgtgaattttaatgtagcgcatgaaactttgcaatggagaagctaaatgttttttttctgct

SEQ ID NO: 11436 - DNA, 824 bp, Glycine max
  Clone ID: 701062460_FLI
cgaaaacggcagtcccctccctcatcggaagggaggaacacagccagccacgacaggattactccctggaatcgggttctgtcttcttcattgcagcagatctcactacactgcatgcatatgggagcagtggttgtcttggaccctttaaaaagcccccactaattgctactgcagatgttccgccaaaaggattgaggaaacaaggtaaggcagcaaagaaacctagcacatcagaagatttctggatcaccagcacgcatgatatggacaacagtgctgttcagtcacagggaagcatctcatcagccagtataacaaaccaagctgcagatcctcatggaggttcatgcaaccccactgagtttgtgaatcatggtcttattctatggaatcagacacggcaaggttggataggaaataaacggtctaagaaccaaactgaacagttgcgagaacccaaattgagttggaatgcaacatatgaaagtttactggggagcaacaagccattccctcagcatattccccttgcggaaatggttgattttcttgtggacatctgggaacaagagggtctgtatgactaacctatagaagactgaaggggtgtcaattggtttgatcaacagattaattatagttctttcttctgagtgtagaggaaaattgggcatactgcagtttgtaactttgtatatctgttgtaatgttatctttcagttgataatgacgaggaattttattagtttctccagaggcctggacataattgtattattattctcctttgcattttaatgttgaaacgaaaatttcctgtc

SEQ ID NO: 11437 - DNA, 1908 bp, Glycine max
  Clone ID: 701062525_FLI
cttcaattctctaacaggtgacctccctcagactatgagctcactttcacgcataaccaccatgtatctgcaaaataaccagtttacaggcactattgatgtccttgctaatctgcctctggataatctgtgtgtctctgttgtatcatataacatagctggaatatcctattttcataaagaaaaactaaagccaattttatttactatcttaaattattctcaggaatgtggaaaacaataattttactggatggataccggaacagttgaagaacataaacctacagaccggtggtaatgcatggagctcaggtcctgcacccccacctcctccagggacgcctccagcacctaaaagcaaccagcaccacaagtctggtggtggaagtaccaccccctcagatactggcagtggcagcagctcaattgaagagggcaaaaaatctggtatcggaggtggtgccatagctggaattgtgatctcggtcatagttttgggggcaatagtagcattctttctggtgaagagaaaatccaagaagtcatcttctgatttagaaaagcaggataatcagtcctttgctccacttccttcaaatgaagtgcatgaagaaaagtccatgcaaacttcctctgtaacagactggaagacgtttgatacttctggctcaataaatcttaaacccccacctattgatcgtcataaatcatttgatgaggaagaattctccaagaagcccacaattgtgaagaagactgtaacagctcctgcaaatgtgaaatcatattctattgctgaactgcagattgctactggcagcttcagtgtggatcaccttgttggtgaggggtcttttgggcgtgtataccatgctcaatttgatggacaggttcttgctgtgaagaagatagattcatctgtccttcccaatgatttgacagatgattttatagaaataatttcaacatctccaatttacatcatccaaatgtgacagagcttgtaggttattgctcagagtatggacaacacctcttggtctatgagtttcataaaaacggatcactgcatgacttccttcacctaccagatgaatatagtaaaccattgatatggaattcgcgtgtcaagattgctttggggactgcacgtgctctagagtacctacatgaagttagttcgccatcagttgttcataagaatattaagtcagccaacatattactggatacagagcttaatcctcatctttcagatagtggattggcaagttatattccaaatgcggaccagatattgaaccataatgttggatctggatatgatgcacctgaagttgccttgtctggtcagtatactttgaaaagtgatgtctacagctttggagttgtcatgttggaacttctcagcggacggaaaccatttgatagctcaaggccaagatctgagcagtctttggttcgatgggcaacacctcaactccatgatattgatgcattggctaaaatggttgatcctgcaatgaaagggctatatcctgttaagtctctttctcgatttgccgatgttattgctctttgcgttcagccggagccagaattccgaccaccaatgtcagaagtggttcaagcactggtgcgattagtgcagcgagctaacatgagcaagcgaacatttagtagtagtgatcatggaggatcccaacgagggagtgatgagccagttctacgagacatctaaatcccaaagcaaatgtagttatatttgtaatataatttccaatagttgcaaatttgaagctcggtttaaattcatattctgttgatgcctactgtgtaaacgggtccaaatgtagattgtttaattctcaacgatagatgacgtcatatcatctctgttagttt

SEQ ID NO: 11438 - DNA, 1502 bp, Glycine max
  Clone ID: 701062577_FLI
gggagttaggttctgcacgctctgcttccagcgagtgttctttcttcgtttcaacaccttaatttgcacacgctgcttcttcagcttgagaaatggcacaagaaacctttctattcacatctgaatctgtaaacgagggtcaccccgacaagctgtgcgaccagatctctgatgcagtgctcgatgcgtgccttgaacaggaccctgacagcaaggttgcctgtgagacatgcaccaagaccaacatggtcatggtctttggagagatcacaaccaaggccaacgtagactatgagaagattgtccgtgacacatgccgcgaaattggattcatctctgatgatgttggtcttgatgctgacaaatgcaaggtgttggtcaacattgagcagcagagccctgatatcgcccagggtgtgcacggtcacttcaccaagcgcccagaggaggttggtgctggtgaccagggtcacatgtttggctatgccactgatgaaacccctgagtacatgcccctcagccatgtccttgcaaccaaactcggtgctcgcctcaccgaggttaggaaaaatggtacctgtgcttggctgaggccagatggcaagacacaagtaactgttgagtactacaatgacaatggtgccatggttccagttcgtgtccacactgtcctaatttccacccaacatgatgagactgtgagcaatgaccaaattgctgctgaccttaaagagcatgttatcaagcctgtcattcctgagaagtacctggatgagaagaccatcttccaccttaacccttctggccgttttgtcattggtggccctcatggtgatgctggtctcactggaagaaagatcatcattgatacctatggtgggtggggtgctcatggtggaggtgccttttcagggaaggaccctaccaaggttgacagaagtggtgcctatatcgtgaggcaggctgcaaagagtgttgtggcaaatggccttgccagaaggtgcattgtccaagtttcctatgccattggtgtccctgagcccttgtcagtgtttgtggacacttatggaactgggaagattcctgacaaggagattcttcaaattgtgaaggagaatttcgacttcagacctggaatgatcaccattaacttggaccttaagaggggtggccataggttcctcaagacagctgcttatggacactttggaagggatgaccctgacttcacctgggaagttgtgaagccactcaagtctgagaagcctcaagcttaagattgttgtgaagttaatcactcccttcaatggatgtcttgctaggtgtggatgaataatttgcgtgttccatgactactactacttcattcataggtctaatgtcatctcatcaatacttaaactgtttttttttttccttttctccttttactcacaatttattttttggttatgcaatgttaccgttttgatgcaatggaaattttatcagaattttgtacc

SEQ ID NO: 11439 - DNA, 1284 bp, Glycine max
  Clone ID: 701062991_FLI
ttcctaaactcttctcttctacactttgctctctaccctctttctttctctttctttttcccttccctcaagtactatcatacacaaacacaaggtacttcacatacccacatacacacacataagcaaaaactcttacttccctttttcaagttcttaaactcatcactacttaactcaggagtgtgcatattttcgttgtatggatggatccttctagtggacaacaccagcaaatgtctagccagtcattggagaacatgttggcatgttcaaaagcccaccaagagagaaaaccaacgcctcagccagaacaagctctaaagtgccccagatgtgactccaccaacaccaaattctgctactacaacaattacagcctttcccagccaaggtacttctgcaagtcatgcaggagatattggaccaaaggaggtacacttaggaatgtccctgtgggaggagggtgcaggaagaacaaaaggtcatcatcatcatcttcaacatcaaagagagttcaagatcaagcattcacaccaaatgttaaccctctcactggccttccttcattaatgtcttatgactccaatgacctcactcttgcattggcaaggcttcaaaagcagtcatgtgggcaattagggtatgatgatcatgatctttcaatgttggggaaccaccacacaaacaccccatgtggtgataatatccttggcatgcatcaccactcatcatcctcatccacaaacccagggttcttggatgccctcagaagtgggttccttggaacacaaagtaataataatatgcatcagaatatgtactatggatatgggaatggggacatgggggaggtggacaatggtggtggggttggggttagtagtagtggagagatgatgatgatgatgatgatgccttataataatgatcaagaaatgagtattgcatccacacaggcagtgacagtcaccaccatgaagcaagagacttgcaacggaagggaacaaaaggtgttgtggggttttccatggcaactcaatggagacacaaacatgggtgaacttgactcaggaagagctagtaattggaatggcatcaattcatcatggcatggacttctcaacagtcccctaatgtagacaacaaccacagggcctctactactgataattttatttccttaatttctcatgttttgttttactaaaaatgttattagtctaattaggattttcaatatccttttgagtgctgggttaattaattacaggggtttggttg

SEQ ID NO: 11440 - DNA, 518 bp, Glycine max
  Clone ID: 701063105_FLI
tgtcactcttggggaacatggttccagatactacaccaagagtttcaaaggatcggtagatgctttccatgtcaatacagttgatacaactggtgccggtgattcctttgttggtgctttattggccaagattgtcgatgatcagtccatacttgaagatgaaccaaggttaagagaagtactaaagtttgcaaatgcatgtggagctattacaactacccaaaagggagcaattccggcccttcccaaagaggaggctgcactgaaactgatcaaaggggggtcatagaatcttttggcaaaatgcaaaagtgctagcatgatttcgttttcttcccctaatgtttaaattttccgttggatttgcttgctataagtttaggagggaacttttgttttttctcctatgcactgttttcaggttttgccaaataacgctttctttcaaattttgagattagcgattgaatgaaaatttgaatcataagctcggcccatagttgcaacttaaacagctg

SEQ ID NO: 11441 - DNA, 1377 bp, Glycine max
  Clone ID: 701063184_FLI
attgaatctcagaattctctaaaagagatctttttctgctctttgaagaaagaagggtctttgcttgattttggagatgtctctgctctcagatctcatcaaccttaacctctccgataccaccgagaaggtgatcgcagagtacatatggatcggtggatcaggaatggacctgaggagcaaagcaaggactctcccaggaccagttagcgacccttcagagcttcccaagtggaactatgatggttccagcacaggtcaagctcctggtgaagacagtgaagtgattttatacccacaagccattttcagggatccattcagaaggggtaacaatatcttggttatctgtgatgcctacactcctgctggagaacctattcccactaacaagaggcacgctgctgccaaggttttcagccatcctgatgttgttgctgaagtgccatggtacggtattgaacaagaatacaccttgttgcagaaagatatccaatggcctcttgggtggcctgttggtggtttccctggacctcagggtccatactactgtggtgttggcgctgacaaggcttttggccgtgacattgttgacgcacactacaaagcctgtatttatgctggcatcaacatcagtggaattaatggagaagtgatgcccggtcagtgggaattccaagttggaccttcagttggaatctcagctggtgatgagatttgggcagctcgttacatcttggagaggatcactgagattgctggtgtggtggtttcctttgaccccaagccaattaagggtgattggaatggtgctggtgctcacacaaactacagcaccaagtccatgagagaagatggtggctatgaagtgatcaaagcagcaattgacaagttggggaagaagcacaaggagcacattgctgcttatggagaaggcaacgaacgtcgtttgacaggacgccacgaaaccgctgacatcaacaccttcttatggggagttgcaaaccgtggagcttctgttagggttgggagagacacagagaaagcagggaagggatattttgaggacagaaggccagcttccaacatggacccatacgtggttacttccatgattgcagacacaaccattctgtggaagccatgagcaaaacctgcatgttttctccctttggatggaaaggaacagttatgcttttcttagtaggatttggtctctctctctttttaccttttgattggtactatggttggtgccttgttggttggtgcaactaactggcaagggttgttcattgttttcttctattcctttccctcgttttccgattgttacaatgacaataatttaatggttattatcagtcttgaacaaag

SEQ ID NO: 11442 - DNA, 659 bp, Glycine max
  Clone ID: 701063210_FLI
gtgcttggtgcgaccaaatattcccgttcctcgggccttgactattgagccatatattcgcattcgcgcgtttccttcggctcttgcttccgtgacttgagaaaagagaattagggtcacgagggtttcatcctgcggcatcagacatgggaggaggcaatgggcaaaaggcaaagatggctcgcgagaagaacatcgagaagcagaaggccgcctcaaagggaagccagctggattcaaacaagaaagcaatgtcgatccagtgcaaggtgtgcatgcaaacatttatgtgcaccacatcggaagtgaagtgtagggagcatgctgaagccaaacaccctaaatctgatgtttatgcttgttttcctcatctcaaaaagtgaacatattggagagtgcaaatggagaaaaactttatatcatcatggcctcttccttaaacctattgacagagatcttccccattttctatctatataaaatgtgtttttctgtgtttgtgccttgggaatttaggagggacaaggagaggaagactattttattatgatttcccttgatgacaggacaagaaactgtgtgatgcttgtcaaggtgtaactgtttaatgatggttcgtgttaatattaaagtgttacagaaacttaaattctagtctt

SEQ ID NO: 11443 - DNA, 628 bp, Glycine max
  Clone ID: 701063243_FLI
gcgtttccgaacgaagttcagtcaggagcagaaggagaagatgcacaagttcgcggagaaagtggggtggaagattcagaagcgggacgaggatttgattcacgagttctgcaacgaggttggggtcgatagaagcgttctcaaggtttggatgcataacaacaaaaacaccttcgccaaaaaagataacaatattgttattagtaatgatattaatattactactagtaataatattaataccagtattattgatgataatgatgcaaatgggggtgatgtcaaggtttttgaaaaccctaacaacaaccatggtagtggtagtggtggtggtgaagatcctgctgaagatccgagtcgtaatcactatggtggggtgaatgttggtgctaacgggtcttcttctagttcttgatctaaggggaagagaagaagaataatgtgatagataggttaatgatgatgatgctgctactactggttaattaattagtagtttttaatttcttttctttttttgtttttaattgtttagtttttatattgtgaatgagaccaagatgatggatgatctatcagcttaattggagagaatgatatatccaaagggaaatttattttgattttt

SEQ ID NO: 11444 - DNA, 840 bp, Glycine max
  Clone ID: 701063302_FLI
aatttctctctcctctctctctctacaaatccttctttctttcttctcttcgctgctcactgtagccatggctttcagagtaggaggagcgggagggggaaatgcctcttctggcatgggtgttgctgagcatagtgtaaacaccttcctggaattgcagaggaagaaagttcatcgctatgtgatttttaaaattgatgagaaaaagaaagaggttatcgttgaaaaaactggaggccctgctgagagctatgatgatttcactgcatccttgcctgaaaatgattgccgatacgctgtctttgactttgattttgtgacatctgagaactgccaaaagagcaaaatcttttttattgcatggtctccttcagtggcccgcattcgcccgaagatgctatatgcaacatccaaggacaggttcagaagggagctgcagggcatccattatgagattcaggcaacagacccaacagagatggatcttgaagtcctcagagaacgtgcaaactgagcagtcacctacacaagaggcttgtgtctaggtgatgtagttagaatatctgaggcctcagggaatgatgttgactgatgataccctttagtttttctactatgatccctgtctgtttcgacctatttctcgtaaattagctgacttgtcatttatcaagtaaataacctgcacctgtgaaggctgatcaggggttcctgcctaagaaaccccactgcaggggaatttatgcttttccttattgccatgatgcttctcaggtgcagattaatacagtaatcgctattggaaattcgacttatattatatgaatttcaaatagacgc

SEQ ID NO: 11445 - DNA, 1550 bp, Glycine max
  Clone ID: 701063345_FLI
gaatgagagatagagagtagccaaaatgggcatatggagaaacgagatttcagaagaagcaaagaagcagctatggctatcagggccaatggtatttgtaaatgtcactggtttcagtgtgctgctaggtatgtcaagtgcacttgacacattttgtggtcaatcatatggagcacagcagtatcatatggttggcatacacatgcagagagccatagtgatcatcatgcttgctactataccaatgtcttttatttgggcatacttgaggcctattctggttgttctgcatcaagacaaaacaattgcagcacaagctcaactatatgccacatacttgatcccaagcctttcagccaacgctcttcttcggtgcattactaagttcctacaaacccagaacattgtccttccaatgatgctagcttctggattcactaccttagcacatgcccttctctgttggcttttggttctaaaatttgggcttggcatcaaaggagctgccattgcattttgcatttcaaattggcttaacacggtgctactagcactttacatcaggttctcctcttcctgcaaaagcacttggactggtttctcaagggaatccttgcagaacattcctcaatttctcagtcttgcttttccttcagcactcatggtctgcctagaacaatggacttttcagataatggtactcctatctggggctcttcctaatccaaaattgcaaacatcagtgctttctatatgctttaatacaactggtctgttttggatgataccatttggggtcagcgttgctgcaagtacaaggatatcaaatgaactaggggctggctgtccaaaagctgcatatttagcagttaaagtcaccttgttaatgtccttcgtggttggggctttaggatttattcttctcatggtcacaagaaacatttgggggcatatttttaccaatatacctgaagtaatccgttatgtggcatccatgacaccaattcttgcaagctctgtctttgtagattcaattcaaacagcattatcaggtattgtaagaggatgtggttggcagaagcttggtgcatttgtcaatcttggatcttattatcttgtggggcttccctttgcaattgtgttggcttttgtcctccatatcaaaggagaggggctccttttagggattgtgattgcacttactatgcaagtggtaggtttccttgtcatcacgttgcgcaccaattgggagaaagaagcaaataaggcagcaaaaagaataagaagcaacggagtgccaactgatgcaaatgcactgccaagtgaccaaaattaaaatcttcgacagttgaacagtaattatgcttagtgattctgattatttagaaaagcagtttttagtgaacatttttttggtacaactattttgtatataaaaggaaagtgccctcgtagattcataattgggctgttaaaatcaaaccaaagactaaattagcagtgggagaatgaatgattcacaatttaatagaatttcgtatgatattaat

SEQ ID NO: 11446 - DNA, 1256 bp, Glycine max
  Clone ID: 701063369_FLI
ataccccacaagctgctgctctcattcccttttccctccctattctctctcctactgttaacgttttctgtttttctttaagatggcgatgacgacaacgacggagtccgatctcgattacgagcttcgctatctcagtctcgccgtaaccgataccttcactgctttccaaaacctcttaccggatgcgatgacttccttttcagcttgtggactaatagaccctctttgttctcaaaacctcactcccaagcattccaccatcactgcaaccattgattctcagtcatcgatttgcgccactagtaatgttgggagcccagtctcagctaataaaccagagggcagagagaatcatacgaaaggagccacaagtggttcctctgagccatctgatgaggatgatgaagcaggtgcttgtgaacagagcacaaatccagctgatatgaagcgccttagaaggaaggtttctaatcgcgactctgccagaaggtcaagaagaagaaaacaagcgcaattgtctgaccttgagttgcaggttgaaaaactgaaagtggaaaatgcaaccctatacaagcagttcacggatgctagccaacattttcgtgaggcagatacgaataaccgagtgctgaaatcagatgtagaagctttgagagccaaggtgaagttagcagaggatatggtgactaggagctcttttactacgttaaacaatcagcttcttcagacacaacatcatcaaatgagcacaccccagcaactgaacacgactaatctgcggcgcatggcgcatgtttcgccaacaatcaccgttcatggaaatgatgtctcgtacaataatggtggacagaattcagcacttggaaacttggatatgagtttcaatgacatcaatgaagtcatgaacgatgctatgagttgtggaactatttggccactcgactagacagactctctctgtagcttccaattagatcgatccatcttttatattttacgtcttgtctaatttgattagtaggctatatatgttaatgtcaagctatgctatttgtcttcgcttgattcctctttaatgatgcctgtttaaaatggcgtcttctttcgttgtatgtagttttgtataaaaggacttgattgctttatccatttctgattgtaattgcaaaacaaaatgttttctaattagggtcatgccaatgcttatggagcatttggctgacaaaatataatacatgagttaattttgattt

SEQ ID NO: 11447 - DNA, 992 bp, Glycine max
  Clone ID: 701063373_FLI
gttagagatgacagtaaaactctacttcagactggaatttctcatgataaccacctggatgctttgggcttcgccttggagcctaattgttcacaaaaccgatcatctgcatgtgctacaacagattctctctgcgttcctggtgcagatatgcatcagcctttaatagggtatccttcaagtcgtgctgtaattcatcagaggattcagggcttttctaacatgttagctgagcatcaagcaaccagtttaggtaaccttgttgaaagtgatcatgattcagcaccttctccaatcaacacatcaggtgaaaaaaatttgacagattcaaaagaacttattactgttcctgaaatgggtatggaggcactagctgtactacctgtgcatcagaagtcaaagcgaactgagatcgcaccacgccgaattcgtaggcccttttctgttgctgaagtggaagcattggttcaagcagttgagaaactgggaactggaaggtggcgtgatgttaaacttcatgcttttgataatgcaaagcatcggacatacgtcgatttgaaggataaatggaaaacactggtgcacacagcaagaatatcacctcagcaaaggaggggagagcctgttccccaagaacttttggacagggtcctaactgcccacgcatattggtcccagcagcagactaagcaacagctcaagcaccactctacaaaaccttgccttctcctttaataaggacttgacaccaccacgtgcctttgttaaaagtgtcatttatcattttttcttcttcctgtatttatgacaaagtgtgtttatcactttgatttttagtacaatgtcacactttatctatcatgtaaaattagaacaaggtgatgcctatagagaatttgcgtcataggttttcactccaaagtcaaggttcggtgtgtaactggagtggaggggcacgtggatgcacgtgttgatgatagaagtttatctgc

SEQ ID NO: 11448 - DNA, 1132 bp, Glycine max
  Clone ID: 701063435_FLI
ctgaaatctgaagctaacttaagggaaatgagatggccaatggcaacactagtcatcgcttcaagctcttgcttttccttctaactctgcactcttcattcgctgagattttcttcgaagagagattcgaagatggatggaagagccgttgggtgctatccgattggaaaaggagtgaaggaaaagcgggtaccttcaagcacacagcaggaaaatggtctggggatcctgatgacaaaggtcttcagacatataatgacgccaagcattttgccatatctgcaaagatacccgagctaagcaacaaggacagaaccctggtgctgcagtattctattaggtttgagcaggacattgaatgcggtggcggttacatcaaacttctttctggttatgtcaatcagaagaagtttggtggtgataccccttatagtttgatgtttggaccagatatatgtggttcacagacaaagaagctccatcttatactatcataccaggggcagaattaccccattagaaaagatctgcaatgtgaaacggataagttgactcatttctatacatttattctaaggcctgatgcctcttatagtatccttgttgataatcgggaaagagattctggaagcatgtacacagattgggacatccttcctccaaggaaaatcaaggatgtcaaagcaaaaaagccggctgactgggatgatagagagtacattgaagaccctaatgatgtcaaaccagagggatatgattcaattccagctgaaatccctgatccaaaagccaagaagcctgttgaatgggatgatgaagatgatggactatggaagcccccgaagattcccaatccagcatacaaaggaccatggaaacgcaagaaaatcaagaaccccaactacaaaggaaagtggaagattccatggattgataacccagaatttgaggatgatcctgatctttatgttctcaaaccaataaagtatgtgggcattgaagtgtggcaggtgaaggcaggttcagtttacgacaatatcttaatttgtgatgacccacagtatgcaaagcaaattgtggatgaatttatggctaataatagagaggctgaaaaagaagcttttgaagaagc

SEQ ID NO: 11449 - DNA, 1049 bp, Glycine max
  Clone ID: 701063636_FLI
ctggtctaccaattgaccattctaacatggtcgatctttcaactcaaacttctggcactttgaccagggattggagcccaatgagtatatgtcctcctcatggaagggtgtcatcatcagtcatttccttattggaagcagttctagtaatgctcctgtagatgttggaggttttcataatgaatttggaactagtagaaatcctactgctcctcaaagttttcataataatctgactcaaactgcaagaggagttcacagtaactactctcaaagatccactccaacttttagggcttcttctagcttacgtttgggacgtgtggcaccttctgatgatggattgcatatggtgtccgaaagttactcttctagacagccaaggccattgaccaccgttggctggcagaacaataatagaaatggaagatcaagaatacctagtgacagatatcggtcattggatgatgagggtttcatgattgttgatcgcacttcactgtatggacctaggaatatgcttgatcgacatagagacatgaggatggacatagacaacatgagttatgaggaactacttgcacttggagagagaataggccatgtgagcacaggattgtctgaggatttgatttccaagtatttgacagaaacaatatactgttcatctgagcaaagtcaagaagaagaagcttgtgcaatctgcctggaagaatacaagaacatggacgatgtcgggacgctgaaagcttgtggacatgattaccatgtgggttgcattaggaagtggttgtctatgaagaaagtatgtcctatatgcaaagcttctgctttgcctgaggataagaagggcaaataaacaatttattcattatactttagtttaacgtatatcatcattctgtacatatatttggatattccttgaagtggagaaaacagacttccatttggatatgttgttgtaatagctaatgctatactctatctatatgtctatgaattcgttctctttggcttcactcttaatttcgtgaagccttgaaatt

SEQ ID NO: 11450 - DNA, 493 bp, Glycine max
  Clone ID: 701063710_FLI
cgtttttgttttcagaccaaaccctagctccgcatcgcaaccatgtcgaccaagcaaggtggaaaagctaagcctttgaagaaacccaagtctgataagaaggattacgacgaggttgacatggctaacattcagaagaaaaaggaagaggagaaggcgctaaaggagttgaaagccaaggcgcaacagaagggaagctttggaggttctgggctcaagaaaagtggaaagaaataagggctctttatcatgattgtatacatccaatattgagccctgtagtttattaccatgataacttctgtcttattgtggccttctttattgctctaatgttagtactgaactgaggtatttcgtgatgtaagctgcaacaagttacttgtttgtagctttattgtgtggcccttcatggggttctgataattacatcctattagtagtgctgtggatttggcatagacttgttcaagtaataatgacttggcttgcg

SEQ ID NO: 11451 - DNA, 907 bp, Glycine max
  Clone ID: 701063748_FLI
aataacatgactctttatttataatgcaggagctattatagatgcacgagtcagaagtgcggtgtaaagaaaagggtggagaggtcattccaggacccaacaattgtgatcacaacatacgaagggcaacacaaccatcactgtccagcaactctgaggggcagtgctgcaagcatgttgtcatcaccttccttttttggttcctcttatatggcgtcaagcttaccccaagattttcttgctcagttggttccaagttatagccaaattaatgatcaccaaagtccaatgtttcaccaaaacctttcccataatctccatccacagcctcaacagcagcaccagttccaactctctcatgaccatggtttgttgcaagacctactaccatcattccctggcaaacacgagccatgaactcactaaaaacctagtgcatgttttgatttatttattttaggaaaaataatggttttatatttcatcactactagaaaaattaaaattagtaacggaataatctatgtaggttttttaaaaaatccgttactaaaatttggtgatctgatctcaaattaattagtgaaggaaaattaattttctatcactaattttgatcaccaatttattgatttttagaagtatttctaggagtttttaaaagaaaaaacaattgctttttcaagataaaccagaatcaaacatgcacttaacccatttctattagcgtatggtggagcttgcagtgtattgcacactgtctatatataagtatgtgtagtaattaagtagtagtagattccctcttggttaattacctcctctctttaagtcacatgtatgtacctagatttgtatggaaatgaaaaacattgattattcttaaatgagtatttagaattacttc

SEQ ID NO: 11452 - DNA, 1043 bp, Glycine max
  Clone ID: 701063804_FLI
caagaatggcacttcgttgcttggtgatgtccctttctgttctcttcactcttggtcttgcgagagaaagccatgccagagacgaagatttttggcatgctgtttggccaaacactcccattccaagttcattgcgagatcttctaaagcctggccctgcaagtgttgaaatcgatgatcaccctatgcaaattgaagaaacacagtacccgaaaaccttcttctataaagaagaccttcatccaggcaaaacaatgaaagtacaattcagcaagcctccctttcaacaaccatggggtgttggtacatggttaaaggaaattaaagacactactaaagaaggatatagttttgaagagctatgcatcaagaaagaagccattgagggagaagagaagttttgtgcaaaatccttgggaacagtaattggttttgccatttcaaagctgggaaagaacattcaagtactttcaagttcctttgtcaataagcaagaccaatacactgtggaaggagtgcagaatcttggagacaaagcagtgatgtgtcataggctaaatttcagaactgcagtattttactgccatgaagtccgtgaaacaacagctttcatggttccattggtggctggtgatggaaccaaaagctcggtactcttctggtatttccatcaaatgcttcatcaacttatgggagttgatcctggaactaaccctgtttgccatttccttggaagcaaggccattttatgggtacccaatttatctgtggacactgcctatcagaccaacattgttgcttaattagtccatgcatcttgagcaccatgagaatgagattgtgtataaaataaattatcatgtgctgtgtgttgtgcaagtactaccttctctagctagattgctagagctagaatttcaacctacctatgtgtactgataagatctgcttccctacttaaagagagcatcatcctgtgatcagtgtgcttcgtattctctctctctatatatatatggtaaaaagtggttatctcgtgcctc

SEQ ID NO: 11453 - DNA, 1330 bp, Glycine max
  Clone ID: 701065355_FLI
gtgccgttgtactgatcctggcttgttgctgccgcgggccaatctcacattttggaggaatggtagtttggtgagagaaaggaatgccatgctccctactatttcttccaaggattggttagacattgattttggtatttctgagggtgttgattttattgctatttcatttgtcaagtctgctgaagttattactcatcttaaaagctatattgctgcacgatctcgtgatagtgatatttctgtcattgcaaagatagaaagtattgactcattgaagaacttagaagagatcgttctagcggcagacggagctatggtggcacgaggagacttgggagctcaaatacctttagaacaggttccatctgctcaacaaaggattgttcaggtttgcaggcaattgaataagcctgtcattgttgcctctcagctacttgaatccatgattgagtaccctacacctacaagagctgaagttgcagatgtttctgaagcagtcagacaacgagctgatgctttaatgctttctggtgaatcagccatgggccagtaccctgacaaggccttaactgttttaaggagtgtcagtttgagaattgagagatggtggagggaagaaaaacgctatgaagctatgttgctcccatcagttgggtcttatttttcagaaaagatatctgaagaaatctgcaattcagctgctaagatggccaataatttagaggtggatgcgctttttgtgtacacaaagacagggcacatggcgtctctattgtctcgttgccgtcctgactgcccaatctttgcttttactaccacttcatctgtgcgtaggcgactgaatcttcagtggggcttgatacctttccgcctgagcttcacagatgatatggagagcaatctcaacagaaccttttcattgctcaaggccagaaatctgatcaaatctggtgaccttgtcattgccgtctcagacatgttgcagtcaatacaagtgatgaatgttccttgagaacatgtttcatttcttttgaaagccaacattgctgcttgttcaaaacctgggatgctgctagagtgctaaaatggggcagagactacatgaatgaattttgttcgttctgtcattttaatttataggacacgacagaagtttgggagagttaatattatggccttgaagttcttagttttaatgcatacaccttcaagctctagatatcttttttagtcgagtgaggcaatagtgtaatagctacccttttaagttgtaaggcacacatttgcattttccatgttttatatcattgcattagctttccacttc

SEQ ID NO: 11454 - DNA, 1173 bp, Glycine max
  Clone ID: 701100555_FLI
ctttctctctcttcaaatcaaaacccatcacaattcacaacaacatacaaatcccaaatcctatcttttctcttctcatataaaagaacccttctttcgaatccttcccgctcttttccctctgatttaattcatgcgcagatccaaaccctaatccatctctccgagaaatattgtgtccacagtcaatttggactgtaagttggacctcaaaacaattgcacttcaagctcgtaatgcagagtacaatcccaagcgttttgctgctgtcattatgaggataagagatcccaaaacaactgcacttatttttgcttctggcaagatggtttgtactggagctaagagtgaacaacagtctaaattggcagcaaggaagtatgctcgtattatccaaaagcttggcttcccagccaaatttaaggatttcaaaattcagaacattgtcggctcttgtgatgtcaagttccccatacggctggagggtcttgcatattcccatggtgctttctcaagttatgaaccagagctgtttccagggctaatctaccgtatgaagcaacctaaaatagttttgcttatatttgtctctggaaaaattgttctaacaggagccaaggtgagagatgagacttacactgcctttgaaaacatatatcccgtgcttactgagttcaggaaaaaccaacaatgattgtaattcaagaaagagcaggagcagtggtttggcagagaagttcgtggaactgtaaatattaagacaaaggatataatctagattgatataaattaaagacagccgtttgtgttgccccttgtctttgtttttttgatttgtcttgatgtagtaaagtggcagacgttgtctattgaattgacatttttgaaaaaaaaaaagagaaaagaggattttgaggtgtcagaaatgaggaaaaaaaaaagtggagctaaatggaaaaagtagcacattgagtcctgacagtagcttgaaaatgttttgataacttctactatcaattgaccgtagtgtgatctaactactgagtagcattgaatatcttgatcaacaaatcgaaaatttgagcctgctaaatttgtaatcgttttcagaatttggtttacattgatagatggaactacttatttagtattttggaccttgattttttggtt

SEQ ID NO: 11455 - DNA, 540 bp, Glycine max
  Clone ID: 701100632_FLI
caaaatttggcatacgttcttttgcaacacgtttaggtaaaaaaaaggtattttggatttgtgtttccctattcgaagtggcttttggagttgtcctcctcgcaggagcatcatcttcttctcccctctggattaaaattattacgggtctaggaagtattattcctgctacaattctctggtaccagaccaaatatgtagatttgtcaagtccagattcgaccagatccttctatatgctgaactggaagttgttgaacgtagcattcttgttcctgcctttaattagataaggatgacactgaagaccaagacaatgttcgtaaagcgtacaacaaaatagtatagatcttttgcacctaaatttattaaaacaataaaaatcattagatttgtgttccatagatataagttcatgtatcattaagatttttctttacttttgtcgaagattttatcatctgtatccataccaacattggccttgattgtcatatatttcataagtggaacaagaaaatataaacaacttgttatact

SEQ ID NO: 11456 - DNA, 1133 bp, Glycine max
  Clone ID: 701100860_FLI
tgagagtttccgtagtctgtttcgatccatcattcaaaaagtcatggaggtttatcaacctgaggcagttgttctacaatgtggagctgattcattgtctggtgacagattgggttgcttcaacttgtctgtgagaggtcatgcagattgccttcgttttcttagatcgttcaatgttcctttaatggtcttgggtgggggtggatatacaattcggaatgttgcccgttgttggtgttatgagacagcagtggcagtaggagtggagcctgataataagttgccttataatgaatattatgaatattttggcccagattatactctctatgtcgatccaagcaacatggagaacctaaacacatccaaggatttggaaaaattaaggaacacactactagaacagatttcccgacttccacatgctcccagtgtaccttttcagacaacaccacctaccttgcaacttccggaagaggcggaagagaacatggatagaagaccaaaacttcgcaaatgggatggtgaagattatgattctgatcccgaagaaggtggaaaggataattccaagttctcaaacatcactgcccatatgagggacattgcagatgaaatggaagaagagaagccagaagagcatccatcatcttgtagttgatagaacagagcaagttcttgcacagcatgtttgtattgtaatctttatcgtatactattctgtttatgggggagatcattgctaaatagtacacaaacaacacttgagaatgcaaatataaacaacacattgtgcaaatgtaatatagtgtaaaacattgttttggtctccctcgtaaactatttttgtttatttaagtcattttcttttatttggtccctgacttacacttagtttcgttttagtctcatagtgaatttagtttattttgaatattttcatttgtgcatattttcatttggtcaaatggagacgtcactttaattttggttcatgtatatttcttttacatgtatgatgaggatattaaagaaagtgatgaaggggcaaaatgttgttttcttgttactatttcatttttgaaagattcttatgtataatccaaatattttaattaaattgttagttaatt

SEQ ID NO: 11457 - DNA, 991 bp, Glycine max
  Clone ID: 701101450_FLI
caatcccacacgcttcttactcctctcataacttttctgctccccgttgagaaagatttgaatccaaaggaaaaataacgctaatggctccaagagacagccgagccaccgcgctcattgggcccggcccaagcctatcaccggcccacaaagagatccgctacagaggcgtcaggaaacgcccctggggccgctacgccgccgagatccgcgatcccggcaagaaaacccgcgtctggctcggcactttcgacaccgccgaggaagccgcgcgcgcctacgacaccgccgcgcgtgagtttcgtggcgccaaggccaagaccaatttcccgacaccctcggaactcatccttaacaacaacaacataaacgctcgtagtcccagccagaccagcaccctcgactcatcctctcccccgccaccgccaccgctagaccttaccctcacccctctctcctccgctgtcttcccggtggcgcgtcctgttctattcttcgacgcattcgcgcgtgcggacaccatggtcgccgtctcgcgccgcgagacctgcggcttcgaacgccccgccgccgatttccgccgcggcgactccgactctgattataaccgccgcatactcctggatcttgacctgaacgtacctcctctcccggaggttgcctgattcatgcagggagttctgtttttttcgcaattattgtttttttggttttttaagcatctgggaggtactactacgcatcttttttgacgaaagtgccctcgagggagcagcaaagtgagtagtggatgacatgatgctcggatttgttgaccattttgtgatgatgaagatatataaccggcacgttatgtaaatacacgttataaccgaaagcaaacgtgcttttgcttggttgcttttttttttgcaactgaggactcttattcagagtatctcatggttgtttctgcaatttctcaaaatatataaatattccaatttccatc

SEQ ID NO: 11458 - DNA, 1497 bp, Glycine max
  Clone ID: 701101540_FLI
gaaaaggatcttgcctttgtcacccaagccaacaaatcaagatgcatatttgctcgctccaaatatgttgaggtttgaagatgtcactgccactaccctcactattattttgggttctgaagaaccctctggtgaaattcttgctggttacaccttgtggcatcgcaaagttgatgatgtggactatcccatggacccaacttgcacctcgctcttaccaaatagaaggttcagtgtctcgggcctaattccaggtacagaatacagtttcaaagttgtttccaatgatttgagggagtcaggtatgtgcgaagttcaagtctcaacagagcatggtgaggaagaagtccctaattgctcagcaactgaaagaagtcagagcccggtaaccaactgtagcagcctttccaatccatcatccgtggaagatgaaactaataactgtaatccatatagtgacctgactgataaccgagcagaccattatccttcttatcacaaggatagcaacaaacttgcttctggaaatttatccaatgatgctattaactgttccaatctaggtggtgcgggacttcctcctgatgcagattctttgtcagacaaacagcatgctggaggaacgactgcctccatacctagttctgatgtgctaaagctcgaaaacaagcattcaccagaggaacaaatcactgaggacatgagcaccgatgatgggttgatttccccagctctaacagggagggaatgtgtgccgttagtgggtagctcggaaggaggcttgcctaatactccctgcaagttggaaacacttaaggatggacctggaaagaataaaagatctaagtccagtggcaaagatcaagaaaatgtatccgggaaaagggagggtccccaagatggaagcacatccaagaagagaagtggagaaaggcaagaggagggccgtgttgcaaatggcttttcggatcgtgattttgagtattatgtgaaggtgattaggtggttagagtgtgaaggtcacatagaaaagaacttcaggcagaaatttctgacttggtacagcttaagagccacccctcaagaagttaggattgtgaaaatatacattgatacatttcttgaagatcctgcatctcttgcagagcaacttgtggacaccttctcggaatgtttgtccagcaagagaacatcagttgtgccagcggggttctgcatgaagctttggcattgaccagattttgtaggtccagctactagccgcaagcttgccatgcagtaattctttagatttttaatatattcttcatttagacagttcaaatacatatatttatttcaacattatcattcatatgatgatgtaagaattttagatttacttttattatacaattactatttaaattgataatttttttccaatttgcaactcggtcatcgatacactttttggtaggtaacattgaagaatttatactaaattaatttatctat

SEQ ID NO: 11459 - DNA, 1195 bp, Glycine max
  Clone ID: 701102005_FLI
cttcatctcccaagggattcaatacaataccaggctagaagaaactccactcatcaccatctcaagcaactaattaacaagctagtactctttgagtgtttggcaattggcttagatttcttgtacttggaacaagatggaaagcactgtcacatttgagactgatctcaacctcaaggcaaccgagcttagattggggcttccaggaacagaagaaattgttgaaaaaccacttcctgcaagtgctagaattaccaacaaaaggcctttgtctgaaacctctgaggagtgtgcttcaaagggttctagtgctccacatgtggaaactgaagcagcccctcctgccaaggctaagatagtggggtggccaccaatcagatcctacagaaagaacagcctccaggagaatgatggtgctgggatttatgtgaaagtgagcatggatggagctccttacctcagaaagatagacttgaaggtctatggaggctacacacaactcctcaaagctctagaaaacatgttcaagttgaccataggtgagtattctgaaaaagaaggttataagggatctgactatgcacctacatatgaagacaaagatggtgactggatgttagttggagatgttccatgggacatgtttgtgacttcttgcaaaaggctaagaatcatgaaaggatcagaggcaaggggtttgggttgtgctgtatgagaaaaccaaaccactaaaaattactatgagcagagaattaaaaaaagtgttttgggggtgaagggaaaaacatgctgaaaagcttgtgttctcggatctgaagggttttgacttttgaaatcactctagtgtgtgcttttggcatacctttatatggagttatactctgaagcaggagaagatggaagatacggtgcagtttcgatcttcctcaagtttggcaacttttatggttattattttggcatctgtggttggatgctatgcttatgatgttgtttccactgatcctttttgaagtttcatgtgagaaatcttagagatttcaaatgaaactttgtgtagaggagagatagaaaattaaaggttatatgtaatattgtttaatccaagttttttggttgtgttgatacaagaatacaatgtaatatactaagtgttggtatttgcctgtgttattggatggactcaattaagtat

SEQ ID NO: 11460 - DNA, 1320 bp, Glycine max
  Clone ID: 701102007_FLI
gatttcaatcgttgttctctccgaaaacttcgcttcttcctcgtggtgccttgaagaacttgtgaagatccttgagtgcagggaaacaaagaagcaactcgttattccaatcttttaccgcatggatccctccgacgtaaggagacagactggttgttatggggagagcctggctcaacatcaatatgagttcagaagcgactccgagaaagtacgcaattggcaggaagctttgactcatgtcgccaacttgcccggatggaggttcagccggtaccaatatgaatatgaattcatcgaagacattgtgcgacaagccatcgtcgccattgtaccccgctatagcatttttctgagttttagtggaaacgatacccgctcctttacaggttttctcaacaatgcattgtgcaggagtaggtaccaaaccttcatgaatgatggggaccaaatttcacaatctactaatggagttattgaagaatcaaggctttcgatcattgtattttctgaaaactatgcacgttcctcgtcctgtcttgattttcttttgaccatccttgagtgtatgaagacgaaaaaccaactggtttgccccatcttttacaaagtgttaccgtcggatttaaggcatcaaagaaatagctatggtgaagccatgactgagcatgaaaatatgttgggtaaggactctgagatggtgaagaaatggaggtcagctttgtttgatgtcgccaacttgaaaggattttacttgaaaaccgggtacgaatatgaatttattgacaaaatcgtggaaatggccagtaaaatttaaaatggcttaaatcgatcaggtcctcgctcaagtgtcaactagaaggaaatatagactgaagtgccgtggaaggcagaactaatcaattcaacagattacaaatggttctatgagcagtcataagctcacagattgatactagtagttgtaatgtttacaatcggcactgaggaattgatttggaagtctgaattttacttcgaacattagcaatttctagaaaggtgaatatataagtcctgagggccatggccagaggcctgtcatcttgaaattgtgacacacactctcgtttaagtcatatttactttgatttcccaaatgtcatgcatatccaaacaattgtatgagctagattaaggaagctttagcattaaacagagtggagccaaatacccagttaagatgctgaatgatgtctctgttcagaatcaaccgacatagttattcatgatgtatataatcgaatttcgaaagacacaccaaacatatccttgcatgat

SEQ ID NO: 11461 - DNA, 878 bp, Glycine max
  Clone ID: 701102051_FLI
cgacaactctatctttctttctcattcggccaaaatggccaagaaggtttaccctcaggatcccacttcctctccctgcatgtcccatggaccagaaacatataccctttggatgaaatcacttattctccactctaacggttgcaccgtctatgattcaaatggtgtcatcgtttatcgcgttgataactatgacacaaagggtagaagacacgttaaccttttggatctgcgaggcagagttctctgtaccatacacaagaaactacttgcttttggacgttgggatgtctatagaggtagtgataattctaacttcaaaacccaggagaagccgtggtttcaagttaaaagatgttataagatggtcacaagaaaaataacgtgccagattacagtggagtgccaaaagtactgcataaagaaaatcggtggcaaaacaacatttcagattgtcaacatagatggagacacggttgccgatgcaaagcaaaaacactcgtcatcgggagttgtgctgggtaatgatgttctaacgttggatgtggagggcggaatagatcattctctcataatggctcttgtcattgtgttcggattaatctgcggcagaatgtgattttgtgaatagtatctctctctatatattatatatatattctgagatcagcatgcactctcatggcttcgctgtatctgaaacctgattatgtaatcctcatcgttgcttttctaaattttctccaaataaacagttttgtagaccgtatttgactttatttttattactgtacatacacagaagactgtgatgagttccgttaggaattcggtattatagtgaatggtgatgaatttggatacgtttctcttttctc

SEQ ID NO: 11462 - DNA, 502 bp, Glycine max
  Clone ID: 701102059_FLI
ctaagaagagctataatgcgacttttggaggacagcatggctgagaagatgcttgctagagagattaaagagggtgactcagttatagttgatgctgactccgatggtaatgtgattgtgctcaacggtagtagtggtgccccagattcattagaagaagctcttcctgtgtaacgtggttgtcttagttagttgagttgtatttttttctctcttttatttgttaaaagaaaacatagcaatagtttgtttaagttgccaatagacatcaagcttttaattgaatgctgatggcctcagccacgtttgcccataacataatgaacacagcaaggtttgggtggaatgaaaaaatgacattatttctgttggtcctacccttgatatgttgcattgtgaacaattttaatttattgaaagcaagttgttttgtagttttcaccgttctgtaaacttattgttatagcttcattttaaataagttgcatgacatccaatgatc

SEQ ID NO: 11463 - DNA, 655 bp, Glycine max
  Clone ID: 701102158_FLI
tgaagtgttcggattgcggcggaggagaagaaggttgttccggcgaaggggaagcactaccgcggcgtgcggcagcggccgtgggggaagttcgcggcggagatccgcgacccggcgaagaacggagcaagggtttggctggggacgtttgagacggcggaggacgcggcgttggcgtacgaccgcgccgcctaccgggtggggacggtgcaagagcaagtggggagtcaagtggcagagtgtacacgtggcgagcagttattggttagctgaggtggattctaaaactggtgttgtgtttattaaatacaataaatacaatacacttttgtaattatgtgatgtgcgtgtgtgtgtaaagcacttagctatattatagccatcatccaactcaattttggaacaaagaaaaaaaggtgaaggatgaggatagatgattttagcacatcaaatggtgagtggtgtgaccccacgggaagaaaaaaaaaaaagagggggagaaaaaaattcaaagaagttatggaatttggaagatgatgaggaatgacggggtgaggaactgaggatatgtaatttggctttgtgaatactaccaaatttgttatttgtttgttcaacattatgaactatgaatgggttaattgttaattgcttg

SEQ ID NO: 11464 - DNA, 757 bp, Glycine max
  Clone ID: 701102430_FLI
gtgacgtgccctagccccatatctagtctccctctctcaatctcacatctctcgtcgccaccgccgcgccgcacggaggcacccacggaaccaatctagccatcagttgaaacagtgagcttacaaaaaatggcaactgcacctgcacaaattcctacaagctttggccatgagttgagggcttgtcttcgttgccgccttgtcaaaacctatgatcaggtcttagtaccctactaccctttatttttcatcattgttttttgtttacaatttctgtttttgtttcacagttcagagagtcaggctgtgagaactgctcattctttaagatggaagaagatcacgagcgtgttgttgattgcactactcccaattttaatgggatcatttcagttatggatccaaatcggagttgggctgcccgttggttgcgcattggaaagtttgttcctggtgtttatactcttgctgtctcagaggctcttcctgaagagatgcaggctatatgtgaagacgagcgtgtgcagtatatccctcccaaacgtttgtgaatgacgtaaatattggttttcatactctagtgtgatgggaattgtctggatgaaggtagattttaatgcatttgctaagtgacttcttagaattgcccgagctttatgatgtgtttttcttctgatgaagaaataaattgatgacgagttattatgtactatggagagatcatgaatcaaacattatttactgcgtttttgggcct

SEQ ID NO: 11465 - DNA, 881 bp, Glycine max
  Clone ID: 701107524_FLI
gttcttgaggtgttagaggattttccttctgtacaaatgccatttgagtggttagtccaattggttccacctctgaaacctagagcattctccatatcttcttctcaatcagctcaccccaatcaagtacacttgactgtgaatgtggtgtcttggacaacaccttacaagaggaaaaaaaaaggactatgctcgtcgtggctagctgcattagatccctgtgatgtaggtatccatgttccaacctggttccataaaggtttacttccgacaccatcaccgtcactccccctcatacttgttggacctggaacaggatgtgcaccttttcgtggatttatagaggaaagagcagtgcaaagtagaactaattccactgctccaattatttttttctttggttgttggaatgaagacggtgactttctgtatcgtgatttttggttgagtcattcacagaacaaaggggtgctttcagaagcaaagggtggcggtttctatgttgctttctctagagaccagccgcagaaggtttatgttcaacataagatgagggagcagagccaaaggatctggaacctattagctgagggggctgcagtttatatagcaggttcttcaactaaaatgcctgcagatgtaacatcagcttttgaggaaattgtatcctacgaaaatgaggtttcagcagaagatgcagttaggtggattagagcattagaaaagtgtggtaaatttcatattgaggcatggtcttagaacaaacaagtcttggactcccgatttttagaccttttgtagtgcaatttttgaccaatgaatatttttttgttataatgattattatcatgtggtttaatggcaattttgttctttcattt

SEQ ID NO: 11466 - DNA, 1193 bp, Glycine max
  Clone ID: 701120878_FLI
gaacttagattgttttactgttaacaccattcctaggtaccatctgcaccaccctttctccttcttcttcaatcaatggcagcaacctcaacatcactcttcttctccaatctccattctctcaaccctcaacctttctcttcctcactctccttcttccgaaatgtccattccaccctctctttcccttcctcttctaaaccctcccgtggcgttgttgccatggctggctctggcaagttctttgttggtggcaattggaagtgtaatgggaccaaagactccatcagcaagcttgtctctgacttgaacagtgcaacattggagcctgatgttgatgttgttgttgcacctccctttgtgtacatcgatcaggtgaaaaactcaattacagataggattgaaatttctgcccagaattcttgggtgggaaaaggtggggctttcacgggagaaatcagtgtggagcaactaaaagaccttggctgcaagtgggttattcttggacattctgagcgaagacatgtaattggagaaaatgatgagtttataggaaagaaaactgcctatgctttgagtgagggtcttggtgtgatagcatgtattggggaacttctacaagaaagagaagctggtcaaactttcgacatttgtttccagcaattgaaggcttttgcagatgcagtgccaagttgggataatatagttattgcatatgagcctgtatgggcaattggaactggcaaagtggccacacccgagcaagcccaggaagtccatgcagctgttcgtgactggcttaagaagaatgtctcagctaaagttgtatctaaaacacgaattatttatggaggatctgtaaatgcaagcaacagtgctgagcttgcaaagcaagaagatattgatggatttcttgttggtggtgcttcattaaagggtcctgagtttgctaccattatcaattcagtcacttccaagaaagttgcggcttaattacttattatgtttttttaggagcgcattaaaaatatggcaatgacatgggtgtattatgagttttatttttatcacttctatagtcctatggctatgatgcatgcgtttagtttggtactttagcttgaagaaataatcgtttatttttgtcagcaccttaagagaataactttttgcaaaataaatgattatttctc

SEQ ID NO: 11467 - DNA, 942 bp, Glycine max
  Clone ID: 701121746_FLI
gtctgcaccaagttcagctcatgatgagcaacctcctgtgaaactggagttttttcacaaagaaagtgtttctaccagagatgatgcaacagaagaatcatctggtcgtactctcaaactttttgggaccactctactggtaacagacacatgcaaaccttcttctccaacaacggagccgtgcaaaccaacacctgcggctgcaatgtatcttatgcaacttcagaatgtttgttcagatgttacagaaggtcatgcttctattgttccttggtggactcttccccacaatactccatttatgccactgcacaaggagccaaaagggaagcatctatattctaatcttggagagtttgaacataaagaagttcaaaaggaaggatcatggactggttcaaacactagttcaattgatgatggagataacactgaaaaatcagatgatcaagccaaaagtcatgtacatggttttagcaaaagtgaaactttaactatatctgagctaagggtgaggcctaaaacatgtggaaaagggtttgtaccatataaaaggtgcatggcagagagggaaaaccagtgctcatcagtatattatgaggaaagggaagagcaacgtattaagctttccttatagtaccctcttattggcttttcttcaaagcagtttcccttttacaggtataatgtacctgtttctgttgctggatgaccttgcatgagaagaaagataagggagctgaaatttttgatatttctactgcattgttaattctccacaagcctgtgtgttaacctatatgagcttcaagactttgggagaaacactatccagtgaattatcccacctttttatatttcttcatgcctaggccttttgtatttcttcaaattctttctcccaccctccactcggatatatctagtgctttttttcttttt

SEQ ID NO: 11468 - DNA, 1009 bp, Glycine max
  Clone ID: 701122290_FLI
aaaatgaaagaccttaaaaaatacagagaaatgtgggagcatcaaaacgttggtttctacgatggcttcagggagcacaagaaaaaagaggacttcaaggcaaatgtgacaaggctagagttggcaagtgtgtgggacgagatcatggaaaagctaagaagttaccaactcccagatgagtttgaaggcaacaaagaatgggtagatcttggatcaaggtttcgacaactaatggagcctctagatattgccaattattaccgtcatgcaaggcattacgaggatggttcttcttcttacatgcttaggggaaggcctaaacgatataggtacacccaaaaatggttggaacatgctgagagaaggccacaggaacctagctccacatcttgtttctgggctgaggtggaggatcttcgctacaaaaccagttatagtaatagctcatcatttgaagatgttaaggaaagggttgagcaattggaggctcaattacaagcatggagcgaaaagggggagttggctaatgatgtcttcttggagggttctaccttggtcaagtggtggaaaactctacctctacaacacaagcaacaatcatgcattagaaatctaataaatgagtgacagatcaagacaaacatgcattaggctgtgtttttttttttttttttcacattcaatcatgtcgaacatcaaagctctctcacaaaaactacgttcaacatacttcggaatgtgtgatatgtgtaaaacaaacacacacttaaatgtcttcttggagggttctaccttggtgaagtgtgttggctgagtgaacttttcttatttctcttatttattgtattttattttcatgcttctttctattgtgtgttatgtaataaacatgtagtttcttctacgttctctatctatctgaaaacaaatgggtattgaatatgtactatcgatgacaggtgaacgaaatggctttgtaattattattgtatagttctgttttggtttc

SEQ ID NO: 11469 - DNA, 1277 bp, Glycine max
  Clone ID: 701122936_FLI
gggaggcatcactgctctgcatatggcagcattaaatgggcatgttgaaagtgtacagttactcttggacttgggagcttctgtgtccgaggttactgtggaggatggaactaccattgacttaattggttctggaagcactccactccattatgctgcatgtggtggaaatcaacaatgttgtcaactgttgattgccaagggtgccaatctgactgctgagaatgcaaatggatggacccccttgatggttgctcgttcttggcatagagactggcttgaggacatcttaaaaacacctccagcagaccccttacaagttcttccttctccatatatatctcttccacttatgagcattgtgcgaattgctagagaatgtggatggaggacaaatgatttagcaccatgcttagatccatgcgctgtttgtttggaaaggaaatgtacggtcgctgtagaaggttgtgatcacgagttctgcacacaatgtgccttgtatctttgttctacaaactctacttcaacaaccacaacaggacccccaggttcaattgcatgccctctctgcaggcacggcatagtctcatttgtgaagcttccagagcaggaccactacacaagggaaatgcaaaggacatcaaacttgtccctaacattttgcacatgttcaagtgaggtattaggggattccagtgacatgaccaccccattttgcaaaccaacttcccgtgatccaaaaattcttccccttcaagatcatttcgctccattagctgccaagggttcccctcattcagaatgaaccccagcctttgcttgggagcagatgttagcccctccttagtgccttgcactgtgggcagaaacgtgaggaaccacttggcaaggtgttctggttccagtttcagacgatcatcttctcaaacagaaagaaggaagtcatcatggttttgttccctcaatcaatctgttgacacaggcagtggatgctgattacattttggtctttttctttctcaccccaacattataccccatgattccaaatatcatccactgttcactacatttctacattgattgtaaataccaagcccaattgttttcagctgggacaaatttcttttttggcaacatatttcacaacacaatttctacaagtctcatgcttggtgcacgtaaatgcaaactgctctatgtggaattcatggcttataattatcaaatagcaaacctgtaaactagttgaaggaaaaatcgtattgttttgtccc

SEQ ID NO: 11470 - DNA, 1369 bp, Glycine max
  Clone ID: 701122944_FLI
agggtccatggtcgccggaagaggacgtcattctgagccgtctggtgagcaagttcggcgcgagaaattggagcctcatcgcgcgcgggatcagcggaagatccggcaagtcgtgccggctccggtggtgcaaccagctcgatcccgcagtcaagcgcaaacccttcaccgatgaggaggaccagatgatagttgctgctcatgcaatccatgggaacaaatgggcagccattgccaggcttctaccaggaagaacagataatgcgattaagaaccactggaattccactctgaggcgtcggggagttggacatgatacgattaaattagaatctggcagcttcatggaagatgttagcttggagaaagcaaaagcatcatcagaagacactctatcatgtggggatgtttctttgaaatcctcagaagggagagatgtcagttctatggagatcatggatgataaatctgatggcaaagcacaaactgagggtcaattacaccatgaagtcaaggacccacctaccctttttcggccagtagcacgcgtgagtgcttttaatgtataccactcatttgatggtacgcagccttcaacatcaattccaagatctgtttcaatgcaaggacccgttttacaatcatcaaaaccagatatggaattttatagagcgcttgaaggaatttttggtgaccagtcagtgcctcaccagtgtggccatggctgctgtgctgctccaaatggtagaaagtccgaaagctctttgttgggaccagaattcattgaattttcggaacctccatctttcccaaattttgagttggctgcaatagctacagacattagtaaccttgcttggcttaaaagtgggttggagagtagtagtgtcaaaataatgggcaacacctctggcagggtagtatctaatggatctcaagtacatattggccattaaagtgccaaatagatcatcattcctattctgagtgaggactggataatgggtatgataaaggctttagtaatgacaatctattttccttccaaatgtaattaggcaatcaaagttatgtgaatcactgctataatgtaaatggattcactaggtaaaaggaggttcataagttcaaggaacaattattttgttttttggggtgttgactgattaggacttgatttgggaccctgtaattgctaaaatgttcgttgtaaaataggccaatagggtaaaattacttgcatatcagtcagttcgagttgctgctgtgatgctgttcactttctaagagtaaaactcatttatgttaaaaggcaattgcagcttagagaaatcaaatcaatgctgaagagttattgttttctgttgtg

SEQ ID NO: 11471 - DNA, 1583 bp, Glycine max
  Clone ID: 701127504_FLI
atagccagcatcagcattcagtaacatcaatatcatcgacaacagacaacaatttcgggaatccgctggctatgactgcagttgtggtcgtcccattgggccttctcttcttcgcttccggcctcatcgttaacctcattcaggcaatatgctacgtggttgtgcggccggtgtcgaagaatctgtaccggcggatgaacagggtggtggcggagctgctctggctggagctcgtgtggattattgattggtgggccggtgttaaggttcaagtattcacagatcctgaaacctttcgttcaatgggtaaagagcatgctcttgttatctccaatcacagaagtgacattgattggcttgttggatgggttttagctcagcgttcaggttgccttggcagcactcttgctgtgatgaagaaatcatcgaagtttctaccggtcattggttggtcaatgtggttttctgaatatcttttcctggagagaagttgggccaaggatgaacgcacattaaagtcaggcctacagcaactgagggatttccctcttcccttttggttggctctctttgtagaaggaactcgctttacacaggccaaactattagctgctcaggagtatgcagcctcagctggattgcctgttccaagaaatgttttgattccaagaactaagggttttgtttcagcagtaaaccatatgcgctcttttgttcctgccatttatgatgtaactgtggcaattcccaagagttcacctgctcctacaatgctaagactcttcagagggaaatcttcagtggttcatgtgcatattaagcggcatgcaatgaaggatttgccagaagaagatgaagctgttgctcaatggtgtcgagatatgtttgtggctaaggatacattgttagacaaacatatagctgaggacacattcagtgatcaagagctgcaggataccggtcgacccataaagtctctagtggttgtcatatcgtgggcatgtgtcgttgttatgggggtcgtaaagttcctccaatggtcatcactactatcctcctggaagggtgttgcattttcagcatttggtttgggagttgttactctactcatgcacatcttgatcatgttctcacaatctgagcgttcaacccctaccaaggttgcccctgcaaagtccaagaatagcgaacaactggaggctagggataacaaacaagactagatcacacacattacctgaatattctatacatagagaattcttctgaggtcgcatcctgaacttgatttgcatttatgtgattttgaaaaagaaaaaaattgcattaacgtgtgtttagggactcactaccccctttctttatttgtttgctttggaattgtacctcgtatgtgttcagtccttgtattatgtattatgcatatactattcattattttgaaattaattaggatgaatttgtatagactaatatataggaatgacatacaaaaatcctgcctaacttcgcagttttttttagagacttgtacactttctggtattggactattaattgtggttatttcttgctccccttct

SEQ ID NO: 11472 - DNA, 1110 bp, Glycine max
  Clone ID: 701127521_FLI
ggcttcctctgcctcgcttttgaaaacgcgcgtttcaggcgaagatggttggcgacaacacgaagaagttgaaagtcgccgagaatttggaggatagcatcgacggcgaactcgtcctctccatcgagaagctgcaagaagtccaagacgagctcgataagatcaatgaagaggcgagtgataaggtcctcgaagtagagcagaagtacaatgagataaggaagccagtttacgataagcgaaatgatgtcgtcaaatctattcctgatttctggttcactgcttttatgagtcatcctgccctttgtgaacttctgaacgtagaggatcaaaagatatttaagtatttgggttctcttgatgttgaagataataaagatgtcaaatcaggctactcaatcacctttaatttcaatcccaatccctattttgagaatacaaagcttacaaagacttttaccttccttgaagaaggaacaacaaagataactgctacccccataaaatggaaagagggcaatggattacccaatggacttgatcatgacaagaatgggaacaagcgggctcgtattgatatcagtttctttagttggtttagtgactgtgagcagaaagatgatgtggatgaaattcatgacgaggttgcagaattaatcaaggatgatttatggccaaatccactcacttatttcaacaatgagcttgatgaagaggatgttgattctgaagctgatgatgaggaaaacgatgaggatgactctgaagatgatgaccaagaggagaatgacgctgggagtgaggatggcaatcacagttgaaaaatgcattatggtgctgttccctgtttatttgtctggttgagtatgtaaggcttttaggcgtggtgagcgtttccattttttcgaggtgttaactcaaggtggagctatatagaaagtggttctttgaccatataatttattaattaccctgtgaagttgtttcgctggtttcagccttcatgcactttttttgtgatactagtaacatactagctctctatcggttcttttttgtggaattacatattaaaattacagtatttattgtatatttggatttcttggc

SEQ ID NO: 11473 - DNA, 1810 bp, Glycine max
  Clone ID: 701127538_FLI
gggacataccatatatacatatattatagtttagtttgcactattttaatggtggctggctaccttaattccacatgctaaaattttgcacccctttattatataaccgtttcattctctatagcatctcaaagggtgtccaaagaaggaatcacacaagagaaattttgggtggatcttggtaatttaaatttggtccaaaaatagtaagaaaaaaaaaccatagttcatttaattttcatgtccttgctaacggtggcgcaccaaagggggtcaggtgagtttatccggttcacggaaagtcatggcggtggtggcgatgacgtcagtggtgacggtgaacatggttgtggacatgatgatggaagtggtgctggaggttcactagggttgaattttaaccaagtgatgcaacaaggtgaggtgacaatgcaaggtggttcattggtttcagggtataacaggggtgatccagagttgagagaaatagtttcagctttgacacacgtggtgtcttcagggtctggccagaggagcaccgaatggacccagcaaagtggttttcctatgatgtctgcttcttctctttcacgtttgtctgctttctcttcttcttctccttctccttcttctggagcctcttgggttggccacaaaagaggcagagaagaagaagagaatagtacttcacataacttgatgcaacaacaacaacaaagtgctccaagactcttcagaaacattggtgacttcatggtgccttctcaaggagactcatcatcagtgacagaagaagcccccacctccacaactacaactgtaaccgccgtcactgaaaacccaccaggaggtggggaaaggaggagaaagtacagaggagtgaggcagaggccatggggaaaatgggcagcagaaatccgtgatccacacaaagcagcaagagtttggctaggcacatttgacacagaagaagcagcagcaagagcctatgatgaagctgcattgaggttcagaggcaacagagcaaagcttaacttccctgaaaatgtaagagcagttccacccattcaaccttttcaagccaccactaggctaaccgtttctgattccaccacctctcaattccggccactctccgcggtggcgccacccttcattcagcagccacagattcagggctcctctgacttgatcagagactacttgcaatactctcagcttctacagagtgattttcaacagcaacaaatacaacaacaacagcagcagcagcggcagcagcagcagcggcagcggcagcagcggcagcagcagcagcaacaacaacaacaaccatctagtttgcttcagcagttgtactataatgcacaatttgcttcacttcaatcaccttcaatgctatcatcatctccttcattttcttcttctgtgtctccagcaccattcccattattcacaacctctgcttctttccccttgttttcaagtcaacaaatgggctatttccagccaccggaaagccgcaatcccgctggcggcgtgccggagtttccaacgtccacatggtcggataccagtagccagccaccaccttctggttgatacagtgttttagtttccttcatattttcctttttcttttttctttctttcattcttagcataaaaaaaaaagacttgttatacttatttcttttttcaagggtgaaactatgatatagttttttttaagtatttttggtactattctcgtatcagaattagagtttcagtaatttatgttgatattcaatacaaatctttattatgt

SEQ ID NO: 11474 - DNA, 1316 bp, Glycine max
  Clone ID: 701063970_FLI
gcaattggcttgatgggaattcgtgcatgttaaaattcatatatagttgcaatggctcgattttcattggatgagatatcagacactggtgcctttgtgagatctgcttccacattcagaaattggatttcgagggacctgaattcgcaatttccaccagaatcagggaggtatcatctctatgtatcatatgcttgtccttgggcttccaggtgccttgcttacttgaatattaaaggacttaacaaagctatcagtttctcggccgtcaagcccatctttgaaagaacaaatgaatctgatgactataaggggtgggtttttcctgaatcagaaactgaggtgcctggagctgaacctgatatgttgaatggagcaaagactattagggaactttatgaaattgcaagtgcaaactacaccggaaagtacactgttccagttctgtgggataagaaactcaagacaattgttaacaacgagagctcagagataatccgcatgtttaatactgaattcaacagtattgcagaaaaccccaccttggacttgtatcccactgatttaaaaccccaaattgatgataccaacgagtggatatacactagtataaataatggtgtttataaatgtgggtttgcaaagaagcaagaaccatacaatgaggctgcaagacaattgtatggggctttggacaaatgtgaggatatactaagcaagcaacgctatatatgtggcaacacactcactgaagcagacattcgtttgtttgtcactctcattagatttgatgaggtttatgcagttcacttcaagtgcaacaaaaaactgctgcgcgaatacccgaatcttttcaattacactaaagacattttccaaattcctggcattagtagcacagtgaacatggaacatataaagttgcattactatggaagtcatccttctatcaatccatttgggatcgttcccgtagggccaaatattgattattctgctcctcatgacagagaaaggttttctgcataggtggtttatagcatatttgtataatgaggagtgctagcaacacactcctcctaacacacaccctatcattgcttgaaatttattgaaaattacaaaatcatgagagagggacattaaagatgatgtaggacccactatcttttataatttccaagaagagaatgtgttcaaaagagtgtattgttggcatttctgttgtataattgtaagagatttatgagaaattttctgtatcttctaagtgaattgttttgttgaataattgcagaaacaatagtgctttgttg

SEQ ID NO: 11475 - DNA, 744 bp, Glycine max
  Clone ID: 701064011_FLI
attatcatcatttgttcattccgcttctaccgagttgtcaccacccaccggactcagtgaatcaccataatgggaaactgcagctcctccgattcgactcaggttgccacggcgaagcttgtgctgcaagatgggaggctgcaggagttctcgtacccggttaaggtttcgttcctcttgcagaagtatcccgcgtgcttcatatgcaactccgacgaaatggaattcggcgacgtcgtttcggccatcgacgaggaccaagttctgcaacccggtcagctctatttcgcgcttccgttgagccgcttgaggcaccccttgcagccgcacgagatggccgcattggccgtcaaggccagctccgcgctcatgaaaaccgccgacaaatgcggctctcgccggaaacagattttgttctctaacgaatatgactctaaccctaagcgcgtgtctcccgcactcgctgctggcggtggaagaggaaggaccaccgctggtgccggtggtaaggggggatttgcagcgttgttgagctccattccggagtaggggcagtttccgaagaaaattatacgccggtgattttgttcgtttgtatataaatagtttttttttctattaaaaagtaatattataaaattttggacattgtagagcttgttttaggaaacaatggaagcgattagattccaatcttggagagttgaaccaaatggatattcatattcatattctatcttggag

SEQ ID NO: 11476 - DNA, 2302 bp, Glycine max
  Clone ID: 701064021_FLI
ctcttttgtagggcattggatttctgaatgatcctaggaggctcaatgttgctttgacacgagcaagatatggcattgttattttgggaaaccctaaagttttgagcaaacagcctctatggaatagtttattgactcactacaaggtagttcttgtgttttgagattttactgtcggtggtattttttttggtttaaccagaggtatctgaggcttcttatttggcacccgactaatcctctcccattttggggtaaagtggtacctctagttgcaactccatgcccatgctggggactgaaccccggaccttggttaagggacccaagtgccaaaccacttgtgccaacaacttttggttactgccgatggtattgatttcataaaaaatgtgctggtatagcaagaaccacaagttgatttgaaatgtttttgctaattgtagaattctattttttataattgcccgtttatgattcatcattaaaagttctcccatttagtaagagtgatttcatattgatctcttttctatagtgttgttttgttttctaaaaaagctgagcttttcttccccacttcctaaacaggaacatgagtgcttagttgaagggcctttaaataacttgaagcaaagtatggttcagttccagaaacccaagaagatttacaatgaacgaaggcttttttatgggggtggacctggaattgcggctaatgataattttggtagtgttggatctggagctggcacaagttcagatcggaggagcagtcgaggaaggggatcttatatacctcctggtccaccaaatggaactcataagcctggagtgcatcctgctggatatcctgtgccaagggttcctttgcctccttttcatggtggtccccaatctcaaccatatgccattccatctcgcggggcagttcatggacccgttggggcagttcctcatgttccatctccagggagtcgaggttttggggctgggagaggtaattctggtgctccaatcggcaatcatctaccacatcaacaaggcacccaacagcctattgggaatattggatctacatttaacttccctgctctagagaatcccaacagccagccatctgttggtggtccatcatctcaacctgggtttgccaacaatatgcctgttcaaggtgctggccaatcatttcgagatcaattttctatgcctggaatgtcccaggacttcttgggcgatgacttcaaaagccaggggtctcatgttccttataatgtcactgatttctctacacaggcttctcaaagtggatatgctgtcgattatgctacacaaggagcacaaggtggattctcagggaattttcttaaccagaattctcaagctggatattctcgctttggttctggaaatgactttatgtctcaggttgttgaagtttgctagcaatgagcattttcccacatgattttggttgacgtgtcctttatgctctaattttctcttttaattcacaggactacatgggccatggatcacaaggtcttttcactcaggtgggattcactgatcccttgcaagatgatgcaacgcaaagccatttcagtgtggcaaatgccaaccctcttcagtcccagatgagttctctttactcccaaccttttgctcactacaacacacagccgcttaacatgcaggctacccaacagcagcctcaggctcagaactcccaaaatcagaaaatccactataacggttgaggaactttaggagcttaatgtggctttgatgggttatatagtctttgcaatcagcaactggggttgtgcctgtcttttgtgctgaaatacgtttgcatgagacatccgaaggattgccttgggatagctataccgaggaactggtatatatgatttgagttgatggaattttggggcattacgaagatacaagcaggcgcatcccgggctgaaaaatgataagataaccccctttaccttactgaagttttgtattgtttgggattaaggtgaaattgttcgagaaagcattacatggaatggttttgtcgaaagggttttaatcttgaagcagaaggggcggtttacatgtcggtgaaatactgaatatagtaatccatactgcaccaatcatcgccaaggaagttattattgtacagaaggcagggatgcggtgaaccctttcagctcttcctgacatgtaatttaaactcgatattatagacacaagttatatatgcaactattgccactcagaattttctgtggcatataaaggtgtg

SEQ ID NO: 11477 - DNA, 1237 bp, Glycine max
  Clone ID: 701064191_FLI
ttttggcagcaaggatggcgtcgagaccagaggtagttgcgccgcctgagattttctacgacgatgccgaagctcgcaagtacacctcttcttcccgtattgttcaaattcaggcgacgctgtcagagagagctctcgaactacttgctttgcctgatgacagcgttcctaaattactccttgatatcggttgtggatcgggacttagcggtgagacactctccgagaatggacaccattggattgggcttgacatttcagcatcaatgcttaatgttgcggtggagcgagaggttgagggtgaccttttacttggtgacatgggtcagggtctaggaattcgtcctggagttattgatggggccatcagtatatctgcggttcagtggttatgcaatgctgataaatcctctcacaaccctcgattaagattgaaggccttttttacatctttatacaaatgcttatcaaatggagctagagcagtatttcaagtgtatcctgaaaatatagaccaacgtgaattgattttaaatgctgcaatgcatgctggatttgctggtggtatagtggtggattttccacacagttctaagaagaggaaggagtttcttgttctcacttgtggtcaacgctcggtaaatgtgtccatttccaaaggtaaaaatgaagatagggagagttgctctgatgaggacagtgaagatgaagaaaaacagacagtatgtatatcagacaggcatagaccgcggaagaaacagaagaataataagagtggcaagggaaaggaatggttactaaggaagaaagagcagatgagaagaagaggaaatgttgttcctccaaataccaagtacacgggtcggaaacggaaggatcgcttttgatcttgtctggcatttgcctcagggtcgtgagtatgaaaagctagtcctatttgttatttgttaattgccgttaccaattgcatcttgctcgggtcttgaaggctactcatacatgcacgttcctgcagtcaaaggtgtttgatggaagccttgaaggatatgtggtatgttggaatcagttttgttttttcttttcttgaggggaaatcctcagccattggggctatgattttgtacgtgtttttaaaataccgataaatatcatttttgctttagttgtatctatttggccaacttatgcatttaaatgtgaggcgcacaattccagaatacaagtagcttttcaagtt

SEQ ID NO: 11478 - DNA, 618 bp, Glycine max
  Clone ID: 701064242_FLI
gagtgagagacggcaaagacggaggagaggtcgcaaacgcaaaaatggtgaagtttctgaaaccaaacaaggccgtcattgtccttcagggacgctacgccggcaagaaagccgtgatcgttcgaaccttcgacgaaggaactcgcgagcgcccctacggccactgtttggtggcggggataaagaagtaccctgcgaaggtgatcaagaaggactcggcgaagaagacggcgaagaagtcgcgcgtgaaggcgttcgtgaagctcgtcaactaccagcacctcatgcccacgcgctacacgcttgacgtggacttgaaggacgcggttaaccccgacgttctcaacgcgaaggataagaaggtcactgctctcaaggagaccaagaagcgcctcgaggagaggttcaaaaccgggaagaaccggtggttcttcaccaagctcaggttctgagcggtaatcttatcgagttttgttattcgaatgcttttggatcttgctttaattgatactttataatgctgtgttgagattagattttggaatttttggttaaattttggtcatattggatgattaaggtggtttattgagatgatatgataggttaatgttgttt

SEQ ID NO: 11479 - DNA, 1188 bp, Glycine max
  Clone ID: 701064249_FLI
aaaataaaacacaccctctacgtgtccacactctctgatcacaacacacccgcttaattaaatctctatatataaaccccttcaggcactccactatgacgggcaaagaaatttttcataagatgaaggaaaaagttttgggatcatctgatcccgattcaggtaaaggaaagagcaagatgaagaagcacataactcatggctttcacttggtaaagggaagatcaggtcatgccatggaagactatcttgttgctcaatttaagcaagttgacaacaaagagttgggtttatttgcaatatttgatggccactctggtcacagtgtacctgattacttgaagtctcatttgtttgataatatcttgaaagagcctaacttctggacagaacctgctgaggctgttaagagagcatatagtataactgattctactattttagacaaatcaggtgaattgggtagagggggttcaactgcggttacagcaatattgatcaactgttacaagctactagtggccaatattggggattcccgggctgtcttatgtaagaatggcgtagccaaacaactatcggtggatcatgaaccaagcatagaaagtgaagatataaaaaacagaggtggttttgtgtcaaacttcccaggggatgtgccacgtgtcgatggtcagttggcagtgtcaagggcatttggtgacaaaagcctgaagatacatttgagctcagaaccatatgtaactgtggagatgatagaagatgatgcagagtttcttatactagccagtgatgggttatggaaggtaatgtcaaatcaagaagcagttagtgctatcagagatgttaaggatgctagatctgcagcaaaggtgcttactgaagaagcaaagaacaggaaaagctcagatgatatctcttgcgttgttgtgaaatttcagtgatcagtaaactcacatagtatatttttatctacgaacttgaaagtgtaacatatactttagtgtaatgttgataccttttaggtgttattatgtcatgccattcagtgtgtgatatttaatcttctttaatttcatacaaatgaaactgctgagaacgtgttgtttgatgtaccaatgttcaaaaggatttagttttggattgtgtagaccaaaataattcgtatgaatgcaaggaagtttggtc

SEQ ID NO: 11480 - DNA, 403 bp, Glycine max
  Clone ID: 701064260_FLI
cttgaggctagggttaccggattcttgcgttttaatatctgcaattcagaagcatggggcactccaatgtgtggaattctcaccctaagaactacggacctggttctcgcacttgccgtgtgtgtgggaatcctcatggattgatcaggaaatatgggcttatgtgttgcaggcagtgcttccgaagcaatgccaaggaaattggcttcatcaagtatcggtgaaagattagttttccacctgccccacccggtttggattcttgcatcaggctatgatgacgtggggatgattttactgtttgaagaacttaaaattttttgtgacatttagcaaagttaattatcaaactcaagttgtggaactaagaatatttttgttttttatataattgttttgagct

SEQ ID NO: 11481 - DNA, 968 bp, Glycine max
  Clone ID: 701064353_FLI
gctagaagcaataagatgaaaatgaaagtgcttgttttgtttgttgctacagttttggtagcatatgaatgccatggctcagactaccagaagttccctctccaaatgaaaactgggtttggtgggcaatacagcaatgaggtggcatgtgccagttggaggcttggcgtggaagcaaacaacgtagtcaagtggcaaactgttcctgcagcttgcggagagtacatagctgactacgttctaggagaccaatatagatcagattccaaaacagttaaccaacaagcttatttctatgctaaatccctcaaactcaccaacaaagatgtctttgtcttggacgttgacgacactactctctctaatctccagtattttgctaaccatggatttggtgtggaaccacacaatacgacggcgtttaagaactgggttcttgatggcgaggcattcgcactgccagagactcttaaaatgtacaacaaactgttggctctcggcatcaagattgtattcttatcagaaagaccactgagtctaggggatgtaacagccaagaacttaaaggaggttggattcaacacatgggagaagttaattctcagggatccatctgagtactctggtaagttatcatttgaatacaaatcagctgagagagagaagctggagaaggagggatacagaatcattggaaacgttggagaccaatggagtgacctcctgggaagcaacaaagggactaggacttttaagctgcctaatcccttgtactatgattaagctctcaaatcaagcctctaagttgctccttaatttctatgaaataagatcctgagtattattacttagtcatgtaggggcactgaacaatgttgttttcccttttcgaggctttcatgaattatgagctcttgttccattaagaaattgtccgttccaagttaaaccagtttagtattattatt

SEQ ID NO: 11482 - DNA, 1092 bp, Glycine max
  Clone ID: 701064513_FLI
tattcaatgacattcacagtcccgagtcctaacctgagttgtgtctcaacttgctcttcttcttcttctctttcaccctccaaattttctcactctctctttatcttcaccttttcagtttaaagcttcagatcacaaccgatccaccattcaccactttctcttcacaagctcaagttactgacaggcaaatctaacaagaaaagtagtctctgaagtcgatccagtgccttgtgaatttggaattggtggtgaatttagatctaaaagccatagcaatgtcttttatcggtacccagcaaaagtgcaaggcttgtgagaaaacggtttatcccgttgatcagctttctgctgatggtactgcttatcacaaagcttgcttcagatgctctcactgcaaaggaacattaaagctgagtaactattcctcaatggaaggtgttctttactgtaagcctcactatgagcagctcttcaaggagagtggctccttcagcaagaacttccagtcacctgcaaagctaggctgataagacaactcctgagctgacaaggtctcctagtaaagctgcgagccatgttttctggcacacaagaaaagtgtgccacatgtggcaaaactgcttatccattagagaaggtaacagtggaagggcaggcctatcacaaatcatgtttcaagtgttcacatggtggatgtcccataacgccatcgaattatgcagcccttgagggcattttgtattgcaagcaccacttctcccagctttttaaggagaaagggagctataatcatcttactaagtctgcatcagtcaaacgggcagccgcagccacagcagcagcaacaacagctgcctctgttccagaatcttgaatgttggttccttcaattgccttttctttttcaaatacattttggtttgtgaagcaggtgtttgtatgtgtggcctttttggtttttgattgttctctcgtgactttgatcatttctgatatttttacttacacatgcgtggcgtgcaaatcttgtgtggtttattcatataatggacatttagtaaagacgagactaatgagagcgtgatttgc

SEQ ID NO: 11483 - DNA, 288 bp, Glycine max
  Clone ID: 701064704_FLI
atgctggcagaaaagatgtgtgcttcataattttgttagatccgtatatttttatttaattattttaaattatccaagccatcaaggagttacatttttgcctttggtgattttcattattgcgagtttgctattctgttcttgtggtttagatactttggcctttagtttgtttattctatgcaagtattctggacttctagtagttaccatagatattttatctgtattttttgtgattcagatatgaatgttgaatttggtggttaatgttcattttatgtcaac

SEQ ID NO: 11484 - DNA, 761 bp, Glycine max
  Clone ID: 701064730_FLI
ttcaggtactgcgtttcggaagcagacacagatggctcgtacgaagcaaaccgctcgtaagtccacaggaggaaaggctcctaggaagcagcttgcaaccaaggctgcacgtaagtctgcaccaactactggtggtgtgaagaagccccaccgttatcgtcctggtaccgttgctcttcgtgagattaggaaataccagaagagtaccgagcttttgatccggaagctccccttccagaggctggttcgtgaaattgctcaggacttcaagactgatctgcgtttccagagccacgccgtgcttgcattgcaagaagctgctgaggcataccttgttgggctctttgaggacactaacctgtgtgccattcacgccaagcgtgtaaccattatgcccaaggatattcagctggcaagaaggattcgtggtgagcgtgcttgagttggtggttggaaagatgaagatgattggtggctgcggttggtgtttttgtttttcagattcctttttttattcaatagatggggttgttagggagggtaggttttctgctggtagtagcattaattgggatataggcaaatactgctaagtgtccgtgactgtgttttcttcctttaagaaaattggcttgtaattgatttttggacatatgtatgtgttagaatgcttctgttttagtttttacctgcgggatgttgcagccactttagaaactgtattggacaacattcagttgccatctaatctcgtttaagtt

SEQ ID NO: 11485 - DNA, 1072 bp, Glycine max
  Clone ID: 701064742_FLI
ctcattaattgcaagaatggcacttcgttgcttggtgatgtccctttctgttctcttcactcttggtcttgcgagagaaagccatgccagagacgaagatttttggcatgctgtttggccaaacactcccattccaagttcattgcgagatcttctaaagcctggccctgcaagtgttgaaatcgatgatcaccctatgcaaattgaagaaacacagtacccgaaaaccttcttctataaagaagaccttcatccaggcaaaacaatgaaagtacaattcagcaagcctccctttcaacaaccatggggtgttggtacatggttaaaggaaattaaagacactactaaagaaggatatagttttgaagagctatgcatcaagaaagaagccattgagggagaagagaagttttgtgcaaaatccttgggaacagtaattggttttgccatttcaaagctgggaaagaacattcaagtactttcaagttcctttgtcaataagcaagaccaatacactgtggaaggagtgcagaatcttggagacaaagcagtgatgtgtcataggctaaatttcagaactgcagtattttactgccatgaagtccgtgaaacaacagctttcatggttccattggtggctggtgatggaaccaaaactcaggcacttgctatttgccactcaaatacttctggaatgaatcatcaaatgcttcatcaacttatgggagttgatcctggaactaaccctgtttgccatttccttggaagcaaggccattttatgggtacccaatttatctgtggacactgcctatcagaccaacattgttgcttaattagtccatgcatcttgagcaccatgagaatgagattgtgtataaaataaattatcatgtgctgtgtgttgtgcaagtactaccttctctagctagattgctagagctagaatttcaacctacctatgtgtactgataagatctgcttccctacttaaagagagcatcatcctgtgatcagtgtgcttcgtattctctctctctatatatatatggtaaaaagtggttatctcgtgc

SEQ ID NO: 11486 - DNA, 798 bp, Glycine max
  Clone ID: 701064821_FLI
caaactcaaagcctaaacacatttcattcccaaaaaactcactcacgagagtgcatcattcctcatttgatcctctcttcccccatgaccttccaaccagtccccactctccttctccttctcctcctcgcgtccgcaaattcccattttgccctcgccggaaagcgcaaggttcacatccccgacgagttggacgacgtgttcgacgacgaggaggacgacgcgtggcgagaatggggcaagaaacccgaaccccctttcccttcctccgatatctccaagctcgatccctcgcagatccagcaggagatgatgaagcgccacgccggacccgtcatcggattcgtcaagctccggccagggtctcgccgtactccggacatggtagctgaatttgcaatgaaatggacacatgttctgagaactggagctgttggagtaaggtttatgggtgttgatctgaatacaattatgtttaacttggaaagcatcaaagacttggaagagttgaaggaatttgtcttggaccaatcagaggcatatgagatcaaaatgggggatcaattttttcgaagatctggagatccacctcttgatgaagttattgagaagtacaatagtgagaaagccaaagcagataatgctgattcagaggaaattgatccgaatgttaaaacagagttgtaattaaacggtatatagacataaactatgtttggttttgcgtcagttttaggaaaattgtgtcaaatttccatgttaacagtgaagcaacttcatataatttttcacttttcc

SEQ ID NO: 11487 - DNA, 1621 bp, Glycine max
  Clone ID: 701064850_FLI
gcgttctgcttcggttcacaaggcaccagctgctccgttctgcttcggcttcagagtttgtgtaacattctccttccttcttccgatttcgaagatggctgaagcagaggatgccgtaagacgccgtaatgcggtcgccgagtatcggaagaaacttctccagcacaaggaattggaatccagagtccgatccgtcagggagaatttgcgagcttcaaagaaagagttcaataaaacagaagatgatttgaaatctcttcaaagtgttgggcagattattggcgaagttctcaggcctcttgacaatgaacgcctgattgttaaagcaagcagtggtcccaggtatgtggttggttgccgcagtaaagtggataaggaaaaattgacttcagggacaagggtggttcttgatatgacaacactcaccataatgcgagctcttcctcgagaagttgatccagtagtttacaatatgttgcatgaagatcctggtaatatcagctactcagctgttggtggcttatctgatcagatcagggaattgagggagtcaattgaactgcctctaatgaatcctgagctcttccttcgagttggaattaaacctccaaagggtgttctcctttacgggcctcctggtactggtaaaacattgttagctagggcaattgcaagtaatatagatgcaaatttcctaaaggttgtttcaagtgccataattgataagtacattggagaaagtgccaggttaatcagagagatgtttggttatgcacgtgatcaccagccttgcatcatttttatggatgagatcgatgccattggaggtcgccgtttcagtgagggaacaagtgcagatcgtgagattcagagaacgctaatggagctgcttaatcaacttgatggatttgatcaacttggaaaggttaaaatgataatggcaacaaaccgacctgatgtacttgaccctgctctcctgcgtcctgggagattggatagaaaaatagaaatccctctgcctaatgaacaatcaaggatggaaattcttaagattcatgctgctggtatcgctaagcatggtgaaatagactatgaagctgttgtgaagcttgcagagggatttaatggggctgatcttcgaaatgtctgcacagaagctggaatggcagcaattcgtgcagagcgtgattatgtgatccatgaagattttatgaaggctgttaggaaactgaacgaggcaaagaaacttgaatccagtgcgcactacagtgctgattttggtaaagactagaatctattgcaaaattcttgcagagccatggatatctaggcagtgcatcttgagttggaaatacctcgagcaagttactcaattcgtagagctaagcgtgatgttccctttgggttatggcttgtgttttccgaattctaaaattggaagggtaacttaatcaaacggtaaaagggatgttcaatttaattgtattattgttgcccccaccccacccaaaccccttttttttctggactgtagaagggcaactcatattttatactggatcttgggatgtgcacaatttgctttatattttaaaaaaattaaaattgtctaattttacac

SEQ ID NO: 11488 - DNA, 181 bp, Glycine max
  Clone ID: 701065029_FLI
ggagagttgtcacttgtgtagagatgtattgggggaatgtctattgttcatgccattgcttgcattttctacaattctatttatgaagtagcaaatttttctattgagcttcccagttataactttgacatcaatgtccatttggccaggcattagttcaataaatccatcttgcttatgt

SEQ ID NO: 11489 - DNA, 1436 bp, Glycine max
  Clone ID: 701065031_FLI
aaaggagtgatttggagtttggagcgactgaactaatcattaatttgcactcgctgtttcagcttcatcacccttcttttgcatcatttatatctcttgagaaatggcacaagaaacctttctattcacatctgaatctgtaaacgagggtcaccccgacaagctgtgcgaccagatctctgatgcagtacttgatgcgtgccttgaacaggaccctgacagcaaggttgcctgtgagacatgcaccaagaccaacatggtcatggtcttcggagagatcacaaccaaggccaacgtagactatgaaaagattgtccgcgacacatgccgcgaaattggattcatctctgatgatgttggtcttgatgctgacaaatgcaaggtgttggtcaacattgagcaacagagcccggatatcgcccagggtgtgcacggccacttcaccaagcgcccagaggaggttggtgctggtgaccagggtcacatgtttgggtatgccaccgatgaaacccccgagtacatgcccctcagccatgtccttgcaaccaaacttggtgctcgcctcacagaggttaggaagaatggcacctgtgcttggttgaggccagatggtaagacacaagtaaccgtcgagtactacaatgacaatggtgccatggttccagttcgtgtccacactgtcctaatttccacccaacatgatgagactgtgagcaatgatcaaattgctgcggaccttaaagagcatgttatcaagcctgtcattcctgagaagtaccttgatgagaagaccatcttccaccttaacccttctggccgttttgtcattggtggccctcatggtgatgctggtctcactggaagaaagatcatcattgatacctatggtggctggggtgctcatggtggaggtgccttttcagggaaggaccctaccaaggttgacagaagtggtgcctatattgtaaggcaggctgcaaagagtgtcgtggcaaatggccttgctagaaggtgcattgtgcaagtttcctatgccattggtgtccctgagcccttgtcagtgtttgtggacacttatggaactgggaagattcctgacaaggagattctgcaaattgtgaaggagaatttcgacttcagacctggaatgatcaccattaacttggaccttaagaggggtggtcataggttcctcaagacagctgcttatggacactttggaagggatgatgcagacttcacctgggaagttgtgaagccactcaagtcagagaagcctcaagcttaagagtgttgttaagttaatcactcccttcagtggatgtcttgctgggtgtggatgaataatttgcgtgtttcatgactactactactactactccattcaatgtctaatgccatctcatcaatacctaaactgttcgtttttttttttc

SEQ ID NO: 11490 - DNA, 1443 bp, Glycine max
  Clone ID: 701065034_FLI
tgattggtgtgcatccatgttaagctagtggcgatcggatccagctacagcctacaacctacagttttggtttggtttgcttgattgaagatcaaggaaggaagatgttgggtgttataaggcacaagagtattcgccccgccttctccgcaatcagacacttctcttctgcagctaaagagattactgtcagggatgctctcaactccgcactcgatgaggaaatgtcagctgatcctaaagtcttcttgatgggtgaagaggttggggaatatcagggtgcatacaagatatccaaggggctgctcgacaagtatggccccgagagggttctcgatactccaatcactgaggctgggtttgctgggattggagttggcgctgcttactatggtctaaggcctgttgtggagtttatgacttttaacttctccatgcaggcaatagatcatattattaactctgccgcaaaatcaaactacatgtctgctgggcaaatatctgtacctattgtctttagaggacccaatggtgctgctgctggggttggtgctcagcattctcaatgttatgcatctttgtatggttcatgccctgggttgaaagtcttgtcaccatattcatctgaagatgcccgtggtttgcttaaagctgctattagggaccctgatcctgttgttttccttgaaaatgaattgttatatggtgagtcattccctgtttcggccgaagttcttgattccagtttttgccttcccataggaaaagcaaagattgagagggaaggaaaagatgtgactattacagcctattcaaaaatggttggctatgctctcaaggctgctgagacactggcaaaggaaggaatcagtgctgaggtcattaatttgcgttcaatccggccgcttgatcgatccacaatcaatgcttctgtcaggaaaaccaacaggctggtgacagttgaagaagggtttcctcagcatggcgttggcgctgaaatctgcacatctgtcattgaagaaagttttggttatcttgatgcacccgttgagagaattgctggggctgatgttcccatgccttatgcagcaaatctggaaagaatggctgtcccacaggttgaagatattgttcgtgctgcaaagagagcatgctacagatctgtgcctttggctgcatctgcttgaatgttctggaaaattttcatgtcctggttagttctttgcagaaacaaaattttccctattttccgccacaaaacagcaggaagaaattgcaaccaaagaatgctgattttaactcatttattatgttaggctttggtttaaaagattctgttgtatgcataatactgtcctaattttcaggactcacagatgctatacattttttccccttctcagcatatctgggaggaagttaatgttaaataacttgtacaac

SEQ ID NO: 11491 - DNA, 2275 bp, Glycine max
  Clone ID: 701065080_FLI
gcaaatccacattcctctccatgtccggagagccaccacggccgttggagatccacctgagggtcaactccaagagaggcggcaccaccatggtgcaccccgtggccacggcggttccggttcagtaccccagagaggaggagggagtgaagcattacagaaaatggtttgcttggctgatacctctctttgtggttgccaacgtcgctatgtttgcgatcactatgtatgtcaataactgcccgcgtaactctgtctcctgcattgcctccttcttgggtcgcttctccttccagcccttcaaagaaaaccccctcttgggcccttcttcgttgacgctgcaaaagatgggggctcttgatgtgagcagagtggttcacaaacaccaagggtggcgcctcgttacctgtatgtggctacatgctggggttttccatctgttggcaaatatgttgggtattctagtcattggaattcggcttgagcaagaatttgggtttgtgcttattggactgctatttttcatatctggatttggggggagtttgctttctgctctgtttatccagtcaaacatctctgttggtgcttctggtgcacttttcggcttgctgggaggcatgctttcagaactcattactaactggtctatatatgataacaagctagcagcactcctcacccttgtgatcatcattgttatcaatctagcagttggaattctcccacacgtggacaattttgctcatattggaggctttcttactggatttcttctcggatttgtgtttttgatacgtccccagtttggatgggttaaccaacgatatgctcccctaaattattctccaggacgatccaagcctaaattcaagaaatatcagtgcatcttgtgggtcctctccctgatcattctagttgttgggctttctgttgggctggttgcccttctccgtggtgttgatgcaaatgatcactgctcctggtgccattatctgtcttgcgttccaacttcaaaatggagctgccatacagaggcagcatattgcgagtcaaaccaacttggcaaccagctgaacgtaacatgctcaagcactggtaaattcagtacatacttcatggaaaatccaaccagttcccagatccagcaattgtgtagtcaactttgtagttgaattttgacaaaagtgatgatcgttggaatgagatgttcatttgttcatattagtatttcaggttctcacgaaaaactgcacactgcagtgctcttttgtttttaccttttgccttattcaggagacacgatggaaaaaaggagggagaggccctaacgaactctctggagtctaggtcttggaggtaaatacacccaatttaagtgctcctttaaacctatgccgatcccacatggttggagcattcttgcaaaatagtgtgaccctaattggtctccctatgattttacctagtgagagtgacttgacttaccagtgtgtggtatgtcttgtcatgtactcttgaaaatgaagacccttgatgaagcaatggacttaattgaaagcatggctgctagtgacattgccattctaagagatcgagcccacattcctaccaagaagagcttattagagctaacctcacaggacgctctgttggcacaaaacaagttactattcaagcaactagaggcattaacagaaacactcagtaagtcgccaactcagcttcattccacacaaacttcacattcttctattttgtaggttgcaggatgtataatttgtggtggagctcatgattctggatgttgtatccctaatgaagagcaaattgcacatgaagttaattatatggggaatcagtccagaggaaatttcaatacaagaggatttccaggatttcaaaacaaccagtagtatcaacaacagagacagtggcaaaatcaccctggagaattataagcaattgggcttggatccggaattgacctacaccggcttggacttgaagagagcagacaattttattttatttcgtctagttttattttatttcgtttttgggcttggacttaaaagagatttgtaagctttggggatgaggacctatataacagcaccagggttttagtagaaggcagactgttgagataggagaaaatttttagggttttgcattttcagtttcgtgttactgttcacgcgcactgttcaagtagcaatcaaatttcgttttctgcttcaaattgcaattttgttttctgcttttgcctttg

SEQ ID NO: 11492 - DNA, 873 bp, Glycine max
  Clone ID: 701065109_FLI
cttaaacactcgtcccaagaggcgcagagccaaaagcagaaagaacaaagaagaaattgagaaccaaagaatgactcacattgctgtggaacgcaatagaagaaagcagatgaatgagtatctttctgttcttcgctctcttatgccagactcttatatccaaaggggtgatcaagcttctataattggaggtgctattaactttgtcaaagagcttgagcagaggatgcattttcttggtgctcagaaagaaggagaggggaaatctgaggctggtggtgcaacaaacatgcccttttctgagttcttcacctttcctcagtattcaactagtggtggtggtggttgctctgataattctgcagccgtaggtgaagacgtgggtgaggttaagtgtggcattgctgacatagaagtgaccatggtggaaagccatgcaaatctcaaaataagatccaagaagcgccccaagcagctcttgaagttggtttctggtttgcataccatgcgcctcacaatcttgcacctaaatgttactaccaccggtgaagttgttctctactctcttagtgttaaggtagaagatgattgcaagttgggatcagttgatgatatagctgcagctgtgtaccagatgctagataaaattcagcaagaggcaatgttgaattaagatcaaaccttgaccaaatttgccttgccccacttggtttttaacctcatgtcaacaccttacttcatggtggatcattgtctctcgctatttttctctttcaagatgtacctaattattgcaacttctgttcacttcaccctttgttaatctactgatggtgccttgatgtgggctccttggaggaagttttttggttt

SEQ ID NO: 11493 - DNA, 376 bp, Glycine max
  Clone ID: 701065177_FLI
catttgatgggttacaaaaattgcaggctgctaggaaaacagcagagaatgctataaaccttaaacgagtggatgaccaggttaacaaagcagtaatagctgcgagcaaggctgccactgctgctagagttgctgctgtgaaagctgttcagaacaggatggatggaaaattttgcgacactgatgtctaagaattagatgttagcttttgtttggaattgtaattgtaaattttttttttactaatattgagtccttggaagatgtcaccccggtgagcaaaagcttattggaggttgaaaagagagttatgcttgtttcaccacgctgtaatctgtacataaatcatgtatatcaatgaaagatgaatttgctc

SEQ ID NO: 11494 - DNA, 686 bp, Glycine max
  Clone ID: 701065303_FLI
caaaaccctacccccatccaattccaattcaccctcaatcatgggttctgaaggttccactgtcgtcgttcctaggaacttcagattattggaagagcttgagagaggtgagaagggaattggagatggaactgttagctatggaatggatgatgctgatgatatctacatgcagtcctggactgggactattattggcccccctggtactgttcatgaagggcgtatataccagctgaaattattttgtggcaaggattatccagacaatccaccaactgttagatttcagactaggattaacatgacttgtgtcaaccaagaaactggagtggttgagccacatttgtttcctatgcttgctaattggcaaagagagtgtacaatggaagacattttgatgcaattgaagaaagaaatgatatctccacaaaatcggaagctagctcagccacctgaaggcaatgaagatggcaggattgaccaaaaggggcttgctctgagatgttgtgtcatgtaattcaggtgagaaccaaagaataataatgtaaataattcaatagataatccttttgtgggttaactcatttataaatgtaattatggaccattcgcttatgtaacatggagcaattaaagagcgactacgaatccttgaaaatttatagtcaatcgtgttgaagctg

SEQ ID NO: 11495 - DNA, 1407 bp, Glycine max
  Clone ID: 701065489_FLI
catatctttcaccttctaaccatacttttgtttttctcgatttccaaggaacttttggattcttagctgccaccctcatatgatatttcttgaaaccttgtgttaaaaattgtgtccttttgaacttcaataaaaatttgatttttttttcttagtttcatacccacatacccattgttggatttgaactagttttacttgcctcatggcccttcatataagcagcggttgttttactgtgatgtgtaactcaagagttcacagaataagagctgttgcttcagagggttctgctactcttaatacagttgtggaggagaaggtgaaattgggtggctctgatttgaaggtatcaagggttggaattggagcttggtcttggggtgataccacttactggaacaattttgaatggaatgataggaatgagaaggctgctagagctgctttcaatgccagtattgatggaggtctaaccttttttgacactgctgaagtctatggctctgggcttgctttaggagccgtaaattctgaggttcttcttggaagatatattaaggaaagaaaagaaaaggatccagacgttgagattgaagtagcaaccaagtttgctgcactaccgtggagatttggccgtcaaagtgttctcaatgcccttaaagattccctttgtcgactaggactgacttcagtggatctttatcagcttcattggcctggagtttggggaaatgaagggtatattgatggtctgggagatgctgttgaaaagggacttgtgaaggctgttggtgtttcaaactatagtgagaagcgactccgtgaggcttatgagaaactcaagaagagaggtattccattagctactaaccaagtaaactacagtctcatctaccgggtccctgaagaaaacggcgtaaaggctgcctgtgatgaacttgggattacaataattgcatattcaccaattgctcaaggtgctctcactggaaagtacactcctgataaaccaccaagtgggccccgaggcagaatttatactccagaattcctaacaaggctccaacctttgctgaacaagatcagtgaaataggagagaagtatgataaaactccaacacaggtatccttgaactggctggtagcacaaggcaatgttgtcccaattccaggagccaagacagcagaacaagctgaggaattcataggtgcacttggctggagactaactgatgaagaggtagctgagctgcgtagtttggcttcagaaattaaacctgttattggttttccagttgaaaaactctagaatatagcatgcaccttctaaatcaaatgtaaagttgtactgtctctgtatattgatatagctcttgttattattaattatttattttacaaaat

SEQ ID NO: 11496 - DNA, 440 bp, Glycine max
  Clone ID: 701065521_FLI
gctggttttatgaccccaactgcactttataccaagacactgaaacctggagatattatggtttttccacaaggacagttgcattttcaggttaattctggaaacggaaaagccactgcttttctggcattcagtagtgcaaaccctggagcacaactacttgaccttctgttatttggcaacaccttgccttctgacttggttgcacagactaccttccttgatgttgcacaagtcaagaaggttaaggctcgttttggtggcagaggctagggtttcttatgaatcaactcatacctagtgtttgttttagtgataatcgtcagcaattaataaacttgtgcatttgggtgtgttttgctttcattttaagtttgattccaaacttatgatttgagggtttgaagtttgacgatgtataaataaaaattttagagttt

SEQ ID NO: 11497 - DNA, 463 bp, Glycine max
  Clone ID: 701065532_FLI
gggtggtggaaaggtttcgttcaaagtcacactcacctccgatccaaagttacccttcaaagtgtttagcgttccagaggcggcaccttttactgccgttctcaaattcgccgccgaagaattcaaagtcccgccccagaccagcgctatcatcaccaacggtagcttttagcctttgggatcacaaaagcttggccacacccgcaatgtttttggattaagaaaatactttttatcatcgatttatcgttggtttcatggtgttggcataaatccccagcagagcgcaggcaatgtcttccttaagcatggttcagaactgcgcctgattccgcgtgatagggtcggtgccttttagatgttacgggtgtctgacttgatattgaccttttttgcaaaatacatgaactgttgtagcttcctaagtagagtaatcaataaataccatggttactgatttcat

SEQ ID NO: 11498 - DNA, 525 bp, Glycine max
  Clone ID: 701065557_FLI
atccagatgaactttcatacgaggaattactggcattgagtgaagtagttggaactgagagcagaggtctttcaactgatactattgcctgtttaccttcagtcaactacaagactgggagtgatcaacatggaagccatgattcgtgtgtcatttgccgggtggactatgaggatggtgagtccttgacagttctttcctgcaaacatctgtaccatcctgagtgcattaacaattggttgaaaataaacaaggtttgcccagtttgtagtactgaggtatctgcttctgggagcaacttgtaggaggacttaatagatgttcttcacttcaaattgaagaaaatttgtgccaagttgggggctaatatcccttattttaatagcatttccatattagggagatagtctgtgctatgtctccagctccttcattttaaatgtaacatgtgacttttggaaccagctctctacattgtctttattctaatggaaaatgaatggcatttaagtggccagttctttt

SEQ ID NO: 11499 - DNA, 1650 bp, Glycine max
  Clone ID: 701065633_FLI
ctagctgcaaagctttttgtgttctgcaactgaaagtgaaggaaaagaagcagaaaccaaatcatgtgttctctactttggagttccattgcattgtgtgtagctttcctactccttgagcttggcgttgtgcacccttcaccctcacaccataggatcactcgcttgccgggtcaaccccatgttcagtttcatcagttttcaggttatgtaaccgttgatgacaaaaaccagcgtgcactttttttctactttgctgaagccgaaaaagatgcactttccaagccccttgttctgtggctcaatggagggcctggttgttcttctcttggagttggtgcattttcagagaatggaccatttaggcccaaaggtaagggcttggttagaaaccaattcagctggaacagagaagcgaatatgctctatttggaaacgccaattggagttggattctcttactcaactgatacttcctcttatgagggtgtgaatgacaaaattacggccagggataacttggtgttcttgcaaagctggtttataaagttcccagaatacagaaaccgaagtttgttcattgtaggagaaagctatgcaggtcattatgttcctcagctggctgaacttatgctccaattcaacaaaaaggagaagttattcaatttaaaaggcattgctcttggtaatccagttctagaatttgcaacagatttcaattcgagagctgagttcttctggtcacatggattaatttcagatacaacgtacaaaatgttcacttctgtttgtaactattcaacatatgtgagggaatactataatggtgctgtttctcctatctgttcaagtgttatgagccaagttactacggaaacaagtagatttgttgacaaatatgatgtgacccttgatgtttgtttatcttcagtgttctcacaaaccaaagtcctcaatccccagcaagtaactgaaaccatagatgtatgtgtggaagatgaaacagtcaattatctgaacaggaaagatgtgcagtcagctatgcatgcacatcttgttggagttcaaagatggtctgcttgcagcaatgtcctggattatgagctgcgtgacttggagataccaacaatcacggttgtggggaagctagtcaaggagggaataccagtattggtttacagtggtgatcaggattcagttatcccactgactggaagtagaacactagtacataaattggcaaaagaacttggattgaacaccactgtgccatacagggtgtggtttgagaagcagcaggtgggtgggtggactcaagtttatggtaacatcctttcatttgccaccatcagaggagcatcacatgaagctccattttcacagcctgagagatcacttgtgctgttcaagtccttcttagaaggaggaccactaccacaagagttttgatatgcatatatatgtcggttgtgtcgataaaatgtgatttttggattgtagtttaattcgtttcactgttaatcaatggtgcccaatttcaagtgtagaaaattttgtaaagttctcaagtaagaagggagggaatttgttgtattttttttttttgtcagtgccttgtttacttttactatttataaagctgcattatgt

SEQ ID NO: 11500 - DNA, 903 bp, Glycine max
  Clone ID: 701065703_FLI
ccttagtgctgctccttgcagctctaattctatcccctcaagttcttgcaaactatgagaatcccccagtgtacaagcctcccactgagaaaccaccagtttataagcccccagttgagaagcctcctgtttacaaacctccagttgaaaaccccccaatttataagcctccagtagagaagccaccagtgtacaagcccccagttgagaaacccccagtgtacaagcccccagttgaaaaaccaccagtgtacaagcccccagttgagaaaccaccagtgtacaagcccccagttgaaaaacccccagtttacaagcccccagttgaaaaacccccagtgtacaagcccccagttgaaaaaccaccagtgtacaagcccccagttgagaagcccccagtttacaagcccccagttgagaagccaccagtttacaagcccccagttgagaagccaccagtatacaagccaccagttgagaagcctccagtgtacaagccaccagtagagaagcctccagtttacaagccaccagtagagaaacctccagtttacaagcccccagtggagaaacctcctatttacaagccacctgttgagaagcctccggtctacaagccaccatatggaaagccaccatacccaaagtaccctccaactgatgacacccatttctgaaggatgtcaagaggtgtattgagtatatgctaaataagaggtgctcaaaatgtagttatagattacaaattattgcaagggttgctcttagcttcttcatttcaagcttttgtttacactttgcagtgctatggcaaagataagagtatcatggatggaaaaagggggggaaaaaatgttgctttgtactccaaattatgaataatagaactttatattatttatc

SEQ ID NO: 11501 - DNA, 1799 bp, Glycine max
  Clone ID: 701065776_FLI
tgtttctgcccctttctttctctgaatcgaaaccctagaagttcgtcgtcttgtcttccagaatctgacaactttcctcatccgaacctaaattctctcatcaaaccctcacttatccaatccccacccaaattccccgcatcgacctcactcccctaaattcccccatcgccggctctctcacggccgaattcatcgcatcgccggttccgctacggtggctatcgcatgggtaagattctccgagaaaacgcgaagccgtcggcaaattcctcatcggcgtacccctctgcggcgcccgccaccacttcgtcgacatcggtgacggagacggtgagggggtcacaccagttcaagatcacggggtactcgctctcgaaggggatcgggattgggaagtacatggcctccgacgtgttttctgtcggagggtacaattgggcgatttatttctaccccgatgggaagagcgtggaggacaatgcaacctacgtgtcgctcttcatcgcgctggccagcgaaggcaccgatgttagggcacttttcgagttgacccttttggatcagagtgggaaggagaggcacaaggtgcatagccatttcgagaggactcttgaaagcgggccttacaccttaaaataccgcggtagtatgggttacaagcggtttttcaagagaacagctctagagacatcagactaccttaaagatgattgtctgtctgtgaattgtagtgttggtgttgtgaggtcacacacggaaggtccgaaaatctataccatagcaatacctccttctagcattggtcagaaatttggacaactgctggaaagtggtaaaggcagtgatgtaaattttgaagttaatggtgatatttttgctgcacataaattggtactagcagctcgttcacctgttttcagagcacagctttttggtcctatgaaagatcagaatacccagcgtattaaagttgaagacatggaggctccagttttcaaggcattgcttcattttatatactgggactcactaccagacatgcaagagcttactgggttgaactcaaaatgggcatcaaccttgatggctcagcatcttctagcagcagctgatcgatatggcttagagagacttaggctgatgtgtgaagcgagtctctgtgaagatgttgctattaatactgtggctacaactctagccttggcagagcagcaccattgtttccaactgaaagctgtctgtctcaagtttattgctacctctgaaaatcttagagctgtgatgcaaactgacggatttgagtacttgaaggaaagctgcccatctgttctgactgagctattggagtacgtggccagatttactgagcattcggacatcatgtgcaagcataggaatgaagcattacttgatggcagtgacataaatgggaggcgggtgaagcaaaggctctaatatgtgaagaacactgcacagctttctgtacatccctcttctactctccgttttaaaagatagcgagagcatggttagagggagaatatatataatcttttataggatcagaggcaatttttaattttcttagcttattcatgtgtaagagatgtaaatgtaatttgtgttgttgctgttactgttctgtttcacgtgtaggtttctgtaatatcttcagtatcactttttactggaaaacatgccttgcaagtgttgatcattactttttatattctgtatgcttattattcaaatgtagtagcgtaagtgcccttgaaacatttgactggcatcatctt

SEQ ID NO: 11502 - DNA, 1062 bp, Glycine max; identical to SEQ ID NO: 8425
  Clone ID: 701065883_FLI

SEQ ID NO: 11503 - DNA, 897 bp, Glycine max
  Clone ID: 701065932_FLI
aggggcaacctcatctttgtcttcaattttcattggaccaacagctattcagattacagagttggctgctcaacccctgggaaataataagattgtcttggattcagatgatgccttgtttggtggcttcagtaggctcaatcacgctgctgagtacttcacctcagaaggatggtatgatgaccgacctcgatcctttcttatctatgcaccttctagaacagcagtggtttatgccctagcagatgaagctgaacctgccctagcagatgcaactgaaccagagccagttgatcttgatgacaagcttctgggatgaatgttacgagtgcacaaaggcatggatgcagtaaacccctagtcaaactagccaaccagcgtctgatggtttaaccgccactggaacatcaaagaagcagaattttgaagtggaataagtgaagcgctagttcatctttagtgaggcaggagactagcctcgaaatctagtacatgtgccttgctaggtaataagttgtgatagcacacccatcttcctatttttactttttaggatttatcgtcttgacatgttataagttgcgccgcgattgagaaatgtgaatcaacaaagctatggtccgcgaacctgagactcaatgtacctatgcacatatcaatcttcattaagtgcatactctgttaagagttggaagcttccaaggggcttttaccgtgggaaattttgcaggaggcttttaaatatgtttcctttagattttatttttatttattgattaaactgtttcctttatatttcaaagttgagttgtagcacaactcagagtattctatgcagtgtaataaagacattgtacacggtcataaaaaagaaaataaaataatcgcctactgtat

SEQ ID NO: 11504 - DNA, 313 bp, Glycine max
  Clone ID: 701066075_FLI
atgaagaagtacccaaaaaaagtggttaaattagagccttagaaattaagtagacagtgtgattttgtttgcatagattgttttgtgagattttatagttatatatttcgtgagtccttttattttaggtttgcttagtctgagcccaataatgtggtggataaaaatgcgcttctaattcatgttatttgtcattttttcaccaagaaatgaattttatttaccatagatgcaataatttgctgctttctttgacatcttgtcggtgtggagaactaaagagtaaaataaaggcatccttcaatatttcacc

SEQ ID NO: 11505 - DNA, 539 bp, Glycine max
  Clone ID: 701066172_FLI
gtcgcgttgtgttgcgtcgtgtcgtgcgctgttcctctgtttctcgtttttgtgttcagaccgaaccctagctccgcatcgcaaccatgtcgaccaagcaaggtggaaaagctaagcctttgaagaaacccaagtctgataagaaggattacgacgagattgatgtggctaacattcagaagaaaaaggaagaggagaaggcgctaaaggagttgaaagccaaggcgcaacagaagggaagctttggaggttctgggctcaagaaaagtggaaagaaataagggctctttatcatgattgtatgcattcaatattgagccctgtaattacagttgctaccatgataacttctcttattattgtggcctactttattgctaatgtgtactgaactgaggtatgtcgtgatgtaagctgcaataagttaattgtctgtagctttattgtatccccttcatggggttctgataattacatccttttagtagtgttgtggatttggcatagacttgttcaagtaaataatggcatggcttgcg

SEQ ID NO: 11506 - DNA, 657 bp, Glycine max
  Clone ID: 701066231_FLI
aacaaatttccaaacagagaaggggcaacacaaaaatgaagaagggtctctcctttgtgctgctgctgatccttgtgatcatccactacaaggtagtcaacgccaacaacaacaactgtgttacagaggattgcctcattggtcatagtttggagtcagagttctcgtttggctcccatgtggcaagaatgctctatgatgtgagccaatctgtgtctggccaaacagggaatagcaacaatgctgctgttaattgtccagaaagcaatggttatcgtagctgcttgccatctcaaaacggtggtggccctaaccaaaattgcggtgattacaccaggacttgctaagaaatatattaccagcaggtatttcaattctgatttcaaggttgtcatattattgagattgtcataatctgaagatgcgtgtaataattgttgctgtcggttcatacttgtgttgtggatgtattattgtgtatcacatgtagtcttggttattaaatgttgataagaatagtattccattcgagatggaaaagtttgtgagaaatatattaccagcaggtatttctggaattttgttttctacacagtgaaattccagctgttattatcagttatgagattgtggcacataaaataaaatttgtgtatt

SEQ ID NO: 11507 - DNA, 833 bp, Glycine max
  Clone ID: 701066283_FLI
tgcatctgggagtgggagagaaagatgccgaagaggacaacgcacacatactcaagcgaggatgcagctccggagggtcctcactccgatctctttgtatattactgcaaacattgcggatcccatgtcctcataacagatacccaattgcagaaaatgcctaaaaggaaaaccgacaaagcttatgtactggacaagagcaaacatctggccagattgaacatgaaggaaggcgggaaagtagtgttaaaacgaggggaggggaaaatggagaaacaattccgcatgaactgtatggggtgtggactgttcgtatgctaccgggcggaacaagagttggagttatcgtctttgatatatgtccttgatggtgccctcagtactgttgctgccgaaaccaacccacaggatgcccccgttccaccctgtatatcccaccttgaaggcggactcgttcaacttgctatagaagtcgaagatcgtgctcaacgttctgcaatcaccagagtcaatgctgatgatgttcgagtcactgttgctgctcctgctgcccgtggagaggctaacaacgaactcttggaatttatgggaaaagttttgggcttgagattgagtcagatgactcttcagcgaggatggaataacaagtcaaagctgcttgtggtagaggatttgactgctagacaagtttatgagaaacttttggaggctgtgcaaccttagctttagtatccatgctgtccttccatagcaagccaggttgaatctcattttttcctgtaaaaatgactttgcggtttaaatttcagctgtaatgttatttacttggatac

SEQ ID NO: 11508 - DNA, 854 bp, Glycine max
  Clone ID: 701066326_FLI
aaagagctgcagattgagatggattaattatctgaggccagacctcaagagaggtggatttactgaaatggaagaggatcaaattatacagctacattcatgtctaggtaacaggtggtctaagattgcttcacattttcctgggaggacagacaatgaaatcaagaaccattggaacacaaaaatcaagaagaggttgaagctcctaggtttggaccctttaaccctgaagccatctgagcaaaaggaaaagtctgttgatgacaaaaaaaatatagaattacaaccaaacacttcaaaagggtctgaacaaggtgtagagaacaagtccttagatatgcatagcacaagagaagtgccaaaaacagaagggaaaatagaagaaaacaaggtgacttgggatgataccactggatttttcaacaattatgaaatgttgtgctcacagttggacttgggatcatggatgagccaagaaaccaaaaccagcactagttcttattgtagttcttctttctcacttgatgattctagcaacctttctgtgggtgaatcctcttaccttcaggaaaattccttacaacaatgggttgatggtttggattccattttgtcatgggatagcttcaatcctcttgagaaagattttctcttcttggataataggcaatgagcacaaccacctcatgaaactgcacaatttttacaatctctcaatcaataaaatgttacaacatttcttgtgtagaatactgccactgcttttcttaatgtgattccatattgttgaatgtgaattggatattttgttattgcttgttcatccatattatatgaattaaccaagttgaatg

SEQ ID NO: 11509 - DNA, 558 bp, Glycine max
  Clone ID: 701066875_FLI
ctcttctcaattctcatattccaatgtcaaatcctcaaacaaacaataaccgccaccagcccagccgcctgcagcgccgcgccccctcctccctgcaaataaaccgcgccgtcgagtggaacgtcgccatccccctcctctccccgctcgcatcctctccgccgccgatggagctaaaaccgccgcaagagccgccgcagcgggaggcggagaaggtcaccgtgtcgttcaagaagtggcagcaccccgccgcacctttctgttacgagcccgctcccatggtgcctcccttcgttcccgtgtagatatacaaaccaaagaaaaagaagaagatgaaggaacagagagagttttaggatgctgctatctaatggttcatactactatttagatagaatgaagaagatctaacgctgtatttttaattaattattattgttcctttttttttgttggggagaggctttgccttgttttgcacacggggattatcatgttcatgcttcattcattcatgtgatatgaatgaacattacaccccctctgtgtttttttctc

SEQ ID NO: 11510 - DNA, 694 bp, Glycine max
  Clone ID: 701067133_FLI
caacagacgcttgacctctctcattccccatttcctcacctccttcaaccgctgctaaattctagggttccgaaatggacgctggcggaaagatcaagaagggcgccggagtagaaagggcggcggccaagagaagaagccggtttcaaggtccgtcaaagccggtctccaattccccgtcggaagaattggccgttatttgaagaaaggaaggtacgctcagcgtgtcggtaccggtgctcccgtatacttggctgcagttctcgaatacctagctgccgaggtgcttgagttggctgggaatgccgcacgtgacaacaagaagaacaggattattccaagacacgtgcttttggcagtgaggaacgatgaagagttggggaaattgcttgctggagtgacaattgcacatggtggcgtgcttccaaacatcaaccctgttttgttgcctaagaagactgagagggcttccaaggaacctaaatctccatccaaggctaccaaatctcctaagaaagcttagattacttttttattttccatatttaatttagtgttgtatatcggtgtttaggtgcttttggtgtaacaggatattttatgtgtttcgaaaacactgtaattcttgtcccaatttgttgcttgtaggagtgagtttgcttcgttaatgaaaagtggaaacccccttgttttc

SEQ ID NO: 11511 - DNA, 525 bp, Glycine max
  Clone ID: 701067440_FLI
ctgctaagcaagctgtcaaaacaactcctgagctgacaaggtctcctagtaaagctgctagcatgttttctgggacccaagaaaagtgtgctacatgtggcaaaactgcttatcctttggagaaggtaacagtggaaggtcaggcctatcacaaatcttgtttcaaatgttcacatggcagctgtcccataactccatccaactatgcagccctggagggcgttttgtattgcaagcaccatttttcccagctttttaaggagaaagggagctataatcatcttattaaatctgcatcaatcaaacgggaagcaaactctgttccacaagcttgagtcatggtgttgtcttttgttgttattatcatctttggaataagtgtttgtgtttttttcattttgattctacttaccatgacaagtttccttcttgttcactttatatgtgggtgtcgctagtgtgcaatttacagtgtgtgatgtatttgaccaatgcacattcagtaataatagtgtgatttgcaag

SEQ ID NO: 11512 - DNA, 1432 bp, Glycine max
  Clone ID: 701067648_FLI
catcattaaccaaaaaaaaaacatcaaaattaaaagaagcaagcatgggggaatccaatgtcatgaccaagactgaggatggtgcttgtctgtctgcaatgctgcttagtactaatctagtgtaccctgcagtactgaatgctgctattgagctcaacttgtttgagatcattgctaaggcaacaccagctggttcttttatgtcatcccatgaaattgcttctaagctcccaacacaacaccctgacctgcctaataggcttgaccgcatgctgcgtttgcttgctagttattctgttcttactacttccactcgcaccacacaccatggtgccactgaaacagtttatggactctcacaagttggacaatactttgtccctgacggaactaggggctacttggcttcattcacagcatttgtctgttatccaccactcttacaagtttggtcagtgattttaactcctatatacgtatatcacatagaggacaggtgtatgtatgtatgtatgtatgtgttgcattttgaaaagaaaaataatcattattgtctttggtacattttaaaatgaaagaatctttctttgctccaatgttcttaactttccaggctgaacttcaaggaagccatggttgatgcagacattgacttgttcaagaaaattcatggggtaacaatgtaccagtacatggaaaacgatccaaaaatgaaccaaatctttaacaagtcaatggccaacttgtgtgcaacagagatgagtagaatacttgaaatatacactggatttgagggaatatcaacattggttgacgtaggaggtggcaatggacaaaatctaaaaatgataatctccaaataccctttaattaaaggaattaactttgatcttccccaagtgattgaaaatgcaccaccccttccagggattgagcatgttggaggcgatatgtttgcaagagttccacagggtgacgccataatactgaaggctgtataccacaattggtcagacgaaaaatgcatagaatttctgaggaattgtcacaaagcattgtctccaaatgggaaggtgattgtggtggagttcatattgccagaagaacccgaaccaactgaagaatcccagcttgtttccactcttgacaacctcatgtttatcactgttggtggaagggaaagaactcagaaacaatatgagactttgtgtaagctctctggattttcaaattttcaagttgcttgtcgtgccttctctagtctgggagtgatggaattttacaaatagcttagaattttaagataaaagtattaagagcaaactgataataaagaccttcatctgagctctaggtcaccactttcttgttgtactttccactttcatgtgatgtaacgtttatgcatattaaaataaattgattttggttt

SEQ ID NO: 11513 - DNA, 1213 bp, Glycine max
  Clone ID: 701067675_FLI
tttgtttaatttctcattcttaatctttgtttccctttgccaggttttttccttccttgtagacttgatgtattttcactctgtctctgcagatggaaaattcgagaagtcagcaatagcggactttgtcttctccaacaagcttcctttggtaacaatttttacaagagaaagtgccccatcagtctttgaaaatccaatcaagaaacagttgttgctgtttgcaacttcaaatgattcagagactttggtcccagcatttaaagaagcagcaaagtctttcaagggaaagttgatctttgtatatgtggaaatggataacgaagatgttggaaagcctgtttcagaatactttggtatcagtgggaatgctccaaaagtacttggatacactgggaatgatgatggaaaaaaatttgtgcttgatggagaggtgactactgacaaaattaaggcatttggggaagatttcgttgaagacaagctaaaacctttttacaagtcagatccagttcctgaaagtaatgatggtgatgtgaaaatagtagttggtaataattttgatgaaattgtcttggatgagtcaaaggatgttctcctcgagatttatgctccctggtgtggccattgccaatcactggagccaatatacaacaagcttgcaaaacatcttcgcaatattgattctcttgtaatagccaagatggatggaacaacaaatgagcatcccagggctaagcctgatggattccccactcttctcttcttcccggcaggaaacaagagttttgaccctattactgttgatacagatcgtacagtggtagccttctacaagttcctcaagaaacatgcatcaatcccattcaagctccagaaaccaacctcaacttctgaatccgattccaaggggagctctgatgccaaagagagccagagtagtgatgtgaaggacgaattatgaggagttaagtgatatatttttatttatagaaactatgattcagacagatgatgacatagtgactgaggtaaaaaataccaagttacttctcacccctggtcaataaaaaacaaacggggagtggggggagagagacaaatgcgaggcacacatgtattactattaacttcaatttgtacaacagtgggtaatttagaattttgattttgggttgagacttcaataaattcccccttaaattccactttt

SEQ ID NO: 11514 - DNA, 401 bp, Glycine max
  Clone ID: 701067910_FLI
cttaagcttgctactgagtttccacactgcataccttaggtcttccgaattcgaagttaatttgcaagatggctaaggaaaaggctcagatcaacattgtggtggttggtcatgtggaccctgaggaggcaaccaccattaacgagctgaagaagcctgttgtggagaaagaagctccagggcatgccatatgagggcatgcacgtacggcctcggaggggaaccagaaaattatgttaacaaaataatctggaaccctaatgtatcagtgtcatcatcagtgtgtagtttaagctagctttgctatggttacgttctttgagatgagagtcttgatgaacagtaccattctgatgtattgctttccttgaaagttaatgcatgcttcttatcttctgtct

SEQ ID NO: 11515 - DNA, 1013 bp, Glycine max
  Clone ID: 701068004_FLI
attgcagaggatattacagatgcacatatagaaatgtacaaggatgtctggccacaaagcaggtgcaaaagtcagatgaagacccaatgatatgtgaaataacctacaaaggaagacacacatgcacccaagcaagtcacttaaacaaaacagtgatacccccatcaaagacaaaggtgaacttgttgggagaaaataagcaccaaacccatcaaattaagaatcaaccacggcaagagaaaatagaacaacaaccaccagagacatttttcacatttggatcatcatcaggtcttgaagttaaaatagaggacatcgaccacaaggagggcatattcccatcattttgcttttcttctccatcaatagtagggtcagaaaatggggacgacaacaacagcagcatattctcatacaccatgattgagaacaacttaatggaaagcttctctcctgccttcatatctccaacaacttcagatatagaatcaaacactttctgccactgggggagcactggactaggccaaagtgtgcaaagctcagggtctgatatcactgatatagtttcagcaccaacttcagtcaccaattcaccaataatggaccttgatttctttttcgataagatcgatttcgacacagatttccctttgagcaccatggaactttgcacttaataaattgtccccacttctaagtttacagcatatgtgatttctatgcggattaactgtgagttttgtagatcctgactagcaccataaccgagggaaggaagtctataataatcaccatagatcatgtccataaatgaagacaatgaaaaacttccctcttgtgctaattaagagagttttcatgtacctaggctgcaatgtgaaaataatttgtaggttgtagcttaatttggtgcatgtttggtttgcaatggaaattgttgtaatgcgcgttccaatgtagatcttatggataaaagtaaaatgaaatcaaaagagttctaatcttttagc

SEQ ID NO: 11516 - DNA, 576 bp, Glycine max
  Clone ID: 701068116_FLI
cgctcttcccaaaaccctagattccctccaaacagaaagctacgatgccaaccctcaccaatttctactccatcaaagatttatcccagcacactaccaaagacgattgctggatcctcgttgatggaaaggtatacgacgtgacacagtatttggatgatcatcccggtggagatgatgtaatcctcgccgcaaccgggaaagacgcaacagaagaatttgaagatgctggccacagcaaaagtgctagagaacatatggagcagtattgtattggtgagcttgacacatcttctccaatttccaccaaagaaaagttcatacaactcactaagcaatattgggttgttccggcaaccgtcgtcggtatctcggtggtagtagctttcttatacttacgtaagaagtagcactacacaagtctgcaattcaatttttttgtcattgttacaacaaactttgtattgctatgaaggataatttggcttatttcaaaacagtaatgattgattatatgcatgatattacattggaggtttgataattaaaaaaaggtctttaggatcacatttgtgt

SEQ ID NO: 11517 - DNA, 400 bp, Glycine max
  Clone ID: 701068125_FLI
ttaagcttgctactgagtttccacactgcataccttaggtcttccgaattcgaagttaatttgcaagatggctaaggaaaaggctcagatcaacattgtggtggttggtcatgtggaccctgaggaggcaaccaccattaacgagctgaagaagcctgttgtggagaaagaagctccagggcatgccatatgagggcatgcacgtacggcctcggaggggaaccagaaaattatgttaacaaaataatctggaaccctaatgtatcagtgtcatcatcagtgtgtagtttaagctagctttgctatggttacgttctttgagatgagagtcttgatgaacagtaccattctgatgtattgctttccttgaaagttaatgcatgcttcttatcttctgtct

SEQ ID NO: 11518 - DNA, 1464 bp, Glycine max
  Clone ID: 701068213_FLI
gtaattgtgaagtgaaaggaaaaaaagttgcatagtgagagagagatggtgggctcaggagcatcagataggagcaaagaagctgttgggatgatggcccttcatgatgccctcagaagagtctgtctcaactcagactggacttactctgtcttctggaccattcgtcctcgcccgagagtccgaggtggcaatggctgcaaggttggagacgatagcggcagcttgatgttgatgtgggaagatgggttttgccaaggaaggggttcaggatgtctggaagatattgatggagaggatcctgtcagaaaggccttcagcaaaatgtccattcagttgtataattatggagaagggttgatggggaaagttgcatctgataagtgccacaagtgggtctttaaagagcccacagaatgtgaaccaaatatctccaactactggcagagctcctttgatgctcttcctcctgaatggacagaccagtttgagtcaggcattcagaccatagctgttattcaagctggacatggtcttctccaacttggttcttgcaagattattcctgaagatctccgttttgtgcttagaatgagacacacttttgaatcccttggctaccaatctggtttctacctctctcaactcttctcttcaacaaggaacacttcctcatcaacttctgttccctcaaaaccatccaccattccaattaggccacctcctccactcttcaactggggtcagaggccactttcttctgccacttccatgctatcctcaccgaattttcaacaacatgaagccaggcttgggtttccaaaagatgaggcgcacatgtttctcatgcctcatgcatcatctgagggtgcaagaatcgaggacatgatgggggagcatgaaaacgacataaaatggcccaatggcttgtctttcttcaatgctctcactggaagaacagatgatgctaagctcttgttcaatcctgagagcttggggaacaaacctggtgatcagaatcagcatcacactattggccaaaaccccaattcagatggatccaacatgcaaaatgctagtggtggaaccaacccaaatgagttcttgagcttggatagccaccaagatgatgcaaggaaaatggacaagtttaagaggagcttcactcttccttcaagagtggcctcatcaacttcatccacttcaatggatcaacatcaacaacaacaacaacaaggtgtggagtatacgaattcagaaggaggtatgtatccggatgtcatggaaacctttttggagtgaattgaggtgagttttttagtcgggggaaaaaatgaaaaatgaaagatgagaatttgtatctaggaaaaagttactacttgtgttcctttttcatgtgttggcttttcactttgtatcctgtgtttcttctgtcttccactttatgagacttgattaatgatc

SEQ ID NO: 11519 - DNA, 891 bp, Glycine max
  Clone ID: 701068223_FLI
cttttaaataccatgtttcttctttctttaaaataatatttactaattgatcactaccaaaaacagctggtcttcttagatgcggaaaaagttgccgactgagatggatgaactatctgagacctgatataaagagaggaaacataaccccagaagaagatgatcttataattagaatgcactcacttttaggaaatagatggtccctcatcgcgggaagattaccaggacgaacagataatgagattaagaactactggaatacccatctcagtaagaagctgagaaatcaaggaacggatccaaatacacacgacaagttaactgaggcaccagagaagaagaagggcagaaagaagaataagcaaaagagtactgagaataacaaagggtcagagaagaccttagtttatctaccaaaaccaatcagggttaaggctttatcgtcatgtatacccagaacggatagcaccttaacccttgattcgaattcagctacgactgcatcaacaagccaagagaaagttcaaagcccagaagcagaaacaaaagaggtgaacatggtttggggggtaagtgacaatattggagacaatggtgggattggaatattctttggtgaagaccatgacctagtcaacagtgcctcttacatggaatgctattctgatgatcatgatacgctagaaaagctctatgaagagtacttgcagctcttgaatgttgaggagaaaccagatgaattagattcttttgctcaatctttattggtgtaaacgtacaaataatggtgaaaatatatggttggaacaaataaaacaaattaagtttgctcctgctagcacgtgaacatattgtattatttattcctcagattagtatcatttattt

SEQ ID NO: 11520 - DNA, 323 bp, Glycine max
  Clone ID: 701068244_FLI
gtctgggtatcaatcttgctacagcagacactgttataatatttgattctgattggaatcctcaaaatgacctgcaggcaatgagtagagctcatagaattggacaacaagaagttgttaacatttatagatttgtgacaagcaaaagtgttgaggaagatattttggaacgtgctaagaagaaaatggttctggaccacttggtgattcaaaagctaaatgcagagggtaggctggagaagaaagaagccaaaaaaggaggaagttattttgacaaaaatgagctgtctgcaatcttacgattcggagcagaggagcttttt

SEQ ID NO: 11521 - DNA, 1343 bp, Glycine max
  Clone ID: 701068367_FLI
tcgttttgctcgatgacttcgccatcaaatcctctcattctctcttcttcaactccctcaaatctcgcggcttcgatctccaattccacctcgcagacgaccccaaaattgcgctccagagatacggccagtacctctacgacgccctaattctcttttcccccaccattgaacgttttggaggatccattgacgcggctgcaattttggattttgttgattcgggtcatgatttgatcgttgctgctgatagcaatgcatctgatttaatcagggaaatcgccaccgagtgtggagtggactttgatgaggatcctgctgctgtggttgtggatcattcaggatatgcagtctcggctactgaaggagatcatacattgattgctagtgatgattttatcaagtctgacgtgatattgggaagcaaaaaaattgaggctcctgtacttttccaggggattgggcattcactaaatcctaccaatagcctggtgttgaaagttctctctgcatctccttcagccttttctgctaacccaaaatctaaattgacaagtcctccatcactcactggaacttcgatctcattagtttcagttatacaggcaagaaataatgcccggatattgatctctggctccttgagtttgttcagcaaccgatttttcacgtcaggtgtgcagaaggctgggagtccaactaaacacgagaagtctggtaatgagcagttcttgaatgaacttagcaaatggattttccatgaaagaggtcacctcaaggcggtgcatgtgcaacaccacaaagttggggaagctaatgaaccagccatctataggatcaatgataatttggaatactctgttgaagtttatgagtggtctgggacaacatgggaaccttatgtagctgatgatgttcaagtgcaattttacatgatgagcccctatgtcttgaagactttatcaactgacggcaagggccattatttcacatcatttaaggttccagatgtctatggggttttccaattcaaagttgagtacgaaaaacttggatatacaagcttatctttatcaaagcagattcctgttcgtccctttagacacaatgaatatgaaagatttataccagcagcttatccctattatggagcagcattttcaatgatggcaggcttcttcatcttcaccgcagttcatctatacagcaagtagatgtaaacctttgctttaaaatactgtagtctgtagtacggggttttggacttattttgagataaaaaattttgattaggcaatgatattaactgatgtttctaatttattatagatgcattacttttc

SEQ ID NO: 11522 - DNA, 1383 bp, Glycine max
  Clone ID: 701068676_FLI
agacaaccacctcgacgaaatcgaaacggctaacaacatcaacaagcgcctcaagccatctccagcggaatcagcagactccgccgcgtctgagcccacgcgccatgtcgtcctcgttgaccatcaggaagccggcgtgcgtctcgtccacactctcctggcgtgcgcggaggccgttcagcaggagaatctcaagctcgcggacgcgctcgtcaagcacgtgggcatactcgcggcttcccaagccggcgccatgaggaaggttgcttcctacttcgcccaagccctggcgcgtagaatctacggaatcttccccgaagaaaccctcgattcctccttctccgacgttctccacatgcacttttacgagtcttgcccttatctcaaattcgcgcacttcaccgcgaatcaggccatcctcgaagccttcgccaccgccgggaaagtccacgtcatcgatttcggcctcaaacaagggatgcagtggccggcactcatgcaggccctcgcattacggcccggcgggcccccgactttccgtttaaccggaatcgggcccccacagcccgacaacaccgacgcgctgcagcaggtgggcttgaaattagcccaattggcccaaatcatcggcgtccagttcgaattccgcggcttcgtttgcaacagcctcgcggatctcgacccgaatatgctcgagatccgacccggggaagccgtggcggtgaattccgtcttcgaactccaccgcatgctcgcccggtccggatccgtcgacaaggtcttggacactgtcaagaaaattaatccccagatcgttaccatcgtggaacaagaagcgaaccacaacggaccgggttttctagaccggttcactgaagccttgcattactattccagtcttttcgactcgcttgagggttcgtcttcttcttcgaccgggttgggctcgccgagtcaggatctgttgatgtccgagttgtaccttgggagacagatttgcaacgtggtggcttacgagggcccggaccgggtcgagcggcacgagactttgactcagtggagggggagattggactcggccgggttcgacccggttcatctcgggtccaacgcattcaagcaagcgagtatgctacttgctctattcgcaggcggtgatgggtatagggttgaggagaataacggctgcctcatgcttggctggcacactaggccactcatcgctacctccgcttggaagcttccctcctccagcgagtctagtggcttgactcagtgaatgtaaaactatagattaattggacttgttccagtgaactgagtcagtgaccgagtcagtgagccttccaggcagcaagaggataaataaatgagagggtgaac

SEQ ID NO: 11523 - DNA, 1433 bp, Glycine max
  Clone ID: 701068964_FLI
gcttgtgttagtgaggttagaagataaagaaagaatggcatttgcaggaacaacccagaagtgtatggcctgcgacaaaacggtttatctggttgataagttgaccgcggataaccgagtgttccacaaagcttgcttcagatgccatcactgcaaaggaaccctcaaggtctctctccctcttttacaattcttgttgattatatagtctctatctagttcaggcttctagctttggatctggtgtctgtaatttggttattagaaggcatgtgaatgtgctggatagcgtgtttggaaagaattgggtcgcagatcgccaccttctctccatgtctaaggatcaaaatacatggaagttacttcaagttgcttctgatgaatgtggtttatcacgtttgcactgtgtttccaaacacacagggaaacagaataatgactaacatcaatcttagaagcatttcctttaagtagtaattcagagttctttttctttatatataattttaagcactttcttcttaagaacatattatgtctctgtctcaaaactttccatgatttcatgataatactgataaatgatataggaaattaggaacctctttttcccttttggtgtattaaaggcttgttagcacattgcaattttcattaaatgatgttttctgactaattaatgtatctatctgcagctgagcaactacaactcttttgagggagttctttactgcaagccacattttgaccaactgttcaaaagaactgggagccttgacaaaagctttgaagggacaccaaaaattgccaagccagagaaaaatttggaagagaaacctgcagcagccaaagtctcaagtatgtttggtggatcaagggaaaaatgtgctggttgtcagaaaacggtgtatcccactgagaaggttactgtgaatggaactccttaccataagagttgttttaaatgctgccatggagggtgtgttatcagtccttccaattacatagcacacgagggaaaactctactgcaaacaccaccatgtccaattgatcaaggagaagggcaatttaacccaacttgaaggtgacaatgagaagagtgcgactaatgggaaaatcaatggtgaagaagtttccgcagagacatgaaggagtcgagtctcagaattttgctttctcaagtttcatatttgtgcaccatatatttctactctctcttgcttttaccattactttgcagtccgggaagctctttacccgtgacaaatatggtattctattttttgttagacaaagtgtgcggatcttcaccatatgtttttggttgttgtgagcgtttgattcaaaatgtgtgatttagaagtacatgttactgcacttcttaacactctcatggacttccaattgatattatatacaatcgttacaccc

SEQ ID NO: 11524 - DNA, 596 bp, Glycine max
  Clone ID: 701068966_FLI
attcttcgttattgtgttcccttctccaatgatgccggaaagtgacatcactctatcctctttcaggcttcgttgggacgtgttcctgagcttcaggggcaccgacacgcgggacactttcaccatgagcctctaccacgctctccaccgccgcggcctccgcgtcttccgcgacgacgacgggctggagcgcggcgacgagatccagaagaagcttctggaagccattgaagactccgccgccgccgtcgtcgttctctctcccgattacgcgtcttcccattggtgcctcgacgaacttgccaagatttgcaagtgtgggaggctgatccttccggttttctactgggtcgacccttcccatgtcagaaagcaaaagggtccctttgaggattctttcgggtcccatgcaaacaagtttcctgaagagagtgttcagcagtggagggatgccatgaaaaaagtgggtggaatcgctggttatgttttggatgagaaatggttggttataaattaatattttgctagatatgaaaattgtttcagcttttaactttttagaatctctataatctatatggtttatccttgtcctg

SEQ ID NO: 11525 - DNA, 396 bp, Glycine max
  Clone ID: 701069104_FLI
aggacaagctcgctgacaagttggagtctgatgaaaaggagaaaattgagactgctgtgaaagaagcactggaatggctggatgacaaccagagtatggagaaagaagattatgaagagaagctgaaggaggttgaagccgtttgcaacccaatcattagtgctgtgtatcagagatctggaggagccccaggcggtggtggtgcatcaggcgaagaagacgaggacgattctcacgatgagctctagattagtcggagtctgttaaatttttatgatagctgggaattaagaagtcccctgcgcttgcttttttggtggcgatgataagatactttgtgaaattacttgtactttacttttttgcttagttttacgacgaaacttcttcagctgt

SEQ ID NO: 11526 - DNA, 824 bp, Glycine max
  Clone ID: 701069261_FLI
gaagagccggttcgtgaaccgcgtggtttcgtcaatgtttaacactgttgcaaccaaaaagatagcaattcttgggtttgcattcaagaaggacactggtgacacaagggagacaccagccattgatgtgtgcaagggactactcggcgacaaggcgcgcctaagcatatatgatccacaggtcactgaggaccaaattcagagggatttatggatgaacaagtttgattgggaccaccctattcacttgcagccaactagtcctacaactgagaagaaagttagtgtggtttgggatgcttatgaggcaacaaaggatgcagatggtgtttgcattctaactgagtgggatgagttcaagagtcttgattatcagaaggtgtatgacaacatgagaaaaccagcatttgtttttgatggaaggaacattgtggatgtggagaagctacgtgagattggtttcattgtgtactcaattggcaagccattggatccatggctcaaggacatgccagctgtggcataagagagacatttcatctcaaggattttgaggcattattcagtttggttcaattttattactactggcaattgttttttggaacaattttcttggttgccatttttcactttcccataatagttggcataaatgagtataaattttgggaaagtaggaggtcatatgttttgggtttccttgtactgcaagtcatcactactatttggatgttttgagtttataaggatttttttattttatttgattagtatggtgttactatcagtttgatgaatgaattggaaattccagcatgagg

SEQ ID NO: 11527 - DNA, 423 bp, Glycine max
  Clone ID: 701069313_FLI
ggttttagaggaactcaatgagataagaagaaacggggatgaaatagttgaaagggaagggccaaagacaattattggtggatgtatagatagggagggttccagtgatatgcctagtgctttcctttgccccatacttcaggaggcaatgacaaacccacacgtggcagcagatggattttcttatgagctagaagcaatagaacactggctgcagtcggggcgtgacacatcaccaatgacaaatttgaggctgaagcacacattcctcacccctaatcacacccttcgttccctaattcaggactggcagaccaacaaatcaacctagagttacacattagtactgaattctttttaggttaaattagtattgttgtcctttaatttattatttaagtttaatttagttttttaattttt

SEQ ID NO: 11528 - DNA, 527 bp, Glycine max
  Clone ID: 701069857_FLI
gctgggaagaggcagtgcagtggttctactactttgcttcttgctgcttcactctcagatggctcgtgctgccacctacacagttggagattctgggggttggacctttaacactgttgcctggcccaaaggaaagctctttcgggctggtgacacacttgctttcaattatagccctgggactcacaatgtggtggccgtgaacaaggctggatatgatagctgcaagactccaagaggagccaaagtgtataagtcagggacggatcagatcagacttgccaagggacagaactacttcatctgcaattatgttggtcactgcgagtctgggatgaaaattgccatcaacgctgcctgagtttaataatatggttaacttcccatacatattgtattgtaatgcaaattgcaccctttagtgggaagttagctcctttaaataatgttaagaaaaaaagtagctatgtgtgctcttctataaatgtcacttatctataaagaataaatgtcggcagtcggtgatc

SEQ ID NO: 11529 - DNA, 1961 bp, Glycine max
  Clone ID: 701069867_FLI
gtggcgcagtggctcagttactctttcaaaaccctgaaaatccaaaatcagccatggtttcaaatggtaggatgctgtgttcaagcttgattacagcacctccgtcatcctccctctccagaactactccatcctacttctgctcatttccttctcgtagaatcatcttcacgccaagaattggatcatctccggccccggcccaggcccaggcccagcccaaggaagccaagctctggggtggcaggttcgaggagggcgtaaccgacgttgtggagaggttcaccgagtcgatctccttcgacaagaagctctacaaacaagacatcacgggaagcagagcacacgcttcaatgctcgctcaccagggtttgataagcgagattgacagagactctattctccaaggattggatgaaatagagaggcgcattgagaatggagagttcaattggagagctgacagggaggatgtgcacatgaacatcgaggccgcgctcaccgacttgatcggtgagcctgccaagaagcttcacactgcgcggagccggaacgatcaggtcttgacggattttcgcctctggtgtcgggacgccattgacaagatcctcctgagcatgaagcagctccaggtctcgctgatcaccctggctttgaacaatcagggcctcattgttcctggctatactcacttgcagcgcgcgcagccggttttgctgcagcatcttctcttggcttatgttgaggagattgagcgtgatgctggtcgtttggtagattgtagggctaggatgaatttctgccccttaggagcttgtgccttggctggtacagggcttcctattgatcgattcatgacttccgaagctttagggtttacggctcctttgaggaatagtatagatgctgtttcagaccgagattttgtactggagtttctttctgctaatgccatcacagctgtgcatctttctcgacttggtgaagagtgggtattgtgggcttcggaggaatttggattcatcacaccaagtgactctgtttcaactggaagtagtataatgcctcagaaaaagaatccagatccgatggaacttgttcgtgggaagtctgccagagtcataggggatcttgttactcttctcacattgtgcaaaggacttcctcatgcttacaaccgcgatttgcaggaagataaagaaccagtatttgacagcgttaaaacaattttggggatgcttgaggtatcagcagaattcgctctaaaaattactttcaattgggaaagaatacaaaaggcattacctgctggtcatcttgatgcaaccacacttgctgattatcttgttaataagggcgtgccatttagaacgtctcacgatatcgctggaaaatctgttgctttatgtacatcgaagaactgccaactgctagacttaagtcttgatgagctgagaagtataaatccagtctttgaggaggatgtgtatgaatttcttggagtagaaaatgcaattaagaaatttgtctcttacggctccaccgggtcagcatgtgttgccagccaacttgattattggctgagaaaacttgaaatgaagtgaaggtttctttaattgtcatgaaattctcatcgtgctagggaaaccaattcctaaaacttgaatgataactcactgcattgcgaaagatcctgcaacacgtaattctggaatcaaccaagatgatacctttgagtatttgaagtctgcgagaacatcagttgttatatgcaaattagtcagggttactgaataggtagtttcagaatcaaatgtgccatgccttaagctatgagctttttgcattttacattaccaccagttcgactgtaattttcagcgtgccgaatgaattttgtgtagcttttaaccaaataaagttatctttagccaccagacggcaagagcttttttcatttt

SEQ ID NO: 11530 - DNA, 622 bp, Glycine max
  Clone ID: 701070051_FLI
cttgtgagagagagagtactagtgtgataaatcaagagagagagagagaatatggtttccagggttcacaagagaacagccatgtacaggaacctacacctgcttcgttcaatcagatactcacactcggtgtcagattacatacaaggtttaaagcaaaaactggaagaattgaaccagttaacagtggcaacggcacgaaaaatcgttgactatgatccaatgcctaagcttgaagttgaaacacaagaagagggttttgtgatcaaggtgctgagtgaaagcagttgccaggggttgctggtgtttatattggaagcctttgaagagctggggcttgatgtgctccaagctagggtttcttgtgcgcacagcttcagtttagaagctctcggaaacaaagagaacaatgaagatactcgcccattggatgcacaactagttgagcaagtagtgtctcaagctattcaaaactggagggaagtttcacagatataatgattcatgccccagcacctattgtcataattagaaattaatattatgcttgcttgatcagtttcctgcttcttgtaacaatgtttactcctttaaatagaacgagaagttggcctttctgatg

SEQ ID NO: 11531 - DNA, 1159 bp, Glycine max
  Clone ID: 701070093_FLI
gcaggatacaatccagaggctttgctaaaacgtcttccaccagatgctttgtatgaagagcatgctatattgttggggaaaatgaaccgacatgaactggcattatctttgtatgttcttaagcttaatgctccagaattggcattgtcttattgtgatcgggtctatgagtctatgcatcagccatctgcaaaaaattccagcaacatataccttgtgcttttgcaaatttatttgaatcctcgaaggaccacagcaggtttcgaaaatagaattacaaatctattatccccacagaataagactattccaaaactcactcctacaccatccataaaaagcagaggccgagggtcaaagaaaattgctgcaatagagggtgcagaggacacaaaagttagtttaagcagcactgacagtggcaggagtgatggtgatgcagatgaatataatgatggtagtcctactatcatgcttgatgagatccttgatttgttgagccgcaggtgggatagaataaatggagctcaggcccttaaacttttaccaaaagagacaaaattacaggacctactttcatttcttggaccccttctgagaaaatctagtgaaatgtaccgaaattgttcggtgataaagagcttgagacaaagtgagaaccttcaggtgaaagatgaactctatagtcagaggaaagaagttgtgaagataactggtgatagcatgtgttctctgtgccataagaaaatagggacaagtgtttttgctgtctacccaaatggtagcactctcgtgcactttgtctgtttcagagattctcaaaatatgaaagcagtgggcaaagggtctcaattgaggaagcgattatgaagctgaaatgccataccaattggtggtccagttgtcttgttttagcgtgcttttacccacggtacctgttggtaggtgtggattatgatgaaagtggcaccgtaatttatcttcagaggtctctctttttctttttttgcttttttgcccagtcaattcgtgtgaaaagtgagatttgatatgtgaagagcgtgatgtgtctatctttttcttttttgtgatgtaaatattggcaaaacttgccacaagtaaaataagactacacgaaatttacatttttttttttttt

SEQ ID NO: 11532 - DNA, 413 bp, Glycine max
  Clone ID: 701070119_FLI
gtgcaagtgtaacccaaaaccctagcggcgcctgctttcttcgttcgtcttttgcatcagccatcaggatggagtctcaggtgaagcatgctcttgttgtcaaagttatgggtcgtactggatccagaggacaggtgactcaggttagagtgaagtttttggatgatcagaaccgtcatatcatgaggaatgttaaaggaccagtgagagaaggagacattctcaccctactcgagtctgaaagggaagcaagaaggttgcgctagagggtatttttttcttgatctttatggtagttagttggtgctaaaggttatagcaccctgtcttgttgtcttggatctattttcattcaaattatgggttgaattttggatgtttggagtttaatatatgattttgaattatggctt

SEQ ID NO: 11533 - DNA, 1500 bp, Glycine max
  Clone ID: 701070153_FLI
gcgaccacctttatattacccttttgatcagagtttaaaatggtgttgtgattctacgagggtcttgcatgcccctttgagtttcaagtttcaagtttgagccccctttctgtaatccataaccatagctttggttgagttgagggatttgattatggataagtatgaggctgtcaaggatttgggagctgggaattttggggtggctaggctcatgaggaacaaggagaccaaggagcttgttgccatgaaatacatcgagcgtggccaaaagattgatgagaatgtggcaagagagattatcaaccacagatcccttcggcaccccaatataattcgcttcaaggaggtggttttgacccccacccatttggccatagtgatggagtatgcggctggaggagagctctttgagaggatatgcaatgctggcaggttcagtgaagatgaggctagatatttctttcagcagctgatttctggtgtacattactgtcatgccatgcaaatatgtcacagagatttgaagctagaaaatacccttttagatggaagccctgcaccccgcctgaaaatttgtgactttggttattccaagtcatcattacttcattcacgaccaaaatcaactgttggaactccagcttatatagcaccagaggttctttccaggagggagtatgatggcaagttggctgatgtatggtcatgtggagtgactctttatgtcatgctggttggagcttatccctttgaggatcaggatgaccctaggaattttaggaaaacaattcagcgtataatggctgttcaatacaaaatccctgattatgttcacatatctcaagactgcagacacctcctttctcgtatatttgtagcaaatccattaaggaggatctctcttaaggaaattaagagccacccatggtttttaaagaatcttccaagagagctgactgaatcagctcaagctgtctattaccagagaggcaatccaagcttttcaattcaaagtgtggaggagatcatgaagattgtgggagaggcaagggaccctcctccagtatctagacctgtcaaaggttttggctgatggcgaagaagatgaaggggaagaagacgtggaggaagaggaggacgaagaagacgagtatgacaagagggtcaaagaggttcatgcaagtggagaatttcaaatcagttaagcactataataattcttgtgtacttggttaaagtattttttttaatgctagaagtcatctatttatgtgtactataatttataataactactactataaaccatcgaggcagcctaacttatggcactgtccatgtaatgtgttagtattttttacctgtatcatcatcgaagccgtgtatgagaacagtagttatctgataacttcaaaattactcatgcctgttataacctccatagttaagctttaaatgctttttaataatatagtagatgaaagaatggtctcagtc

SEQ ID NO: 11534 - DNA, 1372 bp, Glycine max
  Clone ID: 701070166_FLI
ttgaatctcagaattctctaaaagagatctttttctgctctttgaagaaagaagggtctttgcttgattttggagatgtctctgctctcagatctcatcaaccttaacctctccgataccaccgagaaggtgatcgcagagtacatatggatcggtggatcaggaatggacctgaggagcaaagcaaggactctcccaggaccagttagcgacccttcagagcttcccaagtggaactatgatggttccagcacaggtcaagctcctggtgaagacagtgaagtgattttatacccacaagccattttcagggatccattcagaaggggtaacaatatcttggttatctgtgatgcctacactcctgctggagaacctattcccactaacaagaggcacgctgctgccaaggttttcagccatcctgatgttgttgctgaagtgccatggtacggtattgaacaagaatacaccttgttgcagaaagatatccaatggcctcttgggtggcctgttggtggtttccctggacctcagggtccatactactgtggtgttggcgctgacaaggcttttggccgtgacattgttgacgcacactacaaagcctgtatttatgctggcatcaacatcagtggaattaatggagaagtgatgcccggtcagtgggaattccaagttggaccttcagttggaatctcagctggtgatgagatttgggcagctcgttacatcttggagaggatcactgagattgctggtgtggtggtttcctttgaccccaagccaattaagggtgattggaatggtgctggtgctcacacaaactacagcaccaagtccatgagagaagatggtggctatgaagtgatcaaagcagcaattgacaagttggggaagaagcacaaggagcacattgctgcttatggagaaggcaacgaacgtcgtttgacaggacgccacgaaaccgctgacatcaacaccttcttatggggagttgcaaaccgtggagcttctgttagggttgggagagacacagagaaagcagggaagggatattttgaggacagaaggccagcttccaacatggacccatacgtggttacttccatgattgcagacacaaccattctgtggaagccatgagcaaaacctgcatgttttctccctttggatggaaaggaacagttatgcttttcttagtaggatttggtctctctctctttttaccttttgattggtactatggttggtgccttgttggttggtgcaactaactggcaagggttgttcattgttttcttctattcctttccctcgttttccgattgttacaatgacaataatttaatggttattatcagtcttgaac

SEQ ID NO: 11535 - DNA, 1262 bp, Glycine max
  Clone ID: 701070177_FLI
gacagcttcatactgtcttttgagaacatcatagtctttctccaactgcttggtcttccacctggcccttctattctggaaccatatagcaatttgtcttggttgcaagccaagtgctcttgcaagctgcatttttctctctggctcaagcttgttccccaactcaaagctcttctcaagtgtcttcacttgctccatgttgagccttctcttcttctcccctgcttgtgatccatcatcagacaaatcttcctcagcattattggcctcttctccatgctcaatccctgatgaaaatgacatggatctctttcctagaatggtcactcccccatgatattcttgaggtgcacacgttggtagaagcttacacttcaaatggctttggaagctcttcaatcacccaccacagccactccatcgtttagtccctttgaagaaaccagtctcagttacttagagacaccgtggacgaaaggaaagcgttctaagcgtagccgcacggagcaacaactgcaacacccttcatgcaccgaggaagagtacctcgctctttgtctcatcatgctcgctcgcggcggcgccggcagtgtctccaccgccaaacccgctgtctccgacaacaattctgcgccgctatccgccgccaaactgagctacaaatgttcggtttgcaacaaagccttctcctcttaccaagcactcggaggacacaaggccagccaccggaagctcgccggagaaaaccacccgacctcctccgccgtgacgacgagttcggcgtcgaacggtggtggtaggacccacgagtgctccatctgccacaagacgttttcgacaggacaggccttgggaggacacaaacgttgtcactacgaaggcggtaacagcgccgtaaccgcctctgagggagtggggtccactcacacaggaagccaccgcgatttcgatctcaacctcccggcttttccggacttctcagcaaggttcttcgtcgatgacgaggttaccagtcctcatccatccaagaagtcccgtttcaatttgaccatacccaagattgaaatccctcaatactgatccatagatccaaaaaaattattcagtgtttttttatatatttttttaagttatttgggattaatttgttcttgtacatatatagtacttgggccttattcgctagttttagcttttagattgtagtatacttttgacagtggtgattcaattcaattcatttatttttatttgtaagaatg

SEQ ID NO: 11536 - DNA, 967 bp, Glycine max
  Clone ID: 701070289_FLI
ggtagacagacaggtagtgctttgaacaagaaaaaagttgcgctgtgttgcctattgttttctgtatttagattttttcgtcaacttttccgattttttcctcacttgttgtgaataatctggcagaggcggcagcaaataagaatggcttcaaatcccaaacctttgacttttgaggaggtggctaatcacaacaacaaaaaggattgctggattattatcaatggaaaggtctgtttcttcttgatctctttgtcttagttgttctctttcagtttctgggattaccatgatgcgtgctaaatgcttgcacgatggctcgtgtagagggtgtgatggggtgcagaagccacatgttaatctccaatacagtatattaagcttatcaagtgaattgcttgatttgttgagattagtgatcaaaacaaaatgtagaacccaaaaattcatctctgcaatacaaatacaacgttggaacagaatacaaccagatttgaatttggaaaccggacccaataacctcaacaaaacaattatacctattatgaagaacagcacaattgcaacggaagttgttaggcctgatgttatcccttattaccctccttcaagttggagagtgaagattgagatttaagaactcccaacttcgccagcgggtcgtgaaactgtctagagcccaaagccttagtaaatacatcatctggttgctgcttgctaagaacataattagtagcaatgatgctggatagaagatgctcatggaaaatgggattcattgatatatgaagtgcttattgattataacaaaagagtgttgtagaagtcttacaagggacttgcagagaactcaataaaccatggacgtaaatgtctctctaaaatcttcttcaatctatgtgtatccctttgcaaccaagcatttttatatttatcaatctccccaatttgccttatattttatctt

SEQ ID NO: 11537 - DNA, 1149 bp, Glycine max
  Clone ID: 701070435_FLI
agcgtggctccttctctgggaaggactaccaggaccctccaccagcaccactcattgatgctgaggagctcacaaagtggtccttttacagggctcttattgctgagttcattgccactttgctcttcctctacattactgtgctcacagttatagggtacaagcaccagacggatcatgctgatgcgtgtggtggggttggcattcttggcattgcatgggcctttggtggcatgatcttcatccttgtctactgcactgctgggatttcaggaggtcacattaacccagcagtgacatttgggctgtttttggctcgcaaggtgtctttgatccgagccatcatgtacatggtggctcagtgcttgggtgctatctgtggagttggtttagttaaggctttccaaaagtcttacttcaacaagtatggtggtggggctaattccctcgctgatgggtacagcacaggtactggattgggtgctgagatcattggcacctttgttttggtgtacactgtcttctctgccactgaccctaagaggaatgctagagattcccatgttccggttttggctccacttcccattggatttgctgtgttcatggttcacttggccaccatcccagtcactggcactggtatcaaccctgctaggagtcttggagctgctgttatctacaaccaagataagccatgggatgaccattggatcttttgggtaggaccatttattggggcagccattgcagccttctaccaccagttcatcttgagagcaggtgcagccaaggcccttggatcattcaggagtaacccccataattgagatgtctttctcttcatgatgatggctctagtggaaagaagataattggagagatggaggttgatatggcaagtttaataatgggaaatgcttttggctttgtatttgcaacgtttctttgaccctctcgattatgtcttcaagattgtggataagtgtagattaaagtctctttcatgacagggggagccgtttgcactttcctctgtggtgttcttccctttagtgtgtcatttttcttttttaagttattctcttctgtcatctctgtactcaaacaaatcatgggaaatattttaaattttaattttacaaaaat

SEQ ID NO: 11538 - DNA, 855 bp, Glycine max
  Clone ID: 701097023_FLI
cgccaaccaaaaccttctccgttaagaataactctctctctctctctctgaaatgggcgaggaatctcaagggattaagctgtttggtgcgctgattacattgaagggtggggaagtaaagaaaggagaaaaaggaagcgaatatgagagggtggagaagagagcagagaagataataccctgcccgagatgcaagagcatggaaactaaattctgttacttcaacaactacaacgttaatcagccgaggcatttttgcaagagctgccagaggtactggacggctggtggggccctccgaaacgtcgcggtcggcgccgggcgccggaaggctaagtcaccgtgccatggagccggtgacttcatggatgggcgtgcctatgaaacttctgaagatgaaaacaggtttgagatgaatcagggacacgttgccatgcccaacactcatttccgccagatttttcaggccaagcgccagagaatcacctcaggagctcagcatcaaggtcaatgaaatcatgtacgaaaacacaacttggaattattatgaacaagaaattaaggacttcagcagcgagggaccaaagcgtgtcttgagaattaagatgtgaacacacctaaaaaaatgatgatgttcaactatgaggagacgtgagatgctgagattggttttttttcctcgaagctcatgtccattgtccataagcaggttaattttaaggcatgaatatagactgcggataattggttaagtgggttacacattatagctgtgacataagattgcgatccacgaaattgatgtatgcagatatagatgaaatattagtcaatggacaaagagatagaggattg

SEQ ID NO: 11539 - DNA, 2494 bp, Glycine max
  Clone ID: 701097117_FLI
ccggccaactggagcaccagctcttcccgcccaaccacaccggtttcctcttttcacggtttgaaactctccaaaagtagcagcaaatcatccaagcaaacctgctcaatatgcttaaccaaaatgaagcaaggatctggccatgctatattcactgcagaatgttcacattcattccatttccagtgcattgcttcaaatgtgaaacatggaaaccaaatatgtccagtgtgcagagcaaagtggaaagaaatacccttgtcaggtcccagtttggatcctatccagggaagagtttcacctagtccagtaaattggccccaaaatgatgctttgatggcagtggtccaccgtgtgcctctacctctacctcatcctcaccgagatttgaataggaggcatgttgtgccactttatcaggcttctgagccaggcatatttgacgatgatgaatccttaaatcatcaacatgcattttctgagagaagcacttgtaataagagtactgaagatactgatgctgctagagcaatggagattaaaacgttcccggaagtatctgctgctccaggatccaagacttattctaacttcacggttttggttcatctcaaagctactgctgccgccgcagcagctgcagcaaaaagacaaaaccttagtagaaaccagactaacttggcgcagatttctcagactccacgtgcccctgtcgacttggtcacagtgcttgatgtcagtggtagcatggctggaactaagcttgcactactaaaaagagctatgggatttgtcatacagaacctaggttctaatgaccggctctctgttattgctttttcttccacagctcgccgcctctttcccttgtgcagaatgactgattctgggcggcagaaggcattacaagctgttaattctttggttgcaaatggtggtaccaatatcgcggaagggctgagaaaatgtgccaagataatggaagatcgaaaggaaaagaatccagttgccagtattatactgttgtccgatggtcaagataattacactgtcaatggctctggaaccagccaaccccaaccaaattaccagtttcttctgcccacttctatcagtggtggtgataattcaggatttcaaattcctgtgcatgcttttggattcggtgccgatcatgatgcttcactaatgcactcaatttcagagacttctggtggcacattttctttcattgagactgaagctgtattacaggatgcgtttgcacaatgcattggaggacttctgagtgttgttgttcaggagctgcaagtgggaattgagtgcacacacccaaatctcaatcttgtctcactcaaagcaggaagttaccctagccatttgatggccgatggatgcaaaggattgattgatgttggagacctgtatgctgatgaagagagggattttctagtttcagttaatgtcccagctacatccggtaatgaaacatcattgataaaggtcaaatgtgtgtacaaggatccctttactcaggaaacaacaacattggaaagtgaggaagttaagattgagcggactgaaaatgtggggcaggttgtaatgtcacttgaagtggacagacagcgcagcaggctccaagcggctgaggcaatggcccaggcgtgcagtgcagctgaacagggagacctaagtggagcagtacttatccttgagaactgtagaaagatgctttcagagactgtttcggccaaatctcatgaccgcctttgtgttgcattggatgctgaactcaaggaaatgcaagagcggatggcaagtaggcatgtgtatgaagcatctgggagagcatatattctttctggattgagttcacactcatggcaaagagcaacagcaagaggtgattccactgataggtcaagtcttgttcaggcatatcaaacaccatcgatggctgagatgcttactcgatctcaggccatgttactaggtagtccatcagggcagaggcttctccagccactggtgtcatacagaccacaaccaagcccaaggtgatccaacagagattttgtgaaaaccatctaaaaattaagcccttccactgatttgcctttttggcttataaaatatgtgggggagggtggtagtaaacgggagtcataaacagaagatttctttgagctttgattttgttgtttaatgtgtaaaaatgaataagaagtcgaggaaagggtggagggttacttaaaaccaatggagggcagtagataggaatttaccacattatgtttcttctattttgtggggtttaaggtttttcttttggcttcacttttctttcctctaattatgccgtttttttgggggggtggtgtacatacagaagaatgcctttgttttttttctgggacacctgggtataaagtttgtagctgcgcaaatgattggttgggattatctcatcagtaatatatatatgttttcaatt

SEQ ID NO: 11540 - DNA, 920 bp, Glycine max
  Clone ID: 701097128_FLI
cagcactactctctgatcagttttttcttggtctccgaatcacaaactcttcgaaaaaactaacattaatggctccgagggatatcaatagatctaacgttgttgttgccggaggatccaacccgacccgtaaagagatccgataccgcggcgtgaggaagcggccgtggggccgctacgccgccgagatccgcgatcccggcaagaagacgcgcgtctggctaggaacgttcgacaccgcggaggaggcggcgcgtgcgtacgatgcggcggcgcgtgagttccgcggcgcaaaggctaagaccaatttccccacccacgcggagctgacgcacgcggcggcgcgtagccccagccagagcagcacgttggattcgtcctctcccccgacgccgccgttggacctcactcttgccgccccactcgccgccggtggcgcgttggtgttcccagtggcgcggcccgtggtcttcttcgacgcgttcgagcgtgccgaggtgcgcgcgtcgttcgatcttcccgtggcggcgttcagcgactcggactcgtccacggtcatggattacgagcggggctcacgtcggagagtgttggatcttgaccttaatgtccctcctccgcccgaggttgcctgaaccggaaaaaagatccggttttttcgcagctcggtttttctctctctatctgagtgagtggcgattatcaatttatcgtagtagctgacacggtgctagagtttatgtaaatatattataaatagattacaattaaccaaaccaaaaagaaaaagcaggcttatgtttttttttctctattctgcttttttttttccttttcgcaaaggaagaaggaatttcttacctcactgttgcccggtgatgttaactttttatatatataatgccatttctatattaatt

SEQ ID NO: 11541 - DNA, 1595 bp, Glycine max
  Clone ID: 701097238_FLI
caaaaaactctatttgattccaccgaaaccctaaccccctttcgacgaacgaagggcaatcagttgctcgctccttggatccattcttgaaattctcgttatcgctcttcgaactcaagctctctcgctcacgatttctgcttctgcaccaatttctgcggtttctcaagatttagaggttctaagtggttcatttctttgaagcatgccggggttaacgtgcaacgcttgcaacaccgaattcaaagatgatacagagcaaaagctccattacaaatccgagtggcatcgatacaatctcaagcgcaaggtggctggggttcctggggtgaccgaggcgttatttctggctagacaatctgtgcttgctcaagagaaaaataaactgggtgaaacccccatgctctacagctgtggtctttgtggaaaggattataaaagttctaaggctcatgctgagcaccttaaatcacgtggtcatatgatgcaggcctctgaaggaactagtcacgcagatgagaaggcaatagttaagcctcttccacaacgtgttgtgaataggcctcctcctaggagagaggtagataactctgaaaatgaggaaagtgaagatgaatgggaggaggttgatcctgaagaggatttggttgatggtgctgcaaagtccttgactgatttgaatgtgaatgagcatggtgaaaatgttgatatggaggtagatgatgattttgaggagttagacccctcttgttgctttatgtgtgatcaagagcacaaatcaatagaaaactgcatggttcacatgcacaagcatcatggattcttcattcctgatgttgagtatttgaaggatccaaaaggcctcctcacctatcttggccttaaggtcaaaagggactacatgtgtctgtactgcaatgatcgatgttatccattcagcagcttggaagcagtcaggaaacatatggaggcaaaaagtcactgtaaagtgcattatggtgatggtgatgatgacgaggaggtagaattagatgagttctatgattatagcagcagttatgtggatgatcaaggcaagcagcttgttgcgtcttgtgatgcatctaacaatgtagaacttgttggtgggtctgagctcataatcaccacgaaatctggtgaaagatcatcaaccaaaacactaggttcccgtgaatttttgcgttattatcgtcaaaaacctcggccatcactagcaaatatggctatcactgctgcgttggcttcaaggtacaggagcatgggcttgaccactatccaatcaagggagaagattgtgaggatgaaagtgctgaaggaaatgaataggtcaggtgtggacaatatgcgtactaagatggcgatgaagagtaatgtcatcaggaacctgccaaagaatgtaccatattagtcctcactggtaatagttttacatgagtggtgctgtgtattaattttttctatgaaataatttttcatttcttgatcttatgaatcatccacaaggtatccatcaaaggtagtagagtgacatgatatacatgatattttccaatgaggaattaggcattttactt

SEQ ID NO: 11542 - DNA, 818 bp, Glycine max
  Clone ID: 701097366_FLI
aacatgagtaacatgacttccttaagctccttagtgctgctccttgcagctctaattctattccctcaagttcttgctgactatgagaagcccccggtgtacaagcctcccattgagaagccaccactttacaagcccccaattgagaaacctcctgtttataaacctccagttgagaaaccccccatttataagcccccagtagagaagccaccagtgtacaagcctcctgtagagaaacccccagtttacaagcccccagttgaaaaaccaccagtgtacaagccaccagttgagaaccctccaatttacaaacccccagttgaaaaaccaccagtatacaagcccccaattgagaaacctccagtttataagccaccagtagagaagccaccggttgagaagcctccagtctacaagccaccatatggaaagccaccatacccaaagtaccctccaattgatgacacccatttctgaaggatgtcaaggggtgtattaagtatatgctaaataagaggtgctaagaatgtagtttatagtttgcaaattattgcaaggattgctcttagcttcttcatttcaagcatttgtttacactttacagtgctatggcaaatataagagtatcatggatgtagaacgggaaaaaaaatgttgcttcgtactccaaattatgattaatagaactttatattgatcctaaattactgtagagtgatgcttattacgaaagtgaaaccacaagaattgtacgaaatgtaaaatggacggtgaatgttgtaatttttaaaataaatattgattaaaattttttt

SEQ ID NO: 11543 - DNA, 877 bp, Glycine max
  Clone ID: 701097383_FLI
aggagaaagaaaaaggaggtttgagagactagaagaggattgggatttggcaagagatttagattagcatggaatcaagaatggagtgtagtagtcatcaacaacctcagtcactgtaaatttttttggttgttatttatctctctcaaatgcatatgcaatcgcaatcaattgcaaagcatttcggatccagagggagagaccctttgtgacagcctgtatcctctccatcgtctgatagattcttcatttttttttccatttctcgcggcaagatctcacactctgcacctagggttagggttttggttcttgcggcatggcgacttcttcgagttcttcgagctggcgcgagggcatgtcctccgacaacataaagggtctgtgcctcgctctctcttctagcttcttcatcggcgccagcttcattgtcaaaaagaagggtttgaagaaggccggtgctagtggaatcagggccggtatcgttcattcttcgccaccgtcgatcacttttttgtttttactttgtattcagttcattttccgtgtttgctttaatttttctagggatctggacgttttttcttttacttctcttggccacgagtttttcaactgtctcaaatctctcaagtttacactcgatgcgttgctttgccagccttttttttctttgttatatcttctcgtcgcattccacaagacaaatagttgtagaataagcatattaggtctcggcatgaggcggaagggaacatttttgtgttctcaattctcatccttaagattttcaccgaactgtttttttggcaattttaactatccttttcttgtgctccttggtatggaatgatgagagatctatacagtttgtgtg

SEQ ID NO: 11544 - DNA, 1443 bp, Glycine max
  Clone ID: 701097615_FLI
ctttggtattcctcactcagagcctctcatcagagagagagaaagtgagagatggagagaatgttccctcccaagaagccctctactatgaattcccatgacagacccatgtgtgttcaaggagactcgggtcttgtcctcaccactgaccctaaacctcgcctccgttggactgttgagctccatgaacgctttgttgatgctgttactcagcttggagggcctgataaggccactcctaaaaccatcatgagggttatgggtgtgaagggtctcaccctttaccacctcaagagccacctccagaaatttaggcttggcaagcagccccacaaggatttcaatgatcactcgattaaggatgcttcggctttagaactgcagcgaaacactgcttcctcttctgccatgattggccgcaacatgaatgagatgcaaatagaggtgcagagaagacttcatgaacaacttgaggttcaaaaacaccttcagctaaggattgaggctcaagggaaatacatgcaaagcatattggagaaggcttatcaaacccttgctggtgaaaacatggcatctgcagcaactaacttaaagagtgctattgtacctcatcatcaaggaatccctgacatgggagtagtgatgaaggagtttggttcccctcttggtttttcttcattccaagaccttgagaacatttatggaggtaaccaaattgaccttcagcagaacatggagaagccatcccttgatcatggtttcatgccaatcaatgagagcttgtgtttggggaagaagaggtccaataacccttatagtgggagtggtaagaaccctttgatttggagtgatgatctaaggcttcaagatttgggagggccagcatcatcatgccttggccctcaagatgaccctttcaaaggtgaccagattcagattgcaccaccaggatcattggatagaggagctagcactgacattgatcccatgtcagagatctatgactcaaaacctgtgcttcagagtgaagagaaaaagtttgatgcatcatctatgaagcttgaaaggccttcaccaagaagagcacctcttcagcctgaaaggatgagccctatgatcagcactggtaccatggcacaaggtagaggctcaccatttgggtgaatatcatagtttttaattaattagatcatttggctatgttatgtgtaattgatgacttgatcatgtgaaactctcttaatagtagtaccatatctagggtttttgaatttggtcttggaaattagcagttcttacgagggttatttcccccctcgtcaagtactgttatgtggtataatgcctttacatggcaaattaaaccaaagtcttaattctgacaaatataattaaagcacgtattattgtgcttgaatgtgagcattctcacttgtagctttt

SEQ ID NO: 11545 - DNA, 948 bp, Glycine max
  Clone ID: 701097644_FLI
ttcattcttataataatcattattttcttccacaccttcgtccgcttctgccgccgtcgccgccgtcgcctcttctctcgttcgcttccgaccaattcctccgccgccgcctctctcgacgacccgtgcctcgacccttccgtcatcaagtcccttcccacttttactttctccgccgccacccaccgctctctccaggactgcgccgtttgcctgtcggagttcgccgacggcgacgagggccgcgtgctcccgaattgtaagcacgctttccacgcccattgcatcgacacgtggttcgggtctcactccaagtgtcctctctgccgaaccccggtcctaccggccacgggttcagctgacactgaaccgggttcggtttccgaagcgggtgagggttgctcctcatcgtctttgcctccgccgattgggtgtccgagaaagccattggatataaatataatcatagagattccagaggtggaaagagggtctgattctgtaaccggagatcaagggttcagatggtcattgaagaggttttgcaacgtttaagtgagtgagtgcttttgcaacgaatcacaaacaaggcatagcaactcatggatgctaaaacaaatggacgacattttcgttttacaggcaaatgttattagttttttattaaggaaggaaatcaaacttgtaacttttttctccctatcttcttcttacccaactaaacttataactccccaaacaataggattgtatgataaacagaatatctattgcttgcaagagttatcacttttggtaggtgttactctatctatagaatctcaaatctcaaatctcaatctcaattgtgtttcaccttaaccattggattggtgtatttagttttaatctgtgtatgtttggacgcaagttcaggtgttacaatggtaatttttcactttttcattt

SEQ ID NO: 11546 - DNA, 2381 bp, Glycine max
  Clone ID: 701097679_FLI
atcattgttggctattcattcattcgtgttcctcaggagagagagggtgcgtgtgattcggattcgaattcgaattagggttttgcgcatcgtcatcgaatttttctcttatgcaaggaaggttttccttctccgatttgaatttgattgaacgagtagtgttaagattatgatattttttgagaagcttcgtttctctcctcacttgagccgcttcattgccggcatcctcctgttaatcttctgcaattcattccagttagtctctaatttccccattcctatacagccttagattcaacgtcgatcgctacactcttctctccgattcgtacgattccgtattcgatattcgtttgtttgattcactcctcctctctctcgctttcgattcgttggtgattgctgcttgaacaattaaacatggaacctaatcagctcttctccacgcatttccgcgatggtactattgcctcatgcattgagggccaacacagaggagctatcccttccgttattgtgattggtgctggaatatctggacttgctgcagcacgaagtctccacgatgcatcttttaaggtgactgtactggagtcacgagataggcttggtggtcgcattcatactgacttctcatttggttgtccagttgacatgggagcctcatggctacatggagtttgtaatgagaatccattggctccattgattcgtggcctggggctttcattatatcgtaccagtggtgataactctgtcttatatgaccatgatttggaaagttatatgctttttaacattgatggtaagcaagttccacaacagatggtcattgaagttggagacatctttaagaaaattctggaagagacagggaaagtgagggatgagcataccgaggacatttcagtttcccaagctatttcaattgtgctagataggcacccagaactaaggcaacaaggacttgcccatgaagtgctacaatggtttatatgcagaatggaagcttggtttgctgctgatgcagatatgatttcactgaaaacctgggatcaggaacatgtcctgtctggtggtcatggactcatggtgcaaggatatgatccaatcataaaagttcttgcaaaagatattgacatatgcttgaaccaaagggtgaaaatgatatctagtggttacaacaaggtaatggtcacggtcgaggatggcaggaactttgttgctgatgctgctatcataactgttcctattggaatcctaaaagccaatttaattcaatttgaaccaaaacttcctgattggaaggtttcagcaatttcagaccttggtgtgggcaatgaaaataagattgccctaagatttgacaaagtattttggcctaatgtagaactcttgggcactgttgctccgacctcttatacctgtggctattttctcaatcttcacaaagcaacaggccatcctgttcttgtctacatggtagctggaaggttcgcttatgacattgagaagctatctgatgaagcagccgcaaattttgtaatgcaacagctcaagaagatgtttccaaattcttctaagccagtaagtccacctctaatgttgtcctcatagattgctcatcatctactaaaagttcgctttctctagtgtctgcatcctacttgaggaccctaacatctttatttgttggacttttaggttcagtatcttgtgtctcgatggggaacggatccaaactcccttggatgttactcgtatgatttagttggaaaaccactcgatgtgtatgacaagcttcgtgcacctttgggcaatctattctttgggggagaagctgtaagcttggacaatcagggatctgtgcatggagcttactcagctggggtcatggctgcagaaaattgtgagagctatcttttagaaaaactaggccacgtggaaaagctatctctagcttctgttaggcatgaaatgcttgaaactcttatacctcttcagatctcgaggatgtgatttgttggttctcagtagtagcttttagacaatgattctggataacgcaatggcaaaatatttgccattcaatataataaagaaataactgttctttaaggatggtgaattggtgattggtgactatcgtccaagtaacaccattttcactcattggggtcgaatagctttttttatccttttttcataagcttggcttattaaggtgtatgtaccttggtccatcttagtcacagtgcatgtaagaccatatctattgtgatccccacaattctgtaacgtgggggtgccctacttgtaggtagcttctcaacatttccttaatcagcatcttggcatacaacaatgtgctttctttc

SEQ ID NO: 11547 - DNA, 528 bp, Glycine max
  Clone ID: 701097689_FLI
tataaacctgattataacagattactgcatgccaggaatgactggctatgatctgctgagaaaaatcaaggaatctaaatctcttaaaaacataccagttgtgattatgtcctcagagaatgtaccatcaaggatcaacagatgcttggaagagggagcagaagagttctttctgaaaccagttcaacaggcagatgtgaacaagctgaagccacatttgatgaaatcaagagcaaaggaagagcaagaccaacccttcaataacaaaaggaaggacatggaagaaatccattccccaaataaaaccagaataaaatgtagcagttaaaattggtttcaaattaaaaataaaaaaattgatgaaacataggtagtgcctataacattttcctcttctctcgcttgcttggtagtgaaaagttaggcagtcaataatcatgcaaaagggataaagagtacaagtcatttatgtaaatagcctgagaaagaattccattcaattttggtcatcaaatatcatttcatttt

SEQ ID NO: 11548 - DNA, 853 bp, Glycine max
  Clone ID: 701098049_FLI
gggaacacggagaagctgatgaaccagatcatggaattgaagttcacgtcgaaatcgctgcagcggcaatcgcgtaagtgcgagaaggaggagaaatcggagaagctgaaggtgaagaaggcgatcgagaaaggcaacatggacggagcgcggatctacgcggagaacgcgatccgtaagcgcacggagcagatgaactacctccggcttgcctcgcgcctggacgccgtcgtggcccgcctcgacacgcaggcgaagatgacgacgatcagcaagtcgatgggcaacatcgtcaaatcgctggagtcgtcgctggccacggggaacctccagaagatgtcggagaccatggactcgttcgagaagcagttcgtgaacatggaggtccaggccgagttcatggagagcgccatggcgggatccacctccctctccactcccgaaggagaggtcaacagcctcatgcagcaggtcgccgacgactacggcctcgaggtctccgtcggcctcccccagcccgccgctcacgccgttccggccaaggaagccgacaaggtcgacgaggatgacttgtctcgccgccttgctgaactcaaggcccgaggttaatttatcagtaataatactatcatcattatcgttgtttctcgattctcgtcgctgatgcagtggaatattatatatatatatatatatatatatatatattgtgtatatttaactgaattcagttggcacttgttatatgggctctccccttttaggggtttatggccttctcttcgtgttagtgttagtgtcattgtgtgaatacttaatacattaattgaatgcttatatttgtcttttcact

SEQ ID NO: 11549 - DNA, 1251 bp, Glycine max
  Clone ID: 701098060_FLI
cttttctccaaaaccatccaacaagggaaacagaatattattccatttttcaattatggcatcctcaactcaattctccaccactcttgttacactatgtctcttccaattcctagcaggttcgtattcaacgacattcacgattgtgaacaagtgcagctacacagtttggcccggaaactgcaccgccacggggtgcgtggtggatttaaacacgccgtgcccggcggagctgatggtgatgagcagcggagagggcgtggcgtgcaaaagcgcgtgcgaagctttcgacgatccacagtactgctgtagtggcgcttacgcgacgcctgacacatgcaaacccagttcatactcgcagttctttaagagcgcgtgcccacgcgcttatagttacgcttatgacgatggctccagcaccttcacttgcgccacagcggattataccatcactttctgcccacaaccatccactagttcgattaaatcgggaaatgggaaatacccaatggcggtggacaattcgggtgctaatgtagacgtaagaacaaacaatgttatggcggtgattgcttctgttttggtggcatttgtggcaactcaattaggtgtcccttcactgccaaagttgcattaaaatggctggtgaatttggtgggctataactttttattttgatttttatataatacaccgtgcatgccaattgccagtctctatcgattcggttctcaacttgcatcatattcttgcggaatcaaggttggcaacttgtgtttgaagagatgcaatgggaatcggtgcaaagattgccacttctcaacttgtatatataccaactaattaaaacattaattggttatgtcttcatggagcacttatttagagtagaaaggttcagatgcacagacagaattaggcaagtggcatttacttcggctcatgagtctaataccattcatgtgttgtcctctatcttcagagacaaacaggagggcattttgggaagaattgtgacatttttataaataaaatgccattgcctttaatttgctccaattgtaaatatgaacatcaagtttattgaggtgaacaaggagtagaacaattttgaattgctggagcagttattttctctcctaatggcaccagatagaggtttgtgcgtttgacctacttttatgtagacctactattacaatcgttaatttgagaattgaaatgtctcttcaacagagtaccatgtatgtc

SEQ ID NO: 11550 - DNA, 1465 bp, Glycine max
  Clone ID: 701098073_FLI
caacctctaacctacctctttttcttctctctcaacaacttcaccttcttcctcctcgatcatgtctcacttcaagggcaagtaccatgatgagcttatcgccaatgctgcgtacattggcactcctggaaagggtattcttgctgctgatgagtcaacagggacaattggcaagcgtttggccagcatcagtgtagagaacattgaatccaacaggcgagctcttagggagctgcttttcactgctcctggtgttcttcaatatctcagtggtgtcatcctctttgaggaaaccctctaccagagcacagctgcaggcaagccctttgtgaatgtcttgaaggaagctggtgtgcttcctggcatcaaggttgacaagggcacagtcgagcttgctggaactaatggagaaaccaccactcagggtctagatggccttggtcagcgttgtgccaagtactacgaagctggtgcacgttttgccaaatggcgtgcagtgctgaagattggtcccaacgagccatctgagctgtctatccatgagaacgcctatggcttggctagatacgctgtcatatgccaggagaatggcctggttcccattgttgagcctgagatccttgttgatggacctcatgacattcacaagtgtgccgccgtcaccgagcgtgtccttgcagcatgctacaaggctttgaatgatcaccatgtccttcttgagggtaccctattgaagccaaacatggtcacccctggatcccaatctgctaaggtttcccctcaggtggttgccgagcacactgtcagagcccttcagagaaccgtgcctgctgcagttcctgctgtcgttttcttgtctggtggccagagtgaggaggaggcatccgtcaacctcaacgccattaaccaggtcaatgggaagaagccatggtcactctctttctcctttggaagggcacttcaacagagcacccttaaggcatggggcggaaaagaagagaatgtgaagaaggctcaggaagcccttttggtaagagccaaggctaactcagaggcaactctgggaacctacaagggtaactcacagcttgctgatggtgcctcagagagcctccatgtttcgaactacagctactgatcaatcgaagttggtgttgtttgaagagactagtgcgagtaggaatcggtattatgggtacaacaaccgaatttcttgttgataagtattattgtggtttgactcttcccagaataatcgtttggaattttgctttttgttttcctagtgttccttttatgtcaattttagtaattcagtgtatttggtcaaacctgtgcaacagggaagggaatgtaactttgttttcttgaaagacaccaccgtgctgtgaatgaggctttgtgtttatttttgcgattatctgtctttgttttcatatttatgtctatcatcggtaatttcaac

SEQ ID NO: 11551 - DNA, 2149 bp, Glycine max
  Clone ID: 701098608_FLI
ctgtcatggatcatcaccctgtacactctatggcaaatggttgagatgcatgaaatggtacctggaaaacgttttgataggtatcatgaactggggcagtatgcctttggggagaagctaggactttatatagtggtgcctcaacaacttgtggtggaaattggggtgaacattgtctatatggttactgggggaaaatccttgcaaaagttccatgacactgtgtgtgacagctgcaaaaagatcaagttgaccttcttcattatgatctttgcctctgttcactttgtactgtctcacctgcccaacttcaactccatttctggtgtatctctggcagcagcagttatgtccttgaggtacaagtcataaccttttagttatataggtttaattaaacttttggtcctcgttttattttcattccgcacatttagttcccttatttttttttcctacaaatttgatctcttactgttaattttgatcaatctattgtgacactctatggcactattatgtcagcacattcatactggcatgacactttgttacgttatcatgttagcatttctgttaaatattaaatatcaagttaacagataaatcaaaattacacaattaaagtactgggagataaaaaaaaaataggagatcaaattacaaattgacaatagtaatggaattaaaagagcaattaagtttattatctatatccaaattttattatccttgtctattatcaaccaccttaaagttagatgtttgaattgtagtacaaaaggaaacatgaattgaacatgctaacttcaactttgatgtttacattgtcctacagttactctacaattgcctgggcagcttctgctcataagggtgttcaagagaatgtagaatatggttacaaagctaagagtacatcaggaacagtctttaacttctttagtgcccttggggatgttgcttttgcctatgctggacacaatgtggtgttggaaatccaagcaacaattccatctacaccagagaaaccatccaagggtcctatgtggagaggagtggttgttgcttacatagttgtggctttatgctacttcccagttgcccttattggttactggatgttcggcaatacagttgaagataacattctcatcagtttagagaaaccaaaatggcttattgcaatggctaatatgtttgttgtgatccatgttattggaagttatcaggtgaaattcagtttctcttactcttgtccattatccaaaacccttttgattttagcatcaccctttctttttggttcaaaaaacagaagtcatcaagagtaactcttttttttttttttttttgtagatttatgcaatgccagtgtttgacatgattgaaactgtgatggtgaagaaattgaactttaaacctagtatgacacttcgttttattgtacgcaatctgtatgtggcattcacaatgttcgttgctattaccttcccattcttcggtggtctcctaggattttttggaggatttgcttttgcaccaacaacatactttgtaagccaaatacattggtgaatttaatcacacaataatctttaggggggaaaataaattcttaactgttaattttcttgcttaatttttcagctcccctgcgtcatgtggcttgcgatctacaaaccaaggagattcagcatgtcttggtgggccaactgggtatgttgaattttgatttttgtttcaattattctcctttagttgagattccattttttaagctaggattaatcttgccccattaattacagatctgcattgtgtttggcctattgttgatgattttatcaccaattggaggattgaggtcaatcataattagtgccaaggactacaagttctactcataaattcattcctaactgagtcaatgatgggaatctgaagcatgcaattgcaaatacaagaagggaatgaaagctcaataaaagtcatgtgttatagaatctggtttatcttaggtcgctgggtgctttaactatagaatgcaagaatgcattggttgaggaggatcatctgcaacttgcttgttagtggaaaagaaaattatgaaaagggaattttatatatattttctttgtcaattttt

SEQ ID NO: 11552 - DNA, 434 bp, Glycine max
  Clone ID: 701098779_FLI
gtcttcgccaatcgcctgcgtctctctctgaattgactagcttaaatggctggtcctaggattgcccatgctaccttgaaaggtccgagtgtggttaaggagatcataattggaataacacttggcttagctgctggtggtgtgtggaagatgcaccactggaatgaacagaggaaaaccaggaccttctacgatttactggaaaagggtgagattactgttgttgcagaggaacagtgaaaatgttcttgttttgttgcctatgctctccatttataggctttttttttcccgtgttatattcaattggctcttcaaatgtaaatgagccaacatactatgagattgaaaagaataagtttcttgaactgattgaatactatgttggcctgtaaaagtttcatgcagttatgtttttattttgtgcttggctt

SEQ ID NO: 11553 - DNA, 898 bp, Glycine max
  Clone ID: 701098814_FLI
tagaaaagcatttcactgagcaaaatactgcaggtaactctgatgtccataatggaaacgatgttgaacatcaccaggatcattatgcttccccagactctcattcatcaagttttccctcctttgagacacttaaggaggattttgcttcttccctacccaatgatcatcgtgtattggatgacaagtcctcgagtcaccagcctaagagattaccttcaatggacgacgactcgtatttctcataccccaacttatttacctctcaaaactctaatgtgggatctcaggctcattcagataacagccgttcccctcattcagataacagccgttcccctcatgatctgtgatgcagaattatcatccggccacccatttccttatgagtctcaagtcttgcttatgagtgtgttttatacttctgcagtcagtactttatttttattttattttcaaagagcatgcaattcttggctttgttgtctacatagtaaatattaaggctggctttgcataatgatggatgggcactgccactatataatttctttggttcagaagcgttactgtttgtggctggggctgcaatgagtgtagaaatcttatagtgttggaataaagcattcagcttcattttctttatattcttttgtttcaaggacagctacacagcagatatacgagttaaatcaccggaggatattagacattttaatgctttcagaacttcatttgtaattattgtaatactgtggcggcatgttagagtgtggaatatatcacttcatagatatttgcatgatttttcttttgagtaatatgtaacacattagccttattgttgccaaatctgttagatatgcatcatttgacaagaaattgttcttaccttttc

SEQ ID NO: 11554 - DNA, 968 bp, Glycine max
  Clone ID: 701098982_FLI
ggaatcatatgctgatattggtggtttagatgctcagatacaggaaattaaagaagcagtcgaacttcccctgacgcatcctgaactgtatgaagacattggtatcaagcctcctaagggagtcattttatacggcgaacctggaactgggaagacgttgctagctaaggctgtggcaaactcgacatcagcaacctttttacgtgttgttggtagtgaattaatacaaaaatacttgggagatggtccaaaacttgtaagggaacttttccgagttgctgatgatctttccccatctattgtcttcattgatgaaattgatgccgttggtacaaagaggtatgatgcccactcaggtggagaacgtgaaattcagaggactatgttggagttgctgaaccagttagatggtttcgattcaagaggtgatgttaaagtgattcttgcaaccaacagaattgaaagccttgatccagccctgctgcgacctggtcgaattgacaggaagattgaatttcctctccctgatatcaaaacaagaagacgcattttccagatacatacttcaaggatgacattagctgatgatgtcaacttagaagaatttgttatgactaaggatgagttctctggagctgatataaaagcaatatgtactgaagctggcttacttgctttacgagaacgccggatgaaggtgacgcatgccgacttcaagaaggcaaaggataaggttatgtttaagaagaaagaaggggtgccagaaggactgtatatgtgaagcatcttcatcatttaccccggccttctttctttattacagtctttttgttgttctgtgaacggatgtttgtattttgatttgtggtcgtttatgggtctacattatcacgggatttaatctcaactatagttacatagctttctttgatttaaaaaaatcgggaaaattttcctgccatttcttc

SEQ ID NO: 11555 - DNA, 960 bp, Glycine max
  Clone ID: 701099233_FLI
ctttatccaataataataactccattttccctctgtcttccccccctcctctacacaaaaatatattattagcatggagaaggtgaattttgtgaagaatggagagcttagattgcctccggggttccgtttccacccgactgatgaggagctggttctgcaatacttgaagcgcaaggtcttctcctgccctttgccagcctctatcattcctgagcttcatgtttgcaagtctgatccttgggatttgccaggtgatttggagcaagagagatacttctttagcaccaaagtggccaaatatcccaacggaaatcgctccaacagagccacaaattcgggttattggaaggcaactggcttggacaaacaaattgttacttcaaaaggcaacaaccaagttgtcggaatgaagaagacacttgttttctacagaggcaagcctcctaatggatccagaactgattggatcatgcacgagtatcgcctcatccttaacgcctctcagtctcagagccatgttgttcccatggaaaattgggttctgtgtcgcatatttttgaagaggagaattggtgctaaaaatggggaggagagcaactctaaggtggttttctatgacttcctagcgcagaacaagaccgattcctcctcatcggtcgccagtggaattacacatgaatcagatgaacatgaagagagcagtagctccaacaccttcccttatactattagaagaaaaccttaacaaccttccttaaaaatttaagttcattatctagttgttgtttttaattgtctttccctttccctgtaattatcatcaatcacttgttgaaaggaagcatcctcttcccaaatgagaccggcattaagggtagtctggagagtatggtactaatactagtagtagtgtgtaatacacttctcatttcccttcaatttaacccctttttttct

SEQ ID NO: 11556 - DNA, 672 bp, Glycine max
  Clone ID: 701099318_FLI
attcaaaaggcccaagcatagcaccgagccaaaggtttccaaagttcttacacggacagatgcatctgatactggcttatatgtgagggacggatatcagtggagaaaatacggtcagaaagtcactagagataacccttctcctagggcttacttcaagtgttcatatgcccctagctgtccagtaaaaaagaaggtgcaaagaagtgtagaagatccaagtgtgttggtaacaacttacgaaggggagcacaaccatgggcaacaacatcaaactgcagaaatatcaattaattcatcaagcaaaagtgaaacacctaggcctgcagtttcaccctcagccatgaatattcggagtagtgcagcagcaggtccaattgtaacacttgacttggtcaagtcaaaagttgttgacattaatgcgcaaaagtcatctctccagcagtttttagttcaccaaatggctacttctttgacaagagatcctaatttcacagccgcacttgcttctgccatctctggaagaattctagatgatacttctgtgggaaaacgttgaattattaagagatatatatgtattaatttcactgatgaacatatatgaattttgtcacttttcttcgttttaatatttaataacagctagtcacgaggagtagtgttctatgc

SEQ ID NO: 11557 - DNA, 1172 bp, Glycine max
  Clone ID: 701099536_FLI
cgctgatctcagcaggaacaatagcagcgagagcagaagctacagcgaggcaagcctgcttccgcggcttgccacgtggtacaaatccaaggacgtagcgcagaggatccttctctcagttgaatgccaaatgaggaggtgttcctacacgctgggtttgggtgagccgaacctagcgggcaaaccgagcctgctctacgacctcgtgtgtaagccgaacgagatccacgcgctgaagacgacgccgtacgatgagcgcgtagagaatcacgagaaccacgcgttgcacgcgacgcaccagatcgccgagtcgtggatccacgcgtcgcggaaggttctagagaggatcgcagacgcggtgctctccagaaccttcgagaaggcggctgaggactgctacgccgtggaaaggatctggaagcttctcgcggaggtggaggacctccacctgatgatggatccggacgatttcttgagactgaagaatcagctctcggtgaaatcctccggcggcgaaacggcttcgttctgcttcaggtcgaaggagttggttgaactgacgaagatgtgcagagatctgaggcacaaggtgccggagatattggaggtggaggtggatccgaagggaggaccgaggattcaagaggcggcgatgaagctctacgtttcgaagagcgcgttcgagaaggttcacttgttgcaggcgatgcaggcgattgaggcggcgatgaagagattcttctacgcgtataagcaggtgttggcggtggtgatgggaagctccgaggctaacggtaaccgagttgggttgagttgcgactcggctgactcgttgactcagattttccttgaaccgacgtattttccaagcttggatgccgccaagacttttcttggatacttgtgggataataacgataataacaaatggatatgataagggaaaaaaaaaaaacggcacaaaaacgatggccaaagtgaaattttcggtttgggcattttatggataatgttattcagtttagtttggtagtgttacacctcaataaagagggaaaaagcaaaaaacaaaagatgtaatttagaaattcttttttttctttaaggaaaagtggattaaattctgtaatggtcttgatcgttgtaaaatatttaacaaattatctttggag

SEQ ID NO: 11558 - DNA, 1355 bp, Glycine max
  Clone ID: 701099574_FLI
caaattctaaacgctattgagagtaaaatggcggattcagtgtcggtggacatggaagccatctctcctccacccgaggaacatgttgttagaactcgtcatggttgtgtctcagttgctgtgtatggggaccaggacaagccagcgcttatcacgtatcctgatttggctttaaattatgtctcctgctttcaggggttattattttgtccagaagcctgttcattgctgctccacaatttctgcatatatcatattagtccacctgggcatgagttgggagctgctgccattgatccagatgatccaattctttctgctgatgacttggttgatcaaatagctgaagttcttaactattttggtcatagtacagttatgtgtatgggagtaactgctggggcttacattcttaccttatttgctatgaagtatagacatcgtgttcttggtttgatacttgtttctcctttatgtaaagcaccatcttggactgaatggttgtacaacaaggtcatgtcaaatttactctacttttatggcatgtgtggggtggtaaaagaaatattgctaaagcggtacttcagcaaggaagttcgaggcagtgattatttgccagagtcagatatagttcaagcatgccaaaggtcattagacgagaggcagagtttgaatgtgtggcggttccttgaagcaattaatgggagatatgacataagtgaaggattgagaaaattagagtgtcgttcactaatttttgttggagatatgtcttgctttcacggtgaggctctccatatgacatcaaagttggatagacgactcagtgctttagtcgaggttcaagcgtgtggatcaatggtaacagaggagcagcctcatgccatgttaataccgatggagtattttctcatgggatatggcttgtacagaccatctaagctgagtgtcagcccaagaagtcccctgagtccctcttgcatttctcctgagctttactccccagaaagtatgggtttgaaattgaaaccaataaagacacgaatttccgaggagatatagtacagtagtagtaatggtagtaggtgaataaagattgccgctctttttgatttgattgttgaacaagtttatagttctttgttttgtcaaaaatctgatgagggatgtcataaccttgtagatagagggagacgagaaagaaataaacagagggaaaaaggggaagagtttagctgaaagcagctatagtcattctttcatttgtaatcatagactttagttagcgagcctgaatgattggtaaagcttcgaaattgttatttttggacaaataaaataataaagttcttgtt

SEQ ID NO: 11559 - DNA, 798 bp, Glycine max
  Clone ID: 701099788_FLI
gtggaaaacatggctgagacaagtaagaatggagctagtactggttgtgctcaggaacttctaggaggtgaagaggaggaagagagatctgtggcatcggtggaaaatcaacttcgtaaggaaatgactgtatatgagaaatttatcctggggatgctcacaaactttggtagcatggcattagaccgaattcacaatactctcaagatgttttgcattgccgatcccccatatgacaagtcactccagcaactacaaagctttttgtctggtctagtttctgaggagaagttagaacttcgggatggaatgtactttctaaagaagtagtttgacttcggagttgaaatggaatcaatttggtcatgagttctgagcaaaaatcagcttgagctccatttttggtggcatctttgtgttgtcctgaggaaattgctatatatgcttccactctagggataacacaaattcaagcacaccaaagataatctttgttccaggagatgaggatttgaagacattatttgctcttttggctttcatggtgtgctactcctggttttgctaatccttttccaaagattcctcttttttatattatctattctcactgagtcacctaccgctatgtaaatgtgtattatttactgctaatttagtgttgtggataaattatattatattgaataggagaaaatattttatatggccccatgcagtgtttacatcaaatagtgtaaaagttaattcgtatgagcaaactaagggaatttgtatggaacaaactcttcccaagtt

SEQ ID NO: 11560 - DNA, 1687 bp, Glycine max
  Clone ID: 701099955_FLI
attgaattcaaggataaagttaagaatgttggtgccagtcttgtaaagcaggttgctaatgctactaatgatgtggctggtgatgaatattgagggagggagcatttcaattgtcttgcaggaaccacatgtgctacagtccttacacgagcaatatttactgaaggctgcaaatcaatcgcggctggaatgaatgcaatggacctgaggcggggtataagtatggctgtcgatgctgtggtcacaaatttgaaaagcagagctaggatgattagcacatctgaagaaatagcgcaggttgggatgatatctgctaatggagagagagaaattggtgagttgattgcaaaagctatggagaaagttggcaaagagggagtaatcacaatttcagatggcaaaacattatataatgagttggaagttgttgaaggaatgaagctcgacaggggctacatatctccttatttcattacaaacgataagaaccagaaatgtgaacttgaagatccccttattctaattcatgagaagaaaatctctagtataaatgctatagttaaagtcttagagttggctttgaagagacaaagacctttattgattattgccgaggatgtggaaagtgatgcacttgcaactcttattctaaataagcttcgggccggaattaaggtgtgtgctattaaagcccctggttttggtgaaaataggaaggctggtcttcaagatcttgcagttctcacaggaggagcacttattactgaagagcttggcttgaagcttgaaaaagtggatttggatatgcttggtacctgtaaaaaaataacagtttctaaggatgacactgtcattcttgatggagcgggtgacaagaaagcacttgaggaaagatgcgagcagattaggtcagcaattgaaaacagtacctcagattatgacaaggaaaagttacaggaaagattagccaagctttctggtggtgttgcagtgcttaagattggaggagccagtgaagctgaagttggtgagaagaaggatagagtgactgatgcattaaatgcaactaaggctgctgtagaggagggcatagtgcctggtggtggtgttgctcttctatatgcatcgagagagttggataaacttcaaactgctaacttcggtcaaaagattggtgtccagattatccaaaatgctttaaagacacctgtgctcactattgcatcaaatgcgggagttgagggtgcagttgttgttggcaaactattggagcaggagaatcatgatctaggatatgatgcagccaaaggtgaatatgttgatatggttaaagctggaatcatagaccccttgaaggtgattaggacagccttggttgatgcagccagtgtatcgtctttgatgacaacaactgaagctgttgtgtctgaacttccaaacgataataaagatactccagctatggctggtggcatgggtggcatgggttattgaccagcttctattgatttggttgcacttgaaaacaaggattggtgctgaaccctcacagcccccccttttttgttaaattatttggtttgtgaaggcatctttgtaaccatagtgagagatcgagatgtaggtatatggaaatgtgactgctataattccaattataagatatttggaacaatttttacatcct

SEQ ID NO: 11561 - DNA, 1672 bp, Glycine max
  Clone ID: 701100006_FLI
ttggaagtgatctaagttggttgaaagtgagagcaatgtcgttcgcagtggcattgtgttcaacgtcgtcgttcttcccttcaggtttcgcaattcgcaatccaaagcagcttcaacctttcgtttcaatgtcactgtcttcgaagctaccgttgcatttctccggcaatgccagattcaaccgcaaccacccaaccatgttcaaaattcgagcctcaaattcaaactcttcatcttcatccaaactcgtcttatttagctccactatcgtcgtcacaacagcggtagcgaatcgcgtgctctacaaattggcccttgttcccatgaaagagtacccctttttcctcgctcagttcataacttttgggtatgttgttatatatttctcgatcttgtatttccggtaccgggcgagaattgtgaccgatgagatgctggcgattccgaaattgcgctttgtggccattggctttctagaagctttaggattggtttccggaatgtctgctgcagctgtacttcctggaccagtcatacccatattgaatcagacttttttggtttggcagctaatgttttctactcttctcttgagaagaaggtactcaatcaatcaattggttgggtgcttacttgtagctgttggtgttgtggtggctattacaagtggttcaaatacaggtcagatgctctctgaagttcagttcttttggccagcattgatgataatctcatgttcctttcaagcttgggcttctgtaatgaaggagtctattttcattgattctgctactcaattaaagcacaagtcactggacatatttgtggttaattctttcggatctgggtttcaggctcttttcgtacttttgtctctaccaatactttctaacttgagaggcataccatttgcacaacttccttcgtattttaaaagtggtgccggttgctttctaaaccttggagccgataatccaaattgtgatggtgcccccttgcttccactactttacgtaattatcaacttggcattcaacatatccctgcttaatgcagtaaaaacttcgtctgcagttgtggcttcccttctggtaatgttgtcagtgccaatttctgtttatattctttcccttccattaccatatcttccagagggaacaagcctgagcccattttttttgcttggctgtgcaattcttctatgtggtctttttctgtacaacacaacgagacctgtgaggagcagttctgaagatgactgaaacagttccagttcatgaaaaccaatgctgaggagaaactatcaactagggaccctgccaaaaaagaatgtcagccttgaggcactcttgattcactaccattgtgattattcttttgagcggaaaatttgttcagttttcacgtttaagggtcgctttgctgctttatgatgactgacttcctcattctgccactggatcattgtacattaatagaagcagacaaatgtaattggcagaaatgtaagtgcagaacgtttttaagttcagtcatcttattggttggcatttttactaaatagattacaagagtttggcgatgagatatattgaagttgattagttttacgagaagcggacattgcctcactattgtatttaaaagtgatggaaaaattacctttcatttt

SEQ ID NO: 11562 - DNA, 475 bp, Glycine max; identical to SEQ ID NO: 8186
  Clone ID: 701100071_FLI

SEQ ID NO: 11563 - DNA, 803 bp, Glycine max
  Clone ID: 701100139_FLI
gtttattcacaatgagaagcccatagcagagtctcttgtgattgttgaatacattgatgagacatggaagaacaaccccatcttgccttctgatccttaccaaagagccttggctcgtttctggtccaaattcattgatgataaggtttttggtgctgcatggaaatccgttttcacagctgatgagaaagagcgtgagaagaatgttgaggaagcaattgaggctctgcagtttcttgagaatgagataaaggacaagaagttctttggaggagaggagattgggttggtagatattgctgctgtctacatagcattttgggtccctatggttcaagaaattgcagggttggagttattcacaagtgagaaatttcctaagctccacaattggagccaagaatttttgaaccatccaattgtcaaagaaagtctgccccctagagatcctgttttctcctttttcaagggtctctatgaaagcctttttggttcaaaatagatttgatgatgtggtgtgagacttagtatttctaagaattatgtgtttgttaaaggcttctatgaaagcctcactgcttcaaaatagattcatgtatgtgagactcagaatctctggggaaaattgtgtgtggtgtggactacttgttttgtttgtcattgagctatatcgctgttaattaggattttgtttcaaaatgatgcttataagttgtaatctaggatttctccctttgaaatcctaggttgttcttgacatttgctatttcaaagaataaatatatagcatctttctatttctc

SEQ ID NO: 11564 - DNA, 1118 bp, Glycine max
  Clone ID: 701100154_FLI
atgagatctgctggttgggatattgatgcatcagtcaaggccattatggagcagaatgtggtttactggaaagaagatcacaagtgttttgcaattgagtcctttgtgtgtagggagatgtttgattcattcaacttccccaacttctccctaccaaatgagtccctaccagataggaacaggaggcaactgttctttgggaggttcaacgagctaaaaccagagaaagcaaaggactttcttgcagggaaaccaagatcaccctttgcaaaattctgcaggatcaagtacttgaggcttgttcatcccaagatggaggcatccttcttcggcaacctgaatcagagaagcctgctgaatgccggagagtttcccaacacaaatttcttcacctcgtttgctgagatggcaaagagggtatggctcctacattgcttggccttctcctttgagcctcctcaagcttcaatctttcaagtggggaagtggtgcagattctctgatgtgtacatggagagtgtgaatgaaaatgatgaagaaatgccagtggagtccgagacacaaattgctttcactgtggttccagggtttaggattggtaaaactgtgatacagtgccaagtctacctctcacagcgccaagtaaaaaatttcacatccacaaagcaaaggtagtagtaactagtaagtggtgcttttgatcagagactgaccccaccatgcaacaggttttgtgttgaagtggaagacaatgttttgagttgaaacttttggggagggacatggcttgtggtgcagtgcatggctgtgccttgtggggactcaccttctgccatggttcaacggggcattttttttcttgtccatttgtattttggccattttgaaaaggaagcgcgtgaaccgttgcattgggaagtgcccctcttgttcggaatgttttttttaaaaaaaaaattatttgttatgcagtttaatcaaatgcttgcccccaaattttgttgatattaggccggtggcagggatggtctagctggaatgcatcttttccagacattgcatatgttatgtacataataatgttgttggcgataattttattctgctctttttagttc

SEQ ID NO: 11565 - DNA, 1346 bp, Glycine max
  Clone ID: 701100333_FLI
gtgtgttcatcttcaacttcatcctaaccttttacacatcatattttcggcttagaacaaccaaaagcaagttcacattgtcttgtcttttcgggtagtggctgtagaggaaacactcctgttttgtgcgcatattgatattggaatagtctttctctgaaccccatttttgcaaaaaggaagaaagagaaagagagagagagagagagagaagagatatacactgccaagaagaagaacatgaaaattcagtgcgatgtgtgtgagaaagccccggcaaccgtgatttgctgcgcagatgaggcagctttgtgtgccaaatgtgacgttgaagttcatgctgcaaacaagcttgcaagcaagcaccagaggcttctccttcaatctttatctaacaagcttcccagatgtgacatatgtcaagataagccagctttcatattttgtgttgaggacagagcactcttctgtaaagacttgtgatgaacctattcatttagccagtagcctttctgcaaaccaccagcgcttccttgctactggtatccgggtggctttgggttctaattgcaccaaagcaatgaaaaagtcacgtggaaccatctaaaccaaaagcacaagaagttcctgcgaaaattccttctcagcaagtgcctagcttcacatcctcttgggcagttgatgacttgttggaattaacagactttgaatcaccagacaaagttcagaagcaatcccttgagtttggagaacttgaatggctagcagatgtaggcctttttggtgaacagtttcctcatgaagctttagcggcggctgaagttcctcagcttccaatgactagcagtgttggctcacacaaagcccccaaatccttgttgtcttacaaaaagcctaggattgaagtcctagatgaagatgatgatgagcacttcaccgtaccagatctcggataaagcacatggtcatgtaaacaattgcctgaatcagtaggcagtaggttgacgagttgtatatgcatactaggtgcagatgttaatgaactcttcaatgtgcctggtctagctgaagctcaggaccatgaggactattgcatgaatctgtagattgatgagctgtatatgcatacttctcttaggacagtaagtaatgaagtatgttaactagcttgtggagttgataaatatctcattttaggagctatgaatggtttgatttttagaatatagcataaattaaaccttaggggattaaattttccttgctctttgtgatcatcactgtgaacatcctactagtgctcacaccacacaacaatccacgtgaacttgaatggttaattatgt

SEQ ID NO: 11566 - DNA, 642 bp, Glycine max
  Clone ID: 701100375_FLI
gttaattgttaaatcatggtaggtatagaaagaaaactcaatttggcttcttacaattgcaggctgttttgtgggatcgatgacatatattgtctcttcttggggagcttgaacaacttgtccctactcaacaagcaatatggattgtcaaagagtactgatgaggccatgtttgttattgaagcttacaagacactccgtgaccggggtccataccctgcagatcaagttgtcaaggagcttgatggcagttttgcctttgttgtctatgacagcaaggttggcagtgtctttgcagcactgggttctgatggaggagtgaagctgtattggggtattgcagctgatggatctgtggtgatctctgatgatctagaagtcataaaagagggttgtgccaaatcctttgctccctttccaacagggtgtatgtttcacagtgaaggaggtctgatgagctttgagcatccaatgaacaagttgaaggcaatgccaagagtggacagtgaaggggccatgtgtggggccaacttcaaagttgataagttcgccagagtcaacagcattcctcgagtgggaagtcaatccaattggatggaatgggaccaacattagcttaaaaataaagccttaggataatgt

SEQ ID NO: 11567 - DNA, 1496 bp, Glycine max
  Clone ID: 701100427_FLI
ctcattggtacttctcatatatttgtggtgctccctcttcagtttttggtaaactaaacttcttcaattcaagggggtatcaaaatctgctggttggtttcatcaatctgatggaggaaaatctgcctcccggatttaggttccaccctacagatgaagagctcatcacatgttatcttacaaggaaggtttctgattctagcttcacatccaaagctatagcagttgttgatctcaacaagtgtgaaccttgggacctcccaggtaaggcatcaatgggaaagaaagagtggtacttttttagcttaagagatcgaaagtatccaacgggacttcgaacaaaccgagccactgaatcagggtactggaaaaccacagggaaagacaaggaaatttttcgtgctggggttttggttggaatgaagaaaaccctagtcttttataggggtagagctccaaggggcgagaaaagcaattgggtcatgcacgaatatagactagaaaacaagcatcactttggaccttcgaaggacgaatgggtggtttgcagggttttccagaagagcttgcaagtgaaaagaccacagcaaacaccctcctcacaaccagagtccccatgtgacacagcctcaatggtcaatgaatttggtgatgttgagcttcctaatctaataaataacattgcaaattcatcaggtggactcactaacaacatttcaggacaaacctgcttcaatgctgatcttattaatagtgttaacacaaatatgaacttggccatgaattggccagttgcaagtgaggtaattcaggttcccactcttccatcactcccatggccttctgggttgttaaatccaagtatttctgtaaattctttgcttctcaaggcattgcaactcaggagttatcaacaaagagaagcagcaacagatcatttaatagcatcatatgtgcctcaaggagtgtcccatgttggaactgacctaagttcaaatctcactgcctcttcttctaaagttttagaatgtatgccacagcagcaacagctggagcaaccattcaacttggactccatttggtgaatctgtttagaacatgaagctaggcattgtgtaattacatcaacaaccctccagctcccataaataaaatggtaccatttccaaacttaacacaattgctgatgttgtaaacattgctcttcagatattattgtaagtaggtgttaaaataggcagcttttaaattactgttgaaagtcctttgatgtgcaatcattaggttcgttccaagtttcatgttctagtattaagtaaattcaaaggaataatttgtatatcttgcccaatctctttgctttgtatccaacccctcattcagcatgcagttatgcatggatgtaatcatgatgacaagtgatgactatcccagtatatgaaaacaaaggatatgcatggatcatataatatttagatccatgcatgcccgtatcc

SEQ ID NO: 11568 - DNA, 791 bp, Glycine max
  Clone ID: 701100519_FLI
gttcaaggtactgcacaaatccccagatctacctgaaagtttgtcttcagagggacaggatttccttcagcagtgtttcagaaggaatccagcagaacgaccatcagcagcagtgcttcttacacatgcctttgtacaaaatttgcatgatcaagatgttcaagttcattcccaagggcaaaactgtcccagaggagaccctggaccaggagatgattcacgtagacatagccccggtaacagttcaagaaatagccgtggtgtagggtcagcatccattcgtgcatggttttttaacaaaactcataatttaataggtgtcacttcgaaaaaatatgtttcggaggattctaatcatgtcacatcttctcgtgattctccttgctcgatgacagaaatgaacaatcctcagtctcccatgaaatctagtgcccttaactacatgactgtaaccaatcccagcaacatacccctcagtgctgttatgaaaatcatcaggaacatttgaagctaagatttcgattaaaacttggaaggatcgtgacagaagactggggcatatatttttcggaagttcagcaattatcacagcagggatttagaagctagacagtcttacacgttattgaaaaatatatcaacccgaagtgttgaaataaatgataaattcacattcatttgcagttattatgtacataataacaaggctaggttagttgaacctattaccacatgacagattcacatgtaaatttaattgattatatgatattttagtatttttttatttt

SEQ ID NO: 11569 - DNA, 1382 bp, Glycine max
  Clone ID: 701100910_FLI
atcagaataaaaaagataattttggtagtgatgcaccacattttcagagtggagttctccgtaccaactgcattgactgcttggaccgtacaaatgttgcccagtatgcttatggtcttcaagctttaggacgccagctccatgcaatgggtttgactgatgttccaaaagtggatcctgatagtagtattgctgcagctctaatggatatgtatcaaagtatgggagatgctcttgcccagcaatacggtggctctgctgctcacaatactgtgtttccagagaggcagggaaagtggaaagcaacaacacaatcaagagagtttttaaaatccataaaacgatactatagcaatgcttacacagatggtgaaaaacaagatgcaataaacttgtttttaggttacttccaaccacaggaagggaaacctgctctctgggagctggattcagattattatctccatgtatctgggattggggatgatctaattcctgagaagtgttctgaaccaaatatcagtccttctggaagaggtggaatggtattcatgcctataccagcttgtagagatgacttctctcgcataaagttgacatcatttgacatgttaattgaaaagacttgtagtaaaataaaaaatgtaagactatgctgtgagcctgatcagagaccaggtggggtttctggaaacagtggtgtagcacctgatgcagctgagatacagctcaaaagcccaaattggcttttcggccagagaaagtatgaagagggttcctctgctgcaaaagttgcttctcgtgaatctggcgttgaaggatctcatgctaatggcttttgtgacttgaattggctttcctctggcaatgatatgaatgaagaggatgttttccaaaggtaccttacaatgacctcaacaaatgaggccaacggttggtatggaggtagtctcctcggcgatcaagatgaaagcagtgagatatataaacattatgctgagttatgtcagggacctgccttggaacttttccaaaatgaccctgagaaggagcaacactatgcagatgctttaagcacgagttcatatgaaattgttaatgatgctgtcgttgcagcagaaatggaagcagctctaaaggagtatgaccaagttggtgctgaccttgggattattcccaaatcttgtaaattctatgttgatgatccgagctggctgacgagatggttaactggggacgaaaaagtaccaaggatatgatgggtcattgttttgacatgtataagttgaaaacttatttctgtaccattttaactcgtagttccttgtacaaaagtcattgcaagttttcttatcaatccccaggccttagaaatttgattc

SEQ ID NO: 11570 - DNA, 425 bp, Glycine max
  Clone ID: 701100913_FLI
catcgtcagttgtcgttacgttggtcgaccgactgtgtgcagctgattttgcaaagagaagagggaattttgttaggatagttgaatactgataagagaaataacgggaaacaacagacatggatactggtggcaattctttaccatctgcacctgatggggtgaagagaaaggtgtgctatttttatgatccggaggttgggaattactattatgggcaaggtcacccaatgaagccacatcgcatacggatgacacatgctcttctagcccattatgattgctacaacacatgcaggtccataagccatttcctgctagagacagggacctttgtcgatttcatgctgatgattatgttgcattccttcgaagcataactcctgaaacacagcaggatcatctgaggcaactcaaacgcttta

SEQ ID NO: 11571 - DNA, 1154 bp, Glycine max
  Clone ID: 701100933_FLI
ttcatctctgcccaaaaccctcacagtgacgccgtcatggtgccacactgccactttcactgattattcgtcgacggttccaactcaacaatttgttatctctctgcgacttctacttacaagtaacaagttgttggaacttcttacgagttaagagccatttattctgcatcctgtttttgcttcaataaaatggagacaaaatcatccagttcctctacaaacttggtagaccaatcagtgtgtcctggagatgtgattcttgatctgtctaacatgacaaaccagacaattaaacttggtggtggtctacgacaggactgtgatgcgatttctgtaatgaaggctggcagactaaggttctcaaagcctaataaatactgggttgaaaattctcagaagaggtatgtgccacatgcagaggattctgttcttggaattgttgtagactccagatcagataactttcttgttgacataaaagggccagctttagcatttttaccagtgcttgcatttgaaggaggaactagaagaaatatacctaggtttgagataggtactttgatttacgcacgggtcgtaaaagcaaaccctggaatgaatccagagttggcatgtactgatgccagtgggaaagcagcagaatttggtgccctaaaagatggctatatgtttgagtgtacaacgggtctctcaaggatgcttctcagttctcccacatgtccagtacttgatgctttagggaagaaactgtccttcgagatagcagttggcttaaatggacgtgtttgggtcagtgcagcatctccacaaacaactattgttgtagctaatgcgattatgaattcagagacattgagtggtgctcagcagagaataatggttgaaaagctgctggagaggatccattgatcaagatagtcttggtgagcactctccactagactagccccactacctatagggcacaaaggattatcaacaccttcatgtttaatttttgtcgagaaagaatcaagaacctcagtttaattttttaattttatgaccgagatgcatttggttggaatgtattttttgggccattcaatatcattatttttacaaaccatgaattattttaatttaaaatatatatctaaatttatttt

SEQ ID NO: 11572 - DNA, 1135 bp, Glycine max
  Clone ID: 701101125_FLI
gtttccactatcattatttgcccattaaaaatcaatttttagctctcattttcatttttttgcaattcctccacacacaccatccaattcccgtctttgatattttaatcacagagagagaagagggtttgtttctgggttttggaaatttcagcccccatcaaagaagaagccccataatcttcgaatcgaaggcatttgattgaaaggtcgaaactttagcatctgggatcgcgcaattggggttttttttggttaaaagggtatcttcggaattcatggcaaaactgtacgtgaaggcggtgccaccggcggatctgaacaggaacacggagtggttcacgtaccctggcgtttggaccacttacatcctcatccttttcttttcttggatcctcgttctctccgtcttcggttgctcccccggcatcgcttggaccatcgttaatctcgcacactttgctgtaacatatcacttttttcactggaagaaaggaactccatttgcagaggaccaagggatctacaatagattgacttggtgggagcaggtagacaatggaaagcagcttactcgtaacaggaagtttctcacagttgttcctttggtgctgtacttgatagcctcacacacaacagactatcagaatccaatgctgctcttcaacactgttgcagtgattgtgctggttgttgcaaagttcccccacatgcacaaggtcaggatatttggaatcaatgctgataagtgacatgttgcatgtgtccgtgacacttggctaccaccaccacctacctgctcaagagcctcttgtccttttgttctggagaaaaggtcacacctttgtatagaaggcagaactggaaggatactcaagtaatgttttgttgccaactgcttctaaggtattattaaacaaataaatatgttgagtttttttctgtacagtggaaaagtatatgtatcggattatatcggtgcttttaaaatgtaccttttctagcctttttttccctttatttccctttatttgatgccttagaactgagatatacaaggatgatcctttccgttaccattaaaattctattgggtataactttttcttttggaaataaaagtccttctttatat

SEQ ID NO: 11573 - DNA, 1434 bp, Glycine max
  Clone ID: 701101241_FLI
tctctaaccattctcttgaggctgcaaaggttgctgtcacgtcgtttgttagaagtacattttctcatcttctgcaagacatctcagattccctcttacaaatcctgaaaaaggatggagcagaacagtgcactcttgatgttgttcttgatgcaagtacaaaagcagttctccaaggaggactgaatgtgttgctggacttccgcaaagttttagatgatgactctgggatcctagttagattaagagagttaattactgattgggttcaagaaggacttcaagacttttttaggcaacttgaggatcagttccttctgttttcgggaagaaataattcatctattcaagtacacgctttggcagagggagctcaaggttataaagcttttgctggccttgtcctagtgctggcacaattgtctgttttcattgaacaaactgtcatcccaaaagtcactgaggaaatagctgcttccttttctggtggtagtgttagaggctatgaatctgggcctgcctttgttcctggagaaatatgtcgaaaatttcggtcagctggtgaaaaattcttgcacctgtacgttaatatgagaactcagagggtatcacttctcctgaagaagaggtttaccacccctaattgggttaagcataaggagccaagagatgttcatatgtttgttgatctatttcttcaagagcttgaagttatagttaacgaagtgaagcagactttgcctcaaggtagacgtaagcaccacaggactgatagtaatggaagtagtgtttcatcaaggagtaatcccttgcgggaggagaaactgggtaggtcaaatactcaaagggcaaggagccagcttttcgaaacgcatctagcaaaattgtttaagcagaaagttgaaattttcacaaaagtagaatatacacaggagtctgttgttacaactatagttaaattgggccttaaaagtttacaagaatttgtccgactccagacttttaaccgaagtggattccagcaaattcaattggatatccagttcctaagaatccctttaagggaaatagttgaagatgaagctgcaatcgacttcttgctagatgaggtgattgttgctactgcagaacggtgtctagatccgattccattggagcctcccatattggacaaacttatacgagcaaagttggctaaaaccgaggagctaaacacaatttcttcataaacattctttttggaagcaaaggatatatataaaacgtgtttcccatctcgtagaatttgttatggttttggccgttgaaaagtaacttggttcattttctgttcattttgtaaatctcgtaagttatagtagcatttgtcatattgcaatgctgttatttgtggaaacattgaaacatgagaaagttatatccatttttgactcg

SEQ ID NO: 11574 - DNA, 1363 bp, Glycine max
  Clone ID: 701101269_FLI
ggggtattattttttcatgcagaaacgagggatcatctaattaaaccagctttcatcagggtgtgggtgatttattgtaagctttttcttattatcttcgattgtgtttacacgtgtgtgttaaaggtggcgaatcctaaagagaagggaaatgaggttgatgacaataaggaattgatattattccatgaagggataatgaacaaccctacattgtcaaggctatttccgggtttgaatagggagagggagatgtctgctatggtctcagctttgacccacgtggtctccggagaggtgccaataaccggtgattcttcttcttcttcttctttggttcttcatcatcaacctcatgatgatactgttattgttacaccaaccatgccttcttcttcttcttcatctacttatgttgttggcacctcttctctcaagagaagtagggaaaatgatacatatacatcatccttattctcacatccaccttcatcatcccctgctatgccaacaagggcagaatatgcaacaagggaaatgggaaattctgtgtacgaatacagaacaacaacagagaatgcaacaagggatgaaggaaggagaaaatacagaggggtgaggcagaggccgtgggggaaatgggcagcagagataagagacccattcaaagcggcaagagtatggttaggaacatttgacacagcagaggcagcagctagagcatacgatgaagctgctcttcgtttcagaggcaacaaagccaaactcaattttcctgagaatgtcactctccgacaacctcaattcactgtttccaattctccatcttctcttgtatctattacaacatcaacagacccagttgttcacagtactcgacctcttcttcttccttctcaggcttcaactgcgaccaatgtttacgagtattttcaactctcgggcttccccaccaacaccaacctttatgatggtaataggatgtttgtgacgtctaatgccatggcttctcatcatcttcaatcttcgtcttcgttgttgtcgtcttcttcttctgcgtttgtttcttctgtaacttctcaggacacttcactttcttcgttgtattctggccagttgccaccatggtcaaaggtttctggtcacagctcgtcttcctccggatgatcctttttgtttaatgtttatggaatctgtatttttcttctttcattatcataatctcttcatttttttttaaaaaaaacattatacttctattatctgtaattgcaagactagcttgccaatacgtacattcatgattcatgactttagatgattaagatgtttatggaggaaattatggtattaaaaccttcac

SEQ ID NO: 11575 - DNA, 1626 bp, Glycine max
  Clone ID: 701101394_FLI
gtggtgctggtccagatagctaatcctgcgagggggcgagggaaagatgtgaaagaagtgcaagccgagacgaaggccacggtgaaacgaattaatgaaacatttgggaaacccgggtatgatcccgtcattctgatcgaggagcctctcaagttttatgagagagttgcttactatgttgtcgcggagtgttgtttagtcactgcagtaagggatggaatgaatctcataccgtatgaatatatcatcagtcgtcaaggaaatgaaaccttggataaagttttgggtctagcttcctcccctaagaagaaaagcatgttagttgtgtctgaattcattggctgttccccatctttaagtggagcaatcagagtgaacccctggaatattgatgcagtagctgatgcaatggactcggcgctggaaatggctgatttggagaaggagcttaggcatgaaaagcattatagatatgttagtactcatgatgtcgggtactgggctcgaagcttcttgcaagatttggaaaggacctgtagtgatcatgtgcgacgaaggtggtgggggattggttttggattaagctttagagttgttgcgcttgatccaaacttcaagaagctctcaatggagcacataatttcagcttacaagcggacggcaactagggcaatccttcttgactacgatggtacactaatgcctcaatcatccaccattgataagagtccaagcagtaaatccattgaaattcttagtagtttgtgtagagataagaacaacatggttttccttgttagtgctagaagccgaaagatgctttctgaatggttttgtccttgtgagaatctgggagttgcagctgagcatggttactttctaagaatgaagcgagatgaagagtgggaaacacatgttgcggcaacagacactagttggaaacaaattgcagaacctgtaatgaaactttatactgaaacaaccgatggatccaccattgaagacaaagagactgcacttgtttggtgctatgaggatgcagatccagactttggatcatgccaagctaaggaacttctcgatcatcttgaaagtgtgcttgcaaatgaaccagtaacggtcaagagtggccagagcaatgtagaggttaaaccacagggtgttagcaagggactagtggccacacgcctactttctgccatggaagaaaaggggatgtgccctgattttgttttgtgtataggcgatgacaggtctgatgaagacatgtttgaggtaatcaccagttcgatggggagtccgatcgcggcaaaggccgaggtattcgcgtgcacggtttgtcgaaaacccagtaaggctaagtactacctggatgatacaactgaaatagtgagattgcttcagggcttagcctgtgtttcagaacaaatagacaaatagtttcattttcttcggaacaaaaaatagtttgttaagctctgggaacaaaggtggtggtggtgatgagaggtattataaatacattgtactttgctttactttgtcattgaggatgtaggctcagttgtgctgctcttaaaatcttaatacacaattaatattattggtttccttgatattccatgt

SEQ ID NO: 11576 - DNA, 1415 bp, Glycine max
  Clone ID: 701102435_FLI
ctctaacctacctctttttcttctctctcaacaacttcaccttcttcctcctcgatcatgtctcacttcaagggcaagtaccatgatgagcttatcgccaatgctgcgtacattggcactcctggaaagggtattcttgctgctgatgagtcaacagggacaattggcaagcgtttggccagcatcagtgtagagaacattgaatccaacaggcgagctcttagggagctgcttttcactgctcctggtgttcttcaatatctcagtggtgtcatcctctttgaggaaaccctctaccagagcacagctgcaggcaagccctttgtgaatgtcttgaaggaagctggtgtgcttcctggcatcaaggttgacaagggcacagtcgagcttgctggaactaatggagaaaccaccactcagggtctagatggccttggtcagcgttgtgccaagtactacgaagctggtgcacgttttgccaaatggcgtgcagtgctgaagattggtcccaacgagccatctgagctgtctatccatgagaacgcctatggcttggctagatacgctgtcatatgccaggagaatggcctggttcccattgttgagcctgagatccttgttgatggacctcatgacattcacaagtgtgccgccgtcaccgagcgtgtccttgcagcatgctacaaggctttgaatgatcaccatgtccttcttgagggtaccctattgaagccaaacatggtcacccctggatcccaatctgctaaggtttcccctcaggtggttgccgagcacactgtcagagcccttcagagaaccgtgcctgctgcagttcctgctgtcgttttcttgtctggtggccagagtgaggaggaggcatccgtcaacctcaacgccattaaccaggtcaatgggaagaagccatggtcactctctttctcctttggaagggcacttcaacagagcacccttaaggcatggggcggaaaagaagagaatgtgaagaaggctcaggaagcccttttggtaagagccaaggctaactcagaggcaactctgggaacctacaagggtaactcacagcttgctgatggtgcctcagagagcctccatgtttcgaactacagctactgatcaatcgaagttggtgttgtttgaagagactagtgcgagtaggaatcggtattatgggtacaacaaccgaatttcttgttgataagtattattgtggtttgactcttcccagaataatcgtttggaattttgctttttgttttcctagtgttccttttatgtcaattttagtaattcagtgtatttggtcaaacctgtgcaacagggaagggaatgtaactttgttttcttgaaagacaccaccgtgctgtgaatgaggctttgtgtttatttttgcgatt

SEQ ID NO: 11577 - DNA, 915 bp, Glycine max
  Clone ID: 701102546_FLI
aatttgcactgagggcattggctagcacacttaatgaagaagagttggctgatataaaagatcaatttgatgctatagatgtagacaaaaatggttcgattagcctggaagagatgagacaggctcttgccaaagatcttccttggaaattgaaagaatcacgtgtactagagatattgcaagcgatagacaacaacactgatggtctagtggatttccgggagtttgtagcggctacattacacgtgcatcaattggaggaagactctgacaagtggcagcaactgtcacaggctgcttttgagaaatttgacctagataaagatggctatattactccggaagaacttagaatgcatacatgcttgagaggctccgttgatcctttgctagaggaagctgatattgacaaagatggaaaaataagcctaccagagtttcggagacttcttagaactgcaagcatgggttctcaaaatgtttcaagcccatctgttcatcggcggcagaggttctagattagaggtgcttcagaggctgagataagtttggagaaacgagtggtggagttcctctaagtaacttattgtgtgattgtgctgagtctcttaagactatcttctatcatgcagattgacaatctatgatactcaaaactccagttttggactgtggtaatcccctgcgcggggattatgtccacaatgtcacgaggactacatcaagaagtgtttggtagagtttatgtagacgattcatggactggcttcaggtatattgcagtttcagcagtatcatttatgtgtcggagttttcttggttgtggcatgcaagtaatgtgtaactacaaataaaatcttctagccaaaaatgaaaaaaaaaatataaataaacatgaaatgaaatacgtggatc

SEQ ID NO: 11578 - DNA, 2151 bp, Glycine max
  Clone ID: 701102705_FLI
caacaacaaaaaaaagtaaagaatttgctttgcgaggaagtaagtaggagatgctctgaactttcaaatttgtacaacccctaggaagagaagaagaaggttcaaaatccaatccatttttcatttcgaaagatcgtgatcgcaatgtccctctccaccgtgaggcagcggcgctcggagccgtctgatccgtcgccatcagaaccgtacacgaagctggacaagcccgagaaagcggaggagaaagacgaagggttggggtgggttttcccgttcgtggctcttgggttattgaggtacatgagtgccacctccaacatcatccacgattgcgacgaggtcttcaattactgggagcctcttcatttccttctctacaaatctggattccagacatgggaatacagttcacagtttgctcttcggtcatatttgtaccttttatttcatgaaatagtgggtcgaccagcttcatggttgtttagtgaggacaaagtgagagtgttctatgctgtgagattctttctcggtcttctctctgttttgactgatactgttctcgtggtagctctttcgagaaagtatggaaaacgacttgctacgtatgcccttgctatgctgtgcttaaccagtggctgtttctttgctagcactagtttcttgccgagttcgttttctatgtatgcaatatctcttgcatcaggtttatttcttctggataaacttgctgcagcaatttctgttgctgttattggtgtaatacttggctggccattctcaatcttggctttccttccagtgacactatattctctatctagaaaattcaaacaggcatttattgctgcggctgtcacatcaattcttcttcttgcattgtcaatagttatggacttttactactatggaaaatggacttcatctgtcttgaatcttttaatatataatgtagctggaggcggtgaaagccatctgtatgggactgaagggcctctttattatctgaggaatggatttaacaatttcaacttttgttttgttcttgctctgctgttcttggggattttgcctattgcaaagaagaaatatgcaccagacctactgattgtgatatcacctatatatatttggctggggtttatgtctttgcagccacacaaagaagaaaggttcctgtatccagtatatccacttatttgtgttgctgcttcagctgttattgagagcttccctgatcttttccgtagcaaatataatccatatgatcgctctataatagtgacagttgccaaagttatgagaccagtggttcttagccttatactatatgcctctcatgcccgtacattttctctgatcaatggttactccgctcccttagaggtttacaagatcttggaacaccatgatgcagaaaacaattctgtactttgtgttggaagtgaatggcatcgcttcccatcatcatttttcatcccagattatgtgggacaagttcgatggattgacgatggattccgaggtcttcttcccatcccatttaattctaccctaggggggactgcatcagcaccaccatatttcaacaataaaaacatggcatcagacaagcaatatctccatgatgttgatgcttgtactttccttgtcgagctgcagctagagcggccttacctgactcgtggaagtgacttgtcaacatgggagcctattgctgcattgccttatctggacagggagctttcaccggcactgtataggtcctttttcattccttacctttggcaagagaagaatgtttttggaatgtataagctgcttaaaagaagaaccacctgattttctatttgggcgggggatggggcattagattgtcctagaatatggtggtggattaacaacaaaaccatttttgttagagacagtaagcttgtaggatttccctcatctgttgttgaatatttgatttagttctaatcttcttagattccccgagtgttgtctgatgtctttttcccacggaagcattcagtttattaatcatctacggattaagtgtgtgttggggtgagtatttgcaaactggatttggataatcttcattttgcaaaattgttttggttaaaattgagtttgaagtgatttatgttt

SEQ ID NO: 11579 - DNA, 963 bp, Glycine max
  Clone ID: 701102752_FLI
ctctgttctaacgcggggtgcgggaggcccgagacgaggaagcacgagtttcgaaggtgttctgtgtgcggcgaggtgaattattgctcacgcgcgtgccaagcgcttgattggaagttccggcacaaagcggagtgcgcccccgtggagcgatggctcgacgaggacggcgaagatgtcggtaacgacgacggtgacggagaggtcgaggttgttatggtagatagttagacaatttttacaacagtaacggcaacggaagtcgctttggacggaaaatgaatctatttttggcgaagagaaattacttgtcgtgatttattcgccgtctcaaaaaggtagagagaatatggcttcctttcgttttttccttgtatagtttgaaaattctcccgaaaaaaaaaaaagacgaggggagattatttttctttttttttttgttgcaatttcggagtttaacgttaactagaaattagaaattcaatgctaagaggttactagttactaatttttgttattaatttaatcgatttgaacgtaattagtagctttgaagttttcttttattatatgagtagcttttattaaaacttgagattcacttaaatatattttacgtttttttttaatttaaatgtagtactatactcccctcttatattattataatatatattttacagtttaatagttactctattttgtttggatttgagattttagcggatacgacaaaattaaatgtgatttggtgagctgtgatttgtctctattgatttaatgcggcgccatcgcataaggttgaaaaatgaatagttgtgaaaataaatctaatcagttcacggacatcagattttgctttcatacaattttacctctcccctcacatgcatgagatgattacagagggttgattgattctatgcgatccaacaacttgttagtggcgtaaagaaaatatta

SEQ ID NO: 11580 - DNA, 1114 bp, Glycine max
  Clone ID: 701103039_FLI
cgaaatcaccttccgctttctctccattgttctctccgatccaagaccttactccaaccacagagaatggactcgcaggatagagtctcttatcacacatcaaattgaaatcattgccatactttgtgaagatgaggaacaaaattccgacacacgtggcactgcaccaaccgctgatctcagcaggaacaatagcagcgagagcagaagctacagcgaggcaagcctgcttccgcggcttgccacgtggtacaaatccaaggacgtagcgcagaggatccttctctcagttgaatgccaaatgaggaggtgttcctacacgctgggtttgggtgagccgaacctagcgggcaaaccgagcctgctctacgacctcgtgtgtaagccgaacgagatccacgcgctgaagacgacgccgtacgatgagcgcgtagagaatcacgagaaccacgcgttgcacgcgacgcaccagatcgccgagtcgtggatccacgcgtcgcggaaggaactagagaggatcgcagacgcggtgctctccagaacctttcgagaagcggctgaggactgctacgccgtggaaaggatctggaagcttctcgcggaggtggaggacctccacctgatgatggatccggacgatttcttgagactgaagaatcagctctcggtgaaatcctccggcggcgaaacggcttcgttctgcttcaggtcgaaggagttggttgaactgacgaagatgtgcagagatctgaggcacaaggtgccggagatattggaggtggaggtggatccgaagggaggaccgaggattcaagaggcggcgatgaagctctacgtttcgaagagcgcgttcgagaaggttcacttgttgcaggcgatgcaggcgattgaggcggcgatgaagagattcttctacgcgtataagcaggtgttggcggtggtgatgggaagctccgaggctaacggtaaccgagttgggttgagttgcgactcggctgactcgttgactcagattttccttgaaccgacgtattttccaagcttggatgccgccaagacttttcttggatacttgtgggataataacgataataacaaatggatatgataaggg

SEQ ID NO: 11581 - DNA, 871 bp, Glycine max
  Clone ID: 701103204_FLI
cagtgataagccttgtgtcactggctaatgctggcttctcagagattagagggaagcatttgaactattcaaagttttggaatgctaatccctctgcagaaaagcaggtcaagttgtctagcaaagctggcatgcttttgctgtacactcctgcttttcttgctggccttgcatccttctggatctttcctcatcaaggcctcagatccaccctccttcagtctgcagttaccctgcatttcttcaagagggtctttgaggttgtgtttattcacaaatatagtggtgccatgcttcttgattctgcaatccccatcactctgagttatttcctatcaactgcaactatgatctatgctcaacacttaacacaagggcttccagaaccaccaatcgatctgttgtatcctggcattgttttgtttgtggtgggcatcattggcaacttctaccaccactaccttctatccaacttaaggggaaagggtgaaaaggagtacaagattccaaagggtggcatgtttgagcttgtcatatgtccccactacctgtttgagattattgagttttatgggttctccttcatttcgcagacgctatatgcattctctttcaccgtaggcactactttatacttgctaggtaggagttattcaactaggaaatggtatctttctaagtttgaagatttccctgagcatgttaaggctatcatcccatttgtcttctagaaatgttggaaggaataactaattttactttcatttctcagacgctatatgcattatctttcactgtaggcgctactttgtacttgctatgtaggagtgattcgactaggaaatggtatctttctaggtttgaagatttc

SEQ ID NO: 11582 - DNA, 973 bp, Glycine max
  Clone ID: 701103464_FLI
tttacacccccgctggtgagccacttccaaccaacaagaggtatgatgctgccaaaattttcagccaccctgacgttgctgctgaggaaccatggtatggtattgagcaagaatataccttgttgcagaaagatgtaaattggccacttgggtggccacttggtgggtttcctggaccacagggcccatactactgtggaactggtgctgataaagcatatggccgtgatattgtagatgcacattacaaagcttgtatttatgctggcatcaatattagtggcatcaatggagaggttatgcctggtcagtgggaatttcaagttggtccttctgttggtatatctgctggagatgaggtgtgggcagctcggtacattttggagaggattacagagatggccggagtaattgtttcatttgatcccaagcctattccgggagattggaatggagctggagctcactcaaactacagcaccaagtccatgagagatgagggtggttatgaggtgattaagaaggccattgaaaagcttggattgaggcacaaggagcacattgcagcatatggagaaggcaacgagagacgtctcactggaagacatgaaactgcagacatcaacaccttctcttggggtgtggcaaaccgtggaagctccattagagttggaagagacacagagaaaaatggcaaaggttactttgaggacagaaggcctgcttctaatatggatccatatgtagtcacctccatgatcgcagagactaccatcctctggaaaccatgaaaaacagtcatatagtctctagatttggaccactaaaaattgtgttcaatagtcatttgatctaaaaatttatatttgcaaggtgatgtttagttaggaatttctaagtggtctttttgagcctccatgtgccatgtctatggttgagaataatttcgtcattaataacaagaatttcccat

SEQ ID NO: 11583 - DNA, 1532 bp, Glycine max
  Clone ID: 701103727_FLI
gatcctttttcaactggttttacttttctatcaacataggtgcccttgtttccagcacttttattgtttggattcaagaaaatgctggctggggtcttggatttggcattcctgctttatttatggcattagctattggaagtttctttttaggcactcccctttacaggtttcaaaaacctgggggaagccctattacgagaatgtgccaggttgtggtagcatctgtctggaagcgaaatctggttgtccctgaggacagtaatctcctatatgagacaccagataagagctctgcaattgaaggaagtcggaaactagggcatagtgatgaactaaagtgtcttgatagagcggctgtagtgtctgatgctgagagcaaaagtggtgattattctaaccagtggagactttgcaccgtgacacaagtagaggaattgaaaatcttgattcgaatgtttccagtttgggctactgggattgtttttgctgctgtttatgctcagatgtcaacattgtttgtggaacaaggaacgatgatgaacacaaattttggttccttcaggattcctccagcttccctctcgagttttgatgtgataagtgttattttctgggtccctgtctatgacaggattattgttcccattgcaaggaaatttacaggcaaggagaggggcttttcagagttgcaaagaatgggaattggcctttttatttcagtcctgtgcatgtcagcagctgctatagtggagattgtgcgcctgaaggttgcaaaagagcatggccttgttgatgaacctgttcctgtaccccttaatatattttggcaaatccctcagtatttcttattgggggcagcagaagtattcacattcgtcgggcagcttgagttcttctatgaccaatctccagatgccatgcgtagtttatgtagtgctttgtcgctgttgactacttcacttgggaattacttgagctctttcattctcactgtagtgacttacttcactacacaaggtggaaatcctggatggattccggataacttgaacaagggtcatcttgattactttttctggcttttagccggacttagcttcttaaatacctttgtgtacatagttgctgccaaaaggtacaagcagaagaagtctgcttaagatttttcaggcattttatttggactggaaggacgacattctgctatttccttctgtcaatgtcgtgattgttctgcatgtggaataaagatgttctgcagttatgtacgtttctttcatttacaaagtatggttcaaaacagccctgtctctgccctctctcatgaagcctgaaattgatgagatgagattgcctgctaccatttaggctaaacatgggcagttaatgttcaatttctctacattgcttgctaccatttgtaactattgatgtagaaaatgttgatactctttttatgtgcaccatcgtttcagattgtagtgtttgatcaacgaaaagcagagagctagaagaatgcactacgggat

SEQ ID NO: 11584 - DNA, 2195 bp, Glycine max
  Clone ID: 701103732_FLI
aaaatcgtgaggctgccaggaaaagccgactgaggaaaaaggcatatgtgcaacaattagagagcagtaggttgaaactgacccaacttgagcaggagctccagcgatctcgccagcagggaatatttatttcaagtactggagatcaggcacagtcaatgagtggaaatggtacttaaacattgtgtacctccgattgtatgttttgagggttaaacatattggagtagttttaggggatgttttgaggctgataataataatccatagtcagtgcaaaaacgattgacacttggtttgacattcaattaacaatatgtgcatcccgaaattagtgtatatgtaaattttgcattggcaatttggcagaaacctgataaaggcacctctattgagttgctgtccctaaccaacatggaatttctacatgctaaaatatttatggttgatttaagtgcttcatctagttctctgatattattctttttcgtgaaacaaaccaaagttcctgtaaagatatagtaccatctctaagttggattccatttacgttggttcatatttttcattgacaaacattggttatttggttgcatcttgcatcatttcagttgcactgaagtactgcattcttctgatacaccatagagcttggtgttatttgctgtgattgattgcatcatacgtgatgcaagcctattatgtgatttttgaactctgacaacatggtactcagtagcatggatggtcatgggcagggttttgcaaaagtttgtgctctgtttcaaatcctaaatcaatttaataatcttgttgtacaggcgctatggcatttgatgtagagtacgcacgatggttagaagagcataatagacaaaccaatgagctaagggctgcaataaattctcatgctggagatattgaacttcgaaccattgttgacaatttcatgacgcagtttgatgatatcttcagactgaaaggtattgcagcaaaagctgatgttttccacattctgtcaggaatgtggaagactccagctgagaggtgtttcatgtggattggaggctttcggtcatccgaactcctcccaagggagaagtttctcttatctatgttttgtaaatgttttttctggtttgaaaattgcttcactaatatctggttgaacattgattgcattccatgcttcccaacaatataaagtgagaaaagcaacaaaagaatcaaaatagataggacctttttttcttgacattattgaaacctaaaattcaagatatagtttcggaactttcccaattgaagaaatatcagttttaaccgttttgtgtttacgataattgattctgttgttgagttttaaagttcatagactttttatcacgttatgctgtctaagattggattgaaactgttgcagcttcttctaagtcagttggagcctttagccgagcaacaattgatgggcatctacaacttgcagcaatcatcccagcagactgaagatgctctttcccaagggatggatgcattgcagcaatcactatctgagacattggctaatggttcgcccagctcatcaggctgcctcgggaaatgtggcaaattacatggggcaaatggctatggccatgggaaagcttggtacacttgaggggtttcttcaccaggctgacaatctgcggcagcagacattacaacaaatgcttcgaatattaacgaccaggcaatcggctcgtgctcttcttgccatcagtgattatttctcacggctgagagcgctgagttctttgtggcttgccaggccaagggagtgaagcatttcacagccccattagtggacttctttcatgcctgactcccttaaacaccgatgatcattgaatcttgtgctctgaatgagttcaatggaagctggtgtcttttgacaatgaattcctcttgaagcctagttgtgatgctataaacattaaatgctatgatttttctactctgccaactgctggtgtggtgcaacatttttctttaagcttttgtggttttaaaatagtctcaataatttgattatataggtgtatgatagatagaagctgttgaagggaaaaatgtagaaatagtgtatctgtatttttaggttatagctgttcattgtatttcagaaatcagcttttatttgagggggtatttacctc

SEQ ID NO: 11585 - DNA, 1163 bp, Glycine max
  Clone ID: 701103740_FLI
ctgtcttgcttctttgttttgttttgttcgttgcttggtttcttctctgctatgttgtcatgtgttgttgtgtgcaatttttaggacatgcttggagctcgctgaaatttgcaaagaagtcgggcttcctcctggcgtgttgaacattctcactggattaggacctgaagcgggtgctcctttagcagctcatcccgatgtagacaagattgcctttactggaagctctgcaactgggagcaaaattatgacagctgcagctcagctgatcaagcctgtttcactagagcttggtgggaaaagcccaatcattgtttttgaggatgttgaccttgacaaggctgctgaatggaccatatttggttgcttctggacaaatggtcagatatgcagtgcaacttcccgccttattgtacatgaaagtatagcaacagaatttttgaataggattgtgaaatgggtcaaaaacatcaaaatttctgatcccttggaagaaggttgcagactaggccctattgttagtgaaggacagtatgaaaagatattgaagtttatctcaaatgctaagagtgagggtgcaaccattttgactggtgggtctcgcccagagcatctaaagaagggattctttgttgaaccaactgtcataactgatgtaactacctccatgcaaatttggagagaagaagtatttggaccagttctctgtgtaaaaacatttagcactgaggaagaagctattgatctagcaaatgacactgtatatggcttgggttctgctgtaatatcaaatgatctagaaagatgtgagcgcattactaaggcttttaaggctggaattgtgtggattaattgctctcaaccatgcttcactcaagccccatggggaggcattaaacgcagtggttttggtcgtgaattaggagaatggggacttgataattacttgagtgtgaagcaagtgacccaatatatctctgatgaaccgtggggctggtaccagtctccttcaaggctgtgataggtatccaaaagctaacattaataagttgtgggtaatatcaaattatgattatgaccccaaagtcgagaagacatgatgtctatgtataacattgaaatggtttgcactttgcagtcaagattatgttggtagtgttttt

SEQ ID NO: 11586 - DNA, 1010 bp, Glycine max
  Clone ID: 701103953_FLI
ggctgatttgctcagataccactcgacaaagagcggagatgaaatgacaagcttgaaggactacgttacacggatgaaggagggtcagaaggacatttactacatcacaggagagagcaagaaggcagtggagaactctcccttcttggagagactcaagaagaagggctatgaagttcttttcatggtggatgcaattgatgagtatgctgttggacaactcaaggagtacgatggcaagaaattggtttcagctacaaaggaagggttgaagctagatgatgagactgaggaagagaaaaagaagaaagaggagaagaagaagtcatttgatgaactctgcaaggtcatcaaggacattctgggagacaaagtggagaaggttgttgtctctgacagaattgttgattccccttgctgtttggtgactggtgaatatggatggagtgcaaacatggagaggatcatgaaggcacaggctctgagagacagcagcatgagtggctacatgtctagcaagaagacgatggagatcaaccctgacaatggtatcatggaggagttgaggaagagggctgaagctgataagaatgacaagtctgttaaggaccttgtgttgcttctctttgagactgcccttttgacttcaggtttcagccttgatgatcccaacacatttgcttcgaggatacacaggatgttgaagctgggacttagcatcgatgaggatgacaatggcggagatgatgttgatatgcccccgttggaagaggacggtgctgaggagagcaagatggaggaagtggactaaatgccaaaggtgttgtgttaatgaattgtggatcgtacgatttagtctgttaaatggtacaggatgcataagtctttatcttccttgttttgttttttgaaatatattgggttttctttttaacttttgtgatgtgaaaatgtgtctgtgtattgcatctacctattttgtcagtgatcgttatgaatatacatcattg

SEQ ID NO: 11587 - DNA, 1188 bp, Glycine max
  Clone ID: 701104101_FLI
ttccccagtcacacacaaacagctcaacctcggaccaagatttacattagatagatacatcattcatacatggcttgttcccgcattcacttcaaccttaatctccctttcccctccgatgcggcaccaattccgtacacatgtcactctccctctcgcctctctctttcccctctcttcacattcacaacaccaaagatcgcttattccagtgctccgcggcgcacgtgtggtgcggtgtgctgtcagatgaccatggaggagaagcctctctctgagaaccaaatgctcgtgtatgtgcctcctcatccgttgatcaagcactgggtttcagttttgaggaatgagcaaactccttgtcccatcttcagaaatgcaatggctgagttgggaaggctactaatgtatgaagcttcaagagattggttgccaactgtttctggagagattcaatcaccaatgggtgtagcctctgtggaactcattgatcccagggagcctgtggctgtaattccaatcctgagagcaggccttgctctagctgaacatgcatcatcgatcttgcctgcaataaaaacatatcatttaggaataagcagagatgaggaaactcttcagccaactatatatttgaacaagttacccgagaaatttccagaaggatcgaaagtttttgtggttgatcctatgctggcgacaggtggcactatagtggcagctgtgagcctcttaaaggaacgtggagttggcaacaagcagattaaagtgatatctgctgtctctgcccctccagctcttcaaaagctgagcgaacagttccctgggcttcatgtgtatactggaataattgaccccgaagttaatgaaaaagggttcataattcctggccttggagatgctggggaccgcagctttggtacagatacatgaaaaatatatgaaatacctcatctcctctcccttgggtgccatatttttcaatttttgaggcccaaaatttgtctatttcttcggatggatactgaagccttgatcagtggcaccctttcgggttacaattacataggtattggtcattattattatgaattacataggtgttataagttcaaactcctaacgtaaaactgactagcatgtcaattcaaattgtttttctttatggcttaaatatatttttagttcctt

SEQ ID NO: 11588 - DNA, 1331 bp, Glycine max
  Clone ID: 701104659_FLI
ggactgacaccatggtgaggctcttgataatggcggtttattacattggtgatgaggctggctctgaagggactgataagaagaagtcatctggtttgatgcagaagaaagggaagtggaaatcggtttcaagggctatgatggagaaggggttctatgtttctcctcagcagtgtgaggacaagttcaatgacttgaacaagaggtacaagagggtgaatgacattcttggcaaaggaacttcctgcagggttgtggagaatcagagtttgttggattcaatggacttgtctccaaagatgaaagaggaggttaagaagttgctcaattccaagcacttgttcttcagggaaatgtgtgcttaccataacagttgtggacatgggaataacaatgctccacagcaaggagagtctgggggtgaagtgtctcagcctcaggctcaacctcatcatcatcagcagcagcaacaacaaccgcaacaacgatgttttcattcatcagaggttgggaatttggggggctcaggtgttgagggtttgaggatgttgaaagtgggaaatggggaagagggtgatgatgactccgaggatgatgatgactcagaggatgattcggacgaggacgaagatgattcgggagaaggtggttcaaggggtcatgtggggcatggacatgaagatattgaggatgagaatgatggaaggtcaatgagaaagagggcaaggaaagtaggaggggtttctatgtcaccacagttgatgcaacaactgagtgctgaggtgagtggtgtgttccaagatgtaggtaagagtgcttgggacaagaagcaatggatgaggagcaggataatgcagttggaggagcagcaaataagctaccatactcaagcttttgagttggagaaacaaagattaaaatgggcaaggtttagcagcaagaaggagagggaaatggagacagccaaacttgaaaatgaacgcaggaggcttgagaatgagagaatggttttgctcattcgccagaaggaatttgaattgatgagtcttcaacaccaacaacagcagcagcatcaacaacaacattcttccacctagatctaggggagatgatttttctgcggttaattgtattgatagatgaaactaaggtatagaaaagatgtagatcgattaggcctaatagaggaaagtggttgttctctttttggggtacttattataagatggttgttattgaagaaaagaaaaatagtaaatttctgtgtctaccatctagatacccttttgtttatttaaacatgctttggttattactattaattttgtttt

SEQ ID NO: 11589 - DNA, 1602 bp, Glycine max
  Clone ID: 701105014_FLI
ctctctttgctacctcttagtcaaacaaagtaacaaaccatcctcccctctcttctcttcttttgttctctagatttcttctctcttgtttcttagaatccgtacaatctaatcaacataacaaaaatggatgcaattagttgcatggatgagagcaccaccactgagtcactctctataagtctttctccgacgtcatcgtcggagaaagcgaagccttcttcgatgattacatcgtcggagaaggtttctctgtccccgccgccgtcaaacagactatgccgtgttggaagcggcgcgagcgcagtcgtggatcctgatggcggcggcagcggcgctgaggtagagtcgcggaaactcccctcgtcgaagtacaagggcgtggtgccccagcccaacggccgctggggtgcgcagatttacgagaagcaccagcgcgtgtggcttggaacgttcaacgaggaagacgaggcggcgcgtgcgtacgacatcgccgcgcagcggttccgcggcaaggacgccgtcacgaacttcaagccgctcgccggcgccgacgacgacgacggagaatcggagtttctcaactcgcattccaaacccgagatcgtcgacatgctgcgaaagcacacgtacaatgacgagctggagcagagcaagcgcagccgcggcgtcgtccggcggcgaggctccgccgccgccggcaccgcaaactcaatttccggcgcgtgctttactaaggcacgtgagcagctattcgagaaggctgttacgccgagcgacgttgggaaattgaaccgtttggtgataccgaagcagcacgcggagaagcactttccgttacagagctctaacggcgttagcgcgacgacgatagcggcggtgacggcgacgccgacggcggcgaagggcgttttgttgaacttcgaagacgttggagggaaagtgtggcggtttcgttactcgtattggaacagtagccagagttacgtcttaaccaaaggttggagccggttcgttaaggagaagaatctgaaagctggtgacacggtttgttttcaccggtccactggaccggacaagcagctttacatcgattggaagacgaggaatgttgttaacaacgaggtcgcgttgttcggaccggtcggaccggttgtcgaaccgatccagatggttcggctctttggggttaacattttgaaactacccggttcagatactattgttggcaataacaataatgcaagtgggtgctgcaatggcaagagaagagaaatggaactgttctcgttagagtgtagcaagaaacctaagattattggtgctttgtaacgttacgttaggttttttttttctttttttttttcgggagtttttgtgactgatgaaagaaagaaggtacaagaacggcggtgtagtggcatggcaagttgctgcaaagtgcaaaaggtgaattgtatattacttaatattattagatgttgaaattaggtgtaatgtaacaaaaactgtacaagaagaagaaaaaaggttttaagaaggggagaagaaaaataaaaataaaagatatcatatgaaaactgtttaatggtatatgttgat

SEQ ID NO: 11590 - DNA, 310 bp, Glycine max
  Clone ID: 701105029_FLI
gttgaaaaggtggtaacatatgtaattgcgaaggattaaattagagatttatatatttcttttttgttttataatctcttactaatctttcttatttcagctttaaagcatactcaaagtcttttgtactttttttttctttacaggaattgattggtctaggcgctcgcacgctcatggttcctgggaatttaccaataggatgtagtgtaatttatttaacgatttatgaaaccatagataaaacccagtatgaccaatttgggtgtttgaagtggttaaacgagtttggtgaatattacaaccataa

SEQ ID NO: 11591 - DNA, 346 bp, Glycine max
  Clone ID: 701105046_FLI
cagaaagcaagattatgccttcaccctgacaaactgcagcaaagaggagcgacactcctacaaaagtatattgcagagaaggctttctccattcttcaggatgcatggactgggttcatttctgaagatgtttccttataaacagtaggcgactccaattcctgataactcatttttggtttaaagctcgtggacagacatcaagatagacatttggaatgacaaaagcgatcatttccatgcggcaaatacatgatgtatatgaaatttgaaaatagcatgtcctttgtgcaaacaattgactgatggatctgctgttttgtgtttgtaccataagttgtttgat

SEQ ID NO: 11592 - DNA, 2133 bp, Glycine max
  Clone ID: 701105054_FLI
caaaatttcgatatgtgatgtggttttctgacagtcattttgatacatacatggtgtgttttccaaataagttaccaaatcaaattggttcttcaaaagcaacattttcttcctcccttatttcggttacccactcttggttgggaatgaatgaaggaagctggcagagcttggctacaacagaaatgccaagaaatgcaaagagaagtttgagaacgtttacaagtaccacaagagaaccaaagaaggacgaagtgggaaatcagaaggcaaaacttatcgcttctttgatcaattacaagcccttgaaaacaaccctgcaattcatggaaagcaatctccaacacctccaaagccgccaccacaaacaacagcactatcagcaacaccagtgtcaatagtggtaacaacaactacaactacaccatcatcaataataatgccacttccattgccaccagtgtctaataacaacaacaacaccactgttccatccacaacatcacttcctatgcctcaaagcattctcaacataacaccaccatcaacactgaacatcacaatcccttcttttccaccatcaaaccctacaacatacttcccaacacaaacaccaaaccctactagcaacaacaacaacaaccctccaagcaccatcaccccaccttccttccccaatttccccgccgatctcttgtcgaattcgagttcttcatcgacttcttcggaggaaacaccgacgacggaggccagagggcgcaagaggaagaggaagtggaaggacttctttgagaggctcatgaaggaggtgatagagaagcaggaggagctgcaaaggaggttcttggaggccatagagaagagagaacaagagcgtgtggtgagagaggaagcgtggagaatgcaagagatgcaaaggatcaacagggaaagggagattctagcacaagagaggtccattgccgcagcaaaagatgctgctgttatgacatttttgcaaaagatagccgaacatcagcaacaagaaactatcaatcttgaaccagcattgaataacaacagcatcactgttgttccacagcaaccagtgccacaagcaacaccaacatcaactccaacaccacaacaagcacaaacaacaacagttcctgaggccccacaagtgcagccattggtcccacaactacaacaacaacaacaaatagtggtgagtaatgtggaaatcaacaaagctgataataacggtgagaatttgatgatggaagcaagctcttcaaggtggccaaaagtggaggtacaagcactgataaacctgaggacaagcttggaaacaaagtaccaagaaagtggaccaaaagggccactgtgggaggagatctcagcgttgatgaggaaaatggggtacaaccggaacgccaaaaggtgcaaagagaagtgggagaacatcaacaagtacttcaagaaggtcaaggaaagcaacaagaagaggcctgaagattcaaagacatgtccctattttcaccagttggaggctctatacagggagaagaacaagggagaggggcagatgaagccggagagcatgatggcgccgctcatggtgcagccggagcaacaatggcctcctcaaacaacgcttgtggtaccgccagaagtaaccatgggagacacccagaatgacccccatggaccggcagtaccatgaggagaatgaggatgacgaggacgacaaggaaattggagatgaagacgaggatgaggacgacgaaggaggtgataattatgagatagttgcgagcaaaccagccacagctgatgcttccggagagtgagaggaaaaaatattgaccaaaaagggcatcaattaaagaatgatggatcaatttgaattcacatattgtcggaaaaatggtggtgttgggatgaaatttggtattgatggtggatggtgatgtgattgtattgaagattttgaaaatgcacgtacttcagaatgacacatgggtataggggtagccagtagggtgggggaatctgggttggaagtacttggtacaatagcagcatatagtcagtaagattatatgttttttttgttttgaaagaagaaataattaattattttttgagctc

SEQ ID NO: 11593 - DNA, 2553 bp, Glycine max
  Clone ID: 701105070_FLI
cacaactacataaagtcaaggcaaaccatatcatgaaaaaccaacttatgttcttatccatgttcctttcgtttctgattcttccaaccgctagccaaaaacatgcatgtggctctgccaagactagcaactttccattttgtgacacttcactatcttatgaggacagggcaaaggacttggtgtcacgcttaacacttcaagaaaagacacaacaactagtaaacccttctgcaggtatttcgcggcttggtgttcctgcttatgaatggtggtcagaggctcttcatggtgtctcaaacttggggccaggaacacgttttgacaagaaggtgccaggtgccactagcttcccagcagtgatactatcagctgcaagcttcaatgcaagtttgtggcagaagatggggcaggttgtgtcaaccgaggctagagccatgtacaatgtggatttggctggcttgacattttggagtcctaatgtgaatgtgttccgtgaccctaggtgggggcgtggccaagaaactccaggggaggatcccttggtggtgtctagatatgctgttatgtatgttcgtggcttacaagaagtggaggatgaagcaagtgctaaagctgataggcttaaggtttcaagttgttgtaagcattacactgcttatgaccttgacaattggaaaggcatagatcgcttccatttcgatgcaaaggtgacaaagcaagacttggaggactcgtaccagcctccgttcaagagttgtgtggtggagggccatgttagcagtgttatgtgttcttataatagggtgaatgggattcctacatgtgctgacccagaccttctcaaagggataatcagaggccagtggggtctagacggatatattgtttcagattgtgattcagtggaagtctattacaatgcaattcattacactgcaactcctgaagatgcagtggctcttgcactgaaagcaggtttaaacatgaactgtggcgattttcttaaaaaatacactgcaaatgctgtaaacttgaaaaaagtagatgtagcaactgtagaccaggccttggtgtacaactacatagtcctgatgagattgggcttctttgatgaccccaagtcacttccatttgcaaaccttggaccatccgatgtatgtactaaagacaatcagcaactggctctagatgctgcaaagcagggaatagttttgctggaaaataataatggagctcttcccttgtcccaaactaacattaaaaaattggctgtgattggaccaaatgccaatgccaccacagttatgattagcaactatgccggcataccttgtcgctacactagccctttacaaggactacagaagtacatttcttctgtaaattatgcacctggttgtagcaatgttaaatgtgacaaccagagcctcattgcagcagcggttaaggcagcagcctctgctgatgcagtggtgttggttgtgggattagaccaatctattgaagcagagggcctggatagagagaacttgacattacctggttttcaagagaagtttgtgaaagatgtggctggtgctaccaaaggaaaagtgattttagtcataatggcagctggtccaattgacatttcttccactaaaagtgttagtaacataggggggatattgtgggttggttatcctggtcaagctggaggggatgccatagcccaagtaatatttggagactacaacccaggtggtaggtctccttttacatggtatccacaatcttatgttgatcaagtgcccatgacagacatgaacatgagagccaacaaaagcagaaatttccccggaagaacctacaggttttataatgggaattccctctatgaatttggtcatggattaagctactccacattctccatgtatgttgcatctgctccctccagcataatgattgaaaacacatccatttctgaaccacataacatgctctcttccaacaactcaggcacccaagttgagtctctctctgatggtcaagccattgatatttccaccataaactgccaggacttgacatttttgcttgtcattggtgtgaagaacaatggacccttaaatggatctcatgtggtcctagtgttctgggagccagcaacttcagagtttgtgattggtgctccaattaaacaacttataggatttgaaagagtacaagttgtggtgggggtgacagagtttgtaacagtgaaaattgatatatgccaactgataagtaatgtggatagtgatggcaaaagaaagctggtcattggacagcacaccattttggttggatcttccagtgaaactcaggttagacaccacattgatgtcaaactttctgggagtatgaatggaaaagaattcatgtctgaatgaatccagtaagagaactttgctagcagctacaagtcatagcaataatacgatgagtttgataacagtatgtggaagtggaagatatgagatatcatatgtatgatggatcatatactatgtattagatattactaat

SEQ ID NO: 11594 - DNA, 798 bp, Glycine max
  Clone ID: 701105162_FLI
cttgggctccgcagcctcaggtattgggccatccatccacgggtgggttcttgacccactgcggctggaactctattctggagagcgtggtgaacggtgtgcctttcatagcctggcctctgttcgcggagcagaggaccaacgcctttatgctcacgcatgacgtcaaggtggcgctgaggcccaacgttgcagagagtggcttggtggagagacaggagatagccagcctagtcaagtgcctcatggaaggtgaacaagggaagaagcttcgttaccgaatcaaggatatcaaggaggctgcggctaaggctctcgctcaacatggttcctccaccaccaacatctccaatttggctctcaagtggacccacaaattcaactagtagcttcttcctttcaattatctgcacttaacttatcaaatgtcactttgcatacatgacattaataaaataattgggtaagtgtacgtaaatttcaaatccacatcccgaggataccgagtgcgagtgagtgaactgaatgttcaatggctagacctctaacttgtagtatatgtttcaaaatgcctttcaaccttaaattactaagttctatggctgcctggctaattaattaacgtcaatttcttcagtttggtaaatgccttcaaccagaaaaggagtacggtatatcctttgatcaatcatcaaggattaagcactagtttttagaatctgctttatatttttttttcgtggtctaaaatttatgacattcttgtagagctgctaaatatataatatgcttgctgtc

SEQ ID NO: 11595 - DNA, 1375 bp, Glycine max
  Clone ID: 701105189_FLI
caaaaccctaggtagagagctcttcctcactctcattcgcaatggccgcagcagcacgtcctctcgtcaccgtgcaggccctcgacagtgacatggccaccgacgcctccgccaccgtccctatccctgacgtcatgaagtcctccatccgcccggacatcgtcaacttcgtacactccaacatctccaagaacagccgacaaccctatgcagtcagccgccgcgccggccaccagacttccgccgagtcctggggaaccggtcgtgccgtctcccgtatcccccgtgttcccggcggcggaacccatcgcgccggccagggagccttcggaaacatgtgtcgtggaggacgcatgtttgccccgaccaagatctggcgccgctggcacaggaaaatcaatgtgaaccagaagcgctacgccgttgtctccgccatcgctgcctccgccatcccctccctcgtcctcgcccgcggccaccgcatcgagtccgtcccggagctcccactcgtcgttagcgactccgccgagagcgtcgagaaaacaaaagaagcaatcaaagtcctcaagcagatcggagcattccctgacgcagagaaagcaaaagacagtcgcagcattcgtcctggaaaggggaaaatgcgtaaccgtcgctacatctcacgccgtggaccactcatcgtgtacggaacggaaggagccaaagccgttaaggccttccgtaacgtccccggcgtggaagtcgctaacgtcgagaggcttaaccttctgaaacttgctccaggaggacacctcgggaggtttgtggtttggacaaaaagcgcttttgagaagctggattcgatttatgggtcttttgataagccctctgagaagaagaaggggtacttgcttcccaggcccaagatggttaactctgatcttgccaggattattaattctgacgaggttcagtctgttgtgaggcccattaagaaggatgtgaagaaggccacgctgaagaagaaccctcttaagaacctgaactctatgctgaagctgaatccttatgccaagactgctaagaggatggctcttcttgctgaagctcagcgcgttaaggccaagaaggagaagctcgacaagaagaggaagactgtctctaaggaggaagcttctgccatcaagtctgctgggaaagcatggtatcacactatggtgtcagattctgattatacagaattcgacaacttttctaagtggctgggtgtttcacagtaaactttatgattcatattttcgtattagatttttgttttgtatgcccatcagaactaaatatctttggtttttttgttttgcgagttaaggttatcataattatgcagacaatttgg

SEQ ID NO: 11596 - DNA, 929 bp, Glycine max
  Clone ID: 701105417_FLI
caggaagctctaaggtcaagagggctgaaggatgatacaacttgcctcgttgtagatattattccttcagatcatcctgtgttaccagcaattccaagaaagaaacgtagtgtgctaacttcccttctctttggaaagaaatctccaaactctacaaacaaaggcaacaataagctttctgctgttggtgttgtggaggaattatttgaagagggttctgcaatgcttacagagaggtaactgagactataattgctaaatttatatttgcaggatgccatttgaagtttaattgttgctttgcttcatcaccaacatggtggaaagtgagaataaatgatcctttttcccaataacattatgtgtgattcttaaatttccggacataaaaaatgcaggttaggcaaggattttccgtctaatccgaatcctgggattttccgctgtgcagtttgccaagcagatcagccctctgtggatagtgtatcaatgaacactgggtctttttttcccccagtatctaagccatgggaaggtctgttcctctgcacaaactgtcagaagaagaaagatgccatggaaggaaaaaggtctaccaggccctcagagacagcataataatatagtagtaatctagcaacatagtaaaatattagtatagtttttctctagcagtgtgagcatgcttgcttctacatttgggtggtgattgtcattggtgtgttaagaatgaggttgagatagccatattaggtgtattggaggttgttgcatgtttgtttttggcgtctgctcagctgttggactaactgatagaacaagcaatgttgtgttgtgtagaagataacttctagtagtttgattactaacggcttgtaattaactgacactttcattgttaccatttatagatttttttaaacagtaac

SEQ ID NO: 11597 - DNA, 1121 bp, Glycine max
  Clone ID: 701105426_FLI
caaggaataatgtgtcaccacaaaaggcatctttgaagttcttgatatatggtggtgcagggtggattggggggcttataggaaacatttgtgagaagcaagggataccctttgaatatggcatggctcgcttagatgatagatcacagatcttgtttgattttaggaccattaagcctactcatgttttcaatgcttctggggtgattggagcattaaatgtgaaatggtttgaagctcataagccggaaactatacgtgctgttgttgttggtgtgttaacattagcagatgtctgcagagatcatggtctcctcatgatgaattatgcctttggtggtaacttggaagacaaagcaaattccactgatgccttctattttagaacacaagccaaggttgaagagttgctaaaggaatatgaaaatgtttgcaccctaagaatccaattgccagtgtcatctgatctcagcaacccacataacttgatcactatgataacaaggtctgataaagtggccaacattccaaacagcatcactgttttggatgaactcgtaccaatttcaattgagatggccaaaaggaattgcaggggcatttggaacttcacaaaccctggtactgtgacatgcaatgagattcttgagatgtacaaggattatgttgaccctacttttaaatgggttaattttacacttgaacaacaggctcatgtcccttctccaagcactaatgagatggattcatcaaaactgaagaaggaatttcctgagctgttgcctgtcaaggactcattgatcaaatatgtgtttgagccagaaaagaaaagcttggggttttgagtagcataattaaccatatataaatgtatacatttcggtctctatcattttattttcccttttttggttagtttggtttagtttgatagaattgaatttcatattccttttaccttttttttttcatttgtatttgcttctgctttttgtagatgcttgggttttgtagtttatattttctattccataacagaactattttggtcaaaatcaaaagaagttgaataaagggttaacccctgatgtatgaaactatgaatatatccaaattcgtcc

SEQ ID NO: 11598 - DNA, 1472 bp, Glycine max
  Clone ID: 701105438_FLI
cgcatcttcagaaaggcgaatccatagcacccgagctgctacaggccattcaagggtctcgccttttccttgtggtattctctaagaactatgcttcctcaacttggtgtttgcgtgaacttgcacacatctgcaactgcactgatgaagcatccccgagtcatgttcttccgattttctatgatgttgatccatcagaggtgcggaaacagagtggttattatgggatagcctttgcagaacacgaagaaagattcagagaagatatggagaagatggaagaagtgcagagatggagggcagctctgattcgtgtggccaatctctctggttgggatatccgaaataagtaagtacaaatttatatgcagtcagtcatattatatccatgtgcatacatttcatcatttcttagtcacgttgttttatcaaacttactatcgctttctaaagtagagttcagagaagttgaggaggtaacatgcaaattgactctaaatttatacatgtttaacgcgaatggtgtttaaaaactttgaaattatcttatcctgtacatatatacattctgttgtggttctgataatttgccattctttattttctttaaattttcaggtcacaacctgcactgattaaagaagttgttcaaaatataaaatatatcctaggtcccaactttcaaaatcttccaaacggtaatctagtcgggatggaatccagtcttgaagaattagaaaagtgtttacgattagagtcggttaatggcgttcgtgttgttggaattagtggaatggggggaataggaaagacaactcttgcccgtgcattatacgaaaagatttctgatcaatatgattttcattgttttgttaatgatgtaaacaaaatttatcaacattctggttcactaggtatacaaaaacaattactttctcagtgtctaaatgatgaaaatttagagatttgtaatgtttctaagggaacatatatggtatcaactatgctacgcagtaaacaaggacttatagttcttgataatgttaataaggatgaacaactatgtatgtttacagggggtagagagactctattacatgaatgctttggtgaaggaagcagaatcattataatttcaaggaatgaacacatattaaggacatatggagtaaatcatgcttaccaagtccggccattgaatcaagacaaggctgttaagttattttgcataaatgctttccattgtaactatattatgagtgattatgaatggttgaaacgtgatgtactatcacatgctcaaggccatcccttggcaattaaagtaataggcaaatctttgtttggtcgaaatgtttcacagtggagaggtacattggttaggctaagtgataataaaagtaaggatattatggatgtgttgcgaataagttatgatgatctagaagaaaaagataaagaaatatttttag

SEQ ID NO: 11599 - DNA, 1266 bp, Glycine max
  Clone ID: 701105670_FLI
gacgagtggcacctcaggcgtcagcttcttccttttcatactgttgtacttttaccaaataagagaaacaaaaaacaaatccacacactccattttcgattcctttccatttctccgttccccttggaacgttttctctctgtgtgtctcgctagggcaaaaaccatgaacatcttcaggctcgccggtgatatgacccatcttctcagcattctcgtcctcctcctcaaaatctacgccaccaaatcatgctcagggatttctcgcaagactcaagagctctacgcgattgtgttcgtggcacgctatttggatctgttcacggacttcatctccgtttacaacaccttcatgaaggtggtgttcattgccagctccttagccattgtttggtgcatgcgttttcaccccatggtcaggagaagttacgatagggaactcgacacttttcgccattatttcgttgttggggcaagctttgctttggcactcatcttgcatgaaaagttcactgttcaagagattttctgggcattttcaatatacttggaggcagttgcaatattaccccagttggttttgttgcaaaggagtggaaatgtggacaatttgactgggcaatacatattctttcttggtgcatatcgtgcattttacatcctgaactggatataccgctatctgactgagccacattttactagatggatagcttgtgtctcaggtgttgttcagacagctttgtatgcagatttcttctactattacttcatcagctggaagaacaattcgaaactgaagttgcctgcctgaattatctcaagttgttttggaatttagacctgtgtgaccagtcaccgctaaattttacagagcgtcgtggtttggatgatgttagttttgagagtaacgagacaaggctaactcctctccctgttcatgagtggggtaagtaagttttgtttttaaggttcaagggtaaacaggttttaacttctgatgaatataaccgtctcgtgggttaaaatgcaaatgttatgtgatgatgttttgtatattcacgtctccattgcatattattgtatagtttgtagtgtaaggtagctgattttggttatgatacgaatgatccctagtttaggtatgattacactgtaaaattataccatttcttcttttggcagaggtgactaaatgcaaattctgtcggaataccgtaacttgattgctatttctatttataatcgcaaattatgttaattggac

SEQ ID NO: 11600 - DNA, 2127 bp, Glycine max
  Clone ID: 701105705_FLI
gttggatagagcactttattgtcaagataaatgagggtcaaagtaagcgcattagatgcatggaacacaagtgcaattccatatgtgatgatgccgttgtaagaactctactcagtagagagcaccctcatatggcagagaaatatgaacgctttctgcttgaatcttacattgaagacaataagagagttaaatggtgccccagcacacctcattgtgggaatgcaatacgggtcgaggatgatgaactgtgtgaggtagaatgttcatgtggtgtacaattttgttttagttgtttgtcagaagcacactccccttgttcatgtctgatgtgggagctttgggctaagaagtgccgagatgaatcagaaacagttaattggataactgttcatacaaaaccatgtccaaagtgtcacaaaccagtggagaagaatggtggttgtaacttggttagctgtatctgtggccaagcattttgttggttgtgtggtggagctactggccgagagcatacttggtcaagtatagctggtcatagctgtggtcgatacaaagagcaagaaaagacagctgaacgtgcaaagagggatctatatcgttatatgcattatcataaccgatataaagctcacacagactcctttaagattgaaagtaaactgaaagagactatacaagggaagattgccatttcagaagaaaaagattctacactcagagattatagctgggtaaataatggactctccagacttttcagatctaggcgagtcctatcatattcatatgcatttgcattttatatgtttggagatgagctttttaaggatgaaatgacagatgctcaacgggaaataaaacagaacttatttgaggatcaacagcaacagcttgaggcaaatgttgaaaagctctctaaaattttggaggagccttttgaaaccttttcagatgataaggttgttgagataaggatgcagatactcaacctttcaacaattattgacaaactttgtcaaaaaatgtatgaatgcattgagaatgatctattgggttctctcaatcttggcattcatagtattgctccatacaagtcaaagggcatcgagagggcatcagaactttcagttggctggaacaacaaagtcaataatactggtaaatgccttttgtgggttttgtttgaataattagctggaccaaaacccttttgcgttagcattgccattgtttgtgatacctcctctcataatgcattaacaggaaattaagtgagccaattttgatttcttgcttccatttttgtttcttttgttatgcattaaaatgaagaagtattacttgtagatgaggttacgtatataattatgcttatagtgcttattgtagatcttgttgttatttaccaacatggaaatatggtggcaactcataaatttatatttttagcttccttatcttattatgttatgaatgttcttatgtatgtcttcttcagtttgactttgtggatgctcatcagaaaatgttactgagtgaaaaggattattgtatatatgctgcaagcgtaggtgtaacagaagaacttgatcgaccatctggatcagggagttcagacgataatggatgttcttctcgtaaacgtgctagaaaagagggtcttggaggtggtggtttttttgatctaaacttgccagcagagtttgtagacagaaattgactttgaaggacaccttattatacgtacaggcgtacaggtctaacaacataaaattgctttgctttgctgcctttggaaggaaggaattaatctttttggatttcataccccatttgctttctcatatctttcttttagccagccatgtctctgctgagataaaagatatgtttccaaggtttcttattcctatgccatctacctttctgtttgaaatcctagcgctgtatatagatagccttggggcatttatttgctagtagttttatgtaaatggctaccttgaggacaactaggatgcttttattcctattttatggagttataggtggaggtaacttcactgatttttcttctctcatgtttacactattttaacttgtttaagttacaattttcaagcg

SEQ ID NO: 11601 - DNA, 1679 bp, Glycine max
  Clone ID: 701105714_FLI
gaaaagcaaaatggtgaagatttgctgcattggtgctggatatgtggggggtcctactatggcagtcattgcactcaagtgcccatccattgaagttgctgttgttgatatctctaaatcccgcattgcagcctggaacagtgaccagcttcctatctatgaacctggccttgatggtgttgtgaagcaatgccgtggcaagaacctcttcttcagcactgatgttgaaaagcatgtctttgaggctgacatagtgtttgtctctgtcaacaccccaaccaaaactcagggtcttggagctggtaaagcagcagatttgacatattgggagagcgcagctcgcatgattgctgatgtttcgaagtctgacaagatcgttgtagagaaatccacagtcccggttaaaacagctgaggcaatagagaagattctgacccacaatagcaagggaatcagattccagattttatcaaaccctgaattccttgctgagggaactgcaatcaaagatctctttaacccagaccgtgttcttattggaggcagggaaaccccagagggccaaaaagctattcaagcattgaaggatgtttatgctcaatgggtccccgaagaaagaatactaaccacaaatctctggtcggcagaactatctaagcttgctgctaatgccttcttggcccaaaggatttcatctgtcaatgccatgtcagcactttgtgaggctaccggggcaaatgttcaacaggtgtcctattctgttggaacagactcaaggattggacccaagttcctcaacgccagtgttggttttggtggatcctgcttccagaaggatatcttgaaccttgtttacatctgcgagtgcaatggccttcccgaggtggctgagtactggaaacaagttatcaagatcaatgattatcagaagagccgttttgtgaaccgtgtagttgcatcaatgttcaacacagtctcaaacaaaaagattgctattctgggatttgccttcaagaaagacactggtgacactagggagacccctgccattgatgtatgccaggggctacttggtgataaggccaacctgagcatatacgatccacaagtaactgaggaccaaattcagagggatctatcaatgaacaagtttgattgggatcatcctatccacttgcagcccacaagtcctactactgtgaagaaggtcagtgttgtttgggatgcctatgaagcaacaaaggatgcacatggcctttgcattctaaccgagtgggatgagttcaagactctcgactaccagaggatatttgacaacatgcaaaaaccagcatttgtttttgatggcagaaacattgtggatgctgataagttgcgtgagattggcttcatagtttactcaattggtaagccactggatccatggctcaaagacatgcctgctttggcgtaaaatagatcattgatcaagtacactgcaataccagtcaaatgttgaggcagtcagtttaattctttattattttttgtaagagtttttcttttcctgcttaactttctcataatagttggtgacataaatggggtataaattgtgggaaatgggagggtttatgttctatgttactttgtactccaatcttttatgaatgtactagggaaacttgttttgtttgatt

SEQ ID NO: 11602 - DNA, 1364 bp, Glycine max
  Clone ID: 701105767_FLI
attctctaaaagagatctttttctgctctttgaagaaagaagggtctttgcttgattttggagatgtctctgctctcagatctcatcaaccttaacctctccgataccaccgagaaggtgatcgcagagtacatatggatcggtggatcaggaatggacctgaggagcaaagcaaggactctcccaggaccagttagcgacccttcagagcttcccaagtggaactatgatggttccagcacaggtcaagctcctggtgaagacagtgaagtgattttatacccacaagccattttcagggatccattcagaaggggtaacaatatcttggttatctgtgatgcctacactcctgctggagaacctattcccactaacaagaggcacgctgctgccaaggttttcagccatcctgatgttgttgctgaagtgccatggtacggtattgaacaagaatacaccttgttgcagaaagatatccaatggcctcttgggtggcctgttggtggtttccctggacctcagggtccatactactgtggtgttggcgctgacaaggcttttggccgtgacattgttgacgcacactacaaagcctgtatttatgctggcatcaacatcagtggaattaatggagaagtgatgcccggtcagtgggaattccaagttggaccttcagttggaatctcagctggtgatgagatttgggcagctcgttacatcttggagaggatcactgagattgctggtgtggtggtttcctttgaccccaagccaattaagggtgattggaatggtgctggtgctcacacaaactacagcaccaagtccatgagagaagatggtggctatgaagtgatcaaagcagcaattgacaagttggggaagaagcacaaggagcacattgctgcttatggagaaggcaacgaacgtcgtttgacaggacgccacgaaaccgctgacatcaacaccttcttatggggagttgcaaaccgtggagcttctgttagggttgggagagacacagagaaagcagggaagggatattttgaggacagaaggccagcttccaacatggacccatacgtggttacttccatgattgcagacacaaccattctgtggaagccatgagcaaaacctgcatgttttctccctttggatggaaaggaacagttatgcttttcttagtaggatttggtctctctctctttttaccttttgattggtactatggttggtgccttgttggttggtgcaactaactggcaagggttgttcattgttttcttctattcctttccctcgttttccgattgttacaatgacaataatttaatggttattatcagtcttgaacaaag

SEQ ID NO: 11603 - DNA, 1566 bp, Glycine max
  Clone ID: 701105838_FLI
tgagatgcacgctgggttggcatcagaaggtggttctaagctcaaaatgcttataacatttgttcataatctccctaatgggactgagaaaggaacatattatgcactagatcttgggggtacaaattttagggttttgcgggttcatttgcatggtcaacaatcgtctgttttggaacatgaagtagagcgacagcccattcctcaacatctaatgaccagcacaagtgaggatctctttgatttcattgcttcttcattaaaggaattcattgagaaagaaggaaacgcttctgagctttcgctggacagaagaagggaacttggattcacattttctttccctgtgaaacaaatgtctgtttcctctggcattttattaaaatggacaaaagggttttccattgtagatatggtaggaatagatgttcctgcatgtatgcaggaagcattgacaagaaaaggactggacgtgcgggtggctgcattggccaatgatactgttggaacattagctcttggacattataatgactcagatactgttgcttccgtaataattggcactggtaccaatgcttgctatttggaacgggttgatgctattatcaagtgtcaaggtcttcttacagcatcaggatacatggttgtaaatatggaatggggaaacttttggtcatctcatttaccaagaacatcttatgatattgatttagactctgaaagccctaatccaaatgatcagggttttgagaaaatgatatcaggaatgtatcttggtgacatcgtgaggagagtcattctaaggatgttgctagagtcagatatgtttggacctatttcttccaagctttcaataccctttatgctgaggactcctatgatggctgccatgcacgaggatgattctcctgacttgagagaagtagcaagaatccttaaagacatccttgagattcctgatgttcctttgaagttaagaaaagttgtggtgaaggtgtgtgatgtggtgactcgcagagctgcgcgattggcagctgctggtattgttggtatcttgaagaagattggtagggatggaagtggtggcatcacaggtggacgtagaagtgaaatgaaaatgaaaagaacagttgtagcaattgaaggaggtttatattctagctatacattgtttagggagtacttgcatgaagctttgaacgatatattgggggaggatattgccaagcatgtaactcttaaggtcactgaagatggatcaggcgttggagcagcactgcttgctgcctcgcattcatcctatgatgtggatacagtatagctatatattttatatgcatacatgtaatcatgtaaatcagaaagaattttttcccctcttttttattaatctctgtataaaggaaggttctgtctattctttattaagatcattaatattaatattattcttgtcaattttttattagtaggaaatctttaatgtaattcttgtcaagtttggatgtgacacaacagtactattagccattaagaaatcttaattgagttagcgggtttagg

SEQ ID NO: 11604 - DNA, 608 bp, Glycine max
  Clone ID: 701105917_FLI
aagcggggctcactgaaaaagcagtttcccgaattagtaagtaatgaccggaaaaccactgtcagggatactgaaaaccgcctcatctctgaaatcttgttcgtaaccattaatacaacgttggtagtaactcacaaaagcctctgttccctccctttccttcactttaccatgtccatgaaccaatagtagctacctttcacgaacacaaacaaagccactctctcgttttatatggcgtaccaccataacccccaagagcttccacttcaccatttcactgaccaacaacaacaccataaccaacctctcgttgacaactccttgctctccgaccctgcttccaaacctgcctccgatcctcatcaacccgcgccaaattggctcaacaacgcccttctccgcacgcactacactgacaacaacaacaacaacaacaacaacgttaacgctgctaacaacaacaccaacaacggcaccaacttcctcaatcttcacacttccacttccgactccggccaatggcttgctcgcccgatcctcaaccgcaaccacagcgaggtcatcgacgacgtgaccggcgccggcgactccaacatggcggccgc

SEQ ID NO: 11605 - DNA, 321 bp, Glycine max
  Clone ID: 701106089_FLI
caacagagaatccgtgtatttggggcaagttcctagcttatttaaaaagttatgttgcaatgggacttgggcagggtataccctataaatttttacataattttgtgcctttaatcatgggactacttctctcactaaatctcacattacatgctgtgagttgcgagcatggtcaggaattattattgttatttatataatataaataaataaaaactaagtcctggcatcagaatctctcttggaatgtctgaaatatagttggttaccaccgtttggcttgaaaataagaaatgggcaatggtgttgttatattttgag

SEQ ID NO: 11606 - DNA, 1008 bp, Glycine max
  Clone ID: 701106150_FLI
gtcaagttggcacgaaaaagaattaaaagcagattatgacactactaatagtagtccagttttaaaaacaccatctcctatggaaaaacaagctgcgagtctttacacgagaaagatattcatgaaattccaagaggagttagtagagactcttgcaaatcctgctataaaaattgatgattcaggaacaatcactacatatcgagttgccaaatttggggaaaaccaaaaatctcatgttgtgacttttaattcttttgagatgaaagctagttgcagctgtcagatgtttgaattttcaggaattatttgtaggcatatactgtcagtcttcagagctaaaaatgttctcactcttccatctcagtatgtgttgacatgctggacaaggaatgctaaaaccggtacattgttagatgaacatgcatctgaattgccaagtacttctcgtgaatctgtaccagtttgttataacaatttacgacaagaagcaatcaaatatgttgaagaaggtgcaaaatcaatccaaatctatcatgttgccatgagagctctgaaagaagctgctaagaaggtttgcaccataaaaaatcagagttctggaacagcagagggagctacagcaaccaatggaagcaggggtgaattgcttgtagcagatgaagatgttccaagcaatcaatctgtggcggagaagcaaaagaaaataggagagttgactgctgagttagaggccacaaatcaacgatgtgaagtttatagagcaaacttgctggctgtgctaaaggatatggaagaacagaagttaaagctatcagtaaaggttcaaaatgcaagacttagtttgaaagagtgattccctgattgcaaagggttttaatgcatgcctgtcttgccattttgattcctcttagggtatgttaataacctttgcgtagtttatcgtggtccgtgtctgcaatctgattgaatatttgaatttctcgataagttattaattttattatt

SEQ ID NO: 11607 - DNA, 947 bp, Glycine max
  Clone ID: 701106195_FLI
aaaagaggtccatgccctccccgctctaacaatatataatgtaaccaaaccccttatcaatactacttcagagttaagttgagaacataccaatctacaataaacgatgattctcattatctccctcattttttctcttctctctttctcccatgcttctgtcctagatttctgtgttgcagattatgcaggtcctattggacctgcaggatattcctgcaagaagccttcaaaggtcacagcagatgattttgcttacagtggccttggcattgctggtaacacctcaaacattatcaaagctgcagtgacccctgcatttgatgctcagtttgctggtctcaacggtcttggcatttccgcagcacgtttggacttagcagcaggtggagttataccacttcacactcatcctggagcttcagaattacttgttgtaattgaagggagcatcctagctggattcatttcttctgccaacattgtctacctcaaaactcttaagaagggggatgttatggcattccctcaaggcttgcttcatttccaaatcaatgcaggcaaatcttcagccctggcaattgtaagcttcagtagctccaatcctggtctacaaattctggacttcgctttgttcaaaagtagtttccccacaccattgatagtacaaaccactttccttgatgctgctctggtgaagaagcttaagggtgtacttggaggctcaggctaaaccatgggaagttatccatgaaagagactgaagtcaagcaagcatattgtctattacctttaagtttatttatctccttggtctacaatttggatttagtatgcatgtgtaggtagaactcttctttcagcaggctttgtagttgagtaataaacttaagctgatttggttattgttgttgtgatgtttattgttatcaagtttcagttgaagc

SEQ ID NO: 11608 - DNA, 1630 bp, Glycine max
  Clone ID: 701106226_FLI
ccagcctcaggcacattagttcaagccttcaagcacaaaaatgataaccattgttgcttcttacaatgtcactccaaatcagccaactcccagtgatcctatttggctatccgatagtgatcaaattgggcacctacgtcatgtaaacactatctatgcctacaaatcaagacccaacaacaccattgatattgagaggatgaagaactctcttagcaagattttggtgccatactatccaatagctggcagattgaagctgacaaaaaatggtagaatggaagtggattgcaatgcaaaaggagtgacattgattgaagctgaaagcacagccacatttggtgattatggagactttgcaccttccgattccaccatggaacttgttcaaaagttgattatactcgaccctcagaggacatgccgctaatgctagtgcagttaacaaggttctgtggtggtgaaggtcttgccattggagttgctttctctcatcctttggttgatggtactgccgctattttcttcatcaaccgatgggcaaagctggttcgaggcgaagaactggatcccaatgaagttccttttcttgatcgaacactactcaaatttccagagccatcagaaccatgtgttgatctcccagagtggaagcctgtaaggttcatgccagacaacattgctgagcaaaacaagataagtgctatattgttgaaactctcatcaagccaagtggagaagctgaagaagaaggctaatgaacaaccttcaaaagaaggggtaagaccttatagcagatttgaagctatttcttctcatatatggagatgtgcatctaaggctcatcacgctcatgcatctgatgagaatcaccaaccaactgtagttacgtttagtgttgatattcgcaatagattgaatccacctctccctcagaattattttgggaatgctttggcaaaaacactgactcctaagtgtagtgtgggagatatcttattaaacccattaagctatggggctcaaaagataagggatgcggtttatgcggttacatatgagtatataaggtcacacataagttatgttttagggcaagagcaattggataacataagggcttttttctcgggacaaggagaccttattaatgaaccctattctgggaatcctcataacattctcatcacaagctggatgagcttgccagtgtatgatgcagattttggttggggaaagcctgtgcactttggtttagcaaaagtatttcgagaagttagggcacatattattataagccctgatggagatggtgttcttatttccatgaatttcctgacagcacttatggatctttttaaaaaattcttctacgaggatatatgaagaaatatccataccaaaccagctttgtgcaaggaagaattacatgtgactcgtcattttctgtgatcaataatttacatgtgatttaccgtttaatatgttaaataattaaagatcctgtttttattacgtgatttattttcttttatttttcatggtggtatatttgagtgtataatctttgtttaaaaaaatctgtacatttaaattataaaatttatctaaggattgtgaaaattatgat

SEQ ID NO: 11609 - DNA, 1542 bp, Glycine max
  Clone ID: 701106228_FLI
aaactcagaaaacacagggaaagaaagagttgagtgatggcggcttgtctgcaactgtggcaatgcaaactagcgagaccctttgactcattaccggtgcgaaggtcaattcctttgagtctgaggtgttcggccgcgccctcttcttccaagccgacgcgctcctacagcatcactctcatccccggcgacggcatcggccccgaaatcatctcggtggccaaagacgttcttgtcctcgccggttatctcgaagggattaaatacgacttccgcgagatgcttatgggtggagctgcattggatgccacgggactccctttaccccatgaaaccctttctgccgctaagcaatctcatgccgttctccttggtgccgtcggaggttataaatgggataggaacgacaaacatctcaagcctgagactggcttgcttcagatacgtaaagagcttggagtatttgcaaatcttagaccggctaccgtatactctccgttagttgatgcttctactttgaagagagaggttgctgaaggggttgatatcatgcttataagagaactcactggaggtatctattttggagaacccaggggctttggcaccaatgataatggtgaagagattggctttaatactgagatttatgctacacatgagatagatcgcatagctcattttgcatttaaggttgctcaaaagcgtcgtcggaaactttgctctgttgacaaagccaatgtactagaggcatcaatgttatggaggaagagatttttggcaatagcacaagaatatcctgatgttgagctctcacacatgtatgttgataatgcctcaatgcaactaatccgcgatccaaaacagtttgacaccatggtgacaaacaacatttttggcgatatattatcagatgaggcttcaatggtcactggaagtattgggatgcttccttctgctagcctgggggcttcgggacctggactttttgaacccatacatggttctgcacctgatattgctggacaggacaaggcaaatccatttgccactgttcttagtgctgctatgcttttgagatatggcctaggagaagaaaaggcagctgaaagaatagagaatgcagtgatggacactttgaacaggggatttcgaactggtgacatatattctgctggaacgaagctggtaggatgcaaacagctaggtgaggagatactgaagtcagttgaatctaacgttcctgctggtgctgctgcagtgtgattttgaaaccaactcgccatagcattttgggttctggtttaggttggaggccactatgactgccaaagccgagaaagtctccctagtctattaagttctggcttccttctgtatcatgtatttcggttaacacacccagcctatgtatgattgaattttagaaagtagcaaggttgtttatcttgtattcttgtacccgggattctagtttcccttgcatgcgaggtcgcttgtaatggtggaataatgattaatggagtttgtcttgttaaaaat

SEQ ID NO: 11610 - DNA, 2439 bp, Glycine max
  Clone ID: 701106242_FLI
caattctaaagtttacgaaaaggattgtaaacccatgagttgcaaacaaagtgcatgcttccttgattaggaatgtcttcaagagtcaaactcactaggaagcatgcactttgtttgcaactcatgggtttacaattctaaagtttacgaaaaggatcggattttctttgccagtgagacatatgttccaagtgaaacacctggtccattagtgacatatagagaagcagaattgcaggctctaagaggaaatggaacagggaagcgcaaggaatgggacagagtttatgattatgatgtttacaatgatttgggcaatcctgacagtggtgaaaactttgctcgtccagttcttggaggatctctcactcatccctaccctcgtaggggaagaaccggtagaaaaccaacaaagaaagatcccaacagtgagaaacctggcgaggcttatataccaagagatgaaaatttcggtcacttgaaatcatctgatttccttacttatgggctaaaatctttaactcgaagcttcttgcctgcactcaaaactgtttttgatataaatttcacaccgaacgagtttgatagcttcgaagaagtgcgtgcactctgtgaaggtggaattaaactgcctacagatatacttagcaaaattagccccttacctgtgctcaaggaaatcttccgcactgatggtgaaagtgtcctaaagttttcagtacctgatttaattaaagttagtaaatctgcatggatgactgatgaagaatttgcaagagagatgattgctggtgtaaacccttgtgtgattcgtcgtctacaagagttcccaccacaaagcaagcttgatccctcagtctatggtgatcaaacaagtaaaatgactatagatcacttggagattaaccttgaagggctcacagtagataaggcgattaaggatcagcgattattcatattagatcaccatgacacatttatgccatttttgagaaggatagatgaatctaaatcatcaaaggcttatgccactagaacaatccttttcttgaaagatgatgggaccttaaagccattggccatcgaattaagtttgccacatccaggtcaacaacagcttggtgcctatagtaaagtcatcttgcctgcaaaccaaggtgtagaaagtacaatttggctgttggcaaaggctcatgttattgtgaatgactcgtgctatcatcaactcataagccactggttgaatactcatgccgtgattgagccatttgtcatagcaacaaacaggaatctcagtattcttcaccctatttataaacttctatttcctcactatcgtgacacaatgaatatcaatgcacttgctcgacaatcacttattaatgctgatggctttatagagaaaacctttttgggtggaaagtatgctgtggagatatcttcgtcaggttacaaaaattgggttttcctcgaccaagcattacctgctgatctcatcaagagaggaatggctattgaggattcatcttgtcccaacggccttcgtcttgtgatagaggactacccttatgctgttgatggactagaaatatgggatgctattaagacatgggtacaagagtatgtctccttgtactatgcaacaaatgatgcaattaaaaaagaccatgaactccaagcatggtggaaagaagttgttgagaagggacatggtgacttgaaagacaagccttggtggcctaaaatgcagactcttcaagagcttattcaatcatgttctactatcatatggattgcttcagctctccatgcagctgttaattttggacaatacccttatggtggttttatcctaaaccgtccaactcttagcaggagatggattccagaagaaggaactccagaatatgacgagatgacaaagaatcctcaaaaggcttatttgagaacaatcacgccaaagtttcaggctcttgttgatctttcagtgatagagatattgtcaagacatgcttctgatgaggtctaccttggacagagggacaatccaaattggacctctaatccaaaggcaatagaagcctttaaaaagtttggaaaaaaagctagcagagattgagacaaaaatctcagaaagaaaccatgatccaaatcttagaaatcgaaccgggccggctcaattgccctacactgtgcttcttcctaccagtgaaacagggttgacttttagaggaattcccaacagcatctctatctaaatgagtgtggctcaatcgtattgtacttttacttttgaatatctcatatacgtacgcaagcttatgtttattttagggtgatgtttagtaattgtgtttgtttgagtaatattgtatttagggtaagatttagtaatatgggtgatgttcagaatgctaattaataaataagctctttagc

SEQ ID NO: 11611 - DNA, 2834 bp, Glycine max
  Clone ID: 701106423_FLI
aacaaaaccacaatctaagtaagtgttgagagaagagtgcgtttgtttgtttgaaattaagtagtaaagatgtttggaatcatcggaggaaacaagggtcacaagataaaggggaacttggtgattatgcgaaagaatgtgttggatatcaacagcatcaccagtgttaagggtgtcattggaaccggcattaacatcattggaggtgtcgtcgacaccgttactgctttggcgtcccacatctccatccagctcatcagtgccaccaaggctgatggacatgggaaaggtaaagttggaaaggctacaaatttaagaggacaagtgtcgttgccaaccttgggagctggcgaagatgcatacgatgttaattttgaatgggacagtgacttcggaattcccggtgcattttacataaagaacttcatgcaagttgagttctatctcaagtctctaactctcgaagacattccaaaccacggaaccattcacttcgtatgcaactcctgggtttacaattcaaaaaactacaagactgatcgcattttctttgccaacaatacatatcttccaagcgagacaccagctccacttttgaagtacagagaagaagaattgaagaatgtaagaggggatggaactggagagcgcaaggaatgggataggatctatgattatgatgtctacaatgacttgggcaacccggatagcggtgataaatatgcacgccccgttcttggtggttcagccttaccttaccctcgcagaggaagaaccggaagaggaaaaactagaaaagatcccaacagtgagaagccgagcgattttgtttaccttccaagagatgaagcatttggtcacttgaagtcatcagattttctcgcttttggaatcaaatctgtatcccaagatgtcttgcctgtcttgactgatgcattcgatggaaatattttgagccttgagtttgataattttgctgaagtgcgcaaactctatgaaggtggagttacactacctacaaactttcttagcaagatcgcccctataccagtgatcaaggaaatttttcgaactgatggcgaacagttcctcaagtatccaccacctaaagtgatgcaggtggataagtctgcatggatgactgatgaagaatttgctagagaaacgattgctggtgtaaatccaaacgtcattaagattcttgaggagttcccaccacgtagcaagctagatacacaagcctacggtgatcatacctgtataataacaaaacaacatttggaacctaacttgggtgggctcactgttgagcaggctatccagagcaagaagctgttcatcttagatcaccatgactatctcattccatatttgaggaaaataaatgcaactaccacaaagacttatgctaccagaaccatatttttcttgaaaagtgatggaactttgacgccattggccattgagttaagtaagccgcatcctcaaggtgaagaatatggtcctgttagcgaagtctacgtgccttcgagcgaaggagttgaagcttatatttggttattggcaaaggcttatgttgttgtaaatgactcgtgctaccatcaactcgttagccattggctaaacactcatgcggttgttgagccattcgtcatagcaacaaataggcatctgagtgtggttcaccctatttacaaacttttgtttcctcactatcgtgacaccatgaatattaattcacttgcccgcaaatccttggtcaatgcagacggtattatagagaaaacatttttgtggggtaggtacgctttggaaatgtctgctgttgtttacaaggactgggttttcactgatcaagcactgcccaatgatcttgtcaagagaggagttgccgttaaggatccatctgctccccatggagttcggcttttgattgaggactatccttatgcttctgatgggctagagatatgggatgccatcaagtcctgggtgcaagaatatgtgtcattctactacaagtcagatgcagcaattcaacaagaccccgaactccaagcttggtggaaagaacttgtccaagtgggtcatggtgatttgaaagataagccatggtggcaaaagatgcaaacttgtgaagagttgattgaagcctcggccaccctcatatggatcgcttcagcccttcatgcagctgttaactttggacagtatccatatggaggtttaatcttgaacaggccaaccattagcaggagattcatgcctgagaaagggtctgctgagtatgctgctttggctaagaaccctgagaaggagtttttgaaaactattactggcaagaaggagaccctcattgaccttacaattatagaaatcctgtcaaggcacgcatctgatgagttctaccttggggagagagatggtggtgacttctggacttctgatgctggtccactagaggccttcaagaggtttggaaagaagcttcaagagattgaacataagcttatacagaagaacaaggatgagacgttgagaaaccgcactgggccagctaaaatgccttacactctgctctatccttctagtgaggagggattgactttcagaggaattcccaacagtatctctatctaagggctctctcattgaggttgctgtactactctgcctgtttttcaataatgtgaaataggaggaatatgattccttcatctacctacgtatggtcaagttacatttggggtggttgaatgttctcgtgtttgctgtattctgtttttataacagatcgaagagaaagcaataaaggcaatcacgcatgtttcaac

SEQ ID NO: 11612 - DNA, 810 bp, Glycine max
  Clone ID: 701106441_FLI
gtgagttcttctcttctcgcaaagctctgtatcacattcttccgctgttatcgtaagagggtatcagcggttacggaacaatttgacaattgcatgaagaagcaagtagaagcaattgcgcgagttttgcatttatttcaatcctacaaagaggacaatattccgtgcaaaatcgacgagggtctctatttgggttcgattgccactgcagctaacaagcctgctttgaaagactgtaatattactcacgttttgactgtggctggtagaataccacctgcacatcctcacgattttgtctataaaattatagacgttgttgacaaagatgatgaagacttaaaacaatacttcaatgagtgttttgattttattgatgaagccaaaagacacgatggaggtgttttggttcactgttttgctggaagatccaggagtgtgactatagttgtggcatatctgatgaagactcgtggaatgagcttttttgaagctctgcaacatgtaaggagtatacgaccagcagcaggtcccaatcagggtttcatttgtcagctgcaggattttgaaaagtctcttcaaggtgccaataaattgcattagtcttattttcaattgcaacctagcttggtgcattatttataaacgcatatcataaatcatctacataaaatggtatatatttacgtcttaaatatattttgaactgatatacctctgaaaccatcaagatacacatttacaattgtaaaattacacgtgaaagatctttcatgtaatgaagtgaaatttgtaatgatagcttaaact

SEQ ID NO: 11613 - DNA, 1275 bp, Glycine max
  Clone ID: 701106478_FLI
ggaaaccctagattgcagaggaaacggtgcaaaataagcccaacaacaaaagacaactaacgaggaaacaacgttactttcttcattatcgtgcaacatagcacaaaacccttaagccgttaagcaccttcaacgccgccgtagtttgttattggtttggtttgatggagatggagggtgagaaacagcacaagtttgatgtggacctcggcaacctcatggctttcgattcctatcacaccttcccttctcaaccatctctttccagggaggacctcatcaaacagtgtttactgaaaggcactcacttggttcaagctatcgcagatgccctctttatcttaccatcgaccgaagatttggatggaccccttgtcaccttgcctcccccactcactaaattgcctagagaaaaacatctgccaaaaccaaagcctcctactaaatgggaagcttttgccaaaaagaaaggcatacagaaacggaagaaagacaaaattgtatatgacgagcagtctggaacctggaaacgcagacatgggtatgatcgtgcaaatgatgaagctgctatacctatcattgaggcaaaaccaactgatgatccagaagaggatccttttgccaaaaggaaagaaaataagaagaatagaattgaaaaacaggagaaaaatcgattacagaacttgaaagaagctgcaaaatttggtgctttaccaagccatattcagttggctgctacagctttgcctataacaggaactcaagcagcgcccaagaaagttacaaaggatgaactaggtaatgtagcaggaattgcagcaactgcaacagccagtgggggaaagtttgacaagaaattggcaggtgaaaagcctcagaaacatgaaggaaaatatcggaagttcctgccagtggtggaaggaaccgggataggatccctggagagggagcaaactgaaaaaatattgaacaagatcatctccaagaattctcataacatactcaacgttgaaaaggctgtcacgatgcacaatgtgaagaaagagaagaaacgaaggagcgagaaaggaaagacttcagcaactactgacaagaaattgaaaactcagaaaaagtcttttaaaaagggaagctccaagaaaggcaaggcgaaaggaaaatagtttagattttataagaaaaagttttgtagagttcttggaaactctgtttactggtttcaatttttgtagacgataatttcatgtatcaatcgccatcccttttttatttacc

SEQ ID NO: 11614 - DNA, 1708 bp, Glycine max
  Clone ID: 701106549_FLI
cccaaaccaacccaagtctcattctctttctctccatcagaaagaaaaactcaacccaacaccccctctccaccctctttttcttttaatttctcatcttatctattaatcttatatacatatatataaagacatagataatagtcatatagatataattatttcgttatattttccttgcatgggctgttaagatgtctcgcacgtgctcacagtgcggcaacaacggccacaactcacggacatgcaccgacggtggcgccgccgggtctccgagggagaacggcatcatgctgttcggcgtaagagtcatgacggaagctaactcctccttcaggaagagcgccagcatgaacaacctctcacagtacgacgcggagttcaacgccgccgacgccggctacgcctccgacgacgtcgttcacgcctccggccgcacgcgcgagcgcaagcgaggtgttccttggacggaggaagagcatagattgttcctgttagggttacacaaagtcggaaaaggagattggagagggatttctagaaacttcgtgaaaactcgcacgcctactcaggtcgctagtcacgctcagaagtactttctccgccgccacaaccagaatcgccgccgccggagatctagcctcttcgacatcaccaccgatacggtgatggaatcttctactataatggaagaagaacaagttccgccagagacggtggcggcgcctctccccgccgcatatccgccgtcgcattacggggcttttgccggcgcgggttttccgatagctccggtggtgttgccggtgagtggcgagagactaaccaagccgatcaggccgacgccgattttgccagtgcctccgtcttcgaagatggctaatttgaacttgaaagagaaagcttctccgacaaatctcattgagcctttgccgttgtcgttgaatctgccatcgccgacgccgcggtctcaggatcagtcgtcggcgagtagtgggcactcgtcaccgtcgtcgtcgtcatcggcggcagcttttcaggctatgtctgcagcgaagttcggcagcggcggggatagtatcatcagcgttgcttgaaaagaaggaaacaagaaaaaaaattagtgtcattaagttattaattaagtatggtcttagtagttaatttgcgtgtgtaaattaatgttacttaatcgggcatgtatcccaagagggggaaaaattgaagatatgtgttggggatttattgattattacgaaagataatcataatataggtaggagggaggggatatttgaattaatgagtataatggtaattaattatgatttggaaaaataaatatatactatgggtttaggttatgtaggtaattaggcaatttaattgctggtttcagtgtacaggtttagtggaatttagaattagaaagatgggttgtcatattctgtagctgttgagggattcttgtttctgtatgtatgggggagtgtgagcgtgaaatgatagggcaccgggtactcttgagatgcgactggtctgtgtaatgccactggggtcattaaaatattccttagattagattagacaaaggaatatattatgcttaccatttttttttagatttagtttctgtgttcttggacttgggttgaaccaagaagtattcgaatgcaacacaatctaggaccactattacgttggaatg

SEQ ID NO: 11615 - DNA, 1836 bp, Glycine max
  Clone ID: 701106557_FLI
ctccatgttatgttgcaaccccgcattaaaccctcaccttctttctttcttccttctcatcacaaagacacaagctttcttcctcaactaccctacccaacttcttattccactcatcacttcctttgaaattgaaaccaccaaaattgtttttttttttctccttcactcgtagtaatattttgaaaagtgttgtgctttgggttgagaattgtggcagggcctaatgggtaactgcctagattcttctgccaaggttgatgcagctcagagctccaaatccacttctgcatcaggaatctcaaaaactactccttccagtttatctattccatcatacagtgaaaaaagcaatgcctcaagtcttcccacaccaaggtctgagggtgaaatcttgtcttctcccaatcttaagcccttcacattcaatgagctaaagaatgccacccgaaattttcggcccgatagtcttctcggtgaagggggatttggatatgtctacaagggatggattgatgaacacacatttacggcttcaaaacccggatcaggaatggttgttgctgtgaagaggctgaaacctgaaggttttcaaggtcacaaggagtggttgactgaggttaactaccttggacaactgtaccatcctaatctggttaaattaatcgggtactgcttggagggagagaaccggctattggtgtatgagtttatgcctaaagggagcttagagaaccatctatttagaagaggaccacaaccgctgtcttggtcggtgaggatgaaagtggctattggtgctgccagaggactctcctttcttcataacgccaaatcacaagtcatataccgtgattttaaagcttctaacatcctgctggatgctgagtttaattcgaaactttctgactttggtttagctaaggcgggtcctactggcgatagaactcatgtgtccactcaagtaatgggtactcaaggatatgcagcacctgaatatgttgcaactggtcgtttgacggccaaaagtgatgtctacagctttggagttgtgttgcttgaacttctatccggaagacgcgctgttgataaaaccataaccggcatggagcagaatctggtggactgggcaaaaccatatttgagcgataaacgaagactgttccggattatggataccaagttggagggccagtatccacaaaagggggccttcacggctgccacacttgctctacaatgccttaacagtgaggccaaggcaaggcctccaatgacagaggttttagcaactctggaacagatagaggcccccaaaactgcaggcagaaactcccattcagaacaccatagagttcagactcctgtgagaaagtctcctgcacgaaaccggtcaccgttaaatctaactcctactgcgtcccctctcccagctcaccggcaatcgcctcgtgttcactaagctgtgaacatagagcatctgcatgcatgtaaattccttaaatttatcaggttgtgttttggaccgcgtgcgttgaggcatgtgtacttgaatgcaattttgggtacttgaatgcaattttgggtcatgcacggtagaatagttaacaccacatttatccaaatgctatgcaagttattgcatcagtattctgcatgtatatttcctttgtccccacgtagaatgtcttgttgataataacaaccagacacattgcttcccttctattatgggtgcctcataatttgggtttttggcctaaaacaattccaaaacatggagagggttgttatgtacttttaagttgttctattcttgtatatattatttttatc

SEQ ID NO: 11616 - DNA, 107 bp, Glycine max
  Clone ID: 701106589_FLI
caagtttctagaaataaatggctccatatactctggcagcatcgatttattctgctagtacatgaaattttgagaactgagtacacaggtaggattatcagtgaatc

SEQ ID NO: 11617 - DNA, 1789 bp, Glycine max
  Clone ID: 701106671_FLI
gtggcacaatcatcttgatccaaccgtaaagaaggatgcatggacagaggaggaggaactaatacttgcttactattaccaaatatacggcagtaagtgggcagaaattgcaaggattcttcccggaaggtactttgtttgaatgttaatatgcaggcttcaaaacattcatcaatacgtatgtataaaatatgattttaatcatgttaatatgatttgattttggttataatttttcaaaaaaaaaaatctgtttattttgagccaattatactattcaataatgttgaacttgaatctttttcaacatgctttggttttgtgatgtcataaatatttaattccaactttacgaaatatcattcacctcacttctttttcacgagatttcccactgacattaaggactaaaatgttcacttcataaaatcttcactttgttttctgactcttcaaatactattttctgctaatgacatggactaaagtaacctgcacatttaatttcaaggtctaaaatagaaattagaagtatattcaatgtttatgcatcttctctcttgtgattgtgacatgaccgtacttgtccatgttagttcgcctctcctttgagaaacaatgtaggctagcaaaagtagaacaatcatattgaagacattgataaatgtacatgcatttctggtttaagtgctacaagtctttctatatctaatgacccatgataattatttgtatcttttgggggagccaggactgacaatgctataaaaaatcattggaactgctcaatgaagaagaaattggatgcatcacccttagggtgtgacataaaagttgccccttccggtttctgtgcttctggaataaggcctgaacatgttgtggctaaagtggagggtcaaagtttcaatggaatggtttctcccaagcagagtcactggttgaatcgcagtgttgataacattctaacaaaattgattcttcaaaatgattcaggagaggaatcttgctctgcttcatccagggggactcctactcctagggcctcaagacagtttttggataattctctggattgtttacctctttccagtactgttacagatgaggcctatgagtcactgaaacggcaaaaggtttatttttcagatacagagcttaaagtgggtgatgaatctgacagtccccttttgaatttgagctactcaaaatctgccaaccgtgagaagaaaggtcaagctggaaatggaggcaattacaactcaaacaacactatgccacatagtgtagatgaattcagtgaatgtctaagtccaaaaacacacatggcattggcatgtgcatacaataacggttgtactcccccaacgtctatactcaagaatgacacaggcgacatcaacccagaaactttgctaagaaacttagcaatgacctatgagaatgttccttctattataaggaaaaggacacccaagaaggcaagctgttgtgaccgtgaccaagcaccttcgagaatgatcgtaaattctcctgaagcagaatgtgttattggcttagataatttaaaactgaacagggggtttattccattccttcgtagaccaaatactcagccatagctagatctatggaaggatgcataaaatgacagacatgatatgctagtcaattgtaatgctcctttgacatagcagaattgtttaatacagtttttacactagctcaactttattcaaactcgaattgaacttctttattcttaataatatattttttattgtaacac

SEQ ID NO: 11618 - DNA, 1990 bp, Glycine max
  Clone ID: 701106678_FLI
tccaaatcagcacaaagcaccacgccatatggcacgagtcctttcacagtctccatccggaagccaatagccccgttgaactgcaccgcatacaacctcaccggaacatgccccacaaacctacaagaccatcagagcactccagccaccgccacgtgtccagattacttccgttggatccacgaggatttgaggccttgggcccgtacgggcatcacgcaagacatggtggagagggcaaagcaaacggcaaattttaggttgataatattaaagggtagggcttatttggagacttactcaaggccctatcaaacaagggatgtttttagcatatgggggattctacaattgttgagaaggtaccctggcaagatacctgatttggagcttacaatggccctaatgttgagcaaccaactcccttgtttcgggcagagattaatataaagccatggcatattttgttgggagagttgaaagaaggcactacgaggataccatggctgaacagagagccttatgcttactggaaaggtaatccagctgttgctcaaaccagataatatctcatggaatgcaatgtttctgaaaatcaagattggaatgctcgtttattggcccagaaaaaaggttaaaaagaaaagaaaagtgagtgggaaagacacactcgagtcgagcgggagtcaaagctggaagtccaaagtttctggaactcaaactagtagtgtgggtgtggaacaggacaagggggtttctgtgaaggactatttggtggacaaactgaggcctggtgatgaagacagggctctctctgaagtgatatcagagactctgcacaagaaggaactgcccccagaggaagttactgaagaaggtgtgagaaaggtggtttctgatgctgtgcataagagagacgatgatcctgagagaagaatggaacatcaaagaatactgggaaaggtaactgagtcagaggaagtgaagagaaggttaggaggtgaaagtgttgtgacagagaaaaagtaccaagagatgtatgtgaatagtccggggaaaggtgtggttgataagcttaaaggtatggttgggacatggtttaccaacccagcagagaatcaatcttcacaaggtaaatagcaatgaatagtagctctagttgtctccatgaggtttctcttgtttgatcaatgccttttgcaaattttacttatttctaaattagttgattgtattcttttaccatacttctctgactaattcttttgttactcttcacattctgcttgagttttgcagctagacaaagatattttgtatcgatattaaaatttattatctctctatttgtttattatatttgccttgtaacagtttttcgattttcttatcttggaagaagtgttttgagaaacaaaggaaattatgattatgtatgtttctgttagtcttaagacttgattccaagatgaatcgcagttatttgtttacttgttttggtcatgcttacatatttttctatatgtttcttttttttttcattttgtaagaactgtttaaaaaaaagtggagtattttttatcctggtggttttagacttcagtccaagatgagttacaattttttttttactttattttgggtatgctattttttactgaagcaaagtgccacattaattttgaatttgtggtttgcatgggccgaagattcatctatgaattatgaggcaggaagggcagaagtggaacaagttaaccaaggtgcagcaggtgaaagaaggcagcaggagtcatctaattgaagaagtgctttgaaggagtctttgctttgggtgattgtgtagattttcttaaaagctgtttcaatatctgtgtgtctagttctttgttggaagaaagttaggatgttcaagtcacagtaaactaaaaatttgtgtttttttttttaatgtttatgtaaatatccaattttattcgggtttattttt

SEQ ID NO: 11619 - DNA, 1240 bp, Glycine max
  Clone ID: 701106687_FLI
ggaattcagaggttccctgcagccatatatctgctgtggacattggatttatctattgactttataatctaatgtccataccttatatgatttcattaatatataactcttgctgcttcttttttttttaatcatatgattcagtgtttgattatttttatttttgtgacttaggttgccaatgatccatctggaaaagcgatcaatgcactcgagcagcatattaaaaaccttttgtgtccatccactcccttgttcttcaataccctttatgaccccttcagagaaggtgcagattttgttcgtggataccctttcagtcttcgtgaaggtgtgccaactgctatctcccatggactttggctcaacatcccagactatgatgctccaacacagcttgtgaagcctctcgagagaaacactaggtatgtggacgctgttctgaccataccaaagggcactttattccccatgtgtggaatgaacttggcattcgaccgtgatctcattggaccagcaatgtactttggtctcatgggagatggtcaaccaattggacgctacgatgatatgtgggctggctggtgctgcaaggtgatcactgatcatttggggctaggagtcaagactggtctgccctatatctatcacagcaaggccagtaacccatttgttaacctgaggaaagagtacaaaggcatattctggcaggaagacatcattccattcttccagaatgttgttcttccaaaagaatgcaccactgttcagaagtgctacattgagctctccaagcaagtcaaggaaaagctctcaaagatagatccttacttcgacaagctggctgatgcaatggtcacttggattgaagcttgggatgagcttaaccctgaaggagcatctcaggccaatggcaaagcataaaccaaccttggttataacaaccactcatgagctagaagtggaactatttatatactgtactttttttttttcagtatttcttctcaatgtttgcagcattgttagctataattctattttttttttaatcttcatgctttgagcttagaaagaataaactacaatggtcttggtcgttgttttcttgtgatttttgtcccttagtagacatctgcaggaccatatcacttgcaggcactgagtttcatgtgaaacaagtgttataggaagaatattaatgtatgattcattacagattaatagtgatcgaattttc

SEQ ID NO: 11620 - DNA, 1015 bp, Glycine max
  Clone ID: 701106694_FLI
ggaaggagcatcctttccaaactatgcatttaacaatgcctattttagaaatgaagacaacattatgcagactccatttgaaactacaaaggaagatgaattcctaaatttaatcttagccgatgaaagtatagtgatcaatgaagaaaataagcatgattttgtcaatagctctacccaatcagagtcattgaaaagggtatactgtgtaagcagtgatacagatgctgaagtcatctctaaactggatgacaatattgtggatatttcaacagcatgtaatgattatcctaattcagatgaatactattcatcaaaaaggtttaaatcatcacatgatgctgtccatggtggaatatgttttctaccttctaaccttgaagcaaaccaagagaaaaacgagagtatgtttcaagatagtttctggggagcagagacatcatcttgtgactcgacactagataaacctttggagatcaattatattgatatttctagttctcctttcactccatggagatgagaaaattaatatcattgaagaccagtcaatttcgtatgatgggaactaagatctaagttagctccattagattggtagtagctattttggagtatgtcataaaatatgactagttctacaatagcaaatttattagaaaacaattctgtattagaaattgcataatggtagttatgcataaaaaataactatgggcagttatgtattaagatttaggagcttatatcctaacagtaaatctattagaaagtattaaaaactgcatgatagcagttatgcatagaaaacagccactagtagttatgtattaagagcatatatgtgatggtattagtagattgtgtaattaggaagtatgtgtagttgtttgcagtttatggacagagaatactctatgtaggagacttttgtctctaggacaacaagtgtattttgtatcaatgtattttgtgtgattttagtatttcaataatatatttcattagtttttgg

SEQ ID NO: 11621 - DNA, 1089 bp, Glycine max
  Clone ID: 701107156_FLI
tgggagggggcacggggcttaacttgtttcaaaagcgcttccccgaacgatgttttgatgttgggatagcagaacaacatgctgtaacttttgctgcaggcctagctgctgagggcctcaaacccttttgcgcaatttactcttcctttctacaaagaggttatgatcaggtagcacatgatgtggatcttcaaaagcttccagttagatttgcgttagacagagctggcttagttggtgctgatggtccaactcactgtggagcatttgacacaacattcatggcttgtttgccaaacatggtggtcatggctccatcagatgagactgaattgatgcacatgatagccacagctgcagccatagatgataggcctagttgctttaggtacccaagagggaatggcataggtaccattcttccacccaacaataagggcacgccattggaggtcggtaaaggaagggtattaaaggagggaagtagggttgctcttgttggttatggaacaatggtccaaagttgtatggaagcagctaaggttcttgaagctcatggcatctcaacaactgtggttgatgcaagattttgtaagcctctagatggagatttgatgaggagactcgctagagagcatgagattcttatcacagttgaagagggatccattggaggatttggttctcatgtttctcattttctaggcttgaatggtcttctagatggtaatctcaagtggcgagccttgacattgcctgacagatatataaaccatgggtctcagacagatcaaattcaaatggcaggactgagttcaaaccatattgcagttactgctttgtcattgaccaatgtgcattgggatagtcgtttgcttctcagcctacagatatgaatcttaacagaaattgtgagcttgtgattcaatttttaggtgtccccttaatacatgtacataagtagtagttaaatcacaaaaattatggcattaattcaattaaaatgctgtggtgtaattgtaaaagtagttctacatcctttatcactgtgagtttttgataactaaacaggtacttaaggagggaagc

SEQ ID NO: 11622 - DNA, 716 bp, Glycine max
  Clone ID: 701107253_FLI
gaaccatctaatctcaagctctaagaagagcaactctacttttatattcacaacaaaaaagaaaaaagagagcataaaccaatggctacttcactttcagcaactgggtgtgttggttcttccttctatggaagttggggaacttcaattgttggtgaggactacaccatgctggccaagtcagtgccatcacaagttcgcatggggaagggaaagcccacgagattgcagcctatgatgaagaatgttaatgaagggaaaggtatatttgcacctcttgtggtgatcactcgcaacatcgttggcaagaagcgtttcaaccagcttagaggcaaagcaattgcactacactcccaggtgatcacggaattctgcaaatcaataggagcagatggaaagcagaggcaagggctaatcaggttggccaagaagaatggagaatggcttggttttcttgcatgatagattaataacatatgttcccccatattttgtaactatcatgtgagaaagtatcaagttggaacttgatggttttcaattgacagcagaatgtaaactaggaacccatctctctagttgtgatttttcattcttaagtaatgttctctcttattttgttctgatacatgaaatattataaaaccagaggtgatctatatatcaacggtgatacaatgaacaaagcaatgttatttatacaccatatttttcac

SEQ ID NO: 11623 - DNA, 1740 bp, Glycine max
  Clone ID: 701107287_FLI
ccatgggggaggatgaacgtgaactgcttcttcttcgcaaccatgaattcttggcagagcaagaacaactcaaggctaaatacaatataatgcaaaaaaatattgacgaatttggaagagaccctaaaaatcgttccattgtgtttgatagaccagctcgcattgagattataaatgagcaatccgaaataccactggttgtttatgtgtctcgtgaaagaaggccaaatgttcctcatacatacaaagggggagccctcaacacattgctcagagtctcagggctattcagtaacgggccctatgtacttgtagttgattgtgatatgtattgcaatgatccatcatcagctaaacaagccatgtgcttttttcttgatcctgaaacctccaaagatattgcttttgtccaattccctcaaatgtttcacaaccttagcatgaaagacatctacgatagtcaacataggcatgcttttacaacaatgtggcaaggaatggatggactaagaggtccaggtctttctggtagtggcaattacttaagtagaagtgcattaatctttccaagcccatatgaaaaagacggctatgaacataatgcccaaaacaaatttggcaactctaccatgtacattgaatcattaaaggccattcaaggacaacaaacttataaaacgagcatttcaagaaatgtgattttacaggaagcacaagcagtggcctcttgttcctatgaaatagacacaaattggggtaatgagaggatggagatcaacttacctttaccccaaaagaccttgtttcttgggatgtgcccccactgacttcatggaaggcatgcttcagttggtgaaatggagttctgaacttttcttgctaggaatatccaaatacagccctttcacttatgggatttcaagaattcctattctgcacaactttaccttttgctacttcacatctacatgtcaatatattgttgccttaatagtatatggcatcattcctcaagtatgcttcttgaaaggaactcctgtgtttcctaaggttacagaaccatggtttgtagtttttgcaatattatatgtatcctctcaaagtcaacatttgattgaagtcctttatggtggtggctctttgggaacatggtgggatgaacaaagaatatggattgtaaagtcaattgttggaggcatatttggatctatactagcaatcaagaaacgttttgggttaaacaaagcaaaattcattttatcaaataaagttgttgccaaagagaagtttgagaaatatgaacaaggtaagttcgagttcgaaggtgcagctttgttcatgtctccattggttggattactcatagtgaatattctttgcttctttggtggtttatggagactatttaatgtgaaagattttgaaaagatgtctggccaactttttctacttggctatctggcggcgctcagttatcccatttttgaggggataataaccatgaaaagcaaggtgcaatagtagtttgtcaatgattaggctaatttaggtatttgaactttgttcacaaataatttgcttcatatgaaaatctaaagtgcatgctaaatgtttgtatcttaatatgtaattagcgtgcttttatttcatgcatgagaatatggctatcgattttaattaggagcaaaatgtatgttcttactccatttttaatgcaatttctttattttcttgccaatt

SEQ ID NO: 11624 - DNA, 754 bp, Glycine max
  Clone ID: 701107363_FLI
ctcattctcccatttcctctcagaaccctcgatcactcccacgcgctcctatatcctctccttcaccgtcgctctctccaacgatcacaacaacatcgtcatcccatggcaaacgccgcatctggtatggcagtccatgatgactgcaagttaaggtttttggagctgaagacaaagaggacacaccgtttcatagtttttaagattgaggagcagcagaagcaggtcattgtggagaagcttggtgagccagcccaaggctatgaagatttcactgccagccttcctgctgatgagtgccgttatgctgtttatgattttgagtatctgactgaagggaatgtccctaaaagcagaatttttttcattgcatggtcccctgacacatcaagggtgaggagcaagatgatctatgcaagctccaaagacagattcaagagggagctggatggaattcaagtagagctgcaagcaactgatcctactgagatgggtcttgatgtgttcaaaagccgggccaactaaaatgattatagaaaatagtaggctttctggtgggagcagcactccttaagccttagttactcatggaaaatatcctagtttgtgggatggtcaacttgggtagttatggtcccaaactctcaattttccaagttgtggcataaattctattgcaccttttaacaagctttgcttgttccagtgtgttttattatgatttgtgatttatacgaccttgcgtttgagtgcc

SEQ ID NO: 11625 - DNA, 872 bp, Glycine max
  Clone ID: 701107616_FLI
gcaaatattgcctattcggcaatatggcggaaaatggttcaattgagctgaacaagtttgtgttgttttgtttgttgttgctaatacaagtggcagtttctgaaatcatttttgaagagcgatttgatgatggatggcgaagtaggtgggtgaaatcagactggaaaagcagtgagggcaaagcaggttcattcaagcacacagctggaaaatgggctggtgatccagatgacaaaggtattcaaacatccagtgatgccaaacactttgccatctctgcaaaaataccagaattcacaaacaagaacagaacattggtccttcagtattctgtaaaatttgagcaagagattgaatgtggtggagggtacatcaagcttctctctggatttgttaatcaaaagaagtttggtggggatacaccatatattttaatgtttggaccagatttatgtggcacggatacaaagaagctccatgtgatactctcctaccacggtcaaaattaccccataaagaaggacctgcaatgtgaaactgacaggttaactcatttctacacattcattctcaggccagatgccacatacagtgtcctggttgataatagagagagagattctggaagcatgtatacagattgggatattcttcctccacgaaaaatcaaagatgtcaaggccaaaaagcctgcagactgggaggaaagagaatacattgaagaccctgatgatgtcaaacctgagggatatgattcaatcccaagagaaattcctgacccaaatgctaaagagcctgaaaactgggatgaagaggaagatgggaaatggaaaccaccaaagataccaaatccagcatacaaaggaccatgg

SEQ ID NO: 11626 - DNA, 2567 bp, Glycine max
  Clone ID: 701107751_FLI
aaacgttaattaattacaaggcttatgtctattttcagtatttttgacatcttcgttctcctgatttttgttggctttaactttaaaccaccaattctgttccccttgtttcttcatcattagattttaagtgccatgcattgatataatataaatatataacttcatttaattaatgcaagctattgagttttgagtcgaatctattagccacaaaacacacacacacatattctcacacaaactgcaaccatggctactaccttatgttacaattctcttaacccttcaacaaccgttttctcaagaacccatttctcagttcccttgaataaagagcttccactggatgcttcaccttttgttgttggctataactgtggtgtaggatgcagaacaaggaagcaaaggaagaaagtgatgcatgtgaagtgtgcagtggtggaggctccaccaggtgtttcaccctcagcaaaagatgggaatggaaccaccccttcgaagaagcagcttcgtatacttgtggctggtggagggattggagggttggtttttgctttggctgcaaagagaaaggggtttgaggtgatggtgtttgagaaggacttgagtgctataagaggggagggacagtataggggtccaattcagattcagagcaatgctttggctgctttggaagctattgattcagaggttgctgatgaagttatgagagttggttgcatcactggtgatagaatcaatggacttgtagatggggtttctggttcttggtacgtcaagtttgatacattcactcctgcagtggaacgtgggcttcctgtcacaagagttattagtcgaatggttttacaagagatccttgctcgcgcagttggggaagatatcattatgaatgccagtaatgttgttaattttgtggatgatggaaacaaggtaacagtagagctagagaatggtcagaaatatgaaggagatgtcttggttggagcggatggaatatggtccaaggtgaggaagcagttatttgggctcacagaagctgtttactctggttatacttgttatactggcattgcagattttgtgcctgctgacattgaaactgttggataccgagtattcttgggacacaaacatactttgtatcttcagatgttggtgcgggaaagatgcaatggtatgcatttcacaaagaacctcctggtggtgttgatgagcccaacggaaaaaaggaaaggctgcttaggatatttgagggctggtgtgataatgctgtagatctgatacttgccacagaagaagaagcaattctaagacgagacatatatgacaggataccaacattgacatggggaaagggtcgcgtgactttgcttggtgattccgtccatgccatgcagccaaatatgggccaaggagggtgcatggctattgaggacagttatcaacttgcatgggagttggagaatgcatgggaacaaagtattaaatcagggagtccaattgacattgattcttccctaaggagctacgagagagaaagaagactacgagttgccattattcatggaatggctagaatggcggctctcatggcttccacttacaaggcatatctgggtgttggtcttggccctttagaatttttgactaagtttcgtataccacatcctggaagagttggaggaaggttttttgttgacatcatgatgccttctatgttgagctgggtcttaggtggcaatagcgacaaacttgagggcagaccactaagttgcaggctcacagacaaagcaaatgatcagttacgtagatggtttgaagatgatgaagcactcgagcgtgctattaatggagaatggattttattaccgcatggagatggaacaggtctttcaaagcctatatctttaagtcgaaatgagatgaaacccttcataatcgggagtgcaccaatgcaagataattcaggcagttcagttacaatttcttcaccacaggtttctccaacgcatgctcgaattaactataaggatggtgccttcttcttgattgatttacggagtgagcatggcacctggatcattgacaacgaaggaaagcagtaccgggtacctcctaattatcctgctcgcatccgtccatctgatgttattcagtttggttctgagaaggtttcgttccgtgttaaggtgacaagctctgttccaagagtctcagaaaatgaaagcacactagctttgcagggagtatgactgattctgctcaattgcaatttgtaagatatggaaaaattatacagcacaaatttgctattgtatagtactatctgcattgttttagggtggggtattataccacagtctagtcatttaagatctgatatgttacatgcctatatggacatttaagagggactcttgggtataaatttgttactccactccaatactttttgtgtatgacatttgtaatttgttagagttagatttataacatgacacacataaacttgcacgtgattaatgttgaatggagtaagcaatgcctagctatgaatt

SEQ ID NO: 11627 - DNA, 2200 bp, Glycine max
  Clone ID: 701107882_FLI
ggaattgttgtaactttttgattcctaaattctctaaaattcgaaattctaatttcgttaggggaaagagattgtttgtgtgtgagtgagtatggctggaaaaggcgagggtcctgctatcggaatcgatttgggaacgacgtactcttgcgtcggcgtgtggcaacacgatcgtgttgaaatcatagccaacgatcagggtaacagaactaccccatcctacgtggctttcaccgacacagaacggttgatcggcgatgcggcgaagaaccaggtcgctatgaacccaaccaacaccgtttttgatgctaagcgtttgattggaaggcgtttttccgatgcatcagtacaaggtgacatgaaattgtggccgttcaaggtgattcctggccctgctgagaaacctatgattgtggtgaactacaagggggaggagaaacagttttccgcggaagagatatcctccatggttcttatgaagatgaaggagattgcggaggcgtatctaggttccaccataaagaatgcggttgtcactgtgcctgcttacttcaacgactcacaacgtcaagccaccaaggacgctggtgtcatttctgggctcaacgtgatgcgaattatcaacgagcctaccgcggctgccattgcttatgggctcgacaaaaaggccactagctctggggagaagaatgttctcatttttgatctcggtggtgggacttttgatgtctctcttctcaccatcgaggagggtattttcgaggtgaaggccactgctggtgatactcacttgggaggtgaagattttgataacagaatggtgaaccattttgttcaggaattcaagaggaagaacaagaaggatattagtggaaatgccagagctctgaggaggttgagaacagcatgtgagcgggcaaagaggactctctcttccactgctcaaaccaccatagagattgattccttgtacgagggtattgacttctacacaaccattacccgtgcccgttttgaagagctaaacatggatttattcaggaagtgcatggagcccgtggagaagtgtttgcgggatgccaagatggataagagtaccgtccatgatgttgttcttgttggtggttctactaggattcccaaggttcaacagttgttgcaggacttcttcaacggaaaggaactttgcaagagtattaacccagatgaagctgttgcttatggtgctgcagtgcaggctgcgattctcagtggcgagggtaatgagaaagtgcaggatcttcttttgttggatgttactcctctatccactggtttggagactgcaggaggagtcatgactgtgttgattcccagaaacacaaccattcccaccaagaaggagcaggtgttctcaacctactctgacaaccagcccggtgtgttgattcaggtctatgaaggtgaacgaacgaggactcgtgacaacaatttgcttggcaaatttgagttatctggaattcctcctgctcccagaggtgttcctcagatcactgtttgcttcgacattgatgccaacggtatattgaacgtgtctgcggaggacaaaaccactggacagaagaacaagattacaattaccaacgacaagggcaggctttctaaggaggagattgagaagatggtgcaggaagctgagaaatacaagtctgaggacgaggagcataagaagaaagtggaggccaaaaatgcattggaaaattatgcctataacatgaggaacacaatcaaggatgacaagattgcttccaaactgtcttctgatgataagaagaaaattgaagatgcgattgagcaggctatccaatggctagatggaaaccaacttgctgaggctgacgaatttgaggataagatgaaggagttggagagcatttgtaatcccatcatagcaaagatgtaccagggtgctggtggtgatgcgggtggagccatggatgaggatggtcctgcagctggcagtggaagcggtgctggacccaaaattgaggaagtcgattaagcagaagattctcatgggttgttcttgattttgtcaaagacccttttgaagtttagataacagcgtgtcattatgtttttattgcgattttatttttctcttttttttttaatgtacttttccccgtttctacttgaacaatgatataagtttttgctc

SEQ ID NO: 11628 - DNA, 1431 bp, Glycine max
  Clone ID: 701107907_FLI
tgaatctcagaattctctaaaagagatctttttctgctctttgaagaaagaagggtctttgcttgattttggagatgtctctgctctcagatctcatcaaccttaacctctccgataccaccgagaaggtgatcgcagagtacatatggatcggtggatcaggaatggacctgaggagcaaagcaaggactctcccaggaccagttagcgacccttcagagcttcccaagtggaactatgatggttccagcacaggtcaagctcctggtgaagacagtgaagtgattttatacccacaagccattttcagggatccattcagaaggggtaacaatatcttggttatctgtgatgcctacactcctgctggagaacctattcccactaacaagaggcacgctgctgccaaggttttcagccatcctgatgttgttgctgaagtgccatggtactgtattgaacaagaatacaccttgttgcagaaagatatccaatggcctcttgggtggcctgttggtggtttccctggacctcagggtccatactactgtggtgttggcgctgacaaggcttttggccgtgacattgttgacgcacactacaaagcctgtatttatgctggcatcaacatcagtggaattaatggagaagtgatgcccggtcagtgggaattccaagttggaccttcagttggaatctcagctggtgatgagatttgggcagctcgttacatcttggagaggatcactgagattgctggtgtggtggtttcctttgaccccaagccaattaagggtgattggaatggtgctggtgctcacacaaactacagcaccaagtccatgagagaagatggtggctatgaagtgatcaaagcagcaattgacaagttggggaagaagcacaaggagcacattgctgcttatggagaaggcaacgaacgtcgtttgacaggacgccacgaaaccgctgacatcaacaccttcttatggggagttgcaaaccgtggagcttctgttagggttgggagagacacagagaaagcagggaagggatattttgaggacagaaggccagcttccaacatggacccatacgtggttacttccatgattgcagacacaaccattctgtggaagccatgagcaaaacctgcatgttttctccctttggatggaaaggaacagttatgcttttcttagtaggatttggtctctctctctttttaccttttgattggtactatggttggtgccttgttggttggtgcaactaactggcaagggttgttcattgttttcttctattcctttccctcgttttccgattgttacaatgacaataatttaatggttattatcagtcttgaacaaagaaatgctgattgtgaagtataataataatatatgaaattgtcatgttcattggagt

SEQ ID NO: 11629 - DNA, 1097 bp, Glycine max
  Clone ID: 701108161_FLI
caagaagaaagcagagcctctactacatcatcacattcacatttcagtaccttctctttctcccagtctctcacacacaacaattgaagaagaaaatggttgacaatgattcgctctcggaattcctcgcatctgcggtcgacgcggctcagaaagctggcgagattattcgaaaaggcttctaccagaccaaaaatgtggaacacaaaggacaggttgatttggtcacagaaactgataaagcatgtgaagaactcatatttaatcatctgaaacagctttatcccactcacaagttcattggggaagagaccacagctgcctatggcactacagaacttacggatgaacccacatggatagttgatcccctggatggaactactaactttgtgcatgggttcccctttgtttgtgtctccattggtctcacaattggaaaaactcctacaattggtgttgtatacaatccaataattaatgagctttttactggaatccatggaaaaggtgcctttttgaatgggaatcccataaaagtatcgtcacaaactgaactaatcagctctcttcttgcaactgaggctggaacaaaacgtgacaaagaaacagtagatgcctctaccgataggattaaaagcttacttttcaaggtgagatctcttcgaatgagtggctcctgtgctctgaatctgtgtggaattgcatgtggaaggctggatgtattctttgaacttggctttggtggtccttgggatgtagcaggtggtgctgtcattgttagagaagctggaggtgttgtatttgatccgtccggtgcagattttgacataacatctcagcgagtagcagcttcaaaccctttcttaaaggatgcacttgttgatactctgcgccaaatggtgtgagaaatttactattaatcaatggcaagaacttatcatataagccatctttgttagttcgtttagcttttgctcaaataattttttagattctcagttttaagtaaaagttgcatgataaaaatgttttagaatttttaacttcttctgtggattcagagtattcaataataaatcactttaaatcctttc

SEQ ID NO: 11630 - DNA, 1487 bp, Glycine max
  Clone ID: 701108250_FLI
cttcaaacacaacacacacacacacactgtgtttgtgaaactctcacacagacaagtcacaacaacaagtttctgttgttccaatggcatcagcaacaccccttttgaaagatgagctggacatcgtgatcccaacgatcaggaacctggatttcttggagatgtggaggccattctttgagccttaccatctcattattgtgcaagatggagacccttcaaagatcatcaaggtccctgaaggctttgactatgagctctacaaccgcaatgacatcaacaggatccttggccccaaggccaattgcatctccttcaaggactctgcatgccgttgctttggctacatggtctccaagaagaagtacatctacaccattgatgatgactgctttgttgccactgatccatccggacacaagattaatgcacttaagcagcatatagaaaacctgctctgcccatccacaccctactttttcaacaccctctatgaacctttccgagaaggtgcagattttgttcgcggttaccccttcagtctccgggaaggtgtaccaactgcagtttctcatggtctttggctcaacatcccagattacgatgctcctactcagcttgtgaagcctcttgagaggaacactaggtatgtggatgctattttgaccataccaaagggcactttgtttcccatgtgtggaatgaacttggcctttgatcgcgatcttataggagcagcaatgtactttggtctcatgggtgatggtcagcctattggacgctacgacgacatgtgggcaggctggtgctgcaaggtaatctgtgatcacttgggattgggaatcaagactggtctgccctatatctatcacagcaaggccagcaacccatttgtgaacttgaggaaagagtacaaaggcatattctggcaagaagacattatcccgttcttccagagcattgttcttcctaaagaagctaccactgttcagaagtgctacattgagcttgccaagcaagtcaaggaaaagctttccaaggtagatccttactttgacaagttggcagatgccatggtcacttggattgaagcttgggatgagcttaaccctgcgggagcatcagtggccaatggcaaagcgtgaatcggtttttggttaactgcataacagccacaaaacttggaagtggaactatttatatactgtatttttttttccttagtatttatcttcaacttagctgttattctcggcttaaaatttgcagcattgttagctgtaattctgtttaataacttcatcatttgagcttagaaacaataagtacacccatagggcgttactttctttttattattgtttgatgggtagagatcacatggcagcatttcgttacatgtgaaataatagaaaggttactgatgtatgtcttgtttattactgagtatagatccatagtgatcaatttttaactgatgtgtttgg

SEQ ID NO: 11631 - DNA, 880 bp, Glycine max
  Clone ID: 701108251_FLI
gtcgtgccagcatctgccatccctgatggctggatgggattggatattggtccagattctgttaaatcattcagtgaagcattggatactacccaaaccatcatatggaatggaccaatgggagtgtttgagtttgacaagtttgctgttggtacagaggtatgtatgcaagaacacccacccacatatgaaattccattcaaattttatgttaaaccaaagttcaccgtcaatataaaaaatgtccactctaagcgatgcatactcagagggatatgcagtaggggttaaccttcctaatgtgatttgcacatcttgtaaactacatgcttgttcatttatacacgtgtcagatgagggatgattcaaatgtcatctgcagttactacagcatattccattctgtttggctgataaatgtgtgcactgtacataattaatttgcattttgtacccttctttcaggctattgcaaagaagctggctgacctcagtggaaagggggtgaccacaattattggaggaggagattctgttgcagctgtggagaaagtaggagttgctagtgtcatgagccacatatctactggtggtggtgccagtttggagttattggaaggcaaagagcttccaggagtccttgctcttgatgaagccgtcccagtcgctgtgtaagacacttttcatcttggaaaattttcccatcctcaggtgtcagtgttgtcaatcttgtaaaagagcatatgttgtaggacccttcgaagtctgttagtgtaaattttatcttgcttgagttattattggcttcacacataaattgcgtgtaactgtaaaccctggctgagagccataaattcaaataaatcttttagttgctggc

SEQ ID NO: 11632 - DNA, 725 bp, Glycine max
  Clone ID: 701108344_FLI
aaacaagtagttgagaactaagaagaaggaaatggcttcctcaatgatctcctccccagctgttaccaccgtcaaccgtgccggtgccggcatggttgctccattcaccggcctcaaatccatggctggcttccccacgaggaagaccaacaatgacattacctccattgctagcaacggtggaagagtacaatgcatgcaggtgtggccaccaattggcaagaagaagttcgagactctttcctacttgccagacctcgatgatgcccaattggcaaaggaagtcgaataccttctaaggaaaggatggattccttgcttggaattcgagttggagcacggtttcgtgtaccgtgagcacaacaggtcacctggatactatgatggacgctactggaccatgtggaagctgcctatgtttggctgcactgatgcttctcaggtgttgaaggagcttcaagaggctaagactgcataccccaatggcttcatccgtatcattggatttgacaacgttcgccaagtgcagtgcatcagcttcatcgcctacaagcccccaggcttctaagtcattgaaaaatttgcaaagcatctgtagccaccccactttgtttgttgtacttaaactacattcccatttgtttttgctttatgagatttcatcatcctgtatttttggtttctgttttcggacttcaatggaaattaatggatgagaactaatg

SEQ ID NO: 11633 - DNA, 2786 bp, Glycine max
  Clone ID: 701108350_FLI
gtggttgaaagttaagaagtagcaaagatgtttccattcgggcacaagggtcaaaagataaaggggactatggtggttatgcagaagaatgtgttggatatcaacagcatcaccagtgttgacgggatcgtcggcaccggcttagacttcttaggcagtgcactcgatacagttacttttttagcctcctccatctccatccaacttattagtgctaccaaggctgatggtgggaaaggaaaagttggaaaggctacaaatttgagaggaaagataacattaccaaccataggagctaaggaagaagcatacgatgctcaatttgattgggacagtgacttcggaattcccggtgcattttatattaagaacttcttgcaaaacgagttctacctcaagtctttaattctcgaagacattccaaaccatggaaccattcacttcatatgtaactcctgggtttacaattcaaaacactacaagactgatcgcattttctttgccaacaatacatatcttccaagcgagacaccggctccacttgtcaagtacagagaagaagaattgaagaatgtaagaggggatggaactggtgagcgcaaggaatgggataggatctatgattatgatgtctacaatgacttgggcgatccagataagggtgaaaagtatgcacgccccgttcttggaggttctgccttaccttaccctcgcagaggaagaaccggaagaggaaaaactagaaaagatcccaacagtgagaagcccagtgattttgtttaccttccgagagatgaagcatttggtcacttgaagtcatcagattttctagcttatggaatcaaatctgtggcccaagatgtcttgcctgtgttgactgatgcattcgatggaaatcttttgagccttgagttcgataattttgctgaagtgcgcaaactctatgaaggtggagttacattgcctacaaactttcttagcaagatcactcctataccaataattaaggaactttttcgaactgatggcgaacagttcctcaagtatccaccacctaaagtgatgcaggtcgacaagtctgcatggatgactgatgaagaatttgcaagagaaacaattgctggtttgaatccaaatgtcatcaagattattgaggagttcccactaagtagcaagctagatactcaagcctatggtgatcatacctgtataataacaaaagagcatttggagcctaacttaggtggtctcactgttgagcaggctatccaaaacaagaagttgttcatcttagatcaccatgactatctcattccatatttgaggaaaataaatgcaaataccacaaagacttatgctacaagaaccatatttttcttgaaaaatgatggaactttgacgccattggccattgagttaagtaagccacatcctcagggtgaagcatatggtcctgttagtgaagtctacgtgccttcgagtgaaggagttgaagcttacatttggttactggcaaaggcttacgttgttgtgaatgatgcttgctaccatcaaatcattagccattggctaaacactcatgcggttgtggagccattcgtcatagcgacaaacaggcatctgagcgtggttcaccctatttacaaacttctgtttcctcactatcgtgacaccatgaacattaattcacttgcccgcaaatccttggtcaatgccgacggtattatagagaaaacattcttgtggggtaggtactctttggaaatgtctgctgttatttacaaggattgggttttcaccgatcaagcattgcctaatgatcttgtcaagagaggagttgctgttaaggatccatctgctccccatggagttcgacttttgatcgaggactatccttatgcttctgatgggctagagatatgggatgctatcaagtcttgggtggaagaatatgtctcattctactacaagtcagatgaggaacttcaaaaagaccccgagctccaagcttggtggaaagaacttgtagaggtgggtcatggggatttgaaggataagccatggtggcaaaagatgcaaactcgtgaagagttggttgaagcttccgctaccctcatatggattgcttcagctcttcatgctgctgttaactttggacagtatccatatggaggtttaatcctgaataggccaactattagcaggagattcatgcctgagaaagggtctcctgaatatgatgcgttagctaagaaccctgagaaggagtttttgaagactattactggcaagaaagagaccctcattgaccttacaattatagaaattttatcaaggcacgcatctgatgagttctaccttgggcagagagatggcggtgactactggacttctgatgccgggccattagaggcctttaagaggtttggaaagaatcttgaagagattgaaaagaagcttatagagaagaacaataatgagacattgagaaaccgctatgggccggctaaaatgccttacactttgctctatccttctagtgaggagggattgactttcagaggaattcccaacagtatctctatctaagggctctatggttgctgaagtactgtccctggctttaaataaatgtgaaatagaaggaatctgattccttcatcagttgtgtatgtttaagttatgtatttggagtggctgaatgtacttgtatttgtcattaataaaccatgtttgtgtaatggaaaccaaaataataaatgcaatcatgcaggtttgaacttttt

SEQ ID NO: 11634 - DNA, 1077 bp, Glycine max
  Clone ID: 701108407_FLI
gaagaactgaagaaaatgattggtgcagtcacttatattgagtgcagctccaaaacacagcaggtaaataccttaacttcattggattcaactattttgagccatattttgaagtgaatccaagctgtatattgagatgaagttaaagaaaacattgtctctaaagtttaatttatatgtattagtgtaaaattgtttattcaataagaatctaccatgttgtcacatcatattgcaaaagtatgatgtggtaatatggtgaagaacaataatatacaaacacccacttattttaaactctatcaattcttttatttttttttatctttcttcctattacatcataaatcctataatacttgtatttttctcttgttttttttttcctctctaattgttttatagcataatggatgttcatgaaacatttttctattgtgaagagtctggtgaattcttattcaaaatctgtgtaaaatagttttacactcacggtgcatatagattacacttttgtttctctgtattccatttaatcatgcaagttagaaaccgatgatctctgaatccaaattgggaagtaaagtacattgaagagattgttagaattctctctttgttttgtttgcagaatgtgaagacagtttttgatgctgcaataaaggttgcattgaggccaccaaagccaaagaagaaaccacgcaagaaaaagacctgtcctttcctctgatatttcattattcagttatctttcaccccaaatcatttatagagcagaagtcaagtccaatgctttttagtttttgtgatctatatatataaagagcctgtgggtttttggataatatctgtgaagaactttagattcctcttgaattgtaaacgatggcaaatgagcttaagtgttacattgttcaattaattattttattttgcagtgtctagctgaggctctgtatttcaatacttttagtacaaaaagaggtctccaatttgaaattgaaaatcccttctgcaattcttgattttctgattctagtttctaccttgttgctttcgtttgggtttggtcaaatc

SEQ ID NO: 11635 - DNA, 1320 bp, Glycine max
  Clone ID: 701108468_FLI
gcaagaatggccagaatagcttcacttgagagcatgctgaacatatcatctaattcacttgtagcaatggcttctcaactttctgaggcagaagaacgagaacgggccttcactaatcgtggacgctggaaccagttgcgctcaatgggagaagccaagaatttgcttcaatatttgttcaattctgttggagatgctaggtgccaactgtgggaaaaggacactgagatcaaggaaataaaagatcaaatcaaagaacttgtaggtctattacggcaaagtgaaatgaaaagaaaggaaactgagaaggaactaaaagcgagagagcaagctgttgcaaccacattggcgaccccaacttctggaaactctccaaattcattgaaacactatgcggaagacatcaaggaacctttatctccagagtctgtgccagtacagaaacagcgcaaatatatgccaggcatcactaatggccaagtgagggaatcagcagcatttgtagatcagagtagaacgatgatacccattgggcaactgtcaatgaaaaaactagcaattgtaggacaagcttctggcaagctatggaggtggaaaagaagccaccatcagtggctagtacaatttaaatggaaatggcagaagccatggagactttctgaatggattcggcacagtgatgagacaatcatgagaacaaggccacgttcgcaggctttgccgcatataatgtgaatctgaatgttattgtgatcatccatttgctttggctcagtgttcattttttaacctacaagaatgatcctagaaatcaggcaataaagaaccaaaaactaggtgcagttgcagggtgtaatattaatggttgctgacaaataacattatatatactgcccaaatgttgaaaatgtttccattgtttgctgcatatggagcatcttgtgaggtgtgtaaaaatgttgccgagggctacccaaataatcaagagaataggagatagttgtttgcttggaggcattggtgaagatcttgttagacaaattatcttggaatgttttctgtttatactttataccaacactagaagggggaaaaaaggaaatattcttcaagtcttggaaatgtgtattgagggttttctatttcttgtaagttttaagtttctatgctcatagtatgtttgtcaatcattgatttttgttgataaaaatactgtagcgttcctctgccacaaagcaacagaaggaaaactcttctgttttacctctaggtcttgtgtgtaaagaacattaactatattgaaagagattgtaatttacc

SEQ ID NO: 11636 - DNA, 2669 bp, Glycine max
  Clone ID: 701108476_FLI
gtgtgtcataacaaaagaggaagaacataggagagaaatctattcatatcatcatatcataggaaaaaagcgagcaaattcagaggatgaatggggtcacacaccttgaaccagatgagtctgagtttgttgaagttgatccaactggaagatatggcagatacaatgaaatccttggcaaaggagcttcaaagacagtatatagagcattcgatgagtatcaagggattgaagttgcttggaaccaggtcaagttgtatgatttcctgcaaagccctgaagatcttgaaaggctttactgtgaaattcatctcctgaaaacattgaagcacagaaacattatgaagttctacacttcttgggtcgatactgctaataggaacatcaacttcgtgactgaaatgttcacatccggtacacttaggcagtataggctaaagcacaagagagttaacatcagagcagtgaagcattggtgtagacagatcttgagcggacttctctatcttcacagtcacgacccgcctgtgatccatagagatctaaaatgtgataatatttttgtcaatggaaaccaaggggaagtgaagattggggatcttggtttggcagcaattctccggaaatctcatgctgctcattgtgtagggacgcccgagttcatggccccagaagtatatgaagaggcatataatgagttagttgacatatattcctttgggatgtgcatattagagatggtcacatttgaatatccttatagtgaatgtactcatccggctcaaatctacaagaaagttatttctgggaaaaagccagatgctttgtatagagtgaaggatccagaagtgcgacaatttgttgaaaaatgcttggtcacagtgtctctaaggctttctgcaagagagcttctaaatgatccatttcttcaaattgatgattatgaatatgatttgaaaactgttgaaaatggagaactggatgaatttggttctctcatgaggcagccattctttgatcttcatcgaagctatagcaacttcagtaatgaatactcaaatggctttgggtatgaaggagactggggtcctcatccagctgagatcgaacctagtggaattgaactttttgagtaccatgatgatgacgaaccctctgaagatgtcgacataagcatcaagggcaagaggaaagatgatggtggcatctttttgagactaagaattgctgataaagaaggtcgcatccgaaatatttatttcccatttgacatagagctggacacagcaataagtgtggcaactgaaatggttgcagagctggacatgactgatcaggatgttaccagaatagcagatatgatagatggggaaattgcgtccttggtacctgaatggagaccaggaccaggaattgatgagactcctcgttatgctaatgaaggtttctgtcacaattgtgtgtctaatcatacttctagcggttcttttctggattttctttcaaacaatccaggtaacaagaacttgcaacttcttgagtgttgtaggcatggatgtgcttcaatgcatgggcggtttggggagattaccttccaatctgaagagtatgacaatcatgctagaggggatctgaacgtatcaagccaattagacagcttgcagtatcaagagttatggaatcagcatgaaagtcgtgaactgagtccggtagagtctgatcaaagccattctgacgaacaatgtgagcaattagataaaccgattccggctaaagacaaagcacaggatgtttgggaaaaaaagttttcccccaatgcagcaaattctctaagaaatttatcaggaagtcatgatttctctactatccgatcgacctattgcgaccttgaggatgactatgagaaagagatccaaaaggaactcagatggctcagagccaagtaccaaatggagttaagggatcataaggatggacagtttgggcaatgctcacatagtagtaacagtgagcacagaacagaaaatggctttttgtcaccttcactgacagaaacattaaaaggaggcaacaatgggactcggttgaaacccattactactaagtggaattgtgattccagtagccaccctcatgtccatgaaagcagccccaattcggacacccaaagggcccaaaattgtgaggcgattgaatcccctggagaaggtatggttactgcaaagagtttttatacaggctcattgctgccgcactctttgcacaggacagtttctctcccagttgatgctgttgatatataattttgtgagacactcattggattcttttgtagattatatatactccccatagaggctatctgatttctaaatccctccttatttttcataggattttcaatttacccacatggaaatcggtagccactagctataatccccccaccaccaccaccacaaaggcatcaacatacacttgagtgtttatttatctaggaaaaagaaaatcagattttggttacggatgttagtgatcgtgaatttgataattgaggcatgtaaaatatgaaagtagtagagtctatgtaaatctgtccaagtttattgtatgatgcaatttgtatctcccacgttatgaaaacaagtattgatagaccttagcgtgtt

SEQ ID NO: 11637 - DNA, 1971 bp, Glycine max
  Clone ID: 701108481_FLI
ggcgagtgagtgagtgagtgagtaagcaagcatatggcgagtaccttctgcttactccactctcccctctatcaattcccatcttcatcttcttcttcttctgggcccataaaattgcgagcttccacaacatcttgcttggggcagcaagacaaagagccactccgcaacagaagaaccgttcttttgaccagcatcgctcttcttccgtttcgccgtttgaagcgggccccagctctcgaatccccacctccacctccaccccctacagaagaaaccgacgtgaagacacaagaggataaccagaaagccgagaaagcacctgaagtggaccaaccgtcaaattcctttctgcttctcctgaatggaattggaatattttcttctggtgtgttgggtgctctctatacacttgctcagaaagaaaagtccactgctgttgcaacaatagaaacaatgagcagcaaactgaaggaaaaggaagaactgattgtttccttgaagaagaactatgagttgaagttactaaacaagcgggaggaacaagccaagctacttgaaaaggcaaaggaagagcaactggcactgataaaccaactgaattctgcaaacagtactattaaccgcttggggcaggagcttaaaaatgagagaagtttgattgaggacctgaaacttcaaattgaccgacttaaagctgagctttcaaagactgatacagataagaaggatcttgaaaacaatttgaaagaaaagatagattccattggtgttttacaagaaagaatcaatctgctgagtgtggacctcaaggacaaagaagatgctgttcagaatctcaattcatcccaagcagaaaaggagttggaattgaagagtttgaagtctacctatgagcaaaccaaggatgacttaataaatgttcaattgcagattcaagggttgaaagatgaactactgaaaacccaagaggaactagaagctaaagattccttggtgatagaactaaattcaagagtgagttccttaactattgagaacaataattttaggagtaaatgtgatgtcatggagaaggaatacaatgatctaaagttcagtgctgtaaagaaggctgctttggactctaaggttttaagagaaaaagaagaggagcttcatcagctaaaggatcagtttgaacttgccctaggtgaagcaagcaaaagccagatcgtcattgctgatttatcccaagaaagagatgatttgaaggaggctctagataatgaatctagcaaggtgaatcatttgaagcaagaactccaagttacccaggagaatcttgcaaaatcaagaaatgagtctgctgaattggaaaaccttctaactttgtcaaacaaactgtgcaaagagctcgagctcgaggtctctaagctctcgtctgagctcactgaggttaatgaatcgctacagagaaaccttgatgatgcgaaacatgaggcagaaatgctagcaagtgagcttacaactgccaaggaacacttgaaggaagcacaagcagagctgcaaggtgtgtcaaaagaattgacagctgctcttgaaaagaatgatagcctacaaaaagaattagttgaagtctacaaaaaggctgaaagcacagcagaggatttgaaggaacaaaaacagttagttgcttctctgaacaaagatttacaagcattagagcagcaagtctcaaaagacaaggagtcccgaaaatctcttgagagggacctggaggaggcgaccatatcactagatgaaatgaaccgaaatgcggtgatcctttctggggaactacagagagctaattctcttgtttctagccttgaaaaagagaaagatgtgcttattaagtccctaaccaaccaaagaaatgcatgcaaagaggcccaagacaacattgaagatgctcataaccttatcatgaagcttggcaaagaaagagag

SEQ ID NO: 11638 - DNA, 1638 bp, Glycine max
  Clone ID: 701108526_FLI
gcgtaggggaatggttcctccctcagttgcttccttcctcttgtgtccacccagttccccctttcattttccattcaataattcaaacaccagttaatggctacccttctattccaccacaattcgcctcagatattctcctcctccttcttcttctcacatcattaaacgccgtcgttttcatgactccataattcaccggaagcagaacaacaacaagaagcagcagcagcagcgcgagttcacatgggattgggaacaaccgcgagaagcagaagaagaatcgtcatcgaagaaggttctagaacaagaacacacaacaacaccaacaacgccgatgccgatggagctggagcaggagctaggttcaacaacaatccagcgttccttcgacgcgcgctacacgcgccacgcgcgcgactcgctcggcgaattgcctgacagcttcaccatcaccgacccctccatccccggccaccccatcgtcttcgccagcccgggcttcctcaagctcacgggctactccctccgcgaagtcctgggccggcccgcagccatcttccagggcccacgaacatcccgaaaatccgtaatcgaaattcgcgaggccgttagagaggagcgaaacgcgcaggtcgttttactcaactaccgcagagacggtacgccgttttggatgctttttcgtgtttcccctgttttcagcagcgacggtggcgccgtcgtgcactttgttgccgtacaggtaccgcttcagaaaaaagaagggtccggagtgagggatttcgggttcgggtgctgtcggaaggaagtgtgcgtggattcgttggcggagattgatcgcgtttgttcattggagcaagtgctcgaacctgatgtcagagctttgtgggatgcagaagtggagagagaagagccgtgtgaggcgagtgatgatgagaagcgaagtgctgttactgccatggacagtatattttctgtgctaacccattacagtgaggccacagggagattggtgtgtagaaagaggtccagcattcctgacgtgggtcttttaagcacatccttgattatttctcttggtagaatcaaacaaagctttgtattaactaatccgcatttaccagacatgcctattgtttatgctagtgacgccttcttgaaattgacaggttatgcaaaaaatgaagttttgggccacaactgtagatttttaggtggaacagataccgatacctcgactttacatctgataagggaaagcattaaaacagaacaaccatgcacagtacgtattttgaattacaggaaggacaaaagctcattttggaattttcttcatatctcacccgttcgtgatgcttctggcaaggttgcatactttgtgggagttcaaatagaagacaacaataaaaacgatgatagccattgtttgagtcctgagaagagacaacttagtgtggttggtgtagtcaaggttgcagtgaggagtttatcaatgactgcgggatcttctgagtcgtagcaaaaggatcatgtgagtttggaacaaataatatttgcctacttcccagaaatattaatccattcgaaaaaataatcaatctcaattggtgattgttgagatgatagaaaggt

SEQ ID NO: 11639 - DNA, 1985 bp, Glycine max
  Clone ID: 701108585_FLI
actaaactggtaaacatttgttgtagtggttgaaaagcattttctcttactttcctatatcccatgttgaccaattacaagcttcaccatgttcagttgttcacatagatagcttcagttgttttagtagagtaactagtttttacttaatttgacttttgtcatgtgctgaatttcacttaaatgaagttaatggatttcagattgtttgtatgctaggtatgaagttgacacagatgcatttctttctgttttagcccttcaaccaattccaaacatggattctgtccccaccattgttgaggtttcaagttccaagacatgtgagttgttgaagtcaatctcagcattgaaagtagagccagtagaaaatgttgcatcgaaactatttgttcaatgctctcggcagaagggacttataaagatctacaggcacttgctaaattatcgaaaaaatgtattcaatctttgcagcttgcctaatctagaaggaatgacatataggcaaataagacatagatttcaagaagctgttgtatgtggtctttaccggagtgggaaaatatacttccacccaaatgatggtgaaattctgcagcaaaccgacaaagtattgttcattggatcccttcgggatactaatactaaaaagccagaagtaatcctagatgggaaagaaggaaaccacgaaattcataatgaggaaatacttgaaaaggatctggaacatgccattgagttgagtaaagtaagacttgctaatattgtaaaacggcctaatagatcaggttccaagggatcagacgggaatcttggaccgaaagaatgcattcttttacttgggtggcgccctgaagctgtagaaatgattcaagagtatgataactatcttggtcccgaaagtgttttggaagtgttatcagacacaccattagatgacaggattaataaggcaagcaacatcaatggtcataataaactcaagaatgtccgggtttctcatcggattggaaatcccatggactatgacaccttaaaggaaaccattttgaatattcagaattctttgaagaatgaggatgttcctatgtcaattgctgtcatatctgacagagactggcttcttggagatccagctaaggcagacaagctgtctgcttattctctcctccttgctgaaaatatctgcaacaaacttggggttaaggtgcaaaatctagttgcagaaattgttgattcaaaattggggaaacaaattagtagaatcaagccatcagtgacctacattgcagcagaggaaataatgagccttgtaacagctcaagtggcagagaacagtgaactgaatgaagtttggaaagacgtattaaatgcggagggagatgaaatatatgttaaggatattgccctttacatgaaagaaggagagaatccatcattttctgagctttctgagagagcatatttacggagagaagtagccataggatatgtgaagaacaagaagaatgtaatcaacccagttcccaagtctgagcctctctctcttgaaatgactgactccttgatagtcatatctgagctggaaggagagcaacccgtcgttttgtgatgctgaaactttaatcatgtcaagagccccaaccccaagagccctgtcaaatgttgattgattttgatgattgcatccaggtgattgattgctaattaggatgattcaatatcattgtgttactctttaatcattcgaaataaattgtctatggtttctctcctctctaaggatattcttcagtagacaaccaaaagttaatctctttcaagaaggagagattgccaaagtaaatatcacctttccatgtgttaagcatagatagtacttgagactagctacttatgtcatgagaggttgaattccaactttgtttttgacctttgagagatatatgatgatattacgataattgagttgtcaaattgtgatc

SEQ ID NO: 11640 - DNA, 593 bp, Glycine max
  Clone ID: 701108631_FLI
tgctgtctctcgtgttgatgattactggcatcattggcaagatgtgtttgctggagctcttatagggatgataattgcttcattttgttacttacaattctttccacctccatatgacgtagatggttggggacctcatgcatatttccagatgttggctgaatctcgtaatggtgctcagccctctactgtcaataatgagattcatcatgtgcaatctgctgagcttcaggctgtatctttgtatatcccacctcaacatgatgcagatacacgaggcaatagctgggattcaagccccatgttaggtgcatcccaaaatgtaagaacacactgacgacataggaaagatcaccagcatgtccataatctgtaaaaattataggagggattcgttgcagataaaccactttagcatcgttggtagtttaaaatgcggatatcaatcaatttctttgcttgttggattggaaatttgagatgtcatgttagttgtctttaatgaggatccttttattaaaaatctcttaaaattaaaatataacaataatcgttctattttaattgtaaacaatttttttatttatttattt

SEQ ID NO: 11641 - DNA, 1536 bp, Glycine max
  Clone ID: 701108636_FLI
gtaaggaacttgtcaagttcataaatttcctttataatgtcatcaccaatagcatttttttaactatattgatatatgatcgatgatgaaacaaaatttgcaccagtgaggcgctgatgcaccaacacaatttgtttccgtacaccgtcaacacctgtgtaacccacccatgaatctgtgcaacttctgtgtcctctctgaatctgttaacaccaaccatgaagacagatcatcatcaggtcattgcctcatcacaactaagccacaccatttcacgaatcagcaaccatcctacgatcatcaggaggaggagcactgtccaaaggtttggctctgatttttgccgaaaatctcagggcaagagaactttggaaacacaaaatgtttgatgaggttctgattgaagacattatgcgtaatggacgcctgaataacatcagtgttgatggcagccaataatgccttccaaacaaaccctgcagcgatttgtttttatctccgctccttccatctccgccgtaccatgtcggaagcaccaccgtctcagccaccgcctccaaccgccaacgcgtcaccaccgccgtactggtgctaccactgcgagaagcgcgtctccatcgaaacgctcgcgaatctccccgacgtcgtctgcggtgagtgcaagaacggcttcgtggaatccatccacacgccgtcgcgctctcgctccccctccgcctcctccgacgacccctacttcggctcgcagttcctccaggtccttcgcctaatcgctcagtcggcgcgtgacgacgacgcgtcgcctccgccgccgccaagccgctctccggagaacgatttcctcaggatcgagctcggtggctgggacaacgatgaggagaacgacaacgacaacaacgacgacgaggagttcgaggaacacgaggaggcagaggatcgctccggcaatgaggatccgcacggaagagacgacgaggatctgagaagaaggaggcgcgagctgcttcggcttcggattagggatttggcgacgcgcacgaggagcatgcggaaccggatcttggattgggccgagattctgatgggccttgaggacaattccatcgagttccgcctccagctgccggaatccgaccgctacgtcgggaatcccgaggattacgtcgacgcggcggagtacgaggcgctgctgcatacgcttgcggaaagcgacggcggaggtaggagaggagcgccgccggcgtcgaaggcggcggtggaggcgttgccgacggtgaaggttgcgtccgaaagcgaagccgtggcgtgcgctatatgtaaggatttgctcggtgttggagacttggcgaagaggttgccgtgcgggcatgggtatcatggagattgcattgttccttggttgagttctcgaaattcttgccctgtttgcaggtatgagctaccaacggatgataaggaatatgaggaagagagagtggttaactctgcttcgagttccggtggagatggaagtgccattgcttgattccgcttggt

SEQ ID NO: 11642 - DNA, 534 bp, Glycine max
  Clone ID: 701108654_FLI
aatgaatctgatcagggcaaagagcattgagaaaggttgggacttgaagttgggggaacttgcaaggatttggaaagggggttgcatcataagagcaatatttttggacagaatcaagaaagcatacgacagaaatcctaaccttgcaaaccttcttgtggatccagaatttgcaaaggaaatagtggatagacaatctgcatggagaagagttgtgtgtcttgctatcaactatggcactagcacaccaggcatggctgctagtcttgcttattttgacacatatagaagggaacgggtgccagcaaatttggttcaggctcagagagactactttggtgctcacacatatgagaggattgacatggagggatccttccacactgagtggttcaagcttgcaaaacagtcaaggacttagattactactattcaaactctttatgattaattttcaataaatgtaatgctttctactcaggactatgctgagttcagcttaaataattgcattgtggtgaacttcaatttcat

SEQ ID NO: 11643 - DNA, 2248 bp, Glycine max
  Clone ID: 701108931_FLI
gttacactcagagtagtgaacaacaacagcaacaacaacaacaacgttgcagtgtgttgtattgtttcttagtgcacttttttttggcatcaaagaggttaaatccatggattctgattatggtattcccagggaactctcagatcttcaaaagattcggtcgttgtaccagccagagcttcctccttgtctccagggaaccactgtgagggttgaatttggtgatgcaaccaccactgctgaccccactgatgcactcaccattagcagggcgtttcctaacacctatggacaccctttggctcactttctcagggcaactgccaaagtccctgatgctcagatcataactgagttccctcctattagggtggggattgtcttttgtgggagacaatctcctggagggcataatgtcatttggggtctccacaatgctctcaaaattcacaatcccaacagtgttttgcttggatttcttggtggttcagaaggtctgtttgcccagaaaactctggagataactgaggatattctttcgacatacaaaaatcaaggtggttatgatttgcttgggcggacgaaagatcaaattaggaccacagaacaagttaatgctgcacttgctgcatgcaacaatttgaaacttgatggccttgtaatcatcggaggggtgacatcaaacacagatgctgcacagcttgctgaaacatttgctgtagcaaaatgccccacaaaggtggttggtgttcctgtcactctaaatggagatcttaaaaaccagtttgtagaaactaatgttgggtttgacacaatttgtaaggttaattctcagctcatcagcaatgtctgcaccgatgctctctctgcagagaagtattattatttcatccgtcttatgggacgcaaggcatcacatgttgctttggaatgcaccctccagtcccatccaaacatggtaattctgggtgaggaggttgctgcatcaaagcttaccctttctgaaattgcaaaacagattactgatgcagttcaggctagagcagagcaagataaataccatggagtaattctccttccagaagggctgatagagagtattcctgaagtgtatgcactcttgaaggaaattcatggtttactcagacaaggtgttgctgttgacaagatatcttctcagcttaccccatgggcatctgccctatttgaatttctgccaccctttattaggagacagttactcctttaccctgaatccgatgactcagcacagttatcgcagattgaaactgagaaattactggcatatcttgtggaagtagagataaacaagcgtctgaaagaaggcacatacaaggggaagaaattcaatgccatttgccacttttttggttatcaagctcgtggatctctgccatcaaaatttgactgtgattacgcatatgttcttggacacatctgctaccacatacttgccgctggtctaaatggatacatggcaactgtaactaacctgaagaatcctgtaaacaagtggcgatgtggggctgctccaatagcatctatgatgactgtgaagcgctggtctccaaatccaggagccacatcaattggaaaaccagctattcatccagctactgtggacttgagaggcaaagcatatgagctgttgagacaaaaggcacaaagctttcttatggatgatatctacagaaatccaggtccacttcagtttgatggtcctggtgcgggtgcgaaggttataactctttctgttgaagaccaggactacatgggccgcattaagaaacttcaggagtaccttgaacaggttcgaaccattgtgaagccaggatgcccccaggaggttttgaaagctgctctaagtgtcatggcgtcggttactgaagttctagctgcaatgtcaacatcttctactaacaccctgtcagccatgtgagagtaacaaatggatgttgtattctttccaaaattttctggcacgaggttttagtttctacattttattgccatggaagtagttgttgattggaaataagagttatagctgacatggtgcatgtcaacgtgagatgagatttactgtaatcaaagttttggctctctatgttccctactgggtcatttttttttttacaaaacatgagggttccgtgtgacactgataatttagcttggtgcttgagattattattgttgttctatttttaggacatatctttttgtg

SEQ ID NO: 11644 - DNA, 1105 bp, Glycine max
  Clone ID: 701108934_FLI
gcaattatttgtggctatatatatcagtgtccaccatttcggttaagctaccaggggctaggagagcccttgtgctttgcagcatttggtccttttgccacttgtgctttttatttattacatgccagtgcaagggtgaagaaccatttcccattaagtggaacagttctttcagcatcaattcttgttggcttcacaacatcacttatcttgttttgcagtcatttccatcaggtggaaggagacaaggaggttgggaaaatgtcacctttggttagacttggcaataaaaaaggtgcagaggtagtgaaaggggcagtctttatgctctatgctcttttggttgcttttggtctaatcaaggcacttcctctcacttgtatatccctttgtacattgaccttgccgttgggaaacctggtagttagatttgttgaagacaattacaaggacaaaaataagattttcatggctaagtacttttgtgtgaggctgcatgctatgtttggagttgcactggctttaggactagtgctggctaggaatacaaaatttacatcatggccaatattgagttgaagattggcttgtcgaaagaggaagtaatgtagtgtactaaggggattgctcaagaggaccaaggatgcaagtctgcatggtgcaacagccattaagatttcggtcatgagcaatttttctgcagggggttttgaatcagttctcattttcttcccatttccgtggccaaataagattgaaagaaactgcatgacactgataccaatcaagagttgtgtgcagcaagcttacctcatcaatctcaggtcaggagatggttccactatctaggcacctcgttttaacattctccaataaaccttagttgatgcaacatttgctgcaaagaattttttgtgaaatcagaccacatgttgattcttttatttttgccaagaatctttgcaaattacagtggaaattggatttacaacatttggtgtaagttcttgaatgaaaatatatggcagctagccttggaaaggagttaaagagcaaaatgcttttatctttagtaattaatgtaaatttcaaaataaaaattctc

SEQ ID NO: 11645 - DNA, 1777 bp, Glycine max
  Clone ID: 701108968_FLI
ctaagctcactctttctaagtttcttctatcatctctccaccatggttctctccaaaaccgcctccgaatccgacgtctctgtccactcaaccttcgcttctcgctatgtcagaacttcgcttcccaggttcaagatggcggaggagtcgataccgaaggaggcagcataccagatcataaacgacgagttgatgttggatgggaacccaaggttgaatttggcatcatttgtgacgacttggatggagccagagtgtgataaactcatcatggctgccattaataagaactatgttgacatggacgagtaccctgtcaccactgagctacagaatcgatgtgttaacatgatagctcatcttttcaatgcaccactagaagagactgaggcagcagttggtgttggcacggttggctcatcagaggccattatgttggctggattggcattcaaaagaaagtggcaaaacagaaggaaacaagagggaaagccttatgacaaacccaacattgtcactggagccaacgttcaggtttgctgggagaaatttgcaaggtactttgaggtggagttaaaggaggtgaagctccgtgatgattattatgtaatggaccctgaaaaggccgtggaattggtggatgagaacactatttgtgttgctgctatccttggttccacactaaatggagagtttgaagatgtcaaacgcttaaatgatctcctaattgaaaagaacaaaataactgggtgggacactcctattcatgttgatgcagccagcggtgggttcatagccccatttatttacccagagcttgagtgggacttccggttacaactagtgaagagcatcaatgttagtgggcacaagtatggtttggtctatgctggaatcggttgggttatctggagaagcaagcaggacttgcctgaggaactcatctttcacatcaactatcttggggctgatcaacccaccttcacccttaacttctccaaaggttctagccaagtcattgctcaatactaccaactgattcgccttggttttgagggatatagaaacgtgatggaaaactgcagggacaacatgctggtgctgaaagagggactcgagaaaacagggcgattttcaattgtgtccaaagacaatggtgtgcctttggtggctttcacactgaaagaccacacccactttgacgaattccaaatctcagactttttaaggcgctttgggtggatagtgccagcatacaccatgcccccagatgctcaacatgtcacagtgcttcgtgttgtcatcagggaggacttctcaaggaccctcgcggagcgtctcgtgtccgatgtggagaaggtgctgcatgagcttgattcacttcctgcaagggtcatcagcagcaccactgtgacactcagtgcagaagaaaatggcaaggtagtggttgctaagaagaatcctatggagactcagagggaaatcactgccatttggaagaagtttgtgttggagaggaagaagaacaatgacaagatgaatggtgtttgttagtgttagcttcaagggggtgttgtgcctatgcctctgccttattgtacttctttattatatatataatttgggcagtaagtacttttgattgagtcaagctatttatctgtttcagttgtttattgatgagaggcaaatattaaattgtgttttcgtttgtacaagtatgattcactgtattttgactattttctctgaatcatgaattatatttatctcccct

SEQ ID NO: 11646 - DNA, 922 bp, Glycine max
  Clone ID: 701109042_FLI
agaagatgattatccatcttcaagcacttttagggaacagatgggctgcaatagctgcttacctaccacaaagaacagataatgacataaaaaactattggaacacatatttgaaaaagaagctgaacaaaaaattggaagcaggttctgatcaaggaagcttgttgggaggaggacataataatattgggttttcatcagtttctcaaccaatgtctagaggccagtgggaaagaaggcttcaaacagatattcacatggccaaaaaagcacttagtgaagcactctcaccaaacaaggcatcatcatcatcatcaaccttgttagctgaatcaaattcaaacctctccaatgaaaatagtaccttctataatagtaacactaataaaccaacaacaacacaatctatgtgctatgcttcaagtgctgacaacatagctcgtttgttgaaagggtggatgaaaaacacaccaaaatcagcctcatgtgctgcctcggctgtgactcaaaattcctgttcttctagtgaaggaattacaacaacaaagggaagcacaacaagcactagtactgttgaattgtctgagacttttgagtccttgtttggttatgagtctttcgataattactcttcaaattctgagttctcaccatctctttctcctgaggctactcttttccaagatgagggcaagccagatataactacaggattaatagacatgcctttctctttgcttgagaaatggcttctagatgttgatgctggtagtcaagagaaacttggcttctagattattagttcaatttgatatgttttttcttagttacaggagagtaagttaaatctctctctcactttggccctcaacccttcttttggttctagaagtgtatattccaatccaatgttaacattatt

SEQ ID NO: 11647 - DNA, 1339 bp, Glycine max
  Clone ID: 701109085_FLI
cccagtgaagcgcagtggcagtgaagcggaggtggcggagaagggaggcagagaggttttggcaatttctctgttctactggtaagcgaaaatgaattattcagtgcgacgagtgttgccaatgtcaagggttgttcttcggtcctacgccactgtcactgcgaaacccaacgatattccatttcagcccaaacttgctaactccgttaacctcatcggtcatgtccagtccccgattcagttccatgtctctcccaacgatggctacgtctgggcctccaccgttatcacgcgtcaagactcctctgacctctctttctcgattccggttatatttgagggtgatctcgctcatactgccaaatttcatctcaatctaaatgattgcatccacattgctggaaaactcaccactgattcaccccaattggaacacctccacccccaatctaatattcaggttatggtacaaaccctcaattttgttcaacgatatccccaacccaacaccaccacatcaattgatttgaaacctcaacctcaacctcaaccagaacactccatacccagtgcaaagaaaaacccggattcttcttcaccgagtccctggagagaccttctagataatcccatgcagtggcgtgatttccgtgaaagcaaacgcaatggattggtaaaaccaaagcaccctgatttcaaacgcaaggatggctattctctctggcttggcaaggatgaaaagtgggttttgcctaaattggaagaacttcaatttgatgttccaactgctatatccaaaaaagtacacatgtctcaggtgatggtggtgagtcctggaatgatttggtgcaaaactatgctaactggtgggataatagattaaataagaggaatgcaaaagctcccgatttcaagcacaaagaaaccggtaaagggttgtggcttgattcttcatcagagtgggtgttagaaaaattgccgccacctctgaagcctaaacaaagtgtagatactgaaaggacactggtttcataagcaatggacagtgaagcagaaaatggagtcattctctgtgttacacttccatgtaattaacttatgccttcccaagttctgtttttgtgatattttttttttataaaactaagcatttcaaccattcggctactaagcatttgacttgcagtctttacctaggcggatatagatatattagctagctgcttctgatgtgaaaatgcatttatcatcagacagaatttctgctacttctgtacatccttattccgcatatgaggggaagtgtttttgctcaattgatggtggatttcatgttcct

SEQ ID NO: 11648 - DNA, 600 bp, Glycine max
  Clone ID: 701109104_FLI
actgatgtgtcctcaaccgacacaagtggctcatcacacacagagaggattcccttgtcctcccaaccctcaaaggcaaactcaatggcattgcactccgtgtgccaacaccgaacgtctcagtggtggacctcgtcgttcaggtctcaaagaagacctttgcagaagaagtgaatgcagcattcagagagagtgcagacaatgagctcaagggaatcctctctgtgtgtgatgagccacttgtgtccgttgacttcaggtgcactgatgtgtcctcaaccgttgactcctcgttgaccatggtcatgggagatgacatggtgaaggtcattgcttggtatgacaatgaatggggctactcccaaagggttgtggatttggctgacattgttgccaacaaatggaagtgagagccaaacaaattctcattggtaattaaattattatgtatgtaccatgccattgtaattttgtatgcttactactactaccactacaacacttgttgcttcatttttcttttaaacttgtactgagaaacagaaccatcaattttctctgccttctcattgtgcaataaaattcttaccttgaaatctg

SEQ ID NO: 11649 - DNA, 973 bp, Glycine max
  Clone ID: 701109138_FLI
gaacagagagagagagagagagagataatagtagaaggtcggagatagtaaagagagaaatccgaatagaaaaagaagctagctagggtttcggcgcgaagaagaatggggaagaagaaggtggagataaagcgaatcgagaacaaaagcactcggcagataacattctccaagaggcgcaatggattgatgaagaaagctcgcgagctatccattctctgcgatgcgaaggtggcgctgctcatcttctccagcaccggaaagctctacgagctctgcaacggtgacagtttggccgaggtcgtgcagcaatattgggatcatttaggagcgagcggtactgacacaaagtcgcaggaactatgctttgaaattgcagatatctggtctggttcagcgttttctcaaatgatcaaaaggcacttcggtgtttctgaacttgagcatctgagtgtgtctgaccttatggaactagagaaactgactcatgctgctctttcgcgaatcagatcagcaaagatgcgattgatgatggaatctgtagtgaatcttaagaaaaagattgaggcactagaaaaaactaatgacgtcaataacgtggtgacacggtctattgactgtgatcaaacagatggggtgacgcataatctgttcccaggtctctaatggagctgaaagccactactctgggtctaacttgcacactcaacccttgaatttccaagtgtgtgtttaatacatgcatagggaaccatgccatggtctagctacttgccttttattatttctattttggttgaaacatggagcatcttgaagataatgtagcctggggaactttgcttcagctactactttgtgcctaattaatttataataagtgacattagatgccatatggtattataagtctcataatgctaaaatttgggaacggttcacggtgaaagtaatggaaacaatcatgtggagg

SEQ ID NO: 11650 - DNA, 625 bp, Glycine max
  Clone ID: 701109691_FLI
aacgcgatctctctctattctttgaaaccaaagttcaaactctgtcttccctgggttcgatttcgaaatcaacgacgatgagttccacagaggcagcagccacagagaagaaaggtggaagagggaaaccgaagacttcaaagtccgtttcccgttcctccaaagctggccttcagtttcccgtcggccgtgtcgctcgctacctcaaggccggtcgctacgcccagcgcgttggctccggttcccctgtttatctctccgcggttctcgaatacctcgctgccgaggttttggagcttgcggggaacgctgcgagggacaacaagaagacgaggatcgttccgaggcacattcaactggcggttaggaacgacgaggagttgagcaagctgatgggatctgtgaccattgccaacggtggtgttctgcctaacattcaccagaatttgttgcccaagaaggtcgctggcaaggggaagaccgagattggatctgctagtcaggagttttagatttaagactcttgtgttcgtatgtagttggttggcttatatagtaagattaggattgacattggatgatgtatagtcctttaacatttgaaaataattagttgttttctaac

SEQ ID NO: 11651 - DNA, 1292 bp, Glycine max
  Clone ID: 701109845_FLI
cttttaatttcctagatctcccaaacaaattgtagcataagtcccatggccaaagagactagtgttgtttatctatatcccagcaaatcacaagtttggggtgagaattttgatcataaaaaacttgtaataacaacactagctgctaatggaaagaaggaggagagtaatggagcacctaatgacacatatcctgcgtttcccgggtggtatgctgatgtttcctggccaggagaagcacacacatataaaatagaaaagattctattccacgggaaatcagaattccaagagcttcttgtatttgagtcttctagacaaggcaaggttgcaattcttgatgggcatatccagctgacagaaaacgatgaatttgcttaccaagagatgctcactcaccttgcactctgttccattccagatccaaagaaggtgctgcttattggagggggagatggtggaattcttagggaaatatcacgccattcttctgttgagcatattgatatatgcgaactagaccaaatggtcattgatgtttattcggagtttttcccggatatagctgttggttacgaggatccccgagtgcatgttcatatcagcgatggagttgcgtttatcaattctgttcctgagggcacttacgatgtcattatatcggatgcttttccagcaatggggcatagtgctgatgttcttgctgatgaatgcttcttagaatcagtagcaaaggctcttcgacccggaggagtgttctctgctccagcagacagcctgtggcataagaactttgtggttgcagacaccatagcaaattgcaagaagatattcaaaggctccgttaactatgcttggaccacggttcctacatatgcaagtggggtgattggattcatgctttgctctacggagggtccaccagtgaacttcaaacatccaataaataaattgaatccagagaaaaatggggtggcaaagggacctactaagttttataacccagagatccatgctgctgcattctgtctgccttcttttgtggacaaggttgattgatccaacagacattcataaatgactcggtagcattaaggaattgctgttagttaccctttgtttttgctgtgtcgttctgcatatttatgatattatccttttattatgttatttagttttattttatattccctaaaatattagatgttacacacgtgtatgattatcatctaatgtaaggtttgcacctattgaggtatcaatgaaatgaaatctgaaatttagttttttct

SEQ ID NO: 11652 - DNA, 1733 bp, Glycine max
  Clone ID: 701109853_FLI
gaagaaggaggcaatggctcgcctaagctccgatcaggtcttgaaggacaacaatgccgccgacccaacttccgttaccactcttcacctcactcacaaagctctttccgacataacgtgtttggccaatttcgtaaacttggaaaagcttgacctcaagctcaacaatctcacttctcttgagggattgagatcatgtgttaatttaaagtggctatccgttgtagaaaacaaattagaaagcttggaaggaattcaaggacttacgaagctcactgtgctaaatgcaggtaaaaataagcttaaatctattgatcaggtcatgtcagttgttagtctccgagcactgattttgaatgaaaatgagatttcctctatttgcaaacttgatcagctgaaagacttgaacactcttgttctatccaaaaatcctatacgtaaaattggtgaggctctgatgaaggtgaaatctatcacaaagctttcgctctcatattgtgagcttcagggtattggcacttcactcaagtcttgtgtcgaattgagtgagctccgccttgctcacaatgagattaagtctctcccagcagaattaaagcttaattcaaagctccggagtttagatttggggaacaatgtgatcacgaggtggtcagaactaaaggtcctcgaattgctcacgaatcttagaaatcttaatctacaaggaaatcctgctgccacagtcaataaagttatgagaaagattaagaaagcactgtcaaaattacagatattcaatgctagaccagttgataaagataccgagaataagaaaggtagcatagttgatggaactcgtgatttttcagtagatcaaaatgagaatgatcatattgaagctgctgatgatcttgactcggggagaaaatcaagtaagaaaaggaagagaactgttgatgcatccaagaaggaagacagggttgttgatgaggaaaataaaggtcataaaaaggataaggcagatagaaaaaaagagagtcttataactaatgtcgatcctggcatggagaataaatcaactaagaaaaaggcaaaaaaggatgacaagcccttggacaagggatttgctcttgaggagaatgtttccaaggttgagaagaaactaaagaagcaacataagaatgacgaacaaagtgagcttgatgttattgatgatgcagaagcttcatttgcggagctttttaaaatcaatgatgcagaaaatctgaatcttgctgatgaaatgaaagcacaggacaaagtgccgaaggatgtgatgaaattggcaggtgacccggtgacctcatttgccaaacataagaatgctaaaatacagaatatggaatctctatcagctccagtagcagaaattggaatgggaggaccatcaacatggggtgatgagttatgatgatatcttgacatatgctgatgcatcaaaccttgtgtgcaaaggagttgaggatcaattttgagtctgattctgctgtcagatttcgcattgcatttgtcggatggttgagacaagctcctcggctattttctacttctgaattccagggtatttttgctatgctatataagctggtggttatgttgttaatttgtgaattgcatgtcagatttaggaacttccactcaaactttctttttacccgtttttagtgagtttattgcaatcagttctaataattttctacatctttgccatt

SEQ ID NO: 11653 - DNA, 2349 bp, Glycine max
  Clone ID: 701110007_FLI
aacatgttaagtatagaaatgttaatgtcttgtctctaacacacactcatgtgcccctctcgaagcatgtcgtttttggtgattatcaagttgaggacgaggttgatgcagcagactgttacaattacaaaaacatggattatgacaaatgggggctcaaaaaaattcctcgagagttgggacttgtctgatgtgttattcatcgttggtaaagaggaaaaacccgttcccgctcacaaggcaattttagctgcatctggaaagttttctctgtgctcctcctcctttgtcatcaacctacccactgtatcttatctacttttccgtgcactgcttcactacatctatgttggctggacccagattccccaggaacaactcggttctttgagggatttaagtctacagtttgaagtgacaccactggtgaagcagtgtgaagagactatggaacggtttaagctagataagaagttgtttgacacgggcaagaatgtggagttaacatatccatctatccgacctcattgttcaactttgccctcacttcctgtcagcactcagcaactgaaacaattgaaattaacaggccagtacagtgatgtaaacatctacattgagggttatgggctcattgcacgagctcataaaattgttcttagcttatggagtatcccctttgctcggatgttcacaaatggaatgagtgaaagcatgtcctcggaggttactttaagggatgtcccaccggaagctttcaaggctatgcttaactttttatatgatgggcaattgaatgacaaagttatagattctggtgctttgttgctccaactccttctattagctgatcaatttggagtgacttttcttcaacaagaatgctgcaaaatgcttttagaatgtctctcagagggatgaagttcttctattgggtgaaggactcagtatgtccactcctccaagtggtttcttcaatgccatcatgtagacttattaaagaatcattgcagaggagaatttccatgaactttgactattatatcagtgcgagtactgactttgtgttattagatgagacaactttaatcaatatcattaagcatccagatctgacagtaacgtctgaagagaaagtccttaatgcaattctaatgtttggcatgaatgcaaaacagttgtttgggtgggaagtggtggatcagttaatggaaaattcaaaaccagaactcctttttggtgagaggcttcagttaatctatgacttgttgccatttgtgcgatttccactactacaatattccttacttgagaagttgcagcatagcagcattggccggcatattcctgttttccaaaatcttgttaacgaggctatcaattttgttaaatgtgggctggcagagtcagaaaatgaagagaatgttagattccaacatagacggtccagttacagggaactccagtacatctgtgatggggatgaccatggagttctgtactttgctggaacatcctatggtgaacacccgtgggttaatcctcttttggcagagccaaggaaaattaccatcacagctagcagcccccactcaagatacactgatcccaaggttttggtctcaagaacctaccagggaacatgttttgctgggcctcgattggaaaatggacagaactgtagctggtggatggtggatcttggccaagatcatcaggtacgcaatatgccgattgtttgtgtttccaagtattttatattagtactcgcttttgatcatgcactttgagcatgtggatattcgaagattttatttccaccttccaacctcatttatcaaatttatagaagtataattgcacctcaatatgagtagatcaacttcttatttgatggaatcaacattctgattaaaaaaaaggaaaatcgatgaatgcagcttatgtgcaactactataccctgaggcaggacggttctaaggccttcccgagatgttggaatgttcagggctcacttgacggaaagagctggacaaacttgagagtccatgaaaatgatcggagtatatgtaaacctggccagtttgcctcttggcccataattggccccaacgctctgcttcccttcaggtatttccgggttgtgctcacaggaaccaccaccgatgccaccaatccctggaatttctgcatttgttacttggaattgtatggctacttcctttaaaagcctagccatgccaataccataccttcctaaaatacaattccagctccttcatgtacattatggtttgcttattgactaaattatttgaatcaagtcatggataaagggttgtggttct

SEQ ID NO: 11654 - DNA, 1447 bp, Glycine max
  Clone ID: 701110131_FLI
ttcaaacttgaagcattgcattctgctatttaattccactacgtacacgcacattctcctcaaagacaacaatggcaccaacagccaagactctgacttacctggcccaggagaaaaccctagaatcgagcttcgttcgggacgaggaggagcgtcccaaggttgcctacaacgaattcagcgacgagatcccagtgatttctcttgccggaatcgacgaggtggatggacgcagaagagagatttgtgagaagatcgtggaggcttgcgagaattgggggtatattccaggttgttgatcacggtgtggatcaacaactcgtggccgagatgacccgtctcgccaaagagttctttgctttgccaccggacgagaagcttcgttttgatatgtccggcgccaaaaagggtggattcattgtctccagccatctccaaggggaatcggtgcaggactggagagaaatagtgacatacttttcgtacccaaaaagagagagggactattcaaggtggccagacacgccagaagggtggagatcggtgactgaggaatacagcgacaaagtaatgggtctagcttgcaagctcatggaggtgttgtccgaagcaatggggttagagaaagagggtttaagcaaagcatgtgttgacatggaccagaaggtggtggttaattactaccccaaatgccctcaacctgacctcactcttggcctgaagcgccacacggatccgggcactatcaccttgctgcttcaggaccaagtgggtggacttcaagccaccagggacaatggcaaaacatggatcaccgttcagcctgtggaggctgccttcgtcgtcaatcttggagatcatgctcattatctgagcaatggaaggttcaagaatgctgatcaccaagcggtggtgaactcaaaccatagccgtttgtccatagccacttttcaaaacccagcaccaaatgcaactgtttaccctctgaagataagagaaggagagaagcctgtgatggaggaaccaatcacttttgctgaaatgtacaggaggaagatgagcaaggacattgagattgcaaggatgaagaagctggctaaggaaaagcatttgcaggaccttgagaatgaaaagcatttgcaagaacttgatcagaaggcaaaacttgaggccaagcctttgaaggagattcttgcttaattaataataattacatatgtatcatttgcatgcccccttggtgtttttagtattttttaagggccatgaattaataatagtccttacctttgtgcttttgtacgtcttatgatttatcctttgtggggatatcatgtgttgtgttcagttgcctatgtcttattagctagctggctcatctatgtataccttatatttgcctctattataaatgaaaataagtggcactgtctttattattggctgc

SEQ ID NO: 11655 - DNA, 648 bp, Glycine max
  Clone ID: 701117446_FLI
tgttgatgaggctgctggtaaactgagagctaaaggaatcgaagtattggcggttgtttgccacgtttcaaatgcccaacaaaggaaaaatttgatagacaaaactttacaggatgcagctcctcacttgaagaagggttcttctgttgttctcattgcctcacttgttgcttataatccaccacctactatggctatgtatggagtgaccaaaacagcagttcttggacttaccaaagctatggctagtgaaatgggccctaatactcgggtgaattgtgttgttcctgggattgtgccaactcattttgttgcactttatacctcaaatgatgctacaagagaggaacttgaaagaaaggcattgcttggaaggcttggtacaactgaagacatggctgctgcgacagcgtttttggcgtctgatgatgcttcttacataacaggagaaaatctagtggtttctgggggaatgccttctaggttgtagcttccagtttcttcttctggtggttgaatggtgggcctaccccccaaaacgttttgtttcctgactcatctgatgccattcaatatagagtggtgcttcatgtacctggtactattggtaaataaaataaaaatgaaggaaaataaaatacgaagaag

SEQ ID NO: 11656 - DNA, 371 bp, Glycine max
  Clone ID: 701117492_FLI
ataccttaggtcttccgaattcgaagttaatttgcaagatggctaaggaaaaggctcagatcaacattgtggtggttggtcatgtggaccctgaggaggcaaccaccattaacgagctgaagaagcctgttgtggagaaagaagctccagggcatgccatatgagggcatgcacgtacggcctcggaggggaaccagaaaattatgttaacaaaataatctggaaccctaatgtatcagtgtcatcatcagtgtgtagtttaagctagctttgctatggttacgttctttgagatgagagtcttgatgaacagtaccattctgatgtattgctttccttgaaagttaatgcatgcttcttatcttctgtct

SEQ ID NO: 11657 - DNA, 950 bp, Glycine max
  Clone ID: 701117521_FLI
gaaaacccaaaataaccgagaaaagaaaattagatagagagaagaagaaagcgtatctggaattttcgtttcgttggtgtgtcgtgtgcgtgtggaggttcttttctttgagactttccttcaaattctagattgcttccctttcttttctttcccttataaccaccaacctctccctttcccccttttcatttcttcctcgattttccatttccataaccttagtcatcctcttctttcatctttctccctaacggtatcgagggaaaaatatggcggaagaacacagatgccaggcaccgcgcttctgcgccaacaattgcggtttctttggcagccctgccacgcagaatatgtgctccaagtgctaccgcgatttccagctcaaggagcagcaatcttccaacgccaagatggttctcaatcagtcgctggttccttcaccgccaccggcggtgatttctcagccgtcgtcttcttcttcggccgcggtagatccgtcatcggcggtggttgatgacgcgccacgcgagtcggaggaggttaaggcgccgcagcagaaccggtgtatgacgtgcaggcggcgcgtggggctcacagggttcaagtgtcggtgcgggatgatgctgtgcgggacccaccgttacccggagcagcacgcgtgcgagttcgacttcaaggggatggggagagagcagatcgcgaaggcgaatccggtggtgaagggcgagaagctcgacaagatctgaaacgaatgaacgaagggtgttatggtaatttcgtgtttatcaagttggtggtgatggataacggatgcgaaacgcgggtcggatcattgacccgtaaaaggcggtgggtgagtgggtgagtttggtgggtcattgttatgtggttgcgttgtcattgtaaattaaaaaatttgaaaaacatttcaattgtcattcaccttc

SEQ ID NO: 11658 - DNA, 375 bp, Glycine max
  Clone ID: 701117609_FLI
gagaaagagaaacgattgtctaatgtgaaggcttgggaagaaagtgaaaaagaaagcagaatatggtgaaaaaaatgaaaaacaaaatagccttagttcacaagcaagcagaggagaagagagcaatggttgaagccaagcgtggtgaagaaattctcaaggcagaggaaatagctgcaaaacaccgtgcaactggaacctctccaaagaaggcctttggatgcttttaaatttttattcctttttttgttgttgtgcttttgtgcctgatgtcatagcaataatgaaatttttgtctataatattttcatgtttgttttttaaatgttgtttatgtgtgtacgaaatggaaagggggacactatgaagtttgtg

SEQ ID NO: 11659 - DNA, 613 bp, Glycine max
  Clone ID: 701117612_FLI
cttcgtcgttatcttcttcttttgttgtttgtgtgtttgttttttctctcacctgaaaatgtcttgctgcggtggtaactgtggttgcggaagcgcctgcaagtgcggcaacggctgcggaggctgcaagatgtacccagacttgagctacaccgagtcaaccaccaccgagaccttggtcatgggagtggcaccagttaaggctcaattcgagagtgctgaaatgggtgttcccgctgagaacgatggctgcaaatgtggagctaactgcacctgcaacccctgcacttgcaagtgaggtgttggagagctaaagcttcaagcagagatggcccttagaaataatgataaaaactatatgtagtttcaaaacttcaaaattatgtagtatgtattatgttgcactctggtgttttgtgtctaaacaaacacccttagaataaagtggtcatttcttgcccttgagcaagttcaagtgttttggacttgtgatgggtgtgttaaggtcatggttgccttttatatatatatatatataaatgtttggtaattggtcgcttctgtataaagttcggctagttaatctgaattatgaatctctgcttataatatt

SEQ ID NO: 11660 - DNA, 1792 bp, Glycine max
  Clone ID: 701117634_FLI
gattgccttcaaatcacacactctcttcaatttctagggttttgctattgctttgcctccgttccccctttctcacaaaaacaacgccttttctcttctccttcgtatctattctttgcgtttggtttttggttgattgaaggcattcacagcgtaattcgttgctgcattttaatcgatttatctaaccaggactgaatgacctaatggagtctaaaggtgggaaaaagaagtctagtagtagtagtagtaaatcaattttttacgaagctcccctcggatacagcattgaagacgttagaccaaacggtggaatcaagaaattcagatctgctgcttactctaactgttctcgcaaaccatcctgatacacatccggattgatagttcgttgcatgcaaccatagttttattaggattttttcttctttgttttcaattaggtttttttgttgctctccttcaaactccatctttccaaatcctctctttgcgattgtgttttgatctgcttcctactgcgatagtttctctactgttacatggccatggcggtttccgcaattggttttgaaggtttcgagaaaaggttggaaatatcctttttccagccgggactttttgctgaccctgaaggaaggggtctaagggctcttacaaaatcccagttgggtgagattctaacaccagctgcttgcaccattgtttcttcgctcaaaaacgataatgtcgactcctatgttctatctgagtccagcctctttgtttatgcctacaagatcatcatcaaaacctgtggtactactaagctattgcttgcaatcccacccatattgaagttcgctgaaatgctttcccttaatgttaagtctgtgaattacaccaggggaagtttcattttccccagtgctcagccatatccccatcgcaacttttctgaggaagttgctattcttgatggctactttggcaaacttggtgcaggaagcaatgcttatattttgggtggccaagacaaagcacagaactggcatgtctactctgcttctgcagattctgtaactcaatgtgacaatgtttacactcttgagatgtgcatgactggcctggatagagagaaagcacaggttttctacaaagaacaatctgcttcagctgccatgatgactgttaattccggcattagaaaaattcttccagattccgagatttgtgactttgactttgaaccatgtggttattcaatgaactctgttgaaggcgctgctgtttctacgattcatgttaccccagaagatggtttcagttatgcaagcttcgaaactgttggttatgacttcaaagcggtgaatctgaacgaaatggttcagagggtattggcatgtttcctcccaactgagttttctgttgcagttcatgtggatggtgcaagcaagtcgtttgagcagacctgctttctggatgttaagggatactgtcgtgaagagaggagccacgaagggcttggaatgggtggttctgttgtctaccaaaaattcgggaagactagtgactgtggttcacctagatcaactctaaagtgctggaatgaggaagatgaggaagagtagtttccttaagtgtctttattattctgtccttgtgaaaataagtctggttttccagatacgttattgtttttctttgttgtcttttttagcttctgttagagaccatttgggcatttagacctttattgtttctattaccatttgaacatcgaatggattaataaatcactttgtttgcgtgc

SEQ ID NO: 11661 - DNA, 1482 bp, Glycine max
  Clone ID: 701117761_FLI
cttctctcttcaaccctagcttagggtttatgctctaaaaccctcccttttcaggtttattgggagagaaaaatgctcgtattgtttgaaacacccgcgggttttgccctttttaaagtgctggatgaaggcaagctttctaaagttgaggacttgtggaagaacttttccagtgcagatactgctagacaggtggtcaagttgaaagcattttctaaatttgagaacacttcagaagctctagaggcagctactttacttattgatggaaaagctagcaagggtctccgcaagttcctgcgtgttcattgtgaaaatgaaacactaggtgtggcagattcaaagcttgggaatgtgatcaaggagaaattgaaaatcgactgtattcacaacaatgcagttatggagttgatgagaggtgttagaaatcagttaactgaactcatatctggtctagctgttcaagacatggccccaatgagtttgggtttatctcacagcttatccagatacaaattgaagtttagtgcagagaaggtggataccatgattgtccaggccattggtttactagatgatcttgataaagagttgaatacctatgccatgagggttcgagaatggtatggttggcattttcctgagcttactaaaataatacaggataacatcctatatgccagggcagtcaagttgatgggtgatcgtgttaatgcagctagcctggatttctctgagattttgccagaggaagttgaggcagagctgaaggaggcatctgtgatatctatgggaactgaaattggtgagcttgatttggcaaatattcgagaactctgtgaccaggttttgtctctctcggaatacagggcgcaactctatgattatctgaagagtagaatgaacaccattgcacccaatttgactgcaatggttggggagcttgttggtgctcgcctcattgcccatggtggtagcttattaaatcttgcaaagcagcctggtagtactgtgcaaattcttggtgctgagaaggctctctttagggcactgaagactaagcatgctactcccaagtatggtcttatataccatgcttccttgattggtcaggcagctccaaagttcaaggggaaaatttctcggtcacttgctgcaaagacggcattagctattaggtgtgatgctcttggagatggccaagataacaccatgggattggagaacagagctaagcttgaagcacgattgaggaaccttgaaggcaaagagttgggtcgttttgctggttctgccaagggaaagcccaagatagaagcatatgacaaggaccgaaagaaaggagctggaggactgataaccccagccaagacatataatccttcagccgattcagttatcgggcaaatggttgattctgctattgatgaagatgcacaagagccttctgttgctgataaaaagaaagaaaagaaggacaag

SEQ ID NO: 11662 - DNA, 1468 bp, Glycine max
  Clone ID: 701117952_FLI
ggaacaacagctacatttgttttggttgatggatggactgtcactgttgcatctgttggggattcccgctgcatatcagatactcagggaggtgtagtttctctcttgacagttgatcacagactggaagagaatgcagaagagagggagcgtgttactgccagcggtggtgaagtaggaagactcaatgtatttggaggcaatgaggttgggcctcttcgctgctggccaggtggattgtgcctatccagatcaataggcgacacggatgtgggagaatttattgtgccaataccacatgtaaagcaagtgaagctttccaatgttggtggaaggcttattatagcttctgatggtatttgggatgctttatcatccgatatggctgctaagtcttgtcgaggtctacctgcagagcttgctgcaaaactagtggttaaggaagctctaaggtcaagaggccttaaggatgatacaacctgccttgttgtagatattattccttcggacctccctgtattaccaccgattccaagaaagaaacataatatgctaacttcgcttctattttttggaaagaaatctgagaactctgtgaacaaagctaccaataagctttctgcagttggtgttgtggaggagttatttgaagagggttctgcaatgcttaccgaaaggtgagttttgagcctttacctgcctgcatgctatgtcttgaaatgtaatagcaacttaattgaacaagtgactggaattttattttttatttttgcatttgggtgtatatgcttgggaaattttttaaaattctgtattttcttaaaatgcaggctaggtaaggattttccgcttaataaaaattctggtattttccgttgtgcggtttgccaagtggaccaaccccctggtgatgatggtttatcagtgaactctgggccttttttctctccagcatctagtccattcctctgcacaaactgtcagaagaagaaagatgccatggaaggaaaaaggcctagcagagcctccattacagcatagtaattatctagtattacagtagtaacatagtaaatattagtataattttaccctggcagtgtgagcatgcttgattttacattttcggtggttattgtcatagacgtgtaagaaatgaggttgagaattgaggtaggcttagtagctgttttggaggttgctgcaagtttgactctggcttgtgctcagctgtaggactggctgacagaacaaacaagaaagttgtgtctggtagataaaaattctagtggaatctgctaacggcttgtatttgtaagtaaactgaagcttttgtggctgcctctctatcgagagtgcttcaatgctacagcccaaatgcatctgtatcttctaaacttgtgttgttatacaaatacaactacatgtctcgaatgtccctccgaattcgatgagtaagattcttgtg

SEQ ID NO: 11663 - DNA, 1395 bp, Glycine max
  Clone ID: 701117969_FLI
ctctcaagtccaacctacccctttttcttctcccaccaacttcaccgtcttcttcctcgatcatgtctcacttcaagggcaagtaccatgatgagcttattgtcaatgctgcttacattggcactcctggaaagggtattcttgctgctgatgagtcaacagggacaattggcaagcgtttggccagcatcagtgtagagaatgttgaatccaacaggcgtgctcttagggagctgcttttcaccgctcccggtgctcttaaatatctcagtggtgtcatcctctttgaggaaactctctaccagagcacagctgcaggcaagccctttgtggaagtcttgaaggaggctggtgttcttcctggcatcaaggttgacaagggcacagttgagcttgctggcactaatggagaaaccaccactcagggtctagatggccttggtcagcgttgcgccaagtactatgaagccggtgcacgttttgccaagtggcgtgctgtgctgaagattggtcccaacgagccatctgagctggctatccatgagaatgcctatggcttggccagatacgctgtcatatgccaggagaatggcctggttcccattgttgagcctgagatccttgttgatggatctcatgacattcacaagtgtgctgccgtcaccgagcgtgtccttgcagcatgctacaaggctttgaatgatcaccacgtccttcttgagggtaccctattgaagccaaacatggtcacccccggatccaattctgctaaggtttcccctcaggtggttgcggagcacactgttagagcccttcagagaaccgtgcctgctgcagttcctgctatcgttttcttgtctggtgggcagagtgaggaggaggcatccgttaacctcaatgccattaaccaggtcaatggaaagaagccatggtcactctctttctcctttggaagggcacttcaacagagcacccttaaggcatggagtggaaaagaggagaatgtgaagaaggctcaggaagcccttttggtaagagccaaggctaactcagaggcaactctgggaacctacaagggtaactcaaagcttgctgatggtgcctcagagagcctccatgttgaggactacaagtactgatcaatctaagtgcgggtaggaatcggtattttatgggtacaaccgaattttcttgttaatgagtattgtgcttcgactcttcccagaataataatcgtttggaattttgctttttgtttttcctagtgttccttcatatcaattttagtaattcggtgtattggtcaaacctgtgcaaacaggggaggggatgtaactttgttttcttgatagacaccaccaccttgctgttaacgaggctttgtgtttattttgc

SEQ ID NO: 11664 - DNA, 956 bp, Glycine max
  Clone ID: 701118076_FLI
aattgcatcatcagtttctaaaatttttgcatccacattgacatatcctcacgaggttgtacgttccagattgcaagaacaagggcatcattcggagaaacggtactctggtgtgattgattgtattagaaaggtttttcaacaagaaggtgtacagggtttttaccgaggttgtgccaccaaccttctgaggacaacaccagctgctgtgatcacattcaccagctttgaaatgatacaccgatttcttgtttccctttttccttctgatccacggcctcatattttgtgacgattgatcttggtggtcatctgtcttctgtagcagttagattccaaaaaaatatgttgtttgcaggttgtacgttccagattgcaagaacaagggcatcattcggagaaacggtactctggtgtgattgattgtattagaaaggtttttcaacaaggtgtacagggtttttaccgaggttgtgccaccaaccttctgaggacaacaccagctgctgtgatcacattcaccagctttgaaatgatacaccgatttcttgtttccctttttccttctgatccattttgtgacgattgatcttggtggtcatctgtcttctgtagcagttagattccaattcataagctagtccagctgagtaatccttctcttggcgatgcagatatcattctttgtgacttagttgtttatgtatggtagatccccattatattccaacctagcaacctcaactgagcctggtttccctggtcaaacttgtaaatttgagtgataacaacgatgaagatgataaagtgatatgagatgtcctttgcttgcttattttattttgaaactgctgaatcctgtaaaacatccagcacgatctggatttgctgtattgatgagaatcatgcaatcagcgaatctaaattgttatacgaagataagacagtttatattt

SEQ ID NO: 11665 - DNA, 1874 bp, Glycine max
  Clone ID: 701118081_FLI
agaacatgttggatgtgtatgtcaggattgaaggatactgcaacctcttgattgagagggtccatctcatcgagcaagagaggttggtttactcgtaattttgtttggtgaaaaattggttttcggttttgtttttaaaatgatgggtttggtcttcttgttacagagaatgtcctgaggaactgaaggaggcagcatcgggattactctatgcagcttcaaggtgtggagattttcccgagattcaagagattcgtgcaattttgacatcacggtttggcaaggagtttgctgctcgatctattgagttaaggaacaactgtggagtccatcctcaggtatgtatctgatatgagaatcaacaatctgttatgtctaatattgttgccttcccagtattttgttttgcctgttagactagttaaaaactaagatttatgtacaagctagaatttgtgcagagaatagataactgtcttatgataattttgataaatttttctgtggatactatggggtaactcttttttatctggttgtttatagatgacacagaaattgtcaacaaggatgccaagcctggaaagcagaatgaaggtactcaaagacattgcttctgagaatggtattgttctgcagcttgaagaaacttctgtttcggttgaggtataacacctaaggcagcaaaatttgcaatttcttgtttgtatttatatttgaaaagcaactacttatggcatctgatgtaaactgttcaggaacaatccagtgtagaaaagcaaaaccagcatgaatctgagaagaaagaagagaatgtaagcatgttgcctaatagagggaaagatgagaagttaactgattcctacaagggaaggaaaaagtacaaggacgtagctgatgcagcacaagcagcttttgagtcagcagaatatgctgcagctgctgcaagagcagcattggaactctcccgatctgaatcacatgatcctgatgatcattatagtccaagactccaaccaagaaaagtggaggatggacatgatgatgtgagacctcaactggaagaaaaggaaatcctcagtgaaactcaaagggaagatgagttagaaaagtcagaagacattataagttgcaattcaactgatgaggctttgaagggggctactgccttggtagatggtgaaattgaggctgatcctttggaagaggaagtggttttcgacaatagtgatgatgagactgataataaacagaatagaaatcaatctcctaagtggacatcttcagggtatggtgctggtatagtagtaaatacaacgcctcagttggatttgcagaagaggcctatttcagtgaggactagatgaatgcaaaattactgagtatgagtggggcatctattgaagttttgcttggttctttaaattttgtcttatggatttgccatcagaatgtcaatatgtttttcattatttaaatgattaattggattagttggatttaaaaatagagtcagggattcccactctttattgcaattacaacataaaagtaggcaccctctagacatggacataggaaacagattgatatttaatcaaacacagaaatatgactgcagaagaaaccttaataaacataagagaattctaagtcacaacttgatctacgatgggatgccatattgacattagattaaaccaactattaaccatcttatgttatttcgtagctcagattgtcaatttaaaacataatagtagacaagtttatcaaatggagattcaaatcatgaattgccaagctaacttttgaattatgaatcatttgtattgaatcataagattagagacaataaaaataacttcaaatct

SEQ ID NO: 11666 - DNA, 529 bp, Glycine max
  Clone ID: 701118146_FLI
ggttggagcagcttaactcattacaagataagaatggtgaagatgtatcaaatatcaatgttcaagcagaaaaaagcctggttaaagattacttggttgaccataatgcaagatctcagaaaagaattataccagttcccagcccagcatccattgaggatatgagggcaacgatcatagagaactcattaaaattgatccaaacagaaagcaaaatcacacgtctggcagcatctccaaatagaactcctttcgcagacgtgaattcagtcaatgacgactgtagttagaaagttagttcgagtatgagtctccacaaagctcatcacttgatgagcaacactctctctggcatgggtatgatgtaaaatccagagaattaggtattattagtaatatgtaccttacgtttttctacctagtgtaaaattaaccatatgaattttctagtagttgaggtgtgctttctgcacgcaaatatgtttccccatttctctagaatcctcaatgcacatgattcttctttctt

SEQ ID NO: 11667 - DNA, 1059 bp, Glycine max
  Clone ID: 701118503_FLI
ttttctgttttggttttttctttttgtatagataatagttacttttttttttctttcttttctgcagcttaatggcatgagactgtgaggaatatcttatgtgctattattgaatattgtatgcaaatgttcaaataaggtcatttcgttgcctgtctcatcttccttttgtaggcaagcgtggcagaaattgggtgctatgcctcctgaagatgcaatgcagaagtacattgatattgtgaccgagatctatcctacttggcttgatggttcatctttgaggaataaaagcggcgacagtggtggacatggttcagaggctaagggaccaatgggccccgtattcagcacttttgtttatgaagaggaatatggcagtgactcacaaatggaagccattcatggatttgccagggaaggagatatggctaatctgctcaagtgtattgaaaatggtgtttcaatgaatttaaaggacagtgagggccggacaccattacactgggctgtggatcgtggccaccttaatgtcacagagttgcttgttggcaagaatgctgatgtgaatgccaaggacaatgatggacaaactcccttgcattacgctgttacatgtgagagggaagccatagctgagtatttagtgaagcataatgcagacatatattcaaaagataatgatgggagttcaccacgtgacatctgtgagtcaaactggccatgcatgcagcatgtgggggaagaagtaaattgattgattgattgtttgcttgttgcagcttctggccaatacaaccttttagccaaatcccaagaggatgttcgtgtctatataacttgattttttttgtccttactcatgatggtgtatacacccttttcagtctagtgtacgcctatgcaccgcttaggtaatggttagttaattaggttgtattctgttctattattgtttcctctgctcagctctttaaatctggctctcatttcttatatatttcatggataaagatatacacggaaactagaaatagtaacagggaaagggaatcttaaacg

SEQ ID NO: 11668 - DNA, 1360 bp, Glycine max
  Clone ID: 701118532_FLI
gttttctgttaatgcaagtggacagttctgtggggttgcagagatggttggtacagttgactttagcaagaatatggacttttggcagcaagataaatggagtggaagctttcctgtgaagtggcacattataaaagatgtaccaaatccaaattttaggcacattatactggagaacaatgaaaataagccagtaactaatagcagagacgcacaagagataatgtatttgaaaggtttggaaatgctgaaaatattcaaaaatcatacattgaagacatctttgcttgatgactttatgtactatgaaaaccgtcaaaagatcatgcaggatgagaaagccaagtttctagtcaagagttttgatagtccaatatttgtaccagtattagaagctccccaaaagttgaatttttttgttgatgtaccaacagacaattatgagaagaatttgaagcccaaggatgattctgatggcttgaaacatatttcattttcaagtcctgagcagattgttggtaattctgatgtcactggcatcaagcatgcgcatgatgaaaaagatgagaaaattgctgttgataaagaacatatttcttctatcttaaagattggttcagtcactattgcccccaaacaagttgaggctaagcaatccgtcagcaatggtaataaagaaccagttgatgttcttacagtaggctcaatgcaggtcaaagttaatgggtttccttcgtcttctggtttcttgaaggttggcagtaccccatttgatgcaagagcattgcaaccgggaaaaggagatgctgccgttaaaagtggatcacaacgttaaattttgctttgctttgcatttgaggcacatctgattttagtcttcttttggtagatggattaattgtttgcccaattgtattaaactgttgggaagttgagcttctttttgatctttttgttttcatttactaatgatgctttggtacaaggctgttatatcgtgggtgtttgagcagtgttgacatctaaagcttctattggatagtttaacccttatttttttttgttgcttttcgcctgttgttggtcaacatgaaaggggtgagtctgttcatccaatttatgtcgagaaatttgttttaacttcttgccacattcgttgagtgagtcattgttatattaacaagatcgcatttctattctgttggtttgaatgtatttcattctgatttggtttaggacgggaaaatgtaagaaatgattaaacgagccttttaagattacagtatacctgtatttggtttatttaagctcaatctgttatgccatctaatctatggtggaatctgttaagtgtagttgg

SEQ ID NO: 11669 - DNA, 478 bp, Glycine max
  Clone ID: 701118560_FLI
ctccggcatgttcatttcccaagaacaaggatccaattgtgtctgggatagcatttgggtagagactaaagaaaagaagtgcatcccagacacaatgagtctacatgcaggatgccctgtaattgaaggtgagaaatggtcagcaacaaaatggattcatgtggactcatttgataagatggtggcagatgggggggattgcaatgataagcaagaaaactgtgatagatgggctacccttggagaatgcactagtaatcccaattatatggttggatcaccaggccttcctggctactgcatgaaaagttgcaaggcatgttagaagtgttactgaatgctttcaagattccacatgatacttttgacgttgactcaaatttcaattggttctcagatttgtattatgtattttttttgtgtgaattgtattgtattctgcctcattataatgttagctctcagatagtgttccagt

SEQ ID NO: 11670 - DNA, 1658 bp, Glycine max
  Clone ID: 701118589_FLI
atttaacgagggagtgaagcttagagccggtgttaacaagatctctctactgagtgttgcagttggactcccggtttgctctctctctctctctcacatatacatacacaccaaatagatatttcagatgcacccctgcacgtcacactaagctgatttttcagtatcaactgcggattatgatcatgaatcatgactatatttaacatgcagaatgttggtcctcattttgaaacatggaatgctggtgttcttggtccaatttcattaagtggtctcaacgaagggagaagggacttgtcttggcagaaatggtcttataaggttggtcttaaaggtgaaatcttgagtcttcactctcttagtggaagttcctcagtggagtggattcagggatctttagtttctcaaaggcagccattgacttggtacaaaacaacatttgacgcgccagctgggactgcaccattggctttagacatggacagcatgggcaaaggtcaagtgtggttaaatggacagaatcttggccgctactggcctgcttataaagcatccggtacctgtgattactgtgactatgctggaacttataacgagaataaatgcagaagtaactgtggcgaggcttcccaaagatggtatcatgttcctcaatcatggcttaagccaacaggaaatttattggttgtgtttgaagagctaggtggagaccccaatggaatctttttggttagaagggatatagatagtgtatgtgctgatatttatgagtggcagccaaatcttataagctatcagatgcaaacttctggcaaagcacctgttagaccaaaagttcatttatcatgtagcccgggacagaaaatctcatcaatcaaatttgctagctttggtactccagcaggttcttgtggaaacttccatgaaggaagctgtcatgctcacaagtcttatgatgcctttgaaagggtattgccttttgttcttttggaatgctttcttttttgctatcaaattactcatttattattatggtcttatcttattacttggttcattaatcaatgataactttgttattgcagaattgtgttggacagaactggtgcacagtaacagtgtcacctgaaaattttggaggagatccatgtccaaatgtcttgaagaaactctcagtggaagctatttgttcctgatcattttaacctcagaaaataaatagattaaactctccagattgatttttcccaccactattcatttcaatacagttcttttgggtcaaccaaagtctacacttctgaatctgatcaacacgagcattattattttggctttaccaaggtgaagttgcagaaaacacaacacaccatatggttgaaagcctgtaaagattgctgagatgattgtggatatgtgtatatacttgtgttctgcatgttatacagaggtgaaaggtgatgatttgcttggtgcactatgagacgatactgaattgagtccatgtgctagtgttttagacttaggtgtggaagcctcttgcttcctgtaatattagttttcccttgtaagctgcattcatagtgatttagtttctttcttcctgtaagaaacttctcaagatgataaagatcagattcagtcattttggtttc

SEQ ID NO: 11671 - DNA, 1695 bp, Glycine max
  Clone ID: 701118818_FLI
atctatttttcgctcgagtgactgaggtgccaagaaatctcagccattgtgcagtatccaaacacaatgattgtgaagacggttgagctttgaatttcttgagcagcagtttcctgcttctggccgcgtgattgcctgtactcagtgctattgatattagcattgattttcaccacaaagtgtttctagaaatggagcaaaaaggaggtgtgcttatgcaacgatatgaactggggagattattaggccaaggaacctttgcgaaagtctaccatgctaggaacatcataactggcatgagtgtggccattaagattactgacaaggacaagattctgaaagttgggatgagtgatgaggctaatcaggcatccacatgtggttgagctttatgaggtaatggccagcaaaaccaaaatttactttgttatggagtatgtaaaaggcggtgagctcttcaacaaggtatccaaaggaaagctcaagcaggatgatgctaggagatattttcagcaattgatcagcgctgttgactactgccatagcagaggtgtgtgccatcgcgatcttaaaccagaaaatcttctactggatgaaaatgggaatttgaaggtcacagatttcgggttaagcacccttgctgaaactaagcaccaagatggattactccacactacatgtggtacccctgcctatgttgctccggaagtgataaacagaaggggttatgatggagccaaagctgatatatggtcatgtggggtgatcttgtatgttctattggcaggggagagttcaaatttcctaactggattgcaccagatctacgcagattgctgtcgaaaatcttggatccaaacccaaagacaaggatatcaatggccaaaatcatggaaagttcttggttcaaaagggggttagagaagcctaccattactcggaacgaagaccaagaactggctcctctggatgctgatggagtatttggagcttgtgagaatggagatcctattgaaccggcaaaagactcaaaacgttgtaataatttaaatgcttttgacatcatctcctattcctcgggttttgacttgtctggtttgttcgaggagaccaatcgaaagaaagaagcgcgtttcacatccgacaagccggcctcaatcatcatctctaagttggaagaaatttgcattcgtcttgggctgaaagtgaagaagaaagatgggggtttgttcaagttggaaggttccaaggaaggaagaaaagggtcattgggtattgatgctgagatttttgagatcaccccagtcttccatctggttgagttaaaaaagtccagtggagacacattggagtaccaaaagcttttgaaacaggaagttaggcctgcacttaaggacattgtttggaactggcaaggagaacaacctcagcaattgcaacatggagtggtgcagaaagaggaacaaccttcttatcctggcatatcagatgttgcaccgccacaaactgcgtaatgaatcttgtccctaaatttgtttttgtgttgtatgtgctttatgttcttagtcaagtacactgtcatgttgatagttgtcgcggaataaggtggttaagcatgtctagatttaattgctcagcttgtttagttagttgcttatttgaattattttttttaccatttgggtgttctgttgt

SEQ ID NO: 11672 - DNA, 1716 bp, Glycine max
  Clone ID: 701118826_FLI
cggagctactggaacggcgagtcaacggagaatttaccgttcgagtcagacgaagacgaagaagaagaggaagcgagaaacggaggaggagacaaggaggaacagattccggtggcgctgccggtcaccggcttcgatatcgtcatcgacgcgctgccgtcggggacgatcaacgacctccacgagattgcgaagcgaatggtggcaggaggtttcgggaaggagtgctctcacgtgtacagcagctgccggagggagtttctggaagaaagcgtgtcgagattagggttacagaagctcagcatcgaggaggttcacaagatgacgtggcaggatctcgaaggcgagattgagaagtggattaaggcctccaacgtcgctctaaagatcctcttccctagcgagcgccgtctctgcgaccgcgtcttcttcggattcgcctccgcctcggatttctccttcatggaggtctgccgcggatccgcgattcagctgctgaatttcgcggacgccgtcgcaatcgggagccggtcgccggaacggctgttcagaatcctcgacgtgttcgagacgctgcgtgacctaattccggagtttgaggctctgttttcggaccagttcagtgtgtcgctcaggaatgaagcgattactatttggaggaggttgggggaagctattaggggcatttttatggagctggagaatttgattcgccgggatccagcgaagatggcggttcccggtggcggtctccatccgatcactcgctacgtgatgaactaccttcgtgctgcgtgccggtcacgccagagcttggagcaagtatttgaagactatggcttgaaagagtatacaaagcttgaggatagggttccttcctcttcttctctgtcagtgcaaatggattggattatggaactgttagaaagcaatttggaagcaaagtccaggatttacaaggaccctgctttgcgctatgttttcttgatgaataatgggaggtacattgttcagaagaccaaagatagtgaattgggaacccttttgggagatgattggatcagaaaacacgctgcaaaagttaggcaattccatgtgcactatcaaagatgctcgtggactaaggtattagggattttgaagcttgatagtaatggctcatcattgccccctaatggcttggcaaagtcaatgaaggagacgctcaagttgtttaacacagtttttgaggagacttgcagggagcattcttcctggtttgtctttgatgaacagctcagggaagaaataagaatttcccttgaaaaaatcctgcttcctgcgtatgggaactttgttgcgaggtttgagagtgttgcggagcttggaaagaatgctgacaagtatattaagtatggaacggaggaaattcaagcaacactcaatggtttgtttcagggaagcagtggatcaactggtagccgaaagtgaagttgaagctgctactagttgttcttgtgtatttgtggtgtaattaaaattaaaatacactgttttttatcataaaaaaatgtagtcttgtagtcttgtactataaatactgctgtatgttattctgcttagcatcattgtggaggattgaataggattttgaagttaagagccgtttgagatacaaaattatcgtttatgttgcaacattgaggtggttctaattgatcattgctttcattcatc

SEQ ID NO: 11673 - DNA, 2031 bp, Glycine max
  Clone ID: 701118832_FLI
ggactctcctctcaaacaacatggacaatggttgcttctctagttctccacgccacgatgcttttccagctggtttgcgagttcttgttgttgatgatgatctaacatggttgagaatccttgaaaagatgctcaagaagtgcttatatgaagtgactacatgttgtttagcaacagaggccctgaaaaaacttcgtgaaaggaaagaagcatatgacatagtgatcagcgatgtgaacatgcctgacatggatggtttcaaacttctggagcaagtaggacttgagatggatcttcctgttatcatgatgtctgttgatggagaaacaagcagggtgatgaaaggtgttcaacatggagcatgtgattatctccttaagcctataaggatgaaagaactgcgaaacatatggcaacatgtctttagaaaaaggatgcatgaggcaagagattttgaaagccatgagggttttgactttgagggcattcacttaatgagaaatggatcagatcactctgatgatggtaacctgtttgctgtagaagaaactacgtcaattaagaaaagaaaagatgcagataacaaacatgatgacaaagaatttggagatcattttcccacaaagaaagctagagtagtttggtctgtggatcttcatcagaagtttgtcaaagcagtgaatcaaatcggatttgataaagttggtcccaagaaaattctagatctgatgaatgttccatggttgactagagaaaatgttgctagtcacttgcagaaatacaggctctacttgagtaggttgcaaaaggaaaatgatcagaaatcttcatcaagtggaataaagcactcggattcaccttcgaaagatctaggaagttttagttttctgaacactgcaaacaagcaacaaaatgatattgccactgacagcttcagttattcagatggaactttactaattcagatggatgctacaagttatgaaggtgatctcaagggaattgtgtcagagcctacaacagaaaaaagaagagcttccactagtgaaattccggatccaaaggtacaaaaaagttcgcagaagagcctcaacaaaccttttacatctgtagagtcatcagaagcaaaccatgcagtctttgattgcaccataccaacagaatactcttggagtgagtttccaaaaggtccactcaaagaagaacagaagacacctgttcaattagaggatagcctctgccagttgccattgcatggtacacagcatcacattcagattgatcaatcacaatcaattgcctcaattaattccaatccctctataacagaagaagaggttgctgccaaattagagaccaaacctttgtatgctggttacgagagtgattatgtgaatcctgtgagttcaataggatctgcagttgaagcctttcgtagtcagtccaaaagccttatggtgagtgatcaatcttcagagcccactttcacctcgaatttgagcttgaagactcagggattcaatctagattgcatttctgatctggatttttaccaaaggaacctattattgggtggtgaggtagcttctgcacctttggatgaggacctgaatttctttttgctacaaagtgaatgctacaacatgaattttggactgcagaatatagatatgtcagagtattatgatccaaggcttactgctgaagtccctagccacttttatgattcagcagattattcatcggtagatcaaagtctattcattgcatgatcggtcctgctcttcccttttctgcatcttcaacaaaaatccaactaaatgcacgaaaggacgatttactgtcacaacttgaactttctttttcctttccaagaatatcaactttagggggctggggtattcttttttccaattagaaaggattttgatattgaagcacagataaaagtggatgatgtgtgatgacaaacgttaagcttatcaataagcttgcttcctttaatactaataactgaatatttggagaagc

SEQ ID NO: 11674 - DNA, 1203 bp, Glycine max
  Clone ID: 701118848_FLI
ctcctggaggctcactccggggcggggcgagtgcacgcccgattcggcttcggcaagaaaaaggctcccgccccaaagaaagcctccaggggatcgggccgagacaccgacagacccctttggtatccgggcgccaaagcgcccgaatatctcgatgggagtcttgtcggagactacgggttcgatccgtttgggctagggaagcccgcggagtacctgcagttcgagctggactcgctggaccagaaccttgcgaagaacgtggctggggacatcattggaaccaggaccgagctcgcggacgtgaagtccacgccgtttcagccctacagcgaggtgtttgggctccagaggttccgtgagtgcgaactcatccatggaaggtgggccatgctcgccactctcggagctctcactgttgagtggctcactggtgttacatggcaagacgccggaaaggtggagctagtagaagggtcatcataccttgggcaaccacttccattctcaatcaccacactgatctggatcgaggttctcgtaattggctacatagagttccagaggaatgcagagctcgacccagagaagaggttgtacccaggtggcagttacttcgacccattgggcctggcctcagacccagagaagaaagccacccttcaattggcggagatcaagcacgcccgtcttgccatggtgggcttcttgggctttgcagtccaagccgccgccaccggcaagggcccgctcaacaactgggccacccacttgagtgacccactccacacaaccatcattgacaccttctcatcctcctcttaagaagaagagtctttcttgtgcctcgtcactattactagcatattgtaaaagtcttttcttcttcggcttttggttgtaattagaacattttcacttagttggattagtagtacttgtgaaaaacttgtaacgtgaaattggagaggctaagcagaaatgcttctgcttgatgttaagtgttctcctgtaaatgtttattatgcacggaatcgagagggaatgacgagggtaaaaaaatactgataaaattgagatcactacgaaaggtaatggcagggaattggattgaggccattgaaggttttaatttattcatttgttaagtttgggttctagatacgcgctgatttactaaagtttgattctagccaatttgac

SEQ ID NO: 11675 - DNA, 1990 bp, Glycine max
  Clone ID: 701118915_FLI
aatattttgaatggcttccacaagagacaaagatgaggctgaacatcagagaggctattggagatggagcaaacaagatttcttgcctgaggagtccttccaaagctggagcaactacgtttccgccctttctcaaacacggctaaggttcaaggaccgtctcttagcaagatcagatgatgccactgagacagaggaactcaagaaacaaagtgagcatgacatgaaacgttgcctcaactggtgggacctcatatggttcggttttggcgcagtgataggagcaggaatctttgtgctcactggacaagaggctcatgaccatgctggaccagccattgtcttatcctatgttgcctcaggcttctcagcaatgctttctgttttctgctacacagagtttgctgtggaagttccttctgcaggaggctcatttgcttatatgagagttgaattaggagactttgttgctttcataactgccggcaacattcttcttgaaagtgttattggaagtgcagcagtggcaagatcatggacttcatactttacaagccttttgaaccgtcccaaggattcgctgcgcattaaaacaagtctcaaagagggttacaacttgctggaccctatagcttctgtggttctggtgattgcttcagtaatcacaatcatcagcacaagaaaaacttcagttctcaattggctagcatccgccatcaacactgctgttattatatttgtgattgttgcagggtttcttcatgctgacacatcaaatttgacaccctttttaccttatggggctaaaggggtgtttcaagctgcagcaattatttattttgcatatggagggtttgatcatattgcaaccatggctgaagaaaccaagaatccttcaagggacataccaataggattggtggggtcaatgtccatgatcacagtgatttactgcttgatggcactctcactgagcatgatgcagaagtacacagagatagacactggtgctgctttctcagttgcatttcagaatgtgggaatgaggtgggcaaaatatgtggtagcttttggtgcactaaaagggatgaccacagtgcttcttgtgggtagattggcacaggcacgttatattactcacattgcacgttgtcacatgatcccaccatggtttgctcttgtgcactctaagacaggaacccctataaatgctacactcttgattaccattgcaagtgccaccatagcttttttcacaggcttgaaagtgttgtcaagcctgatatcagtgagcacactctttgtgttcatgatgatatcagttgcccttctggtgaggaggtactatgtgagaggggtcacaccaagagagaacttgttgaagctagttatcttcttggttctcattattgcttcctcaattggaatttcagcttattgggggctgaggcctaatggttggtttggatacagtgtgactgttcctatttggttcatggcaacactagggatgtcactgtttttgactcagcaaagggtgccaagagtttggggtgttccacttgtgccatggttgccatctttgtcaattgcaacaaatgtattcctcatggggtctttggaatatgaagccttcataagatttggagtgtgcactgtggtaatgctgatctactaccttctttttgggcttcatgcaacttatgatatggctcaccaacaagagaagctgccatccaaagtagaacacacacagacagttaagaatgaagtgtcttagataagtgtactctcatttgtttgtattttgaatcagatttccgttcttcaaacaagttccacaaagttacatgaaaaattctacaccatactaatccttgaatagatgaatcccacaacgagagtcatatctatttatctataatatttatagtatataaattttgagctacgaaataatacattgaagggtatgtttggaaacccgttc

SEQ ID NO: 11676 - DNA, 719 bp, Glycine max
  Clone ID: 701119132_FLI
tgcagctttacttgtgggcgaagacccaacacagtcatatgcgctcatatgcggtaactgctatatgcataatggtctggctcggaaggaggatttcccagttatcacatactactgcccgcattgtcatgccctgaacaaaccgaagcaatcagatgagcatatctctggtcttacttctccaaacacgggggggactccaaacacagatgatggtgtgacggatgcagttaagaatgctagggcttctgcagccgagagtgtaatcacaagcagtagtcccggaagtgcttctagctctgagattgaggaagtatcagaaagggcaagcgtggatgagaaaattgattaaaaggacagctgttttcttttttatgattcagctgtcggaattacatgtcatggcccttgttctggacacaaactgactatatataaggggagaattgcaattggtttccttggtggctttgcaacaggaagagtgatgaaatacttagatacatagattacacgtattgcttgttaaggcagttttggctttattttttcgtttttttgtgacattatatcgtgacagtgttctagttctagttttaaaacttggattgtacctgaaagaaattttgaaaacgggatttgtatccattgtgtttaatggatttaaatttgatgtatccatgagctataatttcattctaggattaccgacttagtcc

SEQ ID NO: 11677 - DNA, 1062 bp, Glycine max
  Clone ID: 701119142_FLI
ctaacgacaaagattcttccccaacacaagggaaaaccggagcaacaaaaaaagtaacacacacgcacacacgcatcatcgtataacatttgttttattttttttaaagagcgagtgttgtaacaaatggtgaagtcgaagagcgtggagaaacctgcggaggaacaacaacgaggtggtgtttcagcgtacagaggagtacggaagaggaagtgggggaagtacgtgtcggaaattaggctgcccaacagccgtcaaaggatttggttgggttcctacgacagcgccgaaaaggcggcgcgtgcattcgacgcggccatgttctgcttacgtggcagcggtgccaactttaatttcccgagcgaccggcccaacatcgctggcgggaggaacatgacgccctcgcagattcagatcgccgcggcgcgtttcgccaattcggagccccgaaaggagtgttcgggtaaacccgtggagtctttgacttcgattgaggaaacgacgtcgtttccagtaaattcggatacggatacatcttctcctctatcagtagtgacgatccaaaacgacaccgaagtagcaaccgggtcgtttccgggtatattttcgggtttcgggtcgggtaatttcgtccccgaattctccgattttccgagcttcgatgatttcggccacgatttcttcgtgcatgagcttccgggtttcgattacggagaagagaacttggatgggttgataattcaggactcgttcctgtggaatttctaagcgggtcggggttaggataattttattatatcccaaccgtgtttagaattcggatcggatccggatttgggttggtcaatttttgtgagaccatgccctctgtgttagtagttagtgatggtaatgttttttttatgtacctagtagtcaaggtttcgattttttgggatgagaatcataatttatttatttgtcatgactcatgtcattaattgtaaagttgtctgctgatagtgtaattttcttttggccattcattcaattataaaaatgataagatattttcgtctggat

SEQ ID NO: 11678 - DNA, 1803 bp, Glycine max
  Clone ID: 701119211_FLI
gagttctgtctggttgcatagcattggttggtagttgtctcaaaaatctcttcttgccctttggccataatcaaaagccaagacactgttcatacagctgctcaattatcaagccaaccttgctcggttccactgcagaatttcagtttattcttatctaggtagactccttataagtgcgcagaagttcaagtgtagagaatgagtcagcctaagattaaacgccgagttggtaaatacgaggtggggaggaccattggtgaaggtacatttgcaaaggtgaaatttgcaaggaactctgagacaggagagcccgtggctcttaaaattcttgacaaggagaaggtgctaaagcacaagatggctgagcagatcaggagagaagtagctacaatgaaactaatcaagcatccaaatgttgttcgattgtatgaggtcatgggaagcaagaccaaaatatatattgttttggagtttgtaactgggggggaactctttgacaaaattgtaaaccatggaaggatgagtgaaaatgaagcacgtagatatttccagcagcttataaatgctgttgattattgccatagcaggggtgtctaccacagagacctgaagccagaaaatttgctattagatacttatgggaaccttaaagtttctgattttggtttgagtgccctctcccagcaagttagggatgatggacttcttcatactacatgtggcactccaaattatgttgctcctgaggtccttaacgatagaggctatgatggggcaactgcagacttgtggtcatgtggggttattctctttgtattggttgcaggttacttgcctttcgacgaccctaatcttatgaacctgtataaaaagatctcagctgctgaatttacttgccccccatggctttctttcactgccaggaaattgattacacgaatcttggatccagatcccaccactcgtatcactatacctgagattttggatgatgaatggtttaagaaagaatataagcctcccatttttgaggagaatggggaaatcaacctcgatgatgttgaagctgtctttaaagactctgaagagcaccatgtgacagagaaaaaagaagagcagcctacagccatgaatgcatttgagttaatctccatgtccaaaggactgaaccttgaaaacttgtttgatactgagcagggatttaaaagggaaacaagattcacctcaaaatcccctgcggatgagataatcaacaagattgaggaagccgcaaaacctcttggctttgatgtgcagaagaaaaattacaagatgaggcttgcaaatgtgaaagctggaaggaagggaaaccttaatgttgccacagagatatttcaagtggcaccttctcttcacatggtagaggtacggaaggcaaaaggagatacattggagttccataagttctacaagaaactttcaacaagcctggatgatgttgtttggaaaacagaagatgatatgcaaatgcgagaaacaaagtgatgtggatattattatcattgtctattaagtgtaattttcttcgtgtctgaggttttactattttccaatttcttcattcgttatattcctcccccgtaggtttgtttggacattaattacatagtactcatttattgcataccatgctattattttttgaaagcatgcagagttcatgtaagaattttactcatccaacagtcgcggttatgttcatgaaacaaaaaattgtaagaaatttgtatattgtatatatctatctatttatatcttttc

SEQ ID NO: 11679 - DNA, 784 bp, Glycine max
  Clone ID: 701119253_FLI
cccctgcagaagtgagcgagaaagaaggaattaactttctgggagttaaaggtaaatgcttgtggccaattagaatagggtgcttaaatcccaaggaccaaataccaaagtggtcaatgaagacaatacaatgtataacagatgaggattattactttgtatgcgtggagatctttgaaggattaaaaagaattggaaagccgtctatccttctttccatacgcgaaggagctgaagcagtacatataatcatggggatgttgcaggcttgctacatcagaagggctctacttatgaataatactaggtgggagattattatagaggaaagccatgcatcagattcaacaatggaggattggtttgtaattgttgaggatgcaaagaaatctgcagaaagggatacatctaatttgattgaacaaatggtgggaaagggttggatggcgaagaacattctattatcaacacaggagcagactcgatacagttttatatgtgattaaagatagttttcaaaatttggctggctccttagttcaacgggagtgtttggggatacataccattcattttgaagattagactaaagaataaggtcaaaattgcgtagtatattcacaactttcattgtagccaaaaaatattcctaacttgaatcttctgctgggagggtgtttttaagccgttgcattgattatgtaatgtatacataaatcataatgtatacctaaattgtattattacacatttacataaaaaagggctataatctttttttttc

SEQ ID NO: 11680 - DNA, 1988 bp, Glycine max
  Clone ID: 701119350_FLI
gccgccgcaagcgatggcggactccggcggcgacctccggcggcgacctcgccggcatcatttgttcgatctcctatgagcccctcaacctcatcagcgaggatcttcaatcggtctccatctgcgtccacgtttttcacgagctctgtctgcggcaatggttggagtactcttcgaaagggaagaagcacacttgccccatttgcaagcagggttgcagggccagcgacgcttgctggctctattttcagtcagtgggagatgcgaacgatagtgtgaagcctcagaagagctttgaattggaggaagatgctggggttcctgcgtagggaggtgaatgtttcggggcttaattctcaggttgaagggcaaacaaaggaattggaaggacttaatgagaaggtatttttattttattttattttttaacggttgtgtttagatgggagagagagactaagaagcgcatcggaggagattgaaggatatcacgctttgtacttgcaaggagcaggcaaagatagagacagctttaaagaatgaggttttaaataaaaaagcatcaattccagcttcaaatgaaatcagaggtgaaatactctgtagccttctgttttatttgggacaagttaactatttacagcctgaattaacttgtaaagatttatattgaattaggagcttgagaagtcaactttggagtgttttagattaaaagaaagtaatatggctttgactaaagaacttgcagctttaaaattatgagtggagcttcattttgaattttgatcgagtaaccatattttgtttatgatataatttttgtttattttttttacttcttgctatgttggtttatggcctgcaccgtagagtatatctgatctggacattgatgaagaggaggttttgaagcttgccgctttgggtaaggggccaacagtaaagacacagtagatatattgaaaagatctctggtggtcatgcggaacaggagttataaacaattgatggccaagtgcaatattcttggaagaggtgaggcttggtatagcaaaaagctttagaaggctaaagagaagatcactaaactgaaggagagggtacaagaactggagacattaactgaagcaaaagagaacgaatatctgagcttgcaaactttcatcaaaagaacaaagcaaccgaattttgacacccaaatctggaattgacctgactgcaaacgacaacagtaaatattttcaatctttgaagatatagaactccaatgttactaaaaataaggctgtgaatgttagtaatggaagtaaaactaccttttctcttgatataaaaagagagtatatctcaattgatgaggatgatccagaaggcactaatgctttgcaaggatgttcaaaacacaactacaaagatcaagacagggatgatattgcttttagcaagccttctctagtgaagctagagtctgtgtctggcataaagactgaaacatcattgcaaggaaattgtactttggctgcgtctcctagagttgatattgacattggcattgacatggctaacatttcagctggtgctatggatgaagatgtaactttacaaaccaacattaaacaacccgtggtgaacattacaaaggagttaccattaacactttcaaattcagggtgataagaaaaattcactaagttcaaaaaggtcaaagtggtttgaaatcctagttgcaaagagtaaaggaatgcagatagaacttttttggggagagtcatccagtaatatattggtctgtatgggcctggttgggaaacccttgttccaaaaaggaaaggaatgcctcctttgtcccggaggggaaccaatggtagattaaataaatttattttttggaaaagttttcccccctttgaataatgatctttggggattttagctaaacgggtccgaaaatctagtaattgattgattgcttggcttcggctcct

SEQ ID NO: 11681 - DNA, 1397 bp, Glycine max
  Clone ID: 701119418_FLI
ctttgattttcttctgcaaccttatctactgcaaagctttgattactgagtctaacttaccctgccacagtttgccttgtttacctgagctctgtttttaactggtctttgatcaaggatggccataaaggcaattgagttgttgaaaggaagcggaaaccatgaagagatatttgaagttcttgcagcagtggctgcatctttgggggatgtaatagatgatgtgaacactttgcaggtaacacctttaaagggggcaatgaccaatgaggtttttgaggtaaattggccaaccaaaagtgatggtcatcaaagaagggttcttgttcgattatatggtgaaggtgttgaggttttcttcaacagggtggatgaaatccaaacctttgagtgcatgtcaaagcatggacagggtccacgccttcttgggaggttcaccactggcagagttgaggagttcattcatgccaaaacactctcagctgcggacctccgtgaccctgaaatatctgctttgatagcatctaagatgagggagtttcacaatcttcatatgcctggtgcaaagaaggctcagctttggcagagaatgaggaagtggcttagtcatgccaaaagtttgtgctcccctaaagaaaccaagaattttggcctggacaatctagatgctgaaataaatatgcttgtggagttgttatctcaaggaaatcaacagattggtttttgtcacaatgatctacaatatggtaacataatgatggatgaagatacaagagcaatcactttaattgactatgaatatgccagttacaatcctattggatatgatctggcaaatcatttctgtgaaatggtggcaaattaccatagtgacgaacctcatgttcttgactacagtaaatatcctggtctggaggagcgtcaaaggtttgtttataattatttgagttctgaaggtaagaaaccaagcaatagtgaagtggatcagctagtgaatcttgcagaaaaatacactcttgcaaaccatctattttggggcttgtggggacttatttcgagtcatgtcaatacaattgactttgactacaaggagtatgcgaggcagagatttcagcaatactggttgaagaagcctactttattggactcaccaagtatcgtttcccaagatgggattgccaatggtgtgaaccattgacatggatgcttcttatgtatttagcatgttcagcttggtatgtgttgactaatatatagaaaggcatgatgtgatgcataaaatttgtaaataatatataactaaaaatgtgtgatttgagaatttttacaacagttatgttagtaatccctccttttgtgataagttgaggaatggaagtgagaattcctagtttgtt

SEQ ID NO: 11682 - DNA, 800 bp, Glycine max
  Clone ID: 701119822_FLI
gccaaaaaggcctataaaggtatatatataccttcttttttttctgatcaggattcaaaccctagatcagttttaattagtttcctagttttattcatagtgtgcaagaatgggaaacagcttaaggtgttgtttggcttgtgttcttccatgtggagctctagacttgattcgaatagtccatttgaatggctatgtggaagagattacacgtccaatcacagcaggagaggttctcaaagcaaaccctaaccatgttctaagcaaacctagctctcaaggcgtcgttcgccggattttgatcctttcaccggagaccgagctcaagaggggcagcatctacttcttgatcccggaatcttcgctgccggagaagaaacggctagccggaaagggaagaaatgttggtggtgataatgatataaaaaagaaaccatcaacattgaaagggaacaagggtagtagtgatgatgattattcttcactatcacaagggtgcctcaataaagccactcacaaaggttctaaagagaagaaatcgtcgtgccgggatcgccggaaaggccgcatcggaatatggaggcctcatttggagagtatattggaagattagtcggttttttgtgtcgctggccggtggccggaatccaacatggctggaaaaaagaagaggagaaaaagaagaagaaatatgttaaattattgaaatatagcaacaggacttttttttttgttcccttttgttttataaatgtatgtgggaatttgattttgtggataaaaaagtttaccttactttc

SEQ ID NO: 11683 - DNA, 1576 bp, Glycine max
  Clone ID: 701119872_FLI
gttgacgatggcgtttcgggtgcgaagccctgacctccgctctctctttcttctctctctcttgtccatcgcttccgccaatgtcttcttcgaagagcgtttcgatggcattacttttccaggatcaaggtttttctttcgtgtctgagcctcgatctgaaaagcttcgatggttcgatttgtgttttgagttggaaatcgagacgggtgggaaaatcgatgggttaaatcagattggaaaaaagatgagaacgtggctggggagtggaaccacacctctggtcaatggaatggagacgctaatgacaaaggtattcaaaccagtgaggattacagattctatgctatttcagctgagtaccctgaattcagcaacaagggtaagacactagtctttcaattttctgttaagcacgaacagaagcttgactgtggtggtggctacatgaagttgctcagtggggatgttgatcagaagaaatttggcggggatactccttacagtattatgtttggcccagatatctgcggttacagtaccaagaaagttcacgctattcttacctacaataacacaaaccacttgataaagaaggatgttccttgtgagactgaccaacttactcatgtttacacatttatcctccgtccggatgcaacctacagcatcctgattgataatgtggagaagcaaactggtagtctctactctgattgggatcttctccctccaaagacaatcaaggatcctgaggctaaaaaaccagaagattgggatgacaaagaatatattcctgatcctgaggataagaaaccagaggggtatgatgacatcccaaaagagctcccagaccccgaagccaagaagcctgaagattgggatgatgaggaagatggtgagtggacaccccctaccattgccaaccctgagtacaagggcccatggaaggcagagaaaatcaagaaccccaactataaaggaaaatggaaggcaccattgattgataacccagatttcaaggatgaccccgacctctatgttttccccaacttgaagtacgtggcgattgaattgtggcaggtgaaatctggtactttgtttgacaatgtcttaattactgatgatcctgagtatgctaagcagctggttgaagaaacatggggcaagcacaaggatgctgagaaggcagcatttgaggaggccgagaagaagagggaagaggaggaatcaaaggatgacccagttgactctgatgctgatgaggaagaggaagatgctgatgaagctggcaatgactccgatgctgaatcaaagacggaagctggagaagacaccaaggaagagggtgtacatgatgaactctaggaagtttgcaaaacggataaagagtgagcggaagttatattccggaaagttatatctttttcagttgtagtgtttttttgtttttatttttccctagataagcagaccgtggaaaactgcaagtgaaagctggagcttttgcttcaatcacatttgactatttcactgattagaacaggcaaagatgtctccttttgggttgatcttttt

SEQ ID NO: 11684 - DNA, 1575 bp, Glycine max
  Clone ID: 701119923_FLI
gttgacgatggcgtttcgggtgcgaagccctgacctccgctctctctttcttctctctctcttgtccatcgcttccgccaatgtcttcttcgaagagcgtttcgatggcattacttttccaggatcaaggtttttctttcgtgtctgagcctcgatctgaaaagcttcgatggttcgatttgtgttttgagttggaaatcgagacgggtgggaaaatcgatgggttaaatcagattggaaaaaagatgagaacgtggctggggagtggaaccacacctctggtcaatggaatggagacgctaatgacaaaggtattcaaaccagtgaggattacagattctatgctatttcagctgagtaccctgaattcagcaacaagggtaagacactagtctttcaattttctgttaagcacgaacagaagcttgactgtggtggtggctacatgaagttgctcagtggggatgttgatcagaagaaatttggcggggatactccttacagtattatgtttggcccagatatctgcggttacagtaccaagaaagttcacgctattcttacctacaataacacaaaccacttgataaagaaggatgttccttgtgagactgaccaacttactcatgtttacacatttatcctccgtccggatgcaacctacagcatcctgattgataatgtggagaagcaaactggtagtctctactctgattgggatcttctccctccaaagacaatcaaggatcctgaggctaaaaaaccagaagattgggatgacaaagaatatattcctgatcctgaggataagaaaccagaggggtatgatgacatcccaaaagagctcccagaccccgaagccaagaagcctgaagattgggatgatgaggaagatggtgagtggacaccccctaccattgccaaccctgagtacaagggcccatggaaggcagagaaaatcaagaaccccaactataaaggaaaatggaaggcaccattgattgataacccagatttcaaggatgaccccgacctctatgttttccccaacttgaagtacgtggcgattgaattgtggcaggtgaaatctggtactttgtttgacaatgtcttaattactgatgatcctgagtatgctaagcagctggttgaagaaacatggggcaagcacaaggatgctgagaaggcagcatttgaggaggccgagaagaagagggaagaggaggaatcaaaggatgacccagttgactctgatgctgatgaggaagaggaagatgctgatgaagctggcaatgactccgatgctgaatcaaagacggaagctggagaagacaccaaggaagagggtgtacatgatgaactctaggaagtttgcaaaacggataaagagtgagcggaagttatattccggaaagttatatctttttcagttgtagtgtttttttgtttttatttttccctagataagcagaccgtggaaaactgcaagtgaaagctggagcttttgcttcaatcacatttgactatttcactgattagaacaggcaaagatgtctcttttgggttgatcttttt

SEQ ID NO: 11685 - DNA, 1231 bp, Glycine max
  Clone ID: 701120037_FLI
gatacctttgggcaaagaacatctcaatatagaggtgtaacaaggcataggtggactggtagatatgaagctcatctatgggacaacagctgcaagaaagagggccaaggaaggaaaggaaggcaagtttatctagggggttatgatatggaagaaaaagcagcaagagcttatgatatggccgcactcaagtattggggaccctcctctcatataaatttcccattggaaaattatcaaaacgaacttgaggaaatgaagaacatgacgagacaagaatatgttgctcatttacgaaggaaaagcagcggattctcaagaggggcctccatgtacagaggagtaacaaggcaccaccaacatggaaggtggcaagctcgaattggaagggtagccggaaacaaagatctatatcttggaacctttagtacccaagaggaagcagctgaagcctatgacattgctgctattaaattcagaggagttaatgctgtcactaactttgatataacaagatatgacgtggaaaaaattatggagagcaataaccttcttagcagtgaacaagctaagcggaaaagagagatggatgatggaactagaagcgaggctaccgttaaccaaaaaccttctacatatgaccacactcaagaaaccattctaatgcagaaaagatgcaaaaaccaatcagaatggaagatggttcagtttccatgcccccaacagcttgatcagaatcaaagaatcgagagttgtagaactcagcccttctcaacggacttagataacatgtttcgtcaccaagttgaggaacggagcaacatgggaacacacttgtcaaatccttcttctctggtgacaagtttgagtagctcaagagaagagagcccagataagacaagcatgccaatgctctttggaatgccttcaacagtgtccaaattattggctaacgtggattcttgggatctatcttccaatctcaggactgcgctttctatgcctcagatgccaatttttgctgcttggacagatgcataatcttatgttttttacctctatcaaaatagcaaatgcttgtttactaaaacaggatgttaatgcctagctagtacaatagagagcttgtgcggaattttaaaatgttaactgttacatcaagcattttcctcgtacaatgagaggaaagctcctaaagttttatatcctaggactccaaattcgtatcatc

SEQ ID NO: 11686 - DNA, 1324 bp, Glycine max
  Clone ID: 701120519_FLI
agggtctttgcttgattttggagatgtctctgctctcagatctcatcaaccttaacctctccgataccaccgagaaggtgatcgcagagtacatatggatcggtggatcaggaatggacctgaggagcaaagcaaggactctcccaggaccagttagcgacccttcagagcttcccaagtggaactatgatggttccagcacaggtcaagctcctggtgaagacagtgaagtgattttatacccacaagccattttcagggatccattcagaaggggtaacaatatcttggttatctgtgatgcctacactcctgctggagaacctattcccactaacaagaggcacgctgctgccaaggttttcagccatcctgatgttgttgctgaagtgccatggtacggtattgaacaagaatacaccttgttgcagaaagatatccaatggcctcttgggtggcctgttggtggtttccctggacctcagggtccatactactgtggtgttggcgctgacaaggcttttggccgtgacattgttgacgcacactacaaagcctgtatttatgctggcatcaacatcagtggaattaatggagaagtgatgcccggtcagtgggaattccaagttggaccttcagttggaatctcagctggtgatgagatttgggcagctcgttacatcttggagaggatcactgagattgctggtgtggtggtttcctttgaccccaagccaattaagggtgattggaatggtgctggtgctcacacaaactacagcaccaagtccatgagagaagatggtggctatgaagtgatcaaagcagcaattgacaagttggggaagaagcacaaggagcacattgctgcttatggagaaggcaacgaacgtcgtttgacaggacgccacgaaaccgctgacatcaacaccttcttatggggagttgcaaaccgtggagcttctgttagggttgggagagacacagagaaagcagggaagggatattttgaggacagaaggccagcttccaacatggacccatacgtggttacttccatgattgcagacacaaccattctgtggaagccatgagcaaaacctgcatgttttctccctttggatggaaaggaacagttatgcttttcttagtaggatttggtctctctctctttttaccttttgattggtactatggttggtgccttgttggttggtgcaactaactggcaagggttgttcattgttttcttctattcctttccctcgttttccgattgttacaatgacaataatttaatggttattatcagtcttgaacaaag

SEQ ID NO: 11687 - DNA, 1034 bp, Glycine max
  Clone ID: 701120712_FLI
gcagtaccggagcagaacggtgttcgaagacgcgagtcctgagttggtgagggatttcttttgggatgatgagttcaggttgaagtgggatgacatgcttatacatgcttccaccatacaagagtgtgtcctcactggaacaatgatggtgcactgggtgcgcaagtgacagagagtatataattgggaggcgaatttgggacgcaggacgaatttactactgtgtcactaagggagtaccttgcccctccatgccaaggcataataaacctaaacgagttgatttattttattcaagctggtgtattcgtgcagttaaatcaagaaaagatgaccagctgacttcatgtgaagtgttattgtttcatcacgaagatatgggaattccctgggaaattgctaagcttggagttcgacagggtatgtggggagctgtcaagaagtttgatccaggactacggacatatgagaaacaaagggtttctggtaccccattgtcaccctgtgcacgtgctgctaagatcaacactaaagtaaccatggactatgtgaggtctctggaaaacacgaccagtgacttgttggagactgaaaatcaggattcttctgacaaaccaggtggaaggaacatacctaagcttttaattgttggtggagccattgcccttgcctgcactcttgatcaaggactactgactaaggcagttatatttggagtagcccgaaggtttgcaaaaatgggaggaaggaggttgtgatacattatgctttttgctttgagaaattgccaggccagccaattccctctggcagtagaattagaaattgagatgtcacttcttgctttggggcaaatgtttattctggatctagttggcagccatggttcaagaagaatggtattattctttctccatttgtttgatctatgaggcggcttttaactggaaatagctacattgtatctttatgtcattaaaaaaagattgtcatgctgcaggaataacatcaatattcaggttttcttttagttc

SEQ ID NO: 11688 - DNA, 1372 bp, Glycine max
  Clone ID: 701120778_FLI
gcagatgcttcgggaaatgccccaggccgcatcgaagttggtggtaaacctcctgaagtgaaggaaaaattacctatcaaaagatcaaaaggaagtgctagtggtggtaatttgaatatgtggattacagggaaaaataatgaacctggtaaaataccaggagaatctgctaatgggattcattccaaaagtggtgagagtgcaagtgacggaactagtgaaggaagtgatgagaactcccagaatgattctcaattgaaatcaagggagaggcaggactcttttgaagatgaaccatctcaaaatggaagttcagtacatgctcctcaaaatggggtacataatagacctcagacagttgttaatcaaactatgtctatcttacctatatctaccacaagtgctcctggagcagttcctggtcccacaactaatttaaatataggaatggattattggggcacaccaacttcgtccaccattcctgcattgcatggaaaggttccttctactgcagttgctggagggatgattgctgctggatcacgagatggtgttcagtcacaagtttggctgcaggacgaaagagagcttaaaagacaaaggcggaagcagtctaatcgggaatctgcacgcagatccaggttacggaagcaggctgaatgtgatgaactagctcagcgtgctgaagctttgaaagaagaaaatgccactctccgatcagaagtgagccagatcaggagtgagtatgagcagctacgttctgagaatgctgccctcaaggagagacttggggacatacctggtgtcgcgacgcctgggaaggaggatcttaggtctggtcagaatgatcagcatgtgagtaatgacactcaacagagtggtcagacagaggttgtgcagggtgttcattaggatcttgcttcctgctgcatgttgctttttaggtagataacctaaccaagtagcaacagcaagttctagtttttggttcaaattgtattaaaggtgatcatatgtagtattaggatctatttatgtcatatgatccctcattcctaatttgtcatgtttatgacggccaaaaacttgtattgtagttagtgtgtgaatacttggttataccttctctgctacttcaaaagttagtgttagcagtaagaaagtatgattagtgaaactagttattgtccattatatggattgccgtgcttctgcgcaaataatttaatcaggaagatatattaaggaaatggaaatgaagttcagccctgagaaagttatggtttgagtatagccagtcaaccatcgtggattttataagaattttgtattgcattatgaattatgaatacataatcacctatttatg

SEQ ID NO: 11689 - DNA, 920 bp, Glycine max
  Clone ID: 701120851_FLI
aaggttcagtgttgccaacatcaccttcagggggaagcacagattccttaggtgcaagcagatcaactccttcagtttctggaataaatacctctaattttgcttctcgaagtggctatgctttattggatccaacatgggctgcacaggacaatacctccacagccattgggaatgtggtggccttgcttcattccttcttcagtaaccttccacaagaatggcttgaagggaccaatgttattatcaagcaacttcggccagtaacatcagtcgcaatgttgaggatagcattccgtgtaatgggaccactccttccaaaacttgccaatgctcatgcacttttcaacaagaccctctcatcactactaactatattagtggatgtatttgggaaaaactcccagacatcaattgccgttgatgcatcagacatagcagatatcattgacttcctccatcatgttgtccattacgagggacagggagggcctgtgcaggctagcagcaaaccacgaccggaggttttggctctcattggaagggcatcagagagtttacgtccagacattcagcatttgctttcacacctaaatcctgatgtcaattcctctgtgtatgcagcatttcatcccaagttagctcagaatccaacttaggtgcaggagtataatatactacgaagaaacctgcacatagctctatttgtagttcaaaaatggtacagagcaacatttcttattgtggattcttcaggttatatttcctgtataatcacttggttggagacctgtagcggatgacaattacacaacgcaatttagaaattgtaagagtcaagagttgtatataaattaatgtatatgctattcatttttgccaaattagcatcagaaaagcttataaatgtattgcatatc

SEQ ID NO: 11690 - DNA, 1388 bp, Glycine max
  Clone ID: 701120876_FLI
ccgaattggaacaccacacacacagtgctgtcgtgtaattcccaaaataaataacgaacaagaaccctaattttcattgcaattgtgttggtagggagtgtagggcagattgcgtagaatcggaagatggaagaggaagagcacgaggtgtacggaggagagatccctgacgagggagagatggaaggagacattgacatgtccgccgccgacgatgaagccgccgtcgacgatgacgccgccgtcaaggagctcgacgagatgaagcgccgattgaaggaaatggaagaggaagccgcagcgcttcgcgagatgcaagccaaggtcgagaaggagattggcagcgttcaagatcctgctaatgcagctgcttctcaggcaaacaaggaggaggcagatgctcggtctgtttttgttggcaatgttgattatgcatgcacaccagaagaagtgcagcaacactttcagtcctgtggtactgtaaacagggtcactatcctgacagacaagtttggccagcctaaaggttttgcttatgtggaatttgttgaagctgaggctgttcaagaggctctcctgttgaatgaatctgaattgcatggccgtcaattgaaggttttgcctaagaggaccaatgttcctggaatgaaacaatatcgtcctaggtgctttaatccttacatggcgtatggcttcaggaggccatatactccttacttgtattccccttatgggaaggttcctaggtttagaaggccaaatcgttacatgccgtactactagaagtctcattggaacgtgttacattgggaagatggtgcatcctggagcagaagttttttcatttgggcatttgacactatcttcattcagtattatatagtgatggagaatattaccgtgaatttgtcttaggatggtcttgaacctacatttttcttgcgtagttcttggaagatggtttacaattgccattgaatattatgttagtgacttttcggtctttatagtttatactaacctaagatgtacccttcggtaaaatttgatcaaattagagattgaaatatttatggcgttttactggagcatttaggtcgtaagacaatttcgatctcccccccccccatagcagggtgtttagggaacagaaaggtgtaaggtggagtgtatgtgagaatgtgccctcttaaatacaaacatgtttatccaaacagagaaggaggagaccgaggaaaacttgcttaaagtgatttgaagctctaattctaggctggcttttgtgctgtatcaatgtgtctatgtccaaatatttgttgccacttttgatgttattgactgtcgatatgatctattaagctaagtgacagaggaaatgatttgtttct

SEQ ID NO: 11691 - DNA, 1267 bp, Glycine max
  Clone ID: 701120968_FLI
cagacacttccttttctgtgttcaacagtttcttcccacattaaataccaactgtgtattgtactacaaatgttaactatgttcttcttctttttttgttctcatctccacaccatgtcctaatctttctacaccacatcgttcttcatttttggctttacaaaactaccgtgtctggtaaagggttcgttaacatttccagtgaaaaaagttgttagctaaaagaagaccaagtttttagtgttgtagaaggaagagaagagttaacatgaaaattcagtgtgatgtgtgtgagagagctccggcaacagtgatttgttgtgcggatgaggcagctttgtgtgccaaatgtgacgttgaagttcatgctgcaaacaagcttgcaagcaagcaccaaaggcttcttcttcaatgtctatcaagcaagcttccaagatgtgacatttgccaagacaagccagcattcatattttgtgttgaagacagagcactcttctgtcaggattgtgatgaaccaattcattcagccggaagcctttctgcgaaccaccagcgcttccttgctactggtatccgagtggcatcgagttctaattgcaccaaggacaatgaaaaaagtcacttggagcctcctactaggaatgcacaacaagtttctgcgaaaattcctcctcagcaagtgcctagcttcacttcctcttgggctgttgatgacttattggaactaacagcctttgaatcacctgagaaagaatctctgcagtttggagagctggaatggcttacagatgtgggtatttttggtgaacaatttgctcaggaagccttggctgcagctgaagtacctcagcttccagtaactcataacagtagcagtgttgcttcatacagaacttccaaatcctacatgtcccacaaaaagcctaggattgaagtcctaaatgatgatgatgatgagtattttactgtgcctgatcttggctaagtgtgtggcttgccatatgggatggtgcatgcatgattggaaaagattaattatgggaaaataatttgttttttctttttttaaaagctatttagtaaattgtcgaaaaagattattgttttctcaaaaaactattccattcagacatgttgatatgttgtatattcaattattcatacttcactaagaacaacaattttcacaagttgtgtggagttgataagtattgtacttgaggtgttttttttgctggatagcatagaatctatgcctttggggaat

SEQ ID NO: 11692 - DNA, 1951 bp, Glycine max
  Clone ID: 701120991_FLI
gaagctctctatttggctttacagtcatcacagacactaaaggagaggaatattttacatacaaatggaatagccctgaaaaagtgaggtttcagataacttgggatgggtttgagaagaagttcgtgttggatgcagatgggaaacaatggaataggacacagtttgagccttttgatgactgtgagaagtataacttttgtggtagttttgcagtgtgtgatacgggtaattctcctttttgtagttgcatggaagggtttgagccaatgcattgggaggagtggaataataggaattggacaagggggtgtgggaggaggactccactgaaggctgaggctgagagaagtgctaataatagttcttctggagctgatcgtgaggtgagtgttggagaagatggtttcttggagcaaaggtgtaccaagtttccggatttcgcacggttggagaattttgttggtgatgcggattgtcagaggtattgtctgcagaatacttcttgtactgcttattcatatactattggaatcgggtgcatgatttggtatggagagttagttgatgttcaacactctcaaaataatcttggaagtttactccacatccgtcttgccgatgctgatttaggcgatggggggaaaaagaccaaaatttggataatattagctgttgtggtagggctgatctgcattggaatcgttgtattgctggtatggaggtttaagagaaaacctaaagtttcctcagcttctggtttcaacaacaatagcgaaataccagcctttgatctaacgaggagtacagacttatcagaaatttcaggtgagttaggcttggaagggaatcaactaagtggagcagaacttccattgttccattttagctgcattctagcagcaacaaacaatttctcggacgaaaataagcttggacaagggggatttggtcctgtctacaaggggaaaattccagggggagaggaagtagctgtcaagaggctttcaagaaagtctagccaaggtttagaggagttcaagaatgaaatggtgctcatagccaaactgcaacatagaaatctggttagactattggggtgttgcattcaaggggaagaaaagatactggtatatgagtacttgccaaacaaaagcttggactgctttttatttgatccggtgaagcaaacacaactagattgggcaaaacgctttgaaataatcgagggcattgcaagagggctactttatctgcaccgggattctagacttagaataattcatcgtgatttaaaagcaagcaacattttgttggatgaaagcatgaatccaaaaatttcagactttggcttggccagaatatttgggggaaaccaaaatgaagccaacacaaacagagtggttggtacatatggttatatgtccccagaatatgcaatggaaggtctgttttcaatcaaatctgatgtctatagttttggtgtattgctacttgagattatgagtggccgcaagaacacaagctttcgtgacacagatgactcaagtctcattggatatgcctggcacctttggagtgagcagagagtaatggagcttgttgatccttcccttggtgattcaattcctaagactaaagcgttgaggttcatacaaatagggatgttatgcgtgcaagattcagcatctcgtagaccaaacatgtcatctgtgttgttgatgctgggaagtgaatcaacagctctacctttgcctaagcaacctttgctcactacttccatgaggatacttgatgatggagaatcttatagcgaaggccttgatgtgtcaaatgatttgacagtttcaatggtgacaacagggagatagaagtgttaattacattttttggtttttcccattctgtttagctttgtttagactcttttcaatctacataagttcacagc

SEQ ID NO: 11693 - DNA, 836 bp, Glycine max
  Clone ID: 701121062_FLI
agcaaagcagatgaaggttgatgtagatgaataccttaagacaaggcaacagagttcgccgtttttatctgaactgaaggataagctgcttctctcacccaatgaagcagcttctgctgggactcgatataatgtgccgttaattaactcacttgtgctatatgttggaatgcaggcaatccatcagcttcagggacgaactccccatactcaaacatcagcaaatgctttccccttagccgtattttctgttggtgctgcattggatattttccagaccctaattgtggacttggatactgaagggcgctaccttttcctaaatgctattgccaaccaactgcgttatcctaatactaatacacactacttttccttcatccttctgtacttgtttgctgaatcaaaccaggaagttatccaagaacaaattactagagtcttgttagaacgcctaattgttaaccgtcctcatccctggggtctcctcattacttttattgagctgatcaagaatcctaggtacaatttctggaaccggagtttcataagatgtgcaccggagattgaaaaactttttgaatcagtgtcaagatcttgtggaggcccaaaaccagtggatgatagcatggtttcgggttgggtctgatttcccgtagtcttttgtggttgttagtcctgtgtaggttagccaaccatgttagttaggactatttatactgttgttaatctagcagtgttgtttttacattgtaaattatgttttagtgaaactctcttctttcagatgttatgaccatgtacttgtttatattgcagcatgagtcttaattcca

SEQ ID NO: 11694 - DNA, 932 bp, Glycine max
  Clone ID: 701121085_FLI
ggttcagcaagatatccgaaggggtccctggacagaacaggaggactacaaattggtgtattttgttggcatgttcggagatcgtagatgggactttatagcaaaggtatcaggtttgaaggtggagggagactgtaaataaaataggtttgaatagaacaggtaagagttgcagattacggtgggttaattacctccaccccgatctcaaacgagggaagctcacaccccaagaacaacacctcgtcatggaccttcattccaaatggggaaatagatggtcaagaattgctcgcaagctaccagggcgcactgacaatgagattaagaattattggaggactcacatgagaaagaaaaaggctctggagaaaaagcatgcatcagcatcagcatcatcacctgtttcttctagttgtcaatcttcactatcttcaaacaaccatgttgtggattcacatgcttccaaagagagtttttatgacacaggtggatatgatgacatgatgatggggttaattggtggtgaaaaggggtactctatggatgatatatggaaagatattgttttgtcaggagaagagaacagcatttataacaacaataatctgcaacctgtgtatgaagaagggcatagtgaagagggattcaacttctcttgtcctccaccaatgatgattatgccttctccaccatcatgggatcagtacaacatttcttctcaacccctctgggtgatggatgaagaagaaagtaacaagatgttattccctacactaagtgaccaatatttttctcactatgaacaagggaacgaatttctgaccggctaattaggagattcttttttttctttctcttttcaattatcaatattttgttcttatgtgtgccatctgtcccaataagaaggcttaagtcttaacctgtac

SEQ ID NO: 11695 - DNA, 1906 bp, Glycine max
  Clone ID: 701121104_FLI
ggatcatcgagatttccgacacgcgccgccgcgacccggaggggagaatgccgtccttctcgccggcgcaggaggcgctgctgctgatccacgagcggattctcgagagcgacgctgccttcggggtggcggaggaggacgaggagtacggcggaaggggcggcggaagggaccgcatcgcgacgaggctggtggtgtcgcggatgcatgtggggtgtttgttggggaaaggagggaagattattgaacaaatgaggatggaaacaaagacgcaaattaggatactccctagagatcacaaccttcctcgttgtgtttccatgtctgaagaaattgttcaggttgtaggcgatgtaaatgctgtaaagaatgctctagtaattatttcatcacggttgagggagagtcagcaccgtgaccgcagtcatttccatggacgtgtacattcaccagagcgttttttctctcctgacgatgattatgttcctcatgtgactagtggatctcgcagatcttctgttgatggggcctcttttggatcacgaggatctaacacaaatagtagaaataataaccacccctcattgaattatgcaatggagcctggggctgctcctgttgttgatgattcgcagggcttttatggggaggaacttgttttccgtatactctgtccaattgagaaagttgatcgtattattggggaatcagaaggaattgtagagttccttcagaatgaagttggcgtagatgttaaggtcactgatcctgttggtggttcagatgaacagataattatcattacttcagaggagggtcctgacgatgagctgttcccagctcaggaagctttgttacatgtacaaactcgcattgttgatcttgttctagataaggacaatactataaccaccaggcttgttgtcccatctagcgaaatcgaatgcttagatggaaaagatgtttctctatcggaaataaggaggttgactggtgctaatattcaaattttgcctagagacgagctacctctctgtgttgcaaaaactgatgaactggtacagatcgtaggagagattaaagcagcccgagatgctgttgttgaggtgacatcaagattaaggagttacttgtacagggatttctttcaaagggacacagtaccactaccagctcccttacctggtgcggcggcatcttcttccaataatatagttccggttactgaaactcccacaacctatcaaaatctgcaaactgttgcagcagcccttccatcaaaggaaactggaggatctagcactgagacgggaaagcagaaagaaagtgaccgccgggatgatttgcttagtggtttaaataggattgctgtgcctcttgttacgaggagtacacttgaagttgttttaccagagtacgcagtgccaaagcttgtagcaaaatccaaaagcaagcttgcccaaataagtgagttatcaggagccaatgtaacccttgtagaggatagaccagacgtgacacagaagattattcagatatctggtactccagagcaggcagagagagcccagagcttgctccaaggatttattttgagcacacaagaagacggcccttaaactacctgaaattccgaaagctgggtagtgtcgttgatttagtgcctgaggcattttgttccatgcactgattggttttccatatgtttacaagattgttgtggccaagggttgaaattttcaatgtgagagaagcatctcactgtatatgttgtacaagagagcttcttagttttgttagtctttttagctagtgcatgggagcaattgttagctaccccctggatgttgttttccttgtttatctcatctaatattaatttgagtaagtaatactcaaagcctgc

SEQ ID NO: 11696 - DNA, 1204 bp, Glycine max
  Clone ID: 701121147_FLI
gaaaatttgccccaagatggttacctcaagagacttcttagtggggacttggacttgagtgttaggaaggaggctcttgattggatttggaagagaggcaaaagttggagtatgcaactgttagctgtagcatgtttgtcaattgctgccaaaatggaggagattaaagtgcctccttgtgtagatttacaggtattgtagaatcttactacccaagattgtcaaatatacttttgggttggcatctacattttcctctgattttatcacttttgtttgtaattggttggttggagaacctaagtttgcatttgaagctaaagacattcaaagaatggaactactggtgttaagcacattgagatggaaaatgcaagcttcaactccattttccttcctagattacttcctcaggaagatcacttgtgaccaagttatagtaaagtcatccattttaagatcagtaggacccatccttaacataattaaatgtatatattctctttactctgttagtgtgtttacactttagccttatactatgttcttgaggaataatgtggtgcttgttgggaaatcaatataggtatcaatttcttggaattcaggccctctgaaattgctgcagcagtggcaatttctgtatcaagggaaatgcaagcagaagagattgacaagaccttaacatgttttttcattgtagggaaggaaagaattttgaagtgtcttgaattgatcaaagatttgtccttgatccaagattctgctaacttaggcaccaacttagcatcatttgtaccccaaagccctattggggtgctggatgctgcatgcttgagctctataagtgatgaattaacagttggatcatatacagattcatcccttaatactccaaattctaagaggaggaggaaatctgactaaacccttctgatgggacattcaagtcatgaaattttaatttatttccttcactaaagttcatttggtttggtggttgaataagagtttagtgtggtctttcaggcagttggtaacacactcaatgaaggtgtgtgtcttgggtggataagatggaaatttaagcactttcatgcttatagcatgaaaaggaggtgttgctagtaggttatagaaacagctgcggagagatattgtggatgggagaggaaattttgatgaaacaacgtgttgatgaagc

SEQ ID NO: 11697 - DNA, 1401 bp, Glycine max
  Clone ID: 701121160_FLI
ctaaaagagatctttttctgctctttgaagaaagaagggtctttgcttgattttggagatgtctctgctctcagatctcatcaaccttaacctctccgataccaccgagaaggtgatcgcagagtacatatggatcggtggatcaggaatggacctgaggagcaaagcaaggactctcccaggaccagttagcgacccttcagagcttcccaagtggaactatgatggttccagcacaggtcaagctcctggtgaagacagtgaagtgattttatacccacaagccattttcagggatccattcagaaggggtaacaatatcttggttatctgtgatgcctacactcctgctggagaacctattcccactaacaagaggcacgctgctgccaaggttttcagccatcctgatgttgttgctgaagtgccatggtacggtattgaacaagaatacaccttgttgcagaaagatatccaatggcctcttgggtggcctgttggtggtttccctggacctcagggtccatactactgtggtgttggcgctgacaaggcttttggccgtgacattgttgacgcacactacaaagcctgtatttatgctggcatcaacatcagtggaattaatggagaagtgatgcccggtcagtgggaattccaagttggaccttcagttggaatctcagctggtgatgagatttgggcagctcgttacatcttggagaggatcactgagattgctggtgtggtggtttcctttgaccccaagccaattaagggtgattggaatggtgctggtgctcacacaaactacagcaccaagtccatgagagaagatggtggctatgaagtgatcaaagcagcaattgacaagttggggaagaagcacaaggagcacattgctgcttatggagaaggcaacgaacgtcgtttgacaggacgccacgaaaccgctgacatcaacaccttcttatggggagttgcaaaccgtggagcttctgttagggttgggagagacacagagaaagcagggaagggatattttgaggacagaaggccagcttccaacatggacccatacgtggttacttccatgattgcagacacaaccattctgtggaagccatgagcaaaacctgcatgttttctccctttggatggaaaggaacagttatgcttttcttagtaggatttggtctctctctctttttaccttttgattggtactatggttggtgccttgttggttggtgcaactaactggcaagggttgttcattgttttcttctattcctttccctcgttttccgattgttacaatgacaataatttaatggttattatcagtcttgaacaaagaaatgctgattgtgaagtataataataatatatgaaattgtc

SEQ ID NO: 11698 - DNA, 590 bp, Glycine max
  Clone ID: 701121174_FLI
gtttgttttttctctcacctgaaaatgtcttgctgcggtggtaactgtggttgcggaagctcctgcaagtgcggcaacggctgcggaggctgcaagatgtacccagacttgagctacactgagtcaaccaccaccgagaccttggtcatgggagtggcacctgttaaggctcaatttgagggtgctgaaatgggtgtgcccgctgagaacgatggctgcaaatgtggaccaaactgctcctgcaacccctgcacttgcaagtgaggtgttgggagagcaagcttcaagcagagatagcccttaattaggaataatgataaactattaatgtgtagctaaaaacttatgtattatgtctgtgatggttttcgtgcactctggtgttttgtgttaaacaaacatccttagaataaagtggtcatgtcttgcctttcagcaagttcaagtgttttggacttgtgatgggtgtgttaagctcatggttgcttctttttttttttttttaatgtttggtaattggtcgcttctgtataaagttcggctaatctgaattatgaatctctgcttataatattaaatactattactgg

SEQ ID NO: 11699 - DNA, 379 bp, Glycine max
  Clone ID: 701121184_FLI
tctagagggttgatcagccaaggagatgttgttctagtggtctcagatgttgctccaacacgtgccactcctatggctttccagtctattcaggtgaagactattatctaaaacgcaaggctgcaaaaatattgaaggacacgtgtctgtgtattttataggcttgggataggatagtattgtattattggtttcttgtctttttttttttattggtttcttgtccttatgtaaaacaacaaagtttataaattccaaatggtagaactctagcaagttttgaaacctctttcaagagattcttatgaattacacttcgtgaattgcccattgtaagtcactaatacagttgcaccaatatatggcaattatatttgat

SEQ ID NO: 11700 - DNA, 1604 bp, Glycine max
  Clone ID: 701121257_FLI
cgagcggccgccaatgatgatgatctgaggaaccgtgtttgtctcgtgtctcatctcatccatgaagagaaggagaagaagggatccaaaatcagaagaaagttacgatttttcgagatgggtctgtccaaggagaatctgaaaggtctcatactagctttggtgtcaagtgggttcattggggcaagttttatcattaagaagcaaggccttagaagagctgcagcagtttctggtgtcagggctggtgttggtggttattattatctcttggagccactatggtgggtgggaatgatcacaatgattgtaggagaggttgcaaacttcgttgcatatgcatttgctccagcagtcctagttactcctcttggtgcattaagtattattgtgagtgctgttttggctgacattattctgaaagagaagctacacaatcttgggatattgggctgtataatgtgcattgctggtagtatcattattgttattcatgctcctaaggaacaacctattacatctgttctggaaatatggaatatggccactcaaccagcttttctggcatatgtgggctcagtaatagtgttggttttcattctggtcttccattttgcaccaagatgtgggcatacgaatgtgctagtttttactggaatttgttcattgatgggttccctctctgtgatgagtgttaaagcccttggaacttctttgaaattaacttttgaagggaaaaatcagttaatctacccagagacatggttttttatgttagttgttgctatatgtgtcatcatgcaaatgaattatcttaataaggctcttgacaccttcaacacagcaattgtatctcctatatactatgtcatgttcacaacacttacaatactagccagtgtaataatgtttaaggattgggatggacaaagtggtggaactattgtgtcagaaatatgtggcttcatcattgtgctctctggaacaataatgttgcatgcgactaaggacttcgagagaagctcttcttttagaggtagtgatcctttatcgcctacgctatctgcccgactttttaccggaaatggtgactcattacttaagcaagatgaggaaaatggatctcccgagagtaatatgcgctcaagaaggcaagaattgtattagatggttaaagatcttaatttatttaattgtagggggaagaagaagcctttccctggagaatctgaatgagatgcccatcagattatactacaccatgaagctgtaggtaccaatgaaaccataaaatgatggaagatttgtgaagccattcttttaccctgagcatcttaggaatttatcctcatagattttagttctgactttgaaagatggttctggaaccaatgcttacataatgtatagcttgtccaccgtttcttgtgtcatgaatggtttgttcactagtcaaaagtagctaatatgctccaaatagttattagattgagatgattagttgtatttgtgaggctctctttacatgaaccaaaaaagtgagtgggggatggagattattagtttgtgaaaattatatgcatggtgattttgctttctttttc

SEQ ID NO: 11701 - DNA, 1118 bp, Glycine max
  Clone ID: 701121259_FLI
cttctctttgtgttcctaaaaaacacacagcacaagtagacaaacacaaaggaacaaattgcaagttgagaaaattaacatggaaaacagtgacatttcctctgccccactttctcactcccccactaattcctcttcttcctcaccaacaccaccttcacctcctactgttgtgatgagtccttgtgctgcatgcaagattttgaggagaagatgtgctgagaaatgtgtcttggcaccttattttcctccaactgaacctgccaagtttaccattgcacaccgggtatttggtgccagcaacatcatcaagttccttcaggagcttccagagtctcagagagctgatgcagtgaccagcatggtgtatgaggctagtgcaagaataagagaccctgtttatggttgtgcaggggcaatttgccagctccaaaagcagatcaatgaacttcaagcacaattggccaaggcacaagctgagcttgtgaacatgcagattcagcaagccaatcttgtggctctaatttgcatgaaaatggcacagagtccacaggaatcaccacaacaattagtggatgatttcatttcaactcctccccacagtggtggtgcctatcaaagtggcatgaacttctttgaggacaacactagcctaaactcactatgggaacagcccctttggacatgaaggagaatcaatatcatataaatattaattaaatatagaatacggttagacattcacaaagtggttcgtatgattgtctcccaaggagaaagttgaacgaatcaattagaactaataaaaagttaattcaaattaagctaggatttatgcaattatgttaatttaattccctgcatgaggaaaaatttggagggaaagaatatgatttactatctagtaagaaggtcctgcattcaatcctttgagcatgttgatcaaatttgattcctaactttgtgtataaaaaatgcattgttaggagatgtattcgatcacttgctaggcaaaaaacatcaacctaaaaataatagatggtgttttactccatgtaatatttggaattgaagagaaaggaaattgtttggaattgaagagaaaggaaattgttacg

SEQ ID NO: 11702 - DNA, 459 bp, Glycine max
  Clone ID: 701121276_FLI
gtggagcacaaggttgtggcaaataacaaaatggaaagatactccatagcatatttcctatgtccttcttacagtactgtcataaacggctgcaaaggaccttctgtttataggaagttcacgtttggagaatacagacaccaaattcaagaagatgtcaagaaaataggacacaaaattggactatcaagatttctactttaagatacatgcgcacattgggataaagcattaaacatcattcacatggaggaactaatattactattttgcctttgtagtaatagagaaaagagggagttccaatattcttttttttttatatatatataaataatgtttttctgtttagatgcaatatatgtaagaaaaagagaacagagccagataaaaaaaaggtggtggtttatgatacacccagttagaagcacctgaataaaaaagtgtttttttttcctc

SEQ ID NO: 11703 - DNA, 2178 bp, Glycine max
  Clone ID: 701121308_FLI
agaacctttgctttcctttcctagggccggtgtcagcccagtacagtggattcaattacttaatgctttagatcagcaagggttgcctttgctctctcctgtgaaggttcatttacagaagtgcaacaagtgttctcgagaattttgctctcccattaactatagaagacatatacgcatacagcatcgattgaaaaagcttgataaggattctgataaaaatagggatcttttaggggcatattgggataagctctccgtagaagaggcaaaggaagttgtgtcattcaagaatgtgatgctggaggaagttccagggtcttcaattttagaagctttgacaactcttaggaaacaaggattttcctctcttccacaatattatctgagggctggttctgcccttttgaatattgttcaatccaggccttctagttttcctaaatcttcccaagagttattcagtatcttagatgattctagtgaaaaaacatttttggttggatcagcagtatcaatgcaaagatatgtttttgatggagaggctggaaagattggtcttgaaccaaaaaacctagttgcttgcacaagtttcttgctagagcagaatctggtgaaggcctggcttgctgacaaggatgctgaagcattgagatgccagaagctgctggtggaggaagaggaagctgctcagaaaagaaaatatgagattttagagaggaaacaccagaaaaagcttagacagaaagaacacaaggcaagggaacgactcgaagatgacacagaaattaaagagaacatacgcagcacaggagaggatgtttcaccaactgaagcatcttctggtacatgtgactttgaagcacataatccagatatatttgcggatcattctactcctccacatgtaacttctcgctgcctagacaatgatgaagttatagaaggggttacactgtcagggtatgattttgacactgatcagtatatagaacgacagacatcacgaggacataatcaccggcgcataatggctaccagatggcaagggctgccaaaatctcaatgggccatagccaatggttcgcatccaggccataattctcaaatgtcaaagcttggagtcattcaaaaacatggaaccaactgtgatcaaagggtagctcctatagttaatggtagtaagttttggagccgaaaacctaaaccagaaactaatggggtggttttaaaggccagactgcagaaagaaccagacaaatgtaagaatcatgaagttttgataggatctgtatcagtttgtctgggaaattgcagccattcagaagggaatttggtggcaccccagcgggacagcttggtagataatctagccaagcagaatactgctcaggagaagccagtgaaacatgattcctctcagggaagtaacggtcggttaacagttaaactttggaggccggttagccagcatggaactaaagatctattgccacttcaaaatggtggtacagaagctgatgtaattaatggaaaatatgacctaaatttgtcaggtcaatgtagtttgaggttgtgtagtatagatggtagtgatattggttttggggacaatttttcccacactggagattcagaaagcttacgtctatccagccatgctgcaaaagcctttcttgtacaaagatggaaagaagctatctcatcaaaccatgtgaagttgtttgttacacctgattgtcaatcttctaatgcggacagatgtagcattattgcaaattcagagaaccgattgcctgcaacctctggagttgccaaatccaaacccaaaacgaagcttgagaaggaatgaagataaagtacattcccaaacaaaaagcaacaacctagtaagaagaatcaaagaagaaatcgggttatttaattatgacagatatgcataatttgacttctcgccaattaattttactaacagaggttccagttttatcgatggtctttctgtcagaaaattggaggtagggttttgcgggaaagtctttttatattccgtccttttccttcaaatgatggcataggggattgtgcattaagtttatttttttcttgtggcatttttaccaaaatttttgtgtaataaatttgtctagttattataaaatggcatttaatagtatc

SEQ ID NO: 11704 - DNA, 410 bp, Glycine max
  Clone ID: 701121326_FLI
gcgggtttcgcggcgcggcggaagaagaagaagactcatctggaaccctttgggccgacagcgtgaagaagaagcggaagaagaagatgaacaagcacaagtaccagaagctcaggaagcgcatgaggagacagacgtagaaggtcagggaacagaaaaagcattcaactttatcaattcagttttctttttagtgaaactgtaatgttgtcgtctttgtttctattagttttttttttttttggtagtgaaaagaagaattgagagggaggggggagactgtgacatttagttggaggcgaattgttttggatttcttttttgttcactcttggttaatctaaatgttgttattgcactttaatttgatacttcttagtttagaataaataatacatgcactgcaatcc

SEQ ID NO: 11705 - DNA, 572 bp, Glycine max
  Clone ID: 701121395_FLI
attgcttggtgcttgtagcatacatggtgattctgagatgggtaaatatgctgcaaatcaactgtttttggctacaccagacagcccggctccttacgttttgatggcgaacatatattctagtgaagggaaatggaaggagagagcacgttccattaagaaaatgaaagagatgggggtagcaaaagaagtgggtataagctgggttgagattgaaaagaaagtcaatagtttcgtagtaggggacaaaatgcatcctcaagctgatgctatattctggcttttgtccaggttattgaaacacttgaaagatgaaggctatgttcctgacaaaaggtgtattctctattacttggatcaagataaaaaggattaggacctgtttgattttctattgctgagttgtttctctgcatttattctgatggttcattttctagtgagaagaaccctatagatgtttgtgcggaaaactagccagaacttggtttggatcggatcgtggatcatggacaaaaagtacattacatcaatacatcattaaaataatggcacgacaattttgttttctt

SEQ ID NO: 11706 - DNA, 1074 bp, Glycine max
  Clone ID: 701121508_FLI
agaggccagagagtgtggtgtgtgtgtgtgtctctctctttctctgcttttgagtaattaaatgagagcaaaaatgacgctcaaaacagcggcggtggctgtggctatagtgtgcatttctgcctttagcatcactgtggtggctgaagatccatacaggttcttcaactggaatgttacatacggagacatttatccacttggtgttcgccaacaggtctttgattctctcttctactttcatctcattcattctaaacataataacatactatgtgtcttgctctcacacacactcacacaaacagggaatacttatcaacggtcaattcccaggtccagacattcattctgttaccaacgacaacctcatcatcaatgtcttcaacagcttggaccagccatttctcctctcctggtacttactttacatttgcaattagttttttttttttatctttgagaattgaagagataatacatatgctcaaccaattcaattaaatcccatgatacattttcaatccgattctaagcatcaaatgaataattagttaattcaacaaaaaaaaaatgaataattagttatgctcatgcttacgttaaacttttagtttttcttaattaaagattggtatgtgtgaatgtgatgttgcacgtttagcagtacattttggatgtttgttgagtcacatgacctgcaactggaaagtgccaactatcaaatgtccacatcctaccccttctagggggcatgggtcaacccaccaattctgatttgcggacatcaaaccagatcttaaataatatatataacagtattttaacctctgtattacatagaacaaatatttatatttatataactaaaatttataataaataaatattttaaatatataactaaaatttataataaataaatattttaaatatataaattatatcttagatttatgacaaatactagtactttatattgtactaagatgttatttttggttactgataattttttttaaaactattttaaaatttaagttggaattaaacatgtttatgactttgtgtgct

SEQ ID NO: 11707 - DNA, 558 bp, Glycine max
  Clone ID: 701121545_FLI
gcttgcttttgaaggtcaatagtgcagctttcaatggggatatgtatcagctaaaagtttaattcgagcaggagctgatcccaacaaggcagattatgatggaaggtcacctttgcatcttgcagcatctagaggatatgaagatatcacaattttccttattcaagaacgtgtagatgtcaatattatagataacttcgggaacacacccttacttgaagcagttaagaatggacatgatcgggttgcttctttacttgttaaagaaggggcctctatgaagatcgaaaatgctggtagttttttgtgtactgcagttgcaaggggagattcagattatcttaaaagacttttatccaatggcatggatcctaacttaaaggattatgattaccgaagtcctcttcacgttgctgcagctgaaggtttatacttcatggcaaagttgctattagaagccggagctagtgtttttacacgagacagatggggaaataccccgcttgatgaagctcggatgtgtggaaataagaatctgatcaagctactggaagatgc

SEQ ID NO: 11708 - DNA, 729 bp, Glycine max
  Clone ID: 701121563_FLI
ggtcattttcagacatgggggtacacttatattatacagaggcagaaattataatccgaaaaagaggcctgtaattcctgtcatgttgtggaagccccatgaacctgtatatcccagactgattaagacaacaattgatggcttaagtattaaggaaacaaaagaaatgcggaagagaggactatctgttcctgctttaacaaaacttgccaaaaatggttattatgcttttttggtacccatggtcagagatgctttcctctcctgcgaattggttcggatagactgcgagggacttgagaggaaagattacaagaaaataggctgcaaactcagggacatggtcccctgtattctggtgacttttgagaatgaacaaattgtggtttggagggggaaggattataagcacccgaaggatggatactttctcaaagatcgagaatcgtttgacgacgatgatgacttttgtgtgggaaaagagcaacaggctatgtaacacaccacaatcagatgtgataattaagtggaatctttgtgcaaattgctgccatgaatcagaagttcccttgagattggattgttgtgttctgtgtaaatgcagtcaatgatgaaatttgagatatttggatataacaagatatatctacactgttctttttccatgactcattgtaggcctttaaagttgtaaggaaaaatctgaagatataggatgagtttctaacc

SEQ ID NO: 11709 - DNA, 982 bp, Glycine max
  Clone ID: 701121732_FLI
atcggtgttcacttgatctcatcataatcgtcagcgtcaattgaagaagatgccgatcagaaacatcgccgtcggaaggcctgaagaggcgactcaccccgacacgttgaaggcggctttggctgagttcatctcaaccttcatcttcgtgttcgccggctcaggctccggcatcgcctacaacaagctcaccgacaacggcgctgccacccctgccggcctcatctccgcctccatcgcccatgcattcgccctcttcgtcgccgtctccgtcggcgccaacatctccggcggccacgtcaaccccgccgtcaccttcggcgccttcgtcggcggcaacatcaccttcctccgcggcatcgtctacgtcatcgcccagctcctcggctccatcgtcgcctccctcctcctggccttcgtcaccgcctccactgttccagcattcggactctccgctggagttggagttggcaacgccttggtgttggagatcgtgatgaccttcggtctggtgtacacggtctacgcaactgccattgaccccaagaagggtaatttgggaattattgctcccatcgccattggtttcattgtcggcgctaacattttgttgggtggggccttctctggagcggccatgaaccccgctgtgacatttgggcctgctgtcgtgagctggacctggaccaaccactggatctactgggccgggcctctcatcggtggtggaatcgctggccttgtttacgaggttgtctttatcagccacacccacgagcagcttcccaccactgactactagagggggggaaatgaaaataaaaaaaaaaaaattgtgtattattgaatttctctggaatcttcttctgtgtatggttttccttccttgtgttttcttcctaattcactttcgagggttgtacttgttcctttcgtcttaaatccttggatggttgatgatcatgaagttctctttaaagtt

SEQ ID NO: 11710 - DNA, 2228 bp, Glycine max
  Clone ID: 701123142_FLI
ctagagagtaaagtttgaaacctatcttgttactttcatcgtcagaagcttacaggttgaatccatattttttctccttggaaaatgatgatgatgtttgatgagatggggctttgtaataatttggatatgatatctgctccccttggagaggaggatattaccacccggcaaactgatcctgaggtaattgttgaggatgattttactgatgaagaaattggggtagatgaactcgagcagaggatgtggaaggacaaaatgcgtctcaagcgactgaaagaacaaagtaaatctaaggaaggaattgatgcagtgaagcagaggcagtcccaagaacaggctaggagaaaaaagatgtcgagggctcaagatggaatcttgaagtacatgctgaagatgatggaggtttgtaaggcccaaggatttgtctatgggattattcctgagaagggaaaaccggtgactggggcatctgataatcttcgtgaatggtggaaggataaagtccggtttgatcgaaatggtcctgctgccatagccaagtatcaagctgataacactatcccagggaggaatgatggatgcaattccattggtccaactccacacaccttgcaagagctgcaggacacaaccttgggttctctcttgtcggcactcatgcagcactgtgatccccctcagaggcggtttccattggagaagggtgttcctccaccatggtggcccacagggaatgaagagtggtggccccaaatcggtttatcaaaagatcaaaattctcctccttacaagaagcctcatgacctgaagaaggcgtggaaagtcggtgttctgactgcagttattaagcacatgtctcctgatattgcaaagattcgcaagcttgtgaggcagtccaaatgtcttcaagataagatgacagcaaaggaaagtgcaacctggcttgcaatcatcaatcaagaggaggccttagcaagagagctataccctgattatatccccccattagcctcagctggaggtagtggatctttggtgatcaatgatagcaatgagtatgatgttgaagggggtgaggatgagcctaactttgacgtggaagactgcaaacatgagaatcttcacacatccaatcttgggatggaaagagtgagggtaactctgccagttcaacagccctctttttcaataaagggagagactgttacaaatttggatttcattcggaagaggaaggtttctaatgacttcaacatgatggatctgaaaatttacacatgtgaacaccctcagtgcccttacagtcaagttcgccttggtttccctgaccgaatttcaagggacaaccatcagttgatttgtgcttatagaggtacttcagattttgggggtccaagttttcctgttaatgagataaagccagtcgtacaccccccgtcctttgttcaacccaaatctactgctcagcctggtagtatggttccacctgttattgatctaactggacttgaagtttcagataatggccagaaaatgattactgaccttatgactaactatgacacaaatgttcgaggcaacaagaagacaagttcctgtaatcacttagctgcagaaaatttcgaccttcctcagcatgccatgcagcagcaacaggacaacttcattcgcggtcaaggaatcactgcagaaggcaacatctttgatgaagctaacatgcccaacaatcatcacatgtttgcaagagaagaaggtcaatttgaccgtttcaaagctttgaatgctccctttgagaccaatcacaacaacaacaacttccactcaatgtttggttccctttgtgatttggcatcatttgatttcaaggaggatatgcaaggagtagggatggatactcttcagaaacagccagatatttcaatatggtaccagtgaaaatgacaagttgaatctggaagctcgttatccacatcatgaattcttattttcatgtgatgttccttcagccaagtcttactggaattttcttcacatgtaattctgtaggcctagtagaactagatatttttgacttatcctttacaggtctagtagttgttacaataaaaaacttatatgtttagcccttgtgtgctttttttttttttatcagtctagccttgttacttaagattactattctatgcaagactgggatataaataagagttgaagtttcttcc

SEQ ID NO: 11711 - DNA, 451 bp, Glycine max
  Clone ID: 701123158_FLI
tgtggataggatcaatctagaatcctgggatggagcagctaagaattctgcaaagcaagaacctaaccctcttttagctgttttgaaagtttttgttgatgcttttgtgaaattttggtcagggtgaagatattaatgtttgtttctttctcttctgttgtgttgtctatgtatggtgatggtggagttgattttttgtacctaacagaataattttgatttagccttgatcatttaatgagctcgtcattttcctttataaattaccacgatcttgttttcgtagttgatcctgttgtgtggcataatcatgcaagttcagttgtgtttagtagatgggatgcagtctcagttgtttagctgcaatctgtttcttattggaaattagaaaacataatctagcgggagaatctctcttttaatgttcacattctcaatatcctatctcaac

SEQ ID NO: 11712 - DNA, 1505 bp, Glycine max
  Clone ID: 701123183_FLI
gccccactcaaccaccacacctctcctcgttcacgctacccctttctgctcttcttctacctttcaagttttaaaagtataaagatggcagagacattcctatttacctcagagtcggtgaacgagggacaccctgacaagctctgcgaccaaatctccgatgctgtcctcgacgcttgcctcgagcaggacccagacagcaaagttgcctgcgaaacatgcaccaaaaccaacttggtcatggtcttcggagaaatcacgaccaaggccaacgttgactacgagaagatagtgcgtgacacctgcaggaacatcggcttcgtctcaaatgatgtgggactggatgccgacaactgcaaggtcctcgtcaacattgagcagcagagccctgatattgctcagggtgtacacggccaccttaccaaaaaacctgaagaaattggtgctggtgaccagggtcacatgtttggctatgccactgatgaaacccctgaattgatgccattgagccatgttcttgcaacaaaactcggtgctcgtctcaccgaggttcgcaagaacggtacctgcccttggctgaggcctgatgggaagacccaagtgaccgttgagtattacaatgacaatggtgccagggttcctattcgtgtacacaccgtgctaatctccacccaacacgacgagactgtcaccaatgacgaaattgctgctgacctcaaagagcatgtgatcaagcctgtgatcccagagaagtaccttgatgagaagaccattttccacttgaacccttcaggccgttttgtcattggtggccctcatggcgatgctggtctcaccggccgcaagatcattatcgatacttatggaggatggggtgctcatggtggtggtgctttctccgggaaggaccctaccaaggttgataggagtggtgcttacattgtgagacaggctgctaagagcattgtggcaagtggacttgccagaaggtgcattgtgcaagtgtcttatgccattggtgtgcctgagcctttgtctgtgtttgttgacacctatggcactgggaagatccatgataaggagattctcaacattgtgaaggaaaactttgatttcaggcctggtatgatctccatcaaccttgatctcaagaggggtggaaataacaggtttttgaagactgctgcctatggacactttggaagagaagaccctgacttcacatgggaagtggtcaaacccctcaagtgggagaaggcctaagtaattcattccactgctctatgctggaagttttttgagcgttgcccttataatatgtctaatatccataactttccacgtctcttactctgtgtgtttctctcctcttcctcctattttgttatttgtatgttcttttgtaattttttacgtgatcaactaaaaacatgtactctctgtttgtatgtatgccctaccaatgtgtctcttaatatcaatatcaaaaagagagtgttcaagtt

SEQ ID NO: 11713 - DNA, 994 bp, Glycine max
  Clone ID: 701123406_FLI
agaggttccaacattgagcttttgctagacattccaaatgacaacctcagaaacctagcatctagccaagacaatgcaaacaaatgggtgcaagacaacatcaaaaactatgccaacaatgtcagattcagatacgtttcagtgggaaatgaagtgaaacccgaacactcatttgcacaatttctagtgcctgcattggaaaacattcagagggccatttctaatgctggccttggaaaccaagtaaaagtttccactgccattgatactggtgccttggcagaatcattcccaccatcaaagggttccttcaaatctgattatagaggagcatatcttgatggtgtcatcagatttctagtgaacaataatgccccattaatggttaatgtgtactcttacttcgcttacactgcaaaccctaaggacattagtcttgactatgcactttttaggtctccttcggtggtagtgcaagatggttcacttggttaccgtaacctctttgatgcttcggttgatgctgtttatgctgcattggagaaagcaggaggagggtcattgaacatagttgtgtctgagagtggatggccttcttctggtggaactgcaacttcacttgataatgcaagaacttacaacacaaacttggttcggaatgtgaagcaaggaacccctaaaaggcctggtgcaccccttgaaacttatgtgtttgccatgtttgatgaaaatcagaagcagccagagtttgaaaaattttgggggctcttttctcctataactaagcagcccaaatactcgattaatttcaattaatttttagcagaagcataatttggtgtgaaataagggccacgagtccaaatgaaacttcaataattgttttagaagaggcaggtatagaactttaatttatctgcattcttgaagtctgcatgtaccatttacgagctaagttaattagctttaaataaaagttctcttattaatgatc

SEQ ID NO: 11714 - DNA, 1085 bp, Glycine max
  Clone ID: 701123582_FLI
gatctcccaccaggttttcgattctacccaacagaagaagaattagttttcttctatctacacaaccagctagaaggccaaatacacgacacaagcagagtcattccagtcattgacatcaatggcgtagagccatggaaccttccatcacttgcaggggagctttgtcgtggagacacggagcaatggtttttcttttcaccgagacaagagagagaggccagaggaggcagacccaacagaaccacagcaagtggttattggaaggccactggttcccctggccatgtttactcttctgacaacaaagtcattgggatgaagaaaaccatggtcttttacaaagggaaagctcccaccggaaggaaaaccaaatggaagatgcatgagtataaagccattgaacactctgatcaatccaacactgcccctccaaagttgaggcacgaattcagcttgtgtcgtgtttatgtgatatcgggaagctttcgatcgtttgatcgacgcccactggatatgccaagagttgagctacgagttgttgatggggacagaggtgctgcttcaacaagtgctcaagctcaacagagaagttcttctcatacttcccactctggtggtgatgctcatgtcacagatgctggagcagggtcaagtggaacaaattggaatgcaagtaatagggttgaggaaccactttgggaatgggaacaacttgattggccatgacccaaaagtcaagaacatgctcaaacctagcaagactttcttaattgaataacgtcgtttcaattaaattaatcatataagttgtaggcgtagtttggttcgatttccttcacctcgaagggccatgtaatgtaacataatcattagtatttgttgtttaacataggattggttttccccgggaaaataagttgggaataagatccaagcataaaaaggaaggtggtgtggatcttgtaattttgtttttgtgacttgttgtcttgtaacgataatcaatctccttttcaaccctagaaattttctttcttgtttaggaattcaaatgaaattaatcaatctactatttgcttatg

SEQ ID NO: 11715 - DNA, 993 bp, Glycine max
  Clone ID: 701123638_FLI
tgaagtacttaagagagcaatccacacagctgttgctatccttactgccctaatggctgcaacaaaagcaaccaggtcttccaatgttattcttgtaattgtgattggtgctcttggtttgtttattggatggttgatagaaatctcaacaaagtataggtccctttccttttcaattggaatctcatttaatttctctcactgtggctctataatcttgtcaagacacttttgagacggtaccactgggcatttgccttggctggttttcttgcattggccatggcagcaataagctggacacttgaaaccagtgaaacctactggttttggcatagcatttggcatattacaatatacacatcttctttcttcttcctttgttcaaaagcaaatattgaggatactgagaatcagcttcctacaaatggaaactatgaattgactcatcaggattcacttccaagaactggttagaataaagtaaatggaataccgagtaatggtttatggatacttgcatagtgtatacactcaatcaacacccttcatttatccctatctctattttcttatcacatcatatttcttactacatctacacttttctctcttgtatctctttctctgggtgtatgtatattgggtttgagtgtccataaatcatttttgttaaaaattttggtgttttgaggcaagttgtggagacggctcaagaatgtgtggctactgctattgaattttgatgccaaaaacaatgaccaagcaaagcagtctcttgtaaatcttgcagcataaggtttgtttctgccattctttataggataattttggcatgactgtgtctaggataaagaatcaaactacggatatatttttgtcataggatgaaggagctttgttcatgtaattatgatttagaagttaacttgcctttgaactgtatcatatttagagatctttcttataaaaataactcaacatgatagatct

SEQ ID NO: 11716 - DNA, 991 bp, Glycine max
  Clone ID: 701123743_FLI
atccctcccaatgataccggttttcaaaagaaactcctgtatctggaatccatcggtattgactctttcttgcttattgaaaaccatccaacagtgatcacaacctctcttgctgacataagatccaccgtggagtacattacctccttggatttcactgcaattgagtttcggcgtatggttggcatgtgccccgagattctgaccacccaagtctcagacctcatacctgtcttcaccttccttcatcgtgaggttcatgtgcctggctcggatattaagcgtgtaataaatcgtcgtcccaggttgcttgtcagcagtgttagtaagcgacttcgtcctaccctgtacttcctccaaagtattggcatagaagaggtaaacaagcacactgacttgctatcatgtagtgttgaggaaaagttcatgcccaggattgattactttgagaatattgggttttctcgccgtgatgcaacttcaatgttccgaagatttcctcagctattttgttatagtattaaaaataacttggagcctaaatacagttactttgtggtggagatggggagagatctgaaggagctgaaagaattcccacagtatttctcatttagcctagagaataggattaagcctaggcataaacagtgtgtagaaatgggggtgtgttttcctctccctgccttgttaaaaacaagtgaagtgaaatttcaaagtagattagacgtatgtgtaaattcttcaacccccttgaaaacatcccctctgtggtctgctggctgtgatgtttatgacgtatagaataacatttgcattgtatatttaattgcttttgtgaatttctaaaccagccattaggtgcttttggcctttcactatggaaaagttaatcagtcatgagccatcccttccaagcccttgtttgtattatgtgtgaaacgaagctttgcatgatttccaaagcaaacaaatttagctagctttggcc

SEQ ID NO: 11717 - DNA, 1837 bp, Glycine max
  Clone ID: 701123765_FLI
ccagctggaattaatgccattgtagccattgcctgttactctggttataatcaagaagattccgtcatcatgaaccaatcgtcaatagaccgtggattctttcggtctctgtttttccgttcatatagagatgaagagaagaagatgggaaccctggtcaaagaagattttggccgtcctgatagagctaacaccatgggaatgagacatggttcttatgataagctggatgatgatggtcttgccccaccaggcacacgagtatctggtgaggatgttatcattggaaagaccaccccaatatctcaggaggaggcacagggacaagctttacgttacacaaggcgtgatcacagcataagcttacgtcacagtgaaactggaattgttgatcaagttttgctgaccacaaatgctgatggattgagatttgtgaaagtaagagtgagatctgttcgtataccacagattggtgataaattcagtagtagacatggtcagaaggggacagttggtatgacttatacacaagaagacatgccctggactgtggaaggcattacccctgatattattgtcaatccacatgctattccttctcgaatgacaattggtcagcttattgagtgtatcatggggaaggtggcagcccacatgggaaaagaaggagatgcaactccttttacagatgttactgtggacaatatcagtaaagctctacacaaatgtgggtaccaaatgcgtggttttgagactatgtacaatggtcatacagggagacgtctaagtgcaatgattttccttggccctacatattaccaaagactgaagcatatggttgacgacaagatccattctcgtggaaggggtcctgtgcagatcctcactaggcaacctgctgagggacgctcacgagatggaggtctccgatttggagagatggaacgagattgcatgatagctcatggagctgctcacttcttaaaggaaaggttgtttgatcaaagtgatgcatacagggtccatgtatgtgagcgttgtgggttgatagctattgcaaatctcaagaagaattcttttgagtgcaggggatgcaagaacaaaactgacattgttcaggtttacattccttatgcttgtaagctcctcttccaagagttaatggctatggcaatagctccaagaatgcttacaaaggaggtcaaaactacaaaccaaaagaagaagggagcctgataaacatgtttgaccaaagccacttgtcttatattctgattaaaagctctcgagaatatggaacaaacatggtatctaaatatacaaatttgatttgataatgtttttcaagtctcaaattacaggaacctttcaagtgttgggtaattcacaagcaaaaatagctttgataccttcattattgatgtttcccgctgcgttttctctattcaagggtgctcattccaagcgactaatgttaccgaccgagcactgtatatataatggaagtttttcaattccgagagcttgtttcttattcactaagcagagatgggttagcagaagtttctgtcgcgtaattctagtgagccccgtcttaaatgctgtgaaaggtcttatacccaatcaaccgagaattccagctccaattttggaaatccttttgttggtttagggggaggtcacccgaattggattatttaaatttagttgcaatgcttgagagctatggtatatggtacttgtaactcgagactctggcaattttaagttcaattcttgtacaatatagtgaaatgagagaatttatttgacaaagttgatttgtgagttttccatt

SEQ ID NO: 11718 - DNA, 350 bp, Glycine max
  Clone ID: 701123836_FLI
ccagcatagaatttaatgtggctggtgaatgatttgttctctcataggttgctgatatgcttaaaagattggtaacctagattggaacctcaggatatagaatggttggcatgcagtatggaaatgtgatggactgtgtatctgttgagtactgtttttgttctggtttgcaagtatggttggatggttttgtgattgtgggttttcatctttctcatgtttccttcaattgagttgtttttgtacttttaaaaaaagtttttttttttttttggttttttacgacaattatacatttaggatatgtgctatggttttgttgtgccttttcatattattttttaaaaaat

SEQ ID NO: 11719 - DNA, 1000 bp, Glycine max
  Clone ID: 701123845_FLI
ctttgaaattaacttttgaagggaaaaatcagttaatctacccagagacatggttttttatgttagttgtggctatatgtgtcatcatgcaaatgaattatcttaataaggctcttgacaccttcaacacagcaattgtatctcctatatactatgtcatgttcacaacacttacaatactagccagtgtaataatgtttaaggattgggatggccaaagtggtggaactattgtgtcagaaatatgtggcttcatcgttgtactctctggaacaataatgttgcatgcgactaaggacttcgagagaagctcttcttttagaggcagtgctccttcatcgcctacgctatctgcccgactttttaccggaaatggggactcattacttaagcaagatgaggaaaatggatctcccgagagtaatatgtgctcaagaaggcaagagttgtattagatggttaaagatcttaattcatttaattgtagggggaaggagaacccttccctggagaatctgaattagaccatagaatgatgggagatttgtgaagccattcttttatcttgagcatcttaggaatttgtcctcatagattttagttttgactttgcaagacggttctggaaccaatgctttgcagggtacataatgtacagcgtgtccacagtttcttttgtcacgaatggtttgttcacttgtcaaaagtagctaatatgcttcaaatagttagattgagattagttgtatttctgaggctctctttacatgaaccagaaaagaagtgagtgggggatagagattattagtttgtgaaaatcatatgcatggtgattttgctttgtttttcaattttatttatttgttttctttgtcaatttggcttggcatagaggattcatttgtggtttgtaagtaattagatatgtacagaaagctaagagacttctctctaaattttagtttgctatgaataagaaatatgttttcattcttacatt

SEQ ID NO: 11720 - DNA, 830 bp, Glycine max
  Clone ID: 701123944_FLI
tgaagccaaaagggtagaatgtgatgagtcaaattggggaagcaataataataataatgacaacaggttttcaggaaacacaatccaagtgcaaccaatatgtttcagagacatggggactgagatgacaccgattactagccaagagccttcaagaactgggacaccaattagagccacaactcctgctactagaagcccaattcattcagggacttcaactccaatgaggggtcaaaatgggttgcaacaagttgctgagggtggccatggcactactaggaagtgtggagatcaaggatcaacaagcccttgcaagaagactcatgaagatcatcaagctagaaaattgagtcctctagaaagccgtgcaatggcttgggatgaggcagaacgtgccaaatttatggccaggttcaagcgtgaagaggtgaagattcaagcctgggaaaatcaccagataagaaaagctgaaatggaaatgaagaaaatggaggtgaaagctgagaggatgaaagctttggcacaagaaaggtttgcaaataaactggcttcgactaagaggatagctgaagagaaacgagctaatgcacaagtgaagctgaatgacaaagctttgaggactactgaaagggttgagtatataagaaggacaggacatgtgccttcttctttctctttcagctttaagttgccttccatttgctggtagctagtagcaattttgcaaccaatatatgtaatatcttgtgtgaaatataaaaccttttcagtctagcccaacataattgtgctacttctacaataatgttgcaagttatttcttgctc

SEQ ID NO: 11721 - DNA, 528 bp, Glycine max
  Clone ID: 701123978_FLI
cttaaggggatcataaaaggaactgggtatttgtgttcatgtgacaactgcaaccagtcaaaggctcttaatgcatacgagtttgagcgtcatgctggtgccaagacaaaacatcctaacaatcacatatactttgagaatggaaaaaccatctatgctgttgttcaagagctgaaaaacactcctcaggatatgctttttgatgctattcaaaatgtgactggctctaccatcaaccaaaagaactttcgaatatggaaagcatcataccaagctgctactcgggagcttcagcgtatctatggaaaggatgatgtggtcattccgtcttgagttcccttttcttcttaaaagttcagaacagtggtagatatgtaatctgttcatagtgagtgattggcaggttaatattttaaaagactacttaaaattgaaaagttttagccaatgcttcttgtaggaacttgattgttttattaatagtaatgaagatgtctttttgtggttcagttgcattctttccactac

SEQ ID NO: 11722 - DNA, 1374 bp, Glycine max
  Clone ID: 701123993_FLI
caatcagccatggcaggcattcgaatgatagatatagccgtcaacttcaccgatggcatgtttaagggaatctaccacggcaagcaatgtcacgtctcggatattgcaactgttttgaacagagcttgggctgccggcgtcacccgaattattgtaactggtgggtctctagaagaatcaagggaggcacttgccattgcggaaacagatggaagacttttctgcacagttggagtgcatccaacacgttgcaaggaatttgaggagagtggagatccagaaaagcatttccaggctcttttgtctttagctaaagagggaattcagaaaggaaaggtggttgcaattggagaatgtggattggactatgacaggcttcatttttgcccagcagagattcaaaagaagttcactgctggagtcacccattcatttactggtagtatggatgattgcattaagcttctctcatttgataaaatgtacataggcataaatgggtgctctctgaagacgactgagaaccttgatgttgttaagggtattccagttgagagaatgatgattgagacggactcaccatactgtgaaatcaagaatactcatgctggaattggttttgttaaatctacatggccttctaagaagaaagagaagtatgatcaagagtgcattgttaaaggccgcaatgaaccttgtttagttaagcaagttcttgaagtggttgctggctgtaaaggcatcaacgatgtgagtaacctcagcagaacattgtaccataacacttgcaggatatttttccctcatgacttggattctgctgctgatgctcttctagctggcggtaattctacataaacatacttgctagtgacttggccttttctttgcttatattcggagctgttctgtagaccaaatcctcattttcttgagaaagcttggtagtgtccttgaagtggaactgagtttgtctgtcctgtccctttttgggaagtgacaactggcaaatcaagaactgatttccagagtttaatgagtgtacgacaaattattacattgtattttcatgagattatcctgtaaaaaaaactacgatactgaaagccaagagggatacgataagccgcagtgatgattaatgtttaggatgtcacgactgggagtaaatcaaaggaggctgattggtggtccatctgtagtctcctaaagtgcctcaaaacattgttgtttctttacattttttttttaaagtcagttgagttcaactgttcaagtctggatttagatgatacaacggtcagtgtgtcactcgtaacatcatgccttgtgagaacatgttattcaattaaacgtgccataaaatctgttgat

SEQ ID NO: 11723 - DNA, 1662 bp, Glycine max
  Clone ID: 701124057_FLI
cgcttgtttactcactttgagtctgctgatttttcttccccatatcaaagcaagtcaagctaataaacttgatgagttgatcctatctaggagctcacataatcctcctgtgaccctttcttgggcagaggaagatgcattgaaaatgcattctgctgcttatgttgcgccccaagagggactaaggcaagctgacaagattgtcacactgcctggccagccacatggggtgaactttgaccaatattcaggccatgtcacagttgatccaaagactggaagatcacttttctattattttgttgagtctccacataactcttcagctaaacctttagtattgtggctcaatggaggaccaggttgttcctcattggggtatggggcatttgaggagctgggaccctttagagtcaactctgatggcaaaacactatttcataacaaatatgcttggaatgaagtggcaaatgtgctgttcttggaatcccctgctggagtgggcttttcctactcaaacactacctctgactatgatcgttcaggagataagtctactgcaaaagatgcctatgttttcctgatcaattggctagagaggtttccagagtacaaaacccgcgagttttacataactggagagagctatgctggccattatgtgcctcagcttgcatacactattttggtgaacaataaattcagtcaacaaagcattaacctcaaaggcattgctatagggaatgctttgattgatgatgttacaactatcaaggggatatttgattacttttggactcatgctttgaactcagatcaaacacatcatttgattaagaagtattgcgacttcacttcggaaaatatttcagcagcatgtattaatgcaacaataagttccatacttgagaaaggaagcatagactcctctaacatctatgctccactgtgttatgactcttctctgaaaaatggatctactggttctgtatatgattttgacccgtgttctgcctactatgtggaagcctatctaaataggccagaggtccaaaaagctcttcatgcaaaacccacaaattggacccattgcagcggctttgactggaaggacagcccaactaccatcctacccatcattgagtatctcattgctagccacattaaattgtggatatacagtggtgatacagatgcaacggtcccagtcacatcttccagatattcaatcaacaccctgaggctccctattcaggttgattggcatccatggtattctggaaatgaggttggaggatatgtggtgggatacaaagcagtgacgtttgttacagtaagaggagcaggacattttgttccaagctggcaaccagcccgatctttgaccatgatctcatcattcctctctggaaccctgcctcctgcttcaccatacgatggattctaagtatgaagttgatttaaaagttattgccttgagatgaaggttgtgcaatagctacttgttggactatagtaataacagttttattaataaggttccgtagcatctaaatgtactgctaagtttcataggggaagaatatttatcacactttgtattttttatgaaaggaatgtatcttatcttaacattttcttaataaaaatttcagtttgcat

SEQ ID NO: 11724 - DNA, 2238 bp, Glycine max
  Clone ID: 701124086_FLI
gcgccctcgaacaattacccgagtcggttgtaaagcctctctttctgtcaaaatgcaagactctggcaagtggatcgtctctggctttgttagagaacataatcacgaactcgttccaccagaccaggtgcattgccttcgctctcacaggcaaatttcaggagctgccaagacgctcatcgatactttacaggctgctgggatgggtcctcgtagaattatgtctgcactaattaaagagtatggtgggattagcaaagtcggcttcacagaggtggactgtaggaattacatgaggaataataggctaagaagtttagaaggtgacattcaacttgttcttgattatttgagacagatgcatgccgaaaaccctaatttcttctatgctgtgcaaggagatgaggatcagtccataaccaatgttttctgggctgatcccaaggctaggatgaattatacattttttggtgatactgtaacctttgacaccacataccgatctaataggtatcggttaccatttgctccctttactggtgtaaaccatcatgggcaacctgttctctttggttgtgctttcctaattaacgaatctgaagcatcatttgtgtggcttttcaagacatggcttatggccatgtctggacgtcccccagtgtcaataacaactgatcatgattctgtaattcggtcagccataatacaagttttccctgagacccgccaccgtttctgcaagtggcacatctttaaaaaatgtcaggaaaagttatctcatattttcctccaatatccaaattttgaagcagaatttcacaaatgtgttaacttgactgagtcgactgaggaatttgagtcttgctggtcaacacttgtagataaatatgatctcagggaccatgaatggcttcaagcaatatattcttcttgtaggcagtgggtacctgtatatttgcgagacacattctttgcagaaatgtccatcactcagcgaagtgatagcatgaactcttacttcgatgggtatataaatgcttccaccaatttaagtcagttctttaagctctatgagaaagcacttgaaagtcgcaatgagaaagaagtgagagctgattatgacacaatgaatactttgccggtattgagaaccccatctccaatggagaagcaagcatctgagctttacacgagaaaaattttcatgaggttccaggaggagttagttgggacacttacattaatggcatccaaagctgatgatgatggggaggtcattacatatcatgtagctaagtatggagaggaccataaagggtattgtgttaaattcaatgttctggagatgaaagcgacttgcagttgccaaatgtttgagttttcaggccttctttgtaggcacgttttggcagtctttagagttaccaatgtgcttactctcccatctcattatattctgaaacgttggacaagaaatgccaaaagcaatgtaatattagaagaacatgcttgtgatgtatatacttactatttggaatctcatatagttagatataacaccctccggcatgaggcttttaaatttgttgatgaaggtgcgcggtctgctgaaacttatgatgttgcaatggatgctttacaagaagctgcaaaaagagtttctcagggaatgcaaaatgagggaaaaattcctatcaataatggaaaggtaaggagtcacgtgctgaatgatgaaagtcatgctaattacacaagtgggtgccaggaagaaagcttgagccagcatatgtctaaggatgatttggataagaatattagaaaacttatgaatgagcttgagtgtgcaaatcggaagtgtgaaatttatcggtccaacctgctttccgttttgaaagctgttgaggatcacaagctagagttatcagttaaggtggaaaacatcaagataagcatgaaagatggcatctaaagactatggagaattaacattgaaactgataggaaaacaaattctattttggcaatccagtcgcgcatcaataatgatcccatgacaacccgccgccccacaattgtcttgtagccctcttgtgatgtataaagttggtttgcactgtattatttttttgttcagtactaaatttattatattgatgtcaacttttatagtccaagttttctttaagaaaataataatttagcacatatacgtcatcgtattaatatttttctgagttt

SEQ ID NO: 11725 - DNA, 734 bp, Glycine max
  Clone ID: 701124153_FLI
acgaaacgcgcttcatcagtcaaaagccaccaaaggtgattttatcaagtatggaagttgtggcacaatcaatgggatttaagacacatattcgcaactataagatgagaatagagagtatctcaacaaataaggcttcttatttctcagttatactagaagtctttgaaattgctcctacatttttcatggtggatattcagaaagcagctggagatgctggtgaatatctcaagttttacaagaatttttctagcaatcttgaggatatcatgtggaaaccgccccacgaaacaagcaaattaaggaactccaagaccaaagggcagtgagtttcatgaaacaagcaaattctgctctgattgtaagaacaaaaacatagttatggagaccctgagccttatatatatatctttaaaaggctgaaaagccactaagccagctcggctatgccacctccttagtatctttaaccaacccaagttttttttatccctatacaaatagaagaccaaattcaaattcgaaacagaaaataggaatcaggtataaagacagatatatctacaatttgtaaggttgatgtttgtacatctctttttagtttttatctccttttttttatcctgtcattacattgtatcccgttcctagtaagaagagtgctattgttgattgaattgtacgaatctgttttcaatttcagttgtctatctacctatataatttcagtt

SEQ ID NO: 11726 - DNA, 2033 bp, Glycine max
  Clone ID: 701124227_FLI
gggcaatggacatgaactttgtatatggtcattactgtctttaaggtctggtacacttgttagtgcggacagcagtggtagtgtccagttttgggacagtcaacatggaactctcttgcaagcacattctttacacaagggacatgtacatgctctggcagcatgtcctagtcataatagggtgttctctgctggttctgatggccaggtaattctttacaagctatctagtagtcagtcaacatcatccaatgatatcaattctccatcaacaatgaagagatggatctatgttcactatgtaagggctcatacacatgacatcagggccctagctgttgctgtaccaataagtcatgaagcagatattaagccagaaaagaggattaaaagagctcgacgtgcagaaaatcccattagtttccgttaccataagtgggctcatttgggggttcctatgcttatctcagcaggagatgacacaaaactttttgcatacccagtgaaagaattcaccatgttttctcctcatgatatctgtcctgcgcctcagagaacacccattcaactagtgcataattctgtctttaatcaacgcaaactgcttttagttcaatcttcgcaaaagatagaggttcaattgctacaactaaaaaatgtccgcacttctggaggctttacaaagaacgttgtagtggctcaagttaacagtaaggcatctcagaagataatttgcagcaccatttctaattcaggggcgctatttgcatactctgatcataaaaagcctagtctttttcaattgaaaagggatgaagttggaaaaatcaagtgggatgttagaaaaagggagcttcctcagatattaccatttgcccattctatgattttcactcatgactcctccaagttgatagtagcaggtcacgataaaaggatatatgttgtgaatgttggggggccagatgaagttaagtcagaattactgcatacttttacaccccttcgcaaatcacaagatcaagaattacctccgactgagccacccataacaagattgtttactagttctgatgggcagtggttggcagctgtgaactgctttggggatatatatgtatttaacttggagatactaagccagcactggttcatttcaagattagatggcgcctctgttacagctggtggatttcctccccagaacgacaatgtactgatagttacaacttcctcaaatcaagtgtatgcttttgacgtagaggccaagcagttgggagaatggtccaaacggcacacatatgctcttcctaggagatacctggaatttcctggtgaagttattgggctctcattccctccatcagaaacttcatcttctccatcggcaacttcatcttcagttgttgtttacagctccagggctatgtgcttgattgactttgggttgcctgtggagcaagacgaaagtgatatgctaaatactaaagattcaagggcaatgaattcacaaaattttaatgttaagaagaggattgaagttaagaagatgattgaagttaagaaggaacataataggaggaactttgaagttatacctttcgagaatcctgttttatgtttaggtcatacttcaaaaaattccatctttatggtagacaaaccatggttgcaagttgtcaagagtttagaaggccgaccagtccacagacatatatatgggacatgaggcattaagcaacctagagaattgttctcagcttgagggggatacatgacggggataaaagttccttgttgtttttctttttgtctcttcatggctgggatctggaatcatgtattgtgttatcataatcaattttgttccattagtaatcgcttcacttcacaatttattttattttttatttacacatgttctgtacttttactctttaatcaatccctagctggtttttgatgtttgatgcagtagaatcttttgacacttctaacacaatgattaagatgtaattaaaatttcatataag

SEQ ID NO: 11727 - DNA, 419 bp, Glycine max
  Clone ID: 701124312_FLI
aagaggatatatgatatggtcattgttggacaactttgaatggacaagtggctatgacataagatttgggctatattatgtggacagaggcactcttgaacgaattcctaaactttctgttcaatggttttctagtttcctcaacaacagtagccaccccaacataacagaacacttgagcaagcaacatattgaaagcaaagatgtgagaaatgttggttttgattttatttgaactatcccgtcaaacacggttaacattttcttactcatatcaatttattgtttttggacattattaatcttcagacatttttctaaaacatcgagaggaagacatggaagttgaagaaaggctcacaatgtagatctgaaaatatacaatcaagtatcaaaagagttacaacactttgttgttt

SEQ ID NO: 11728 - DNA, 283 bp, Glycine max
  Clone ID: 701124318_FLI
gttgaagccgtttgcaacccaatcattagtgctgtgtatcagagatctggaggagccccaggcggtggtggtgcatcaggcgaagaagacgaggacgattctcacgatgagctctagattagtcggagtctgttaaatttttatgatagctgggaattaagaagtcccctgcgcttgcttttttggtggcgatgataagatactttgtgaaattacttgtactttacttttttgcttagttttacgacgaaacttcttcagctgtatgaatgagccttgtttc

SEQ ID NO: 11729 - DNA, 1210 bp, Glycine max
  Clone ID: 701124373_FLI
gctggaccctccggctcctccgatggaggggtaggagtgaattggctctgcatgagccctaagcgagatcacaaccccgaaaactatgacgaccttcaattcgagttcaatcctaatctcttcgcctctctcgagcactatttgcctcctcatatgctcaacctctcacgcgatgttaagcttcactacatcaggaacattcttcttcgctatttgcctgagaatgaccgcaactggattcaaaagctgagggaatacaggctaaagatcatattgaattatccatcgttgcataaggagatatttactatggatgctgagaactttttcgtaccatcatttctcagagcaattaaagaaaacacagaagcgaattttagaagtataatggctgaaccttgtaaaggagtttatacatttgaaatgcttcaaccgcaattttgtaaaaaactgatgtctgaggtggatcattttgaaagatgggtccatggtaccaaactcaaaatcatgcgtcctaatgcaatgaataaaaataaacatggtgttatccttgatgattttgcctttgaagccatgcttgacagatttatgtgtgatttcatacgtcctatatctcaagttttctaccctgaacttggtggatcctcattggactctcaccatggttttgttgttgaatatggaattaataaggatgtggaacttggcttacatgaggatgaggcagaagtcaccttaaatgtttgcttgggaaaagaattttctggtggagaactgttcttccagggtgttcgatgtgatgcacatgtaacatcaaatgcgcaaccagaggaggccttcaattattcccatgttccaggacacgcaattcttcatcctggtcgtaaccggcatggtgctagacctacaacatctgggaatcggatgaatttaattctctggtgtagaagttcggtgtttagagagttgaaaagatatcagagagatttttatagctggtgtggagaatgcaaacagaagaaggcggagagagtgtgtttgtcagttatggccaccaaacaggaattactgaagagcgaaatataattggcctcgtgaactttcacatgcaaattatgtttgtatagtttattcccaccattgaacttcttttctgtttctagattatggattatttttaacaaaatgaaatatattgaagttgcaagtt

SEQ ID NO: 11730 - DNA, 1326 bp, Glycine max
  Clone ID: 701124380_FLI
gcttctcaattgtttgggcttctgcggttccatgaacattactcatacaagctcatctcagagaaagtatccaacggtaatagaagagttgtgccatcaattttctctggccgatcttaggaaatccaccaacaacttcgatcaaaacagagtaattggacgtggattatttagtgaagtatataaaggctctgtacaacataagggtgcttctgattatactgttgcagtaaagcgattcaatgaacgaggattggaagcgttcaagaaggaaatagaattgctctgccagctttttcaccctaattgtgtctctataataggattctgcaaccacataaaagagaagattattgtgtacgagtacatgtccaatggttctctagctgattacctacaaggtggagatgcagaagcattatcgtggaagaaaagactagagatctgcattggagtagctcgtggactacactaccttcacactggagccaagcgctctgtctttcactgtatcctcagtcctagtaccattcttttggatgatcacttgaagccaaaacttgcaggtttcggcgttaatgtgcagggatcacgttttatgacaaagaaaaaacaaatcaaactagaccttatcacgggtacttttggctacatggctacggagtatgccatcaatggtaccgtgacagataaatgtgatgttttctcatttggtatggttctactagaagttgtgtgtggaaggcaatatttaatacacccaagagaaacagaatttctggagaagcctgttgaagagaaaattgatgcaaatatcaaaggggaaattgcacctgagtgttggcaagtctttattgatatcgcccacagatgtgtgaagcatgaaccagatgagcgaccaataataggagaagtagaggtggaacttgagcatgccctcttgttgcaggaacaagcagatatcactaacaccaatggtgaatattctttattgtccaaaaccgttattgacctaaaactggtgcgggaatattttgagcaggctctatttcaccaagaagatatcacataagacagtgacttgacttagaagatatgtttccttagttatttggtgagctcaaatcagtacacgagggcaaacattcagaagatcactattaaagggccacaagcaacaaatacaaataaactagacatcacttccaatctcttgcttttctagtgatcctttctttcagcatattgaatctgattgtatctgaagttgtcattgtaattatcttgaactggtataaagaagtgaagagattcttgcttgagcct

SEQ ID NO: 11731 - DNA, 1008 bp, Glycine max
  Clone ID: 701124682_FLI
ctgcacttgtgtctcttgcattgtttggtgcttatgtgagcagagcaggcatcaaaacagtgaatgtgatgaccccaaaagtttttataggtttgattgtgggagcaatgcttccctactggttttcagccatgacaatgaagagtgtcgggagtgcagctctcaaaatggttgaagaagttcgtaggcaattcaataccattcccggtcttttagaaggaagagcaaaacccgattatgcaaattgtgtaaaaatttccactgacgcctcacttaaggagatgatccctcctggtgcattggttttgcttacgccacttattgccggaacattctttggggtagagactcttgctggggttcttgctggttcactcatttccggtgtgcaggtggcaatttcagcttcaaacactggtggtgcatgggataacgccaagaaatacatagaggctggtactaccccacatgctgtatcacttggtccaaaaggctctgatgctcacaaagcagctgtcataggtgacactgttggagaccctcttaaagatacttcgggtccctcacttaacattttgatcaagctcatggcagttgaatcattggtatttgctccattctttgcagctcatggaggcttaatctttaaattactctgatctggagcttttcatgcaatcatctaaatccgattatgcattaccttcaacagcatctaatggagctgtgagattgattgtgcttgcttatgtgattagtagtctagcaaaaaatacatggtttgctttgatttcaccaatgttatgccagttattatctggaataaaattacatgatgtagattatgcaagttgagagtaggatcccatcgttaattatgggaatagtaattttctttgatttcaccaattttattccagtggaataagattacttaatgtagattatgcaagttgggagtagtatctcattgttgattattaatagaatagtaataagtattcatgg

SEQ ID NO: 11732 - DNA, 898 bp, Glycine max
  Clone ID: 701124726_FLI
gccaccggttcgatcatataggaagaatactctacaacaaaagaaagaggaacagggtgaagggtctgggatgtacgtgaaagttagcatggcaggtgcaccttacttaaggaagatagatctaaatgtttacaagagctacccagaacttctcaaggccttgggaaatatgttcaagtgcacatttggtaagaacctagaacaagttttaaataatctcttattattttttttggctttcttaagattaatttggcatatatatgtgtatgttgaaaggaggaataaagttgtaattgcttgtgatccaggtgaatattcagaaagggaagggtacaatggatctgaatatgctccaacttatgaagacaaggatggggattggatgctggttggagatgttccatggaagtaagtttcttctcctaaatctgttctttgaattaactagtagtaattatttgttgttattatatatatattaaaaggttgtgtttttgctaagcttatgttaattattattgtagcatgtttgtgtcatcctgcaagagactgagaattatgaaagcatcagaagcaaaggggttgggttgtttttgaccaaaataaaaaaacaaagcaggaccatcatgcatgcccatatccaaaacatggagcaaagcaattttcagtgacgtcatccaagagaatttcttctgtttggaatatgcaagagctaggcacttggcctctgtgaaatggttatatttagcttattaaaaagagagatgcacatacacgattttattttccctttatttgtttatttcaaaagctaggtgactttttagacctgcttaattaagtatactattccaaattctcaatgcctaaaccagaattgaaaactgtaatgatg

SEQ ID NO: 11733 - DNA, 547 bp, Glycine max
  Clone ID: 701124917_FLI
ggaggggtgtcatataagtctgatgtctatagttatggaatgatgattttggaaatggtcggaggaaggcaaagtatcagtattgaagcaagtcattcaagtgagacatattttcctgattggatatacaagcatgttgagttgggaagcaatttagcatgggatgaaggtatgaccacagatgaaaatgaaatttgtaagaaaatgattattgtgggattgtggtgcatacaaacaatcccatctgacaggcctgctatgagtaaggtggttgaaatgttagaaggaagcatagatcagttgcaaattccaccaaagccattcatatttagtcctaccaaaacccaagtggatatttgcaccactactagtagctctgattgattcttaatttctgattactagaactccggagaatttttatataacaattttcccttttgaaaggtaattcaccaatgccttttaatcatttcagtacataacacgaacagcgtagggaagggagtatttgggacttggattgataatacctattcttttagcc

SEQ ID NO: 11734 - DNA, 816 bp, Glycine max
  Clone ID: 701124978_FLI
cgatcactcccacgcgctcctatatcctctccttcaccgtcgctctctccaacgatcacaacaacatcgtcatcccatggcaaacgccgcatctggtatggcagtccatgatgactgcaagttaaggtttttggagctgaagacaaagaggacacaccgtttcatagtttttaagattgaggagcagcagaagcaggtcattgtggagaagcttggtgagccagcccaaggctatgaagatttcactgccagccttcctgctgatgagtgccgttatgctgtttatgattttgagtatctgactgaagggaatgtccctaaaagcagaatttttttcattgcatggtcccctgacacatcaagggtgaggagcaagatgatctatgcaagctccaaagacagattcaagagggagctggatggaattcaagtagagctgcaagcaactgatcctactgagatgggtcttgatgtgttcaaaagccgggccaactaaaatgattatagaaaatagtaggctttctggtgggagcagcactccttaagccttagttactcatggaaaatatcctagtttgtgggatggtcaacttgggtagttatggtcccaaactctcaattttccaagttgtggcataaattctattgcaccttttaacaagctttgcttgttccagtgtgttttattatgatttgtgatttatacgaccttgcgtttgagtgccattttagtcgtcttatcccttactagttgaatttgtaactgtttgtgttatcagacaaaaaatggggtttcttcacttattgacactcgtc

SEQ ID NO: 11735 - DNA, 869 bp, Glycine max
  Clone ID: 701125040_FLI
cgagtcaggaggtcacacggggaacgcgagcgggagcaacgagttgtccggttgcagggagcaagacaggttcctcccaatagcaaacgtgagcaggatcatgaagaaggcgttgccggcgaacgcgaagatatcgaaggaggcgaaggagacggtgcaggagtgcgtgtcggagttcatcagcttcataacaggagaggcttccgataagtgccagaaggagaagaggaagacgatcaacggcgacgatcttctctgggccatgactaccctgggcttcgaggactacgtggatcctctcaagatttacctgcacaagtatagggagatggagggggagaaaaccgctatgatgggaaggccacatgagagggatgagggttatggccatggccatggtcatgcaactcctatgatgacgatgatgatggggcatcagccccagcaccagcaccagcaccagggacacgtgtatggatctggatcagcatcttctgcaagaactagataacatgtgtcatctgtttaagcttaattgattttattatgaggatgatatgatataagatttatattcgtatatgtttggttttagaaatacaccagctccagcttgtaattgcttgaaacttccttgttgagagaatatagacattattgtggatggtgatgtggcatatgtggcatacacagaatttttgtattcttctttctctctatggatttttgtgtaagggcaggactatggctttgtttgctgatcgtatagctagtatggtgctatctaggttcggatttttttctttttcatgtataatgaaaaattaacggaggaaattactcttacgttactttgaaattaattaact

SEQ ID NO: 11736 - DNA, 709 bp, Glycine max
  Clone ID: 701125214_FLI
ctccttctcaaactagtagtattattcttccattcataatgggtgttttcacattcgaggatgaaatcaactcccctgtggctcctgctactctttacaaggccctagttacagatgccgacaacgtcatcccaaaggctcttgattccttcaagagtgttgaaaacgttgagggaaatggtggcccaggaaccatcaagaagatcactttcgttgaggatggagaaaccaagtttgtgctgcacaaaatagaaagcattgatgaggcgaacttgggatacagctacagcgtggttgggggtgctgcattgccagacacggcggagaagatcacattcgactccaaattggttgctggtcccaatggagggtctgctgggaagctcactgtcaaatacgaaacaaaaggagatgctgagcccaaccaagacgaactcaaaactggaaaagccaaggctgatgctctcttcaaggccattgaggcttaccttttggcccatcccgattacaactaatcctcttcaacttacttgtcatcactttcttgcttggagacttatccaatcactctgttctcaacttaagttgccttccaatgtatccagtctttcctttcttctttccttttcccatataattgtgagacttatgatatatctgtatctcacttcatcaataataaattataataaagatgagcaatcattac

SEQ ID NO: 11737 - DNA, 947 bp, Glycine max
  Clone ID: 701125331_FLI
atttgcacctgtactaaatataaggcagtggaagaaggtttaattactgtgaatgttagggaagaagtactgaaggtgtggtgatgggtgttccacaacctccacctccctctcaacatctctatccacaagaaattcagcttaaactttaccaagccttcatattctcaattcccatactcttttccatcattttggttcttttgttttacttgttctacctcaaaaggagggcttcttctctctcatcaccacctctccacatacttcccagtactactaattcacaaactacatatccttatccttcacaaccttgccgtttagatctgacagtgcaatttctggacaaacttccaagaattttgtttcatgaggatttaagaacaggagattcagtatggctgccttccacatgttgaggctatcctcattaagaacaccctccacataggcaaaaggatttccctccaatcccaaaggactccccgcctgtgtacctgtatgttgtgtttgcctaggagaatttgagctgaaggaagagttgctacagattccttattgcaagcatgtgtttcatataagctgcataagtaactggctgcaatcaaactccacgtgtccactttgtagatgctccatcattccctctaccaagttccttaatcccgcgccacctattatatcagacccaacacggcaaggtggagtttcaggctcttcatcacacatcttgtcattgcctcatcaacaagaagaagttggtgcttccacaaatactaccatttttcaagggaatgatgtataatgtattaaataataaatagacaataataccttttgaattgtagggggaggaggcattcaactggtcctcatgagtctagagttctgtatattcaaaaccaatattaatgtatgaaataaaatgtggcctttctttatct

SEQ ID NO: 11738 - DNA, 1918 bp, Glycine max
  Clone ID: 701125611_FLI
ctccattccactccgaaccaaaaacaaacaactcatcttcccaaattcaaatcacacactcttttctctctgtctctgagattagagttagggtttgtgtttagttcgatcatggcttcgtcttcctccgatccaggaaagtccgcggagacgtcggaggcggcggtggtggtggcgaacgaccagctcttgctctacagaggattgaagaaggccaagaaggagagaggttgcacggccaaagagcgcatcagcaaaatgcctccgtgcgccgccggcaaacgcagttccatataccgcggcgtcacgaggcacaggtggactggtcgttatgaagcgcatctttgggataagagtacgtggaaccaaaatcagaataagaagggaaagcaagtttacttgggggcgtatgatgacgaggaagcagcggctagagcatatgatcttgctgctctcaaatattggggtcctgggactctcattaactttcctgtgacggattatacaagagatcttgaagaaatgcagaatgtgtcaagagaagagtaccttgcatctttacggcggaagagcagtggtttttcaagaggactagcaaaatatcgtggactctccaggtgcgaatctatcattttttttgctgaaattgtttggcagttaaattattatttgtatccacatctgagtctgtgtggggtatgtgtgtgtggagctagttcttctgtgctctgctacacagcttcagttttttatgatctactttagctgtcataaagtacatcgattccaacatggatttgactgctaacttaaactcttcatttcattttgcatgtgttgctaccaaaactagtcgatgggatccatcgtatggccgtatgtctggatctgattacttcaatagcatgcattatggtgcaggggatgattctgcagcagaaagtgaatatgtaagtggtttctgcatagaaagaaagattgatttaacaagtcacatcaaatggtggggatctaataagagtagacattctgatgttgggacaagattatcagaagaaaagaaacttggttctgctggagatatttgcattgaaattaagcaattggagcagaaagttcaacctacagcaccttaccagatgccacagttaggaaggccccaaaatgagaaaaagcatagaagttcttcagtttctgccttaagtatcttgtcacaatctgctgcttacaagagcttgcaagagaaagcgtcgaagacactggaaaatatcatagataatgatgagaatgaaaacaaaaatacaatcaacaagttggatcatggcaaggcagttgagaaaccatcaaatcatgacggaggcaatgaccggcttgacattgcaacgggaatgagtggaacaatgtctcttcaaagaaatgtttacccattgacaccattcttgtctgcaccacttttaacagcctacaatactgttgatccattggtagatcctgttctctggacatctcttgttcccatgcttcctgctggcctttctcatacagctgaggttacaaagaccgagaccagctcaacgtacacgatgtttcggccagaggaatgaatggttggacatttggatttccaattgaagaagaaaggctcaaaggcaagcatctgaaagctgagcttgtaccgaacaaagaacagaatataggtctgaagtgctcaaccaggtctaagagaattctcccatggcttttttttgccagattacatgggttatagaggtcagagaaaagaaaaatattacaatggttttacatcgatgataaatatagaattagcacgaatcttgtccttatatgttggatatgtatcagttaacatctctatcatgtatatcagtatatgcagtcagagataaattttagtgat

SEQ ID NO: 11739 - DNA, 1507 bp, Glycine max
  Clone ID: 701125869_FLI
atttgggagttaggttctgcacgctctgcttccagcgagtgttctttcttcgtttcaacaccttaatttgcacacgctgcttcttcagcttgagaaatggcacaagaaacctttctattcacatctgaatctgtaaacgagggtcaccccgacaagctgtgcgaccagatctctgatgcagtgctcgatgcgtgccttgaacaggaccctgacagcaaggttgcctgtgagacatgcaccaagaccaacatggtcatggtctttggagagatcacaaccaaggccaacgtagactatgagaagattgtccgtgacacatgccgcgaaattggattcatctctgatgatgttggtcttgatgctgacaaatgcaaggtgttggtcaacattgagcagcagagccctgatatcgcccagggtgtgcacggtcacttcaccaagcgcccagaggaggttggtgctggtgaccagggtcacatgtttggctatgccactgatgaaacccctgagtacatgcccctcagccatgtccttgcaaccaaactcggtgctcgcctcaccgaggttaggaaaaatggtacctgtgcttggctgaggccagatggcaagacacaagtaactgttgagtactacaatgacaatggtgccatggttccagttcgtgtccacactgtcctaatttccacccaacatgatgagactgtgagcaatgaccaaattgctgctgaccttaaagagcatgttatcaagcctgtcattcctgagaagtacctggatgagaagaccatcttccaccttaacccttctggccgttttgtcattggtggccctcatggtgatgctggtctcactggaagaaagatcatcattgatacctatggtgggtggggtgctcatggtggaggtgccttttcagggaaggaccctaccaaggttgacagaagtggtgcctatatcgtgaggcaggctgcaaagagtgttgtggcaaatggccttgccagaaggtgcattgtccaagtttcctatgccattggtgtccctgagcccttgtcagtgtttgtggacacttatggaactgggaagattcctgacaaggagattcttcaaattgtgaaggagaatttcgacttcagacctggaatgatcaccattaacttggaccttaagaggggtggccataggttcctcaagacagctgcttatggacactttggaagggatgaccctgacttcacctgggaagttgtgaagccactcaagtctgagaagcctcaagcttaagattgttgtgaagttaatcactcccttcaatggatgtcttgctaggtgtggatgaataatttgcgtgttccatgactactactacttcattcataggtctaatgtcatctcatcaatacttaaactgttttttttttttccttttctccttttactcacaatttattttttggttatgcaatgttaccgttttgatgcaatggaaattttatcagaattttgtacc

SEQ ID NO: 11740 - DNA, 1984 bp, Glycine max
  Clone ID: 701125903_FLI
gcttaaatcaccttggtcacaaaggaaaagaaaacatgccctttcacctcagcaatggaaaagcatgtttgcagaagacggtagattctgtgatggtggaaataagttcctgaaaagagtgcgcagtggaggtgttgatcctagtattagggctgaggtttggccgttcctgcttggagtgtatgacttagacagcaccaaagatgaaagagatgttaaaagaactcaaaatagaaagcaatatgagaaactccgcagacaatgccagaaactcttgaagcaaagcaatgagagaaataagttaaatgaagttggtgaaatcagctatgaggaagatggtgggagcctctctcatgattctggttctgctagttctgatgatgcagcaagtgctagggaatctctttcttgtgaggataggagccctgatgttgaacattctgacaatccatccagtgccctgttggaaggagatgacgttcctaatgccaacaacactgatgtttctacactggatactgatttttctgattcagactcctcagaaggacctgaagtaattcagaccgttccttctgatgatgttcaggaacataatgatctcgacaaagcttctgaggaagtctcttctccctccaaagcaaaaatcccatcaaagctaccaacttctgaagatttttccacctggcaacggattatccgacttgatgcagtacgtgccaatgcagaatggaaggcatattacccctctcaagctgcagtatcagacagtagggcatgtcgtgctgctgaggctgttggcttgaaggattatggtcacctagaggctggcagaatcttccatgctgctcggctagttgctattcttgaagcatatgcactatacgactctgaaattggttactgccagggtatgagtgacctgctatctcctataattagtgttatatcagaggatcatgaggctttctggtgttttgtcggattcatgaagaaggcacggcaaaattttaggcttgatgaggtgggtattcgcaggcaactggatatagttgcaaaaataattaagtttaaggatgcccacctttttaggcatttggaaaagcttcaggctgaggattgcttttttgtctataggatggtggtggtaatgtttcgaagggaattgacatttgaacaaactctttgcctatgggaagtaatgtgggcagatcaagcagcaatcagggcaggtattggaaaatctgcatggagtagaattaggcagcgtgctccgccaacagaagacttactgctttatgcaatatctgcttcggtgttgcagaagaggaaattgatcattgagaagtatagcagcatggatgagatcattaaggaatgcaatagcatgtcaggacatcttgatgtttggaaactgcttgatgatgcacataatttagtggtcaccctgcatgacaaaatcgagacatcattgtcatgactacaataaacaggctagtttacaatgctatcataaaaaaatatttggctaccagctttctcatgtgcttctaaaataagcactggatccgcaagaactattgcatgctattctgagttctgctgcttaaacgtgccactgcttatttgcttttttttgtgtcgacaatggtggctaatgtgtggatgttgttttcaaatgggaatgttgtctttttgattcgaatcaggagatcttttcctcttgggctctactaactttcgtgccatctgaatatcttcgaacaactcatcgcttctccaggatgcttgattttcgaaggttacgtgaagagatgaaattcttaaacagttaaagttttacttgattgcttttagaatcaatatcatttagcttttgattcaattagtaactgtaagtttgatttttccatgggaccaattaactgtggttaacattaattttttttaatagaacaataacggggtaaggttctaaggttgg

SEQ ID NO: 11741 - DNA, 1368 bp, Glycine max
  Clone ID: 701125911_FLI
ggacatatcactgaaatagtatataagggccaacatagccacccaaaaccgcagtctactagaagaacaaactctcaatcaattcatcaaccttcttcgtcttgcacaaactcagggataactgatcattcagtggtgactctaggaaatccacaaatggatcatttctccatacaagaagattcttcagcttctgttggagaggaagagtttgagcaaacaccgcaaaccagttattccggaggagacggagataatcttggacctgatgccaaaagatggaagggagataacgaaaacgatggctattcagtctcagcaagcagatctgttagagagcctagagttgttgttgaaaccacaagcgaaattgatatacttgatgatggctttaggtggaggaaatatggacagaaagtagtcaaaggaaactcaaatgcaaggagctattacaaatgcaccgcccctggttgttcagtgagaaaacacgttgagcgagccgcacatgacatcaaagctgtgatcacaacttatgaagggaagcacaaccatgatgtgcctgctgcacgtggtagcggaaaatataactcgaacagaaattctcagaacagcaacatatcagcgcctataagaccctcggcagtgaattgttattctaactcatcaagtttcacaaattctctctataataatactaggcttccagcaactggaaatcaagaatcattttcactggacaagttcaagaatcctggaagttttggctattcagatcttaacagaccaatgggttcacataccaatcatgcacaatacacagatgctgcatactcaagggccaaggatgagaggaaggatgattcattccttcagtcatttctctcaaaggacttctaaatttggagtggaccacaactttacatattatcctggatatgtttttgtatagcatgtaggattttagttattcacagcagaatatagacaaaaaaattgcaaatgtttacttatttacctcttttagattagtgactggcactacagccatagtgacagaaaattgctgctatacctgtctgccaagttcttgtccaaattgaaacttcaactttatcataggattgactgatgaattctgttattcttttgttgtatttgtagggaaaaaaggttcttctggaagaatcttacgatatttcattaatcagtagcaagtgtgcttgtgttggctatttctactatgctctttctaattttagtttttatcaaatgatttgtgatgaatatcaggaggtccaggacttccataatttgtaccaatatcaacaccgggatttgataaattttcaattcatagtccttgatgtg

SEQ ID NO: 11742 - DNA, 1449 bp, Glycine max
  Clone ID: 701125938_FLI
gtgaccctcctcacgccaacgccatagttgttcccttttctctctcgttttttctcaaaaagttgcaagagttaaagcaaaaaccaaagtgagagagaaaatgatgaagccatcgatgctcagatctcttcactctgccgccacccgcggcgcctcccacctctcccgccgtggctacgcctccgagccggtgccggagcgcaaggtggccgttctaggtgccgccggcgggatcgggcaacccctctcccttctcatgaagctcaaccccctcgtttccagcctctccctctacgatatcgccggaactcccggtgtcgccgccgatgtcagccacatcaacaccggatctgaggtagtggggtaccaaggtgacgaagagctcggaaaagctttggagggtgcagatgttgttataattcctgctggtgtgcccagaaagcctggaatgactcgtgatgatctttttaacatcaatgctggcattgttaagacactgtgtactgctattgctaagtactgccctcatgcccttgttaacatgataagcaatcctgtgaactccactgttcctattgctgctgaagttttcaagaaggcaggaacgtatgatgagaagagattgtttggtgttaccacccttgatgttgttagggcaaaaactttctatgctgggaaagccaatgttccagttgctggtgttaatgtacctgttgtgggtggccatgcaggcattactattctgccattattttctcaagccacaccaaaagccaatcttgatgatgatgtcattaaggctcttacaaagaggacacaagatggaggaacagaagttgtagaagctaaggctggaaagggttctgcaactttgtcaatggcctatgctggtgccctatttgctgatgcttgccttaagggcctcaatggagtcccagatgttgtggagtgctcattcgtgcaatccactgttactgaacttccctactttgcttccaaggtgaggcttgggaagaatggagtggaggaagttctgggcttaggacctctctcagattttgagcaacaaggcctcgaaagccttaagcctgaactcaaatcatcaattgagaagggaatcaaatttgccaaccagtaattgaacatgttatcacatacgtgtctggtaggctaatgttaatgttattccttcaagaaccaaatcaaattttgcaatctcagaaccattgttgtattgttgccggcagtggtgtggcgactttgttgttttatttagagtaggtatacgccatgatttaataatttaagtctgagagctttttgttgctaaagagattcaacgatcttataaccgggtttaggttttggccattccattaataatggtcccttttaactgtgtatggtttcacgtaatgtaattgcagggtgttgtacccttcatccgtg

SEQ ID NO: 11743 - DNA, 871 bp, Glycine max
  Clone ID: 701125957_FLI
ggcggcaagcaactccatccgcaatggtatgtttcgcttcaacggcgtcaccatccctcatccttggagagttgatctgactgagttcttgaacttgattgcagggaatcgatttgaaggcaggaggtaagtccaagaagaccaagcgaaccgcccccaaatccgatgatatctacctcaagcttctcgtcaagctgtaccgttttcttgttcggaggactgggagtaacttcaatgctgttgtcctcaagcgccttttcatgagcaaggtcaacaagcccccgctatccctctctagattgatccgttacacgaagggaaaggaggataagatagctgtggttgttggtgccgtgaccgatgacattagggtttatgaagtccctgctctgaaggtaactgccttgaggttcactgaaactgccagagctagaattgagaaggctggtggggagtgcctcacctttgatcaactggctcttagagctccacttggccaaaacacggttcttcttagaggtcccaagaatgcgcgtgaggctgtcaagcactttggaccagctcctggtgtgccccatagccacaccaagccctatgtccgtgcaaagggaaggaaatttgagcgggccagaggaagaaggaatagcagaggctttagagtttgagttctggagctcaaacatgaaggacttttccttttaacttatgatcattatgtattgttttcttgttttttggaacaatctgttaattttagtttttatttttccttctctatgggaaaaaaattgaaacgctttccccgaacaattttgttctagcacaaactacttttgagaggaggattaaagagtagctattggtctgcttc

SEQ ID NO: 11744 - DNA, 1080 bp, Glycine max
  Clone ID: 701125958_FLI
atcttgtccctacaggcttaagcaagtctgataaaccaatgatgttcttcatcaccaaaccttgtcaatctgattctctatctgtgaaggaaaagttcatccatgcaaagtatgctgagaagctttttgttcgcaagccaaaggacaatcaataccgtctcttagtagcacaacaaatctgggaggctgttcatgctaacgataaaaaagctgtataccgttacattgttaattctgatgttgatgttaatgctgtttatgagccaacatgcagcagctccttaacccttgccaaagtaatgctattacaagagcagactagccatgatcacagctctactttagcagggaacacattggactggtcctccactaaagaaggccaggtcatggacaatctagatgggtgcaccctacttcatctcgcatgtgaaactgcagatattggcatggtggagctcctcctacagtatggtgcaaatgttaatgcaactgattcgagaggtcaaacacctctacatcgctgtattctcaaaggaagatctacatttgcaagattattgctttctaggggagccgatcctcgagctgtggatgagcagggaagaacccctattgagcttgctgctgagtcaaatgctggcggtgacagagaagtccatgctccatcgactgattctaatggatgagagtgataggcaaaaacctcggagtataatacatatataaaatatggaagattggattatgtaaatttgtatttcataaattgaaaagctggttttttttttttttttttaagtaaatgtcactagtgtgagggattaagggagagaggtaggttgaaatgcctgccccttagtcatgtgcaaaatagtgctaagatctgtattgtaaaatggccacattggtcttagtaaaagagttatgcatatgctgcactggtagcacccagcctgcacttcgtaatatgatgattgtgtatttttgtttacttttgaggtgaagctgcgatgcattaggctagggatttgtgtatgttgtgtacattggtttttgtgaaggtgttgttgtggctgt

SEQ ID NO: 11745 - DNA, 1351 bp, Glycine max
  Clone ID: 701126043_FLI
gcgggtggctgcattggtcaatgatactgttggaacattagctcttggacattatcatgactcagatactgttgcttctgtaataattggcactggtaccaatgcttgctatttggaacgggttgatgctattatcaagtgtcaaggtcttcctacaacatcaggatacatggtattgctctttttttttgtttgtttttttttttcacttttgtttattgtcttgttttgaacctagtataaatcttctgtttattaggttgtaaatatggaatggggaaacttttggtcatctcatttaccaagaacatcttatgatattgatttagactctttttttgtttgtttttttttcacttttgtttattgtcttgttttgatcctagtataaatcttctgtttattaggttgtaaatatggaatggggaaacttttggtcatctcatttaccaagaacatcttatgatattgatttagactctgaaagccctaatccaaatgatcaggttaggttctgctgctcatgaatcctgttgcttgattcaagatgactcaaatcagattttgctaattttgatgtagggttttgagaaaatgatatctggaatgtatcttggtgacatcgtgaggagagtcattctaaggatgtcgctagagtcagatatgcttggacctatttcttccaaactttcaatgccctttatgctgaggactcctatgatggctgccatgcacgaggatgattctcccgacttgagagaagtagcaagaatccttaaaggcatccttgaggtaaacaagtctgacaccatatcttttgtccttaaaaagtcggtcaagtctaacaatcattccttatgtttggcttgtgcggtctcagattcctgatgttcctttaaagttaagaaaagttgtggtgaaggtgtgtgatgtggtgactcgcagagcggcacgattggcagctgccggcattgttggtatcttgaagaagattggtagggatgggagtggtggcatcgcaggtgggcgaagaagtgatatgaaaatgaaaagaacagttgtagcaattgaaggaggtttgtattctagctatacattgtttagggactacttgcatgaagctttgaacgatatattgggggaagatattgccaggcatgtaattcttaaggtcactgaagatggatcaggcgttggagctgcactgcttgctgcctcgcattcatcatatgatgtagatacagtatagctgctatatgtatgtatacatgtaatcatgtaaatcagaaagaaaattttccctctttttaattaatctctgtataaaggaaggttatgtctattctttgtt

SEQ ID NO: 11746 - DNA, 1206 bp, Glycine max
  Clone ID: 701126078_FLI
ggagaacaacattgtctttctcttctgtttctcctctcattgatgttgcttcttccccttttcttacccttcagaaaaaaaaaaaccaacacacttcaaatccattcttagaactcacaatttctcactgaaaaacaaaaatcactcatcacccttctgttccaaaactgcagatctcacacctcttattattatctctatgcaaaatgaacatgtcagatatgatatcttgtttcaacgagaacgcagtgaatgtgtcacactcctcatgttctagctactcaaacaacgcttgcatatctccaagtgttacaccttcaactcaaaattcagtgtcttctgtctacaaaaccaccctctcaaaccaaaagcagcttctgatcacagtcacgtggtgcaagagccactccaaccaaggactcaacgtaaccttcggcgaagagaacaacaaccctttggcaccatctttcagactcaacaccaattcacgctttttcaggaaaaagaaaggaagcaaaatgttggaatccgaagactcaaaagttgaagtcttctgggacctctcgaaggccaagtatgacactggccctgaacctgttgaagggttttacgtggcgattctcgttgatgcagaaataggcctcattctcggtgaagatgtggccaagaagttcaaaacaagaacccttttgggcaatgtttcgctgttatcacggcgtgagcattgctcgggtaacgccgtttacgcaaccaaggctcagttttgtgacactggaacttggcatgacattttgatcagatgcagtggcgagaatgaaggactcaaagctcctgttttgtctgtttgcattgacaagaagacggtgattcgtgtgaagaggctgcagtggaatttcaggggcaaccaaacgattttcgtcgatgggttgcttgtggatttgctttgggatgttcataactggtttttcaaccctgcttctgggaatgctgtgttcatgttcaggaccaggagtggcttggatagcagattgtggttagaggagaagattgcacagaaagataaagatagagttgaattctccttgttgatctatgcctataagaacacatgagggaactcattcttcatatcagatcacaggaatccttcacggtagacaactgtgctttatttctctgtattcttccttgggacctgaatggtac

SEQ ID NO: 11747 - DNA, 1129 bp, Glycine max
  Clone ID: 701126225_FLI
atttgtacatcccggcgagaaggcccgccgtcgggaccctcgccggtttcattactctgcaacagtctgtccagagtttcgccgcggtcagtgtgaccgtggcgatgcatgtgagttttctcatggggtgtttgagtgctggttacacccttctaggtatagaaccgaggcttgcaaggatggtaggaattgcaagcgaaaagtttgcttctttgctcacacccctcgccaactcagggttttgcattccaatgaaaatagcaacaagaaaaagtgcaccaatatgagccctcataacaacaacaacaacaccaacaattgttgtttggtttgccattgctcttcttctactcgttcaccaacttcaaccttgttcggcatgtctcatttttctcctccattgtcaccaccttctccttcttccccttctaggtttgagaccaaccatcatcatggtgttgtgaaatataataaggatgtgctctctgagcttatgtgttccatggagggtttgaattttggtgaggcttcacttttgtctgctgcttctaagcctcacaacaatttgtcttcttggcttgatgtttctgaggatcacaatcaaaaacagttcagtactctttcaccaaccatcactgcttgtggaagcttttccaacaacggaaatgggagatttttgagagaagaaagtggggttgttgatgatgttatttccccagatctcgcatgggtgaatgaattactgatgtagattatatgcatttgaagatgatgatgacaaaaagtggttcgtggtgggaattgtgatgaggatttaccaagtgtaaatacatgttggagctagcaacatatattacatccttggcttcttttcttattattgttttaagaattttattgctttctgaatttgttttaagatttgtcaaattaaattctgtaatttttatgtccattaattagatttgatcttttattccgaggattctgtagaaagtgaaactgattcttggaatgggatgttgaatttttctctctgttttggatttttcgttggctttaattaattatcttcttgctccgttaagctcattatctgtgtcgtggaataaaggtttagatattttgt

SEQ ID NO: 11748 - DNA, 708 bp, Glycine max
  Clone ID: 701126378_FLI
ggttgcccctttttctgtacaactactccactcaccaactccatggtatctttgaggctaacaataatgaagccaccaagactgctgcagagaagaaattcaaaacactgccaccatcagagtctctgcctaagaatgaaaccattggaggctacatctttgtttgcaacaacgataccatggcagagaatctccaaagacagctctttggtctgcctccacggtacagagattcagttagaacaataactccagggttgcccctttttctgtacaactactccactcaccaactccatggtatctttgaggctgcaagttttggaggatctaatattgatccaacggcttgggaggataagaagtgccctggtgaatctcgtttccctgctcaggttcaagtgattactaggaaagtttgtgagccactagaggaagattccttcagaccaattcttcaccactacgacggccctaagttccgtcttgagctgagtgtgcctgaggcactgtctcttctggatatttttgcaaaccagaacagtttcgatgacattttcaaagtcattccagcatagaagggtagaaattatacaagaagagaagttacgagcacaatggataatgaatgaatactgtggactcataatattagagtgtcagaagataattaagacaatgaaaatatggtgggggacgattatattg

SEQ ID NO: 11749 - DNA, 1026 bp, Glycine max
  Clone ID: 701126379_FLI
atttgaagtcaagtgttgttgctgtttttatcgccaatgaagagaattctgcgataactggtgttggtgtggatgcacttgtcaaagatggcctcctcaataaactcaaggatggccctctgtattggattgacacggcggataaacaaccatgcgttgggactggtggtatgataccttggaaacttcacgtcaccgggaggctctttcatagtggattagctcataaagctataaatgcgctagagctagccatggatgctctaaaggaaatccagttgcgattttactcagacttcccacctcatcctcaggaacaggtttatgggtttgcaaccccttcaaccctgaagccaacccaatggagttatccaggaggtggaatcaatcaaattccaggggaatgtacaatttcaggagatgtcagattaactccattctacaatgtaaaggatgttatgaaaaagctgcaagaatacgtggacgatattaatgagagtgcacagaagctagaatctaggggtccagtttcaaaatatgtcctacctgatgaaaacataagaggaagacttactttatcttttgatgaggcactgtctggagttgcttgtgatcttaattctagaggttttcatgttttatgcaaagcaactgaagaagtagttgggtatgtaaagccttactctattactgggagtttgcctctcattcgggaactacaggaagaaggttttgatgttcaaacttctggctacggcctaatggctacttaccatgcccagaatgagtactgcctctttacggatatgtcccaaggatatcgggtcttcgcgagaatcatctctcaattggaagagtgagaatagcagaggaactaataattctggtgtctcgtgggctatgaagatgttcgtgttcagatatatgaacataatttctgttatattgtgtagagggttcggtattactgacttttcttcagcatgataggcgaaactagttttttccacataaatttctccgggg

SEQ ID NO: 11750 - DNA, 1870 bp, Glycine max
  Clone ID: 701126409_FLI
gggtgactcacgtctcaagtttgcagagggagaggctccggttcaatcaagcaatgaaaccatacatgctctccttcagtgcgtgccttatttgtctcaccaaaaactgtactcgatgcttggagtacgctatgtccaggatttcatattggtgtgatggaaaaacaggtggttggtatctaggacgaagctgttctttaagatatgagacctacctcttctttgagctcatattccacgatgcaccagcaccacagccttcccaacctgcagttacccctacaaaagattttccgaaaaagaccaacccatcgcgaaatatcattgttatagtcgtgccagtgttcgccgttgccattgtcgttgtgggactcatagttcttatctacaattattttggagcgagaagaccaagacacaaacctatccaaagtgaaggtgatggtgaaggtgatggtgaaggtgaaggtgagcttgataatgacattaaaacagatgagttagcgcaatttgaatttgctaccatcaaatttgcaacaaataacttctctgatgcaaataagcttggtcaaggtggattcggaattgtttataagggtacgctctctgatggacaagaaattgcaattaaaagattgtctatcaattctaaccaaggagaaacagaatttaagactgaaatttcgctaacaggaaagcttcagcaccgaaacttagttagactacttggcttctgttttgcaaaaagagaaagattattgatatatgagttcgttcccaataaaagccttgattttttcatatttgatccaaacaaacgtgggaatttgaattgggaaagacgctacaatatcataagaggcatcgctcgcggtcttctttaccttcatgaagattctagattacaagttgttcatcgtgatctcaaaataagtaacattttgttggatgaagagttgaaccccaaaatatcagattttggcatggcaagattatttgagatcaatcaaactgaagccaatacaaatacagttgtcgggacctttggatatatggctcctgagtatattaaacatgggaagttttcagtcaagtcagacgtttttagttttggtgtaatgatgttggaaattgtatgcggccaaagaaacagtaagattcgtggtaatgaggaaaatgcagaagatctattaagctttgcatggaaaaactggaggggagggacagtttcaaatattgtagataccacactgaaggattattcttgggatgaaataaagagatgcatccatattggattactatgcgttcaagaagatataaatggcagaccaactatgaattctgtttcaataatgcttaacagcagctctttctcccttgctgaaccttctgaacctgcatttttaatgcgtggtaaaagtcaattgcctatgattatgctgtctggtagtgagcaatattcagaggcaacaaagtcaagtgattcaggaagtcaatttgctcaaggatcatcaaataaggctccaatcaccgagccatatcctcgttagatattttttaagcgaattgggcaaaaaggaaatgattttgaaaacaagatatcaacttttgaaacttcatcctttggagttgacaagcccgtaccctccctggttattttgtaatataatgcttgttctagattccttgcactttgccacatccagtttctttttcattcttgtattttttgtggttttttcttttctttttggaaaccagtggtgtttgttttcagattccgcgcgtgcctccattgttgatcaactataaacatataagagacatgatatgtttggcaattaataaatttgagtaattaattatt

SEQ ID NO: 11751 - DNA, 904 bp, Glycine max
  Clone ID: 701126530_FLI
cctattcgaacattgatccttcaattgacttcactaataactttagtcaagagctgcaactacaagttaacacggctgagcatagtggatatggaatgtgtggttcagggaattatagagactcagcatgttgaggccttggagattcttcttcaaggactatgtggtgttcagagagaacgattgaggatccatgaaatatgcctcaagagtggtccacatctgggcactgtagcctcagaggttcgactcttgtgtgacctagagcaagctgaaccttcctggactgttaaacatgtaggtggtgcaatgaggggagcaggtgcagagcaaatttctgttctcgttaggtcaatggtggaaagcaaaacaagcaagaatgcacttcgcatgttttatacactggggtacaagttagaccatgagctgctgagggtgggattttccttcaatttccacaggggtgcacaaatcactgtaacagtttcatcaatcaataaaatgctgaagctgcatgcaactgatgaggccgtgccagtaacacctggtatacaaatggttgaagtaacagcacctgcaactgctgaaacctacgctgaagttgcttctgctgtgtcatccttttgtgaataccttgcaccgcttctccacctgtccaaaccaggcatttcaaccggtgttgttcctactgctgctgcagctgctgcatctctaatgtctgatggtgggggtacaaatttgtagtgggactataccgttttctttataaacgctcactttatgtacattgaagttccttgaccccacttcttaattataatagagacgtgaacatagaattttcacttgataataacatgtaaaaatttaacatgggaacatgccttcccattattaattgttt

SEQ ID NO: 11752 - DNA, 551 bp, Glycine max
  Clone ID: 701126772_FLI
ggctcgaggcagatccaggttacggaagcaggctgaatgtgatgaactagctcagcgtgctgaagctttgaaagaagaaaatgccactctccgatcagaagtgagccagatcaggagtgagtatgagcagctacgttctgagaatgctgccctcaaggagagacttggggacatacctggtgtcgcgacgcctgggaaggaggatcttaggtctggtcagaatgatcagcatgtgagtaatgacactcaacagagtggtcagacagaggttgtgcagggtgttcattaggatcttgcttcctgctgcatgttgctttttaggtagataacctaaccaagtagcaacagcaagttctagtttttggttcaaattgtattaaaggtgatcatatgtagtattaggatctatttatgtcatatgatccctcattcctaatttgtcatgtttatgacggccaaaaacttgtattgtagttagtgtgtgaatacttggttataccttctctgctacttcaaaagttagtgttagcagtaagaaagtatgattagtg

SEQ ID NO: 11753 - DNA, 695 bp, Glycine max
  Clone ID: 701126938_FLI
ggagggcaaaggtttcacggaagagcaagaagctctggtggtgaaatcatggaacgaaatgaagaagaattctcaagaactcggtcttaaatttttcaagaaaatattggagattgctccagcagctcagcaattgttctcattcttgaaggattcaactgttcctttggaggaaaaccccaagctcaagccccatgccatggctgtctttgtcatgacgtgtgaatcagctgttcaactgaggaaagctggtaaagtcactgtgagggaatcaaacttgaaaagattaggtgctactcattttaaagccggtgtagcagctgagcatttcgaggtaacaaagttggcactattggagaccataaaagaagcagtgcctgaaatgtggtcaccagccatgaagaatgcatgggaagaagctcatgatcagctggccgaagccatcaaatctgaaatgaagccctctgattagactctagtagttgctttctctcaaattgaataagattgatagggtggtggtgtttgggtctgtgcttctcgtttgtatgaattttaataatgtatctatgttgctattggggttgctatgtcggaaagtgttcacattttaacaattcagttattgaaggtgatgtgaattgtaaggaaagggaaaatgataaatgcatggatggtatgaattgttacaattt

SEQ ID NO: 11754 - DNA, 3411 bp, Glycine max
  Clone ID: 701127134_FLI
aattaaccaaaacgtcacacctctttcaacaaccctgccgaatgcagagccgtatcctctgcttctcaacgcgtcgtttaccactccatcagcgtcgttttctcagccacttcattcccgaccaccaatacgacccgccgttctccccttccccaaaaccctactacaaatcaaagaagaaccacgcggagaagaagaaaaagaacaattccgaaaacggtgatccgaacaaaaacggagccccgaaactccctttcaagtcgaaccttccgttcgacttcagatactcttattcggagtccgacccttccgttgggcccatcagcttccgcgaatcgcccaagttctccccctttgggccgggccggatcgaccggaaatggaccggtgtttccgctccggttcagggtgaaccggaccgggagagggtcgaggaggagcggaaccggattctcggagaaccgcttagtgaggtggaggtggcagagctcatcgaacgctaccggcacagtgactgtgccaggcaaatcaatttaggtgtctccttattccctcaactattttcattttttttctttttttttcactggagaaaagaacaaaaagatgtttttgtttttttaaatattaattgatttcgttttattttattatcttgaatttttagatggttattcctgttatgcatatatctgggttaatatactatcggagatgcttctgtaaaatgcttgaattgatgaacgaatatgtgaacccagtaagtaattgtttttaaaataattattaaaaaagtcaatatttttattatactatgcataagtattcatgattagatgatagtttaaaaaatctgaacgctagcagcatcattttctaatgcactccttttaatatactctgccattggttaaaatttgttgacaactacaaaatcacaggtgagacttgtttgctaacaatataaggcgtgcttaaaagaagggtaaatacttggatccctccaagtatgaggcagtgacaaattggtatttttgcacattacaaaatgatctcacaaatttaacgacaagaccaatctgtcgcactttttgtacattagggactaaatttgaattcttcatttttcaggatcaatttgtcaccgcttcacactttcaaggatcaaaatgagtatttaccctaaaaagaatgtctcacaaagtgtttttctagcatttctcaaaaaatctctttaagtcttaatgcactgtattctaagtaaattcttgtaaaattcctgctggttgcttatctgaatgacttatttttggtttatttgttgttacttgtatcaatgtttctttcttcttttttttttctacccaatttgggaatttatttgcttatttcttattgaggttattgatgatacttgatttgatttagtgatggctgcactttttgataaagaagtgtagaattatacgtgttgattattaatggctaaagttgtaataaactttatatacatatttaaatttgtaacaaattacagagctgtaaacttaaaattcagagataaacttaacattcgatttctgtggtagttttaaataataggtataccagatttggggtttcacctacattaatgccattggtagttagggttattgggtttgagtgataatggagtggtgtagaagaaagaagaggaagaagaagacagaaaaggaagaactttataaaaatcttttagctttaaattagctattaagttaaaaaatatattgaaaattatcaaacgacttacttctaaagttcatagtttaacttcaactttaaaacagtttttaaactcaaaagttaggccatacaatacctaagagttataactcttcacttttctatctaaagggcatttggagaagacaaatttattttatatggatgagttgttatgcaattagctaatgatgtttgtgttgtactagggaaggggggagtcacacacaacatgttgggtgacatccataaccattggaaaaaggctgaagctgtgaggattaaatgcttgggtgtgccaactcttgacatggacaatgtttgcttccacctcgaggtcaacattgctgttttgcacttttaaaggattgatcattctgatttaaactctcaatttacatttcttttccctgatgtgtattgctgtgttcacaggacaagtctggtgggaaagttatctaccgcaacattaatatactgcttctgtacagaggacgaaattatgataccaagaactgtccagttatccctctcatgctgtggaagccttatgcacccatatatcctaggcttgtgaagaatgtaattgagggtttgacgtatgaggaaacaaaagaaatgagaaaaagtgggttgaattcagatcctctcctgaaactcagtaagtgaattattggggagtaggggctcacaaaatgttaccttttggtcctaatctagtttaaaagtagtattggattggtacatatgctaaattgtgctttcaatgttcagctagaaatggtgtttatgtgaatgtggtggagagggtgagggaggcttttaagactcaggaggttgtgaaactggactgtatccatgtgggaactagcgactgcaaaaagattggagtgaagctaagggtatgtctacttgacattcgattcatgataaatttcactgtttccctgattctgtctttgtgttgaatacatctgccatgtggtgcataagcatttaatggtaatcctgttattgcaggatttagtgccatgtgtccctatcttgtttaaggatgagcagataatcctctggagaggaaatttcaaggaagagcaaccttcagattcacaatgttagcaagtaatgcaaacttttgttattcgaaattactgtatggtaccatttccttgactaatggatctggttttgaatgggtttcttgatcacatttgtattcatcaaactataattgaatgctaaattccatgtctgcaggcgagaaatgcattgattcatggctgaaactcctcaatctgcttgtttgtagcgtgtttaaaagcctgttgagaagtaaaagatcatgtttgtgatgtggaagtataactattaccttctcagcaaacgtgaaaagccacatctgagataaggaaccaaacacaccattgctagttgctaccacccaagcagactgtcttgatggtctttatatgagagctgattattcaatatttctcagctactctgtggatacaatgtgctgtgttcttaggatcctcatgcatcatggcaatacgggtaagattgttgatgagaaatgcaacatgttacaaaaataattgtttgtggaaacaacctgcttgttttattggctgaaaattgaat

SEQ ID NO: 11755 - DNA, 1905 bp, Glycine max
  Clone ID: 701127164_FLI
gaattcggccgagatcaaaacaaaaacttgttcacccttccccttctccttacttctcactctctttccaaaacactccctttctctttccccttacccttcttctgtgtgtgatgatgtagatagagaataaaaagagaccagtgtgcagtgagaaagaggttggtcacttcttgtgtggctttgttttgttctttgtgttggaatttgttgatgggtgaagagggagaagaggtgtcaagagataaggaacagcaacacatgggagtttatggaaatgagtggttgtttagtagtttctgtgcaaattggcgccgtttaagacaccagaattcctgttctatgcctccttttgagtgaaaaaaaaaaaacatcaaaacaaaaacttgttctctctcagcttttcatcttccgatcttaatatacattgactaaaagaaaaataaagggatcaaatttaagttccttgatctaataagatccttgcttttaattgtactactcatgaagagacttggcagttcggatacactgggtgctctcatgacgatttgtccaccaacagacgaacacagtccgaggaacaaccacgtgtatgggaaggagttccagtccatgctggaaggactcgacgaagaagggtgcgtggaagaagcagggcaccactctgagaagaaacgacgactaaacgtagatcaggtgaaggccttggagaagaacttcgaagtagagaacaaactggaacctgaccgaaaggtgaagctcgcgcaagaactcggcttgcaaccaagacaagttgcggtttggttccaaaaccgccgtgccagatggaaaacaaagcaattggaaagagattacggcgtcctcaaagccaattacggatcacttaaacttaactttgacaccctccaacaagacaacgaagccttactcaaacagataaaggaattgaaatcgaggctggtgcaagaagagaacaacaacaacactgaaagcgatgtttcggtgaaggaagagatgatagccactctgcaggatagtaacccgctctgtgaatccgccattcctggatcggactcgaaggagttgagttacgagtgtttcaacaagagtgatgaggtgggagggggttctgtgttccctgtggatttcaaagatgggtcttctgatagcgactcaagtgcgatcttgaacgaggagaacaacaaccacagccccaacaacaacgcggcgatttcgtcgtgtggggttctgcaaagtcacgggcttttgtcgtcgccttcttcttcgtcgatgaacaactgtttccagttccagaaacagtaccagacgacgacgcagtacgtgaagatggaggagcacaattttctcagcgccgacgaggcctgcaatttcttctcggacgaacaagcaccaactctgcagtggtactgttcagaggaatggagttaagagggaagaagaagaagcttaattaattgagagcgagggagggaatagaaagaataaggcattttgcagggtgtatagtaatgggatggagagagaaacattgtaaaaatgaaatggtcaaggattgaagaagagagggaaattgaagagcttgagagagaggggatggggttgaagcacgcatggcgtggggtcggagatgagaggttgatgacgataaaaaaaaaaggggggtaataataatcatcaacatccgtgcggggaaaggggagtaatttatgaataataataatgattaggtcgtaatgaagtgaaatctatctagtgagtaatgctgtaaaaaatccacaattcacctctgcttccacctttctttctagctctcaccagttttatcggcttttgtatttctatatctagattaatttcttttataaaaaatctggaattaat

SEQ ID NO: 11756 - DNA, 1247 bp, Glycine max
  Clone ID: 701127167_FLI
caacctacccctttttcttctcccaccaacttcaccgtcttcttcctcgatcatgtctcacttcaagggcaagtaccatgatgagcttattgtcaatgctgcttacattggcactcctggaaagggtattcttgctgctgatgagtcaacagggacaattggcaagcgtttggccagcatcagtgtagagaatgttgaatccaacaggcgtgctcttagggagctgcttttcaccgctcccggtgctcttaaatatctcagtggtgtcatcctctttgaggaaactctctaccagagcacagctgcaggcaagccctttgtggaagtcttgaaggaggctggtgttcttcctggcatcaaggttgacaagggcacagttgagcttgctggcactaatggagaaaccaccactcagggtctagatggccttggtcagcgttgcgccaagtactatgaagccggtgcacgttttgccaagtggcgtgctgtgctgaagattggtcccaacgagccatctgagctggctatccatgagaatgcctatggcttggccagatacgctgtcatatgccaggagaatggcctggttcccattgttgagcctgagatccttgttgatggatctcatgacattcacaagtgtgctgccgtcaccgagcgtgtccttgcagcatgctacaaggctttgaatgatcaccacgtccttcttgagggtaccctattgaagccaaacatggtcacccccggatccaattctgctaaggtttcccctcaggtggttgcggagcacactgttagagcccttcagagaaccgtgcctgctgcagttcctgctatcgttttcttgtctggtgggcagagtgaggaggaggcatccgttaacctcaatgccattaaccaggtcaatggaaagaagccatggtcactctctttctcctttggaagggcacttcaacagagcacccttaaggcatggagtggaaaagaggagaatgtgaagaaggctcaggaagcccttttggtaagagccaaggctaactcagaggcaactctgggaacctacaagggtaactcaaagcttgctgatggtgcctcagagagcctccatgttgaggactacaagtactgatcaatctaagtgcgggtaggaatcggtattttatgggtacaaccgaattttcttgttaatgagtattgtgcttcgactcttcccagaataataatcgtttggaattttgctttttgtt

SEQ ID NO: 11757 - DNA, 1488 bp, Glycine max
  Clone ID: 701127294_FLI
caagttcataagaattgggaaggtgatgaaactaatcgatgagcagcagtgaaaaaaaacttgtttgaaccccaatgattaattattaatcaaattcaattcaatgaccaaccaatcttcttcgccctctttactttgcgcttctttcaaccaggaccacagttactttgccgttggcaccagagatggtgttagaatatttgatgctaatacaggaaggctttgttatgaaagagcggttggagcttttgttattgctgagatgctgtttagctccaaccttcttgctatcgttggagctggtcatcagccatctttgtctcctcgccgtctttgtttattcaatacaaccactggagctgctcttagagaattgaattttctaacttccatacttgctgttcgcatgaatagacaaagactcattgtcattttacaagacaaagcatatatatatgaaataaatagtctcacaatcttggatactattgacacagtgccaaatattaaaggactttgcgctttttcccctagtttggatgcatgttacttggctcttcctgccagtactaccaaaggatctgcattgctatataatgtcatggaatgccatttacactgtgagattgaggctcatcgttcaccattagctgcaatggttctttcttctaatggaatgtacatagctacagcatctgagcaagggaccataatcagagtccatttggtgtcagatgcaacaaagtcatatagctttagaagggggacatatccgtctactatattttctgtttcatttggaccatcaaagcggcttccagatattcttgcagcctcaagttcttctggttctattcatcttttcactcttggatttgcttcacgtccaagtagcaagagatcaagtggttttcttggatcaataattcctgatgctgtgcatgatgtgctggatcctgctcatcatcatgtactacataatgctgtccctgcaggggtcaaaagctatgctgtaattcgcaaggttgaaaatgtcaccaactcctcatcatctgaactcctagcttgtagggccattatgtccgtaataacttataacggttacttccaggaatacaacttaagcattgatgctcacaatgaattatcttggtctttaggacgccagttcaatcttttgactgtgaccatggataaggcatcatgagtgacataaagtgttcttagagcgccaactataactgtgaagcttgaggaatcacatgctacacttaaacttccagacctactactgctgccaatgttgaagtgttaatcaaagaaactggtagagctgtcgaggctgccaacatgaatgtgttatttggaggaaacaatgagtccaaattagagaacatttaaatgtaaattattggaatgaattaaaaaaaatgtaaattagtggtgtatttgggatagaatattcttattttataaagtagtttcact

SEQ ID NO: 11758 - DNA, 942 bp, Glycine max
  Clone ID: 701127318_FLI
cgagactgaggattattcatcgtgatcttaaagcaagcaacattctcttggatgctgaaatgaatcctaagatatcggattttggtatggcaagattgtttcttgtggatcaaactcaaggaaacacaagtaaaattgttggaacttagtaagtatatcacgatatgaaagggttaattaactgttttcctcagtccttacaaatcaaaatagaggattttttttttcctaattgagcttgatggtatttacatgtagtggatatatggcacccgaatatataagtcaaggacaattctctgtgaagtcagacgttttcagttttggtgtactggttttagagatagtaagtggccagaaaaatagtggatttcaacatggagaccatgtagaggatctaataagctttgcctggaaaaactggagggagggaacagcatcaaatctcatagacccgacattgaatacaggttcaagaaacgaaatgatgagatgcatccacattggtttactgtgtgttcagggaaatttagctgacagaccaaccatggcttctgttgcactcatgcttaatagctactctcacacaatgcctgtgccttcagagcctgcgttttttatgcacagcagaggcttgtcagatattcagtcgagggagtataattcaggggcaacagaatcaaaaagcaaatctgtcaaagcatactcaagtgaggaatcaacatgatgagctttaccctcaatagaatttagtgatacagccttacaagtgacatttttcctttttcttttccccggggaatagtaacaaattggtcatttttccatctagtatgtaaattttccatctacatcctgaattcattttaagttgttgactaagagttttggtgtttgcttgttgctctgatgatgacatgttaataacaacctattacctac

SEQ ID NO: 11759 - DNA, 410 bp, Glycine max
  Clone ID: 701127327_FLI
agaggccccaaaagctgcacacattgcccttcctgtccaggaatttgagatctagcaactaacaaggcaataatgaagttcttgttccagtgcccttgctgctcttgcttttgcttcatgaagccaaagcaagggaaggcaaaggtcaaggaagtcaaagaaaccaaggtggaagaaaaaaaggttgaagaaaagaaagactgaccatgtaactccatttcaagctttctttggttattattagtattatataagcatgcacaacaaatttgtgtctacttaatttgtgcttctttgttcctttaattaccactgctatgatgccttcctactacaattagtttgaaaatgtacaatgcgtttgcaagtaacttcttaaaaatggaaaataaaaaataaattgtcatttc

SEQ ID NO: 11760 - DNA, 1057 bp, Glycine max
  Clone ID: 701127365_FLI
gaaattcgtcatcatagagatttctgaagaaatcttggtagatacaatacaagtagctaattttgagcaccattcttccaatttaaaagcttttgaacttcttggcagtctgagctttccaacagatgtttgggttttctttgggaatttcactgcctcaaatgttaggcatgctcagaggtttgttcttcaggagccaaaatgggtgagatacctaaaattgaatcttcaaagtcactatggttctgaattttattgcacactaagcgcagttgaagtttatggtgtggatgctgttgagaggatgctggaggatttgatacatactcaagataatctatatgcacctggagatggtgatgctgataaaaggacagtatcaccccatcctaatcctcctgagagtgaagatgttcatcaaaataattttggagatcctgcttcagatatctcctctgcaaatcatgagaaagtaaatagtaatgttcctgatccagttgaagaaacccatcaacaagttggcaggatgcccggggatactgttctcaagattctgatgcagaaagttcgcactctagacttaaatttgtttgctttggagcggtatatggaggacttaaattctagatatgtcaatattttcaaagagtacagcaaagacatgggaggaaaagatatacttatacagaatatcaaagatggcattaggaatctcgttgaccggcaggatgctataacaaaaggtgcaagtgatctcaaatcttggaagtcccatatttccatgcagttggatcatctactcagggacaatgctgttttgaggtccgaggttaatgaagtccgcaggaagcaaacatctttagaaaacaagggtgtgctagtgttcttagtgtgttgtattttttcattgttagttatattacggctgtctctagatatggctacgagtgtctatagagtagtactgagtgttaatagaacagattgctccaggaaattttgtgccgttagctcatcctggtttctcctattattgaattgtatcattgttattttt

SEQ ID NO: 11761 - DNA, 1564 bp, Glycine max
  Clone ID: 701127494_FLI
gctttcctttgacgcttctgacactgctccttttctttctctccgtgtcctaatggctctccccgactcttcttcccgccgcaactccctgatcccctccttcatctactcctcttcctccaaaacgctccctctacaccacatgctcaactccgcctccgccgccgccccctcccagccgccggaaaacctccacgccggatcgcgcggcctcatgattccctctcccagcgagtcacgcaagatcgagatgtactcccctgccttctacgccgcctgcaccgccggtggaatcctcagctgtggcctcactcacatggccgtcactcctcttgacctagtcaagtgtaatatgcagattgatcctgctaagtacaagagcatctcttctgggtttggagttttgcttaaggagcagggattcaggggctttttccgtggctgggtgcctaccttgcttggttacagtgcccagggtgcttgcaaatttggcttctatgagttctttaagaagtactattctgatattgctggcccagagtatgcaagcaagtacaagaccttgatctaccttgctggttcagcatctgctgaggttattgctgatattgctctttgcccatttgaggctgtgaaggtccgtgtccaaactcagccaggttttgcaaggggtttgtctgatgggctcccaaaatttgtcagatccgaaggaaccttagggctgtacaagggattagtgcctctatggggacgacagattccatacacaatgatgaagtttgcttcgtttgagaccattgtagagctgatctataagcacgccatcccaacaccaaagaatgagtgcaccaaaggcctgcaacttggtgtcagttttgctggtggatatattgctggtgtactttgtgcaattgtgtctcatcctgctgataatcttgtctcttttctgaacaatgcaaaaggagcaacagttggtgatgcggtgaagaagcttggcctgtggggtctctttacccgtggtcttcccctccgtattgttatgattggaactcttactggagcccaatggggaatatatgatgcattcaaagtgtctgtcggattgccaaccactggtggtcctgctcctgcagctgctctagcttctgatgctgagcttgcaaaggcatagaatgtccaatgatgacacattcaacagtttgtttacgaaacttagaaagccagtgaatagggacaccataaataaacaggaggattgcagaagttgcttgagtggaactcgagcttggttggataatatattcttttaaagttcagacatcgtgtttccatttttcttaaatttgagtattttgaatttttaggaggatggttttgctcgcatcctcctcttgctgaaaactttgtaggtaggaatgatataattttgcatgctaggttctctacatgccattgtcaaacgggaatactcatttgttttcttgtctgtgcataagcacagacgcatttgcaaatgtctagattgagataatttttactccctttatttgattatttcttttgg

SEQ ID NO: 11762 - DNA, 1352 bp, Glycine max
  Clone ID: 701127573_FLI
cttaaaaccatttgtcacgctgtttcattgggacctcccacaagctcttgaagatgaatatgggggatttctcaaacctgaaatagtgtaaataaatactcaattatatatgattcactatagtatttttaaataatgaaaaagaaaatatagtaaatgtttatggaaaaataaaaatagggaggacttccgtaactatgctgacttttgcttcaagacatttggtgatcgggtgaagcactgggtaaccctaaatgaaccatatggctacagcgtgaatggctacagtggtggaagttttgcaccaggtagatgttctaactacgttggaaaatgccctactggtgattcttccaccgagccctacattgttaaccatcacttaatacttgctcatggagcagcagtcaattgctacaagaacaaataccaggctcatcagaaaggacaaattggagtcaccatagtgactttcttctttgaaccaaaatctaatagtgatgctgatcgcaaggcagcaaggcgagctctggactttatgtttggctggtttgctaatcccattacatttggtgactatcctgagagtatgagatctttagttggttctagactccccacattcaccaaagctcaatctgaaagtctcaaaggttcatatgattttcttggtataaattattacacctcaaatttcgcggaatatgctccaccaaccgccactaacaagacctatttcactgatatgctagccaaactttcttcgaccaggaaaggtgtacccattggcacaccgactcctctgagctggctctttatctatccggagggactttataagctcatgacatacataagggacaactacaataatccaccggtgtacattaccgaaaatggcgttgcggaatcaaagaatgactcacttgcaatcaatgaagcccgaaaggatggtattcgaattagataccatgatggccatctcaaatccctgcttcatgcgatcaaagatagagttaatgtgaagggctactatatatggtcattttcagatagctttgaatgggatgctggttacacagctcgatttggcatcatatatgtggattacaagaacaatttgagtagataccctaagtcctctgcgttttggctgaaaaaattccttctcaagtgatctaaatctattgttcctttggcatgcatgcccagtttttcttcttgtttgtttcctggatatcacagacatgcagtgtgtatcacttgctcttcgattcggatcaatgtaatcaagtcatcgttgatatcaaataaataatggcatgccagagaatggaataaattatcttttc

SEQ ID NO: 11763 - DNA, 1597 bp, Glycine max
  Clone ID: 701127904_FLI
gcgatttgatctctccaccttggtgaaagccttgtgaaacataaggcttttacagaaggtggaattttgactagaagggatgtttggctgttgagtttatggagggtcaagctctttgttgaatagtgtttgtgttgcctttatctgcaacttttaattgaaccaatcctaccctttttatgaacatatgaaaagatcggttttttgtggttcctccactcattgttgttgaagggtctcgcgaaatcaatcaagttttgagacctgttttctggtagaggtgtaagtacaagatcttaataataaggattttgtacaaaggaaaagttgagaataagatgggggaagatggttattcttggattaggaggacaaaattttcacacactgtctgccatcgtttggatcctgctaggttaggctctattcctatcagtgttcagtcagagcaaaaatcaaggcctgctgcctcaaaggctcagagacaccccataacaaacaagcagagatctttgtcaccattgcctgagacttatctttctgaggccttcagggaagctagacatgaacagaagaggttctccacgccgaatccccggagggaaaagaggattatggggaagttgttgaacaaagattctagggagactaaggaatcaagttcaaagtcaccttcgcatagtccaaataggcaagtgaagtcaaagaaccgcaaggattcagcatggactaagcttttggacaatggtggaggaaagattactgctgtggaaacagctgaagagtggaatgttgacatgtctcaattgttttttggcctaaagtttgctcatggtgcacatagtcgactttaccatggtgtatataaggaggaggctgttgctgttaaaatcattatggtacctgaggatgatgaaaatggagctttggcttctcgattagagaaacagttcattagagaagtcacccttttatctcgtcttcaccatcaaaatgtcataaagttctcagcagcatgcagaaagccaccggtttattgtattatcacagaatatctggcggaaggttccttgagggcatatttgcataaattggaacaccaaactgtttctctacaaaagctaatagcttttgctctggatattgctcgcggaatggaatatatacattctcaaggtgtcattcatcgggaccttaaaccagagaatgtcctaatcaacgaagacaatcaccttaaaattgccgattttggcattgcatgtgaggaagcatcttgtgacttattggctgatgaccctggcacctaccgttggatggcacctgagatgatcaaaaggaaatcctatgggaaaaaggttgatgtctacagttttgggcttatgatatgggagatgttgactggaacgataccatatgaggatatgaatccaatacaggctgcttttgcagtagtaaataaggtgtgttctgttgtaatttaagtcatgtagttttgtaatgtgaatatctctctttatttgtcccttcatcattcattgccagaattctttttaaaagccctgtattatcctggcctttaatggattgttctttgtgc

SEQ ID NO: 11764 - DNA, 567 bp, Glycine max
  Clone ID: 701127927_FLI
attaaattctttaaattaaaatgataaatttaacacgttaatgaataaaaagaatagtgtgaaactatttcttctttttacaaataaaatacatcaaatttttaaactctgtaaaccaagcaccctgaaaagggtaaaaaggctgcaccaagaagccttgtatagcactataagcgcgagggataatggttgatggggaaataggaaacaacaagtggagctcctcttgatttttgtttctctgaagaaggagatttcagttgagatgatccttcggcatagtcagagacttgacatgatgtggatggagtaaagcaattcaagaaatatgacatcaaagccatatatatcattagtaagtgttttggtaccttcccttagttttcttggtgagtttcacgtaaaatatgtttgggtggaggctagctatcaattgtagttcctctttctaaggaagcaagtagtgaaatttgaaattattgaagaggaattccttttagcttgcaaatgttcatgttctgggactatctattcacacatcacaacaaatgaaattgatccaattcc

SEQ ID NO: 11765 - DNA, 1497 bp, Glycine max
  Clone ID: 701127954_FLI
cacaaagcgggttactgtctgttcaagctaccatctctctctctctttcttagtgcctccttgccagaagttaaaatggcccaagaaactttcctattcacatctgaatcagtgaacgaggggcaccctgacaagctctgtgaccagatctccgatgctgtgctcgatgcatgcttggagcaggaccctgacagcaaggttgcctgtgaaacctgcaccaagaccaacatggtgatggttttcggagagatcacaaccaaggccaacgtggactatgagaagattgtgcgtgacacatgcaggaacattggttttgtctctgatgatgttggtcttgatgctgacaactgcaaggtcctcgtcaacattgagcaacagagtcctgatattgctcaaggtgtgcacggccacctcacaaagaggcctgaggagattggtgctggtgaccaaggtcatatgttcggctatgccactgacgagactcccgagctcatgcccttgagccatgtccttgccacgaagctcggtgccaagctcaccgaggttcggaagaacgggacatgcccttggctgagacctgatggcaagacccaagtcactgttgagtactacaatgacaagggtgccatggttccaatccgcgtccacactgtgctcatctccacacagcatgatgagactgtcacaaatgatgagattgcagctgatcttaaagaacacgtgattaagcctgtgattcctgagaagtaccttgatgagaagaccattttccatttgaacccttctggcaggtttgtcattggagggccgcatggcgatgctggtctcaccggccgcaagatcatcatcgacacctatggaggatggggtgcacatggtggtggtgccttctctgggaaggatcctaccaaggttgataggagtggtgcctacattgtgaggcaagctgcaaagagcattgttgcaaatggacttgctaggagggcaattgtgcaagtttcctatgccattggtgtgcctgagcccttgtctgtgtttgttgacacttatggcactgggaagatccctgacaaggaaatcctcagcattgtgaaggagagttttgacttcaggcctggcatgatctccatcaaccttgatctcaagaggggtggaaatggcaggttcttgaagactgctgcatatggacactttggcagagatgaccctgacttcacatgggaagtggtgaagccactcaagggggagaaggtacctgcttaactaaaaggggttccaacactcttggcaagggacttttgcactactactggcttcttattatctgattgctaaaattttctctatgtttccttccctcttactcaattctgtttttttttttctgtatttttttatgaatttcccccttttttttgtgtacttgtatgtgttctttcagaacatatatattttatatgatgaaacaaaaaaaaatgttctctcaagatttatgct

SEQ ID NO: 11766 - DNA, 1504 bp, Glycine max
  Clone ID: 701128462_FLI
atgtgaatggtaaacaagaagataataatcctaagcctgatcagctatctctggacgtggagaatttgaatttaaaagaggtttccaatgaaggaaaagttaacagttaccgggcacagacatttacttttgctgagcttgcagctgcaacagggaatttcaggtcagattgctttctgggtgaaggagggtttggcaaggtttataaggggcgcatagagaaaataaaccaggttgtagcaataaagcaactagatcctcatgggcttcaaggaattagggaatttgttgttgaagtgttgacattgagtttggcagaccaccctaatttggtcaagttaattggtttttgtgctgagggagagcagaggctattggtttacgaatatatgccattgggatctttggagaatcatttgcacggtatattctgttttcctaatatcttgttttttgttggatagaatcaaggttttaaattgtggttgcagttgtgggtttgtagcaatccttaacattgagggaaattgctgacaatgtcgctcatgtggccgcaattgtaatcgtggagactttaaaaactttgatgttgcggccaaaatcactgtcgcatattgttttttaaaaccttggatagattagaatgtactggcaatggtattctttgtccccatggtttgtatctttttctttctttcattttgccagatcttccgcgtggtagaaaaccgattgactggaatacaagaatgaaaatagcagctggtgcagctagaggcttagagtatttgcataataaaatgaaacctcctgtcatatatcgggacctgaaatgctccaatatcctgttaggcgaaggatatcattccaagttatctgattttggcttggcgaaagtaggaccaagtggtgataaaacccatgtttcaaccagagttatgggaacatatggatattgtgccccagattatgcaatgacgggtcaattgacgttcaagtctgatatttatagctttggagttgttcttttggagatcatcacaggcaggaaggcgatcgacaatacaaaacctgctaaagaacaaaatctagttgcatgggcaaagcctttattcaaaaaccgtaaaagattctgtgagatggttgatccattgcttgaaggtcagtatccaataagaggtttgtaccaagctcttgctattgctgccatgtgtgttcaagaacagcctaatatgcggcccgaaacaactgatgtggttacagctctaaattaccttgcatcccagaaatacgatccccaagttcattcaatacaaagctgtagaaaaggtgtagcttctccaagggtgagaagtgatggtcatagacattttgttagtaatggttctgagacagacagttctggagattagaaatgtgatgtgtttttggatattcatattgtaaaatgcttagttatccaattttgcttcatataaagaagattcttctttttggctcctct

SEQ ID NO: 11767 - DNA, 814 bp, Glycine max
  Clone ID: 701128474_FLI
catcctcgtgaaataatgactgaggttcttaaagctttgcaagaattaaatgtttgttggaagaagattggtcactacaacatgaagtgtaggtgggttgctggcattcctggtcaccacgaaggaatggttaacaataatgtgcatagtaatcattactttggagatgattccaacattattgagaatgatgctgtttctacttcaaatgtggtcaagtttgaagtgcagctttacaaaacccgggaagaaaagtatctgcttgatcttcaaagggtgcagggtccacagtttcttttcttggatctatgtgctgctttccttgcacagcttcgtgtcctctagagcgaagagcttaggctcaccagagacataaatatgccttgtgtttcatgtgaataagcttacattgtacatacaagtatcttttcggtccaagcttatcctctgttttctacccgtttatctgtgggtaaacattataatgagccaatcccaagtatgggatttgcttcgttaacaatggtgctcgactaggttttcctttctcttggtgattttaattttatcagtgtaatgaattatatggggaatgtcttaaaagaattagccccaactgacagtgatatatgtatggttatcaaccaaatgctgtaaacgactgttgccattggaagggatgtctaggctgcttctaacttttgcagattagtctttgttgtcctataaatgtaatttcatattactcgtgtatgaatgctatgtaacgactgtgttcatccgacgagccatttcgtagagtgcaaccgttcct

SEQ ID NO: 11768 - DNA, 1178 bp, Glycine max
  Clone ID: 701128502_FLI
attcctcatggagctaagctacatgcactaattgatgcctgccatagtggcactgttctagatttgccatttctttgcagaatgaacaggagtgggcaatatgtatgggaggaccatcgccctagatctggtgtatggaagggatctagtggtggagacattatctgcttcagtggatgcgatgatcatcaaacttcagctgatacatctgctctatcgaagattacatcgactggggcaatgacattttgcttcatccaagccatagagggtggtcatggggctacctatggcagcattcttactgcaatgcgtactgccatcagaaatgttggcagtggtggtggcggcagcgctattgggggtggtgatgtcgtaacatcccttctctccatgcttttgaccggaggtagtctcagcggcgtcggtggactgagacaggtaatatagttagatttgacactcatattacaaaagttttgactgttttatttatatcagttgctcgatgatccgaactcattagttcttgtataccaactataacagtgccttctctgtttgtgtccactttgttttcctactgttaaactgacttctgctattgtttttcctacctatttccttttgtttcaacaggaaccacagttaacagcttgcgaagcatttgatgtgcatagaaaacctttttcattatgatattactattactcaatattctttattctacaatttgttttcctcggctctgcccctgtacacgactaaattgattaattaatgtattataaagtagagagtatccttttttttctgaaatcactgaggatgtgtttggatgaatttatgtctacccttgagattgtgacatgctcttataataatgactttggttgctgctgcaatcgttggattaaatgctgattcgactcagatttgaattccacataagaggtgagcatcttacccctggataaattaggtgtgcttgtgacctcaaatttactacgtgaaaagtgtcaataatggcttgaaattgatggtctcgtattgatgatacattatgtgcataagtttgatgtaattacttgtatagtatttttttggaacaacaaatcttgggacttgatttgataaaaggtataaaatagaaactaatttgattttgattttttatt

SEQ ID NO: 11769 - DNA, 1063 bp, Glycine max
  Clone ID: 701128634_FLI
caattttcaggctccgcttttgggacaagtaaagacagaagttgcacatttaatggccctgccaacctacgtgctggaactaataaaatagcacttcttagtgtagctgttggattaccaaatgttggattccattttgaaacatggaaggctgggatcactggagttttgcttaatggacttgatcatggacaaaaagatttgacttggcagaagtggtcataccagattggtctaagaggagaggctatgaatttggtggctcccaatggggtctcatctgttgactgggagaaagactcactagctgtccgaagccagtcacagttgaaatggcacaaggcatatttcaatgcacctgagggagttgaaccattggccttggacctgagcagcatgggaaagggtcaagtatggatcaatggacaaagcatagggagatactggatggtttatgcaaagggttcttgtagttcttgcaactatgctggtacataccggcctgccaagtgccaacttggttgtggacaacctactcaacgatggtatcatgtgccaagatcatggttaaggccaacaaagaacttgatagtagtatttgaggaattgggtgggaatccttggaaaatagctctagtaaaaaggacaacacatactccagcaaactagtgaacccgattcaaagaactgaaaaaacgtgaatatggccagtcaaatggtgatcgacagggcaacgtgcaatgggcccatggtatagaaattggtgatcataatgttgagggaataagttaatgcttggttcaaccgttgatgtcttcatctccaattctacattattcttcattgcataaaaaatagagaaccgtgaataatacaaaaaaaaaggtgtggccaagttgttttttaatttattcttatagtatgtacttaaaaagagaaaataacaaaattcagaggtgtgcttttattcacttgtgtaatgtgtatatctcaaattctcaatacatgtaatgcattttagtggttgccttatacgtttttcataaaattctattaatttgct

SEQ ID NO: 11770 - DNA, 1158 bp, Glycine max
  Clone ID: 701128657_FLI
tcatgctccacaacaacaacactgatgatgataacaacaaaaccagcactaacactgggttagggtactatttcatggagagtgaccaccatcaccgcaacaacaacaacaatggaagctcctcctcctcttcctcttctgctgtcaaggccaagatcatggctcatcctcactatcaccgtctcttggcagcttacgtcaattgtcagaaggttggagccccaccggaagtggtggcaaggttagaagaagcatgtgcttctgcagtgacaatggctggtgatgcagcagcagcagctggatcaagctgcataggtgaagatccagctttggatcagttcatggaggcttactgtgagatgctcaccaagtatgagcaagaactctccaaacccttaaaggaagccatgctcttccttcaaaggattgagtgccagttcaaaaatcttacaatttcttccaccgactttgcttgcaacgagggtgctgagaggaatggatcatctgaagaggatgttgatctacacaacatgatagatccccaggcagaggacagggaattaaagggtcagcttttgcgcaagtacagcggatacctgggcagtctgaagcaagaattcatgaagaagaggaagaaaggaaagctacctaaagaagcaaggcaacaattacttgaatggtggagcagacattacaaatggccttacccatccgagtcacagaagctggcccttgcagagtcgacaggtctggatcagaagcaaatcaacaactggtttattaatcaaaggaaacggcactggaagccttcagaggacatgcagtttgtggtgatggatccaagccatccacactattacatggataatgttctgggcaatccatttcccatggatctctcccatccaatgctctagaaaagtatccatcctttgtgggctgataatagattcataagctcgtgctgtcacttattaaaaccttaagcaattattaattaatatgctttctagtgctcatataagcattctaagaaatcctagattgctatatactatatttatagtacgcaggtgtatcctgctagcttaaagagacggtcctttgtgtggatcatctagttcaaggagttatgaataaataaaattccataaattt

SEQ ID NO: 11771 - DNA, 698 bp, Glycine max
  Clone ID: 701128782_FLI
gatctcattacaatctcccaagtttctaatctcagctaagaaaaaccaaaagatgtctctgattccaggtttcttcggtggccgaaggagcaacgtgttcgatccattctcactcgacatgtgggatcccttcaaggattttcatgttcccacttcttctgtttctgctgaaaattctgcattcgtgagcactcgtgtggattggaaggagaccccagaggcacacgtgttcaaggctgatattccagggctgaagaaagaggaagtcaaggttcagattgaagatgatagggttcttcagattagcggagagaggaacgttgaaaaggaagacaagaacgacacgtggcatcgcgtggagcgtagcagtggtaagttcacgagaaggttcagattgccggagaatgcaaaagtgaatgaagtgaaggcttctatggaaaatggggttctcactgtcactgttcctaaggaagaggttaagaagcctgatgttaaggccattgaaatctctggttgatccatgttatggttgaaaatcgtgagcttatcctttgttgttgtaataagtgtcttctgtcttgtgtgcctttgagaaaaatcttccatgcatgcattgtggattgtaattgctcgaatgattgataactgtgtggctgtgtaattcatgtgaataaagtcctaccttcagagttcagaat

SEQ ID NO: 11772 - DNA, 1416 bp, Glycine max
  Clone ID: 701128804_FLI
gcctcacgcttggaattatgatattgttggccatggtaattgtagcgttctacagatccagccaatcgaagcgattgaggaaaggatccagcagaactgggcaaggtcctccaaaactggttattcttcacatggatatggctatccacaccttggatgatataatgagaagtactgagaatctcaatgagaaatatatcatagggtatggtgcgtctagcactgtatacaaatgtgttttgaagaattcccgaccaattgcaattaagcgactgtacaaccaacaagcacataatttaagggagtttgagactgaacttgaaacagttgggagcattagacatagaaaccttgtcaccttgcatggatatgctcttactccctatggaaatctccttttctatgactatatggcgaatggctcactgtgggatcttctacatggtcccttgaaggtaaaacttgattgggaaactcgcctgaggattgctgttggagcagcagaaggacttgcatatctccatcatgactgcaacccacgtatagttcacagggacataaagtcttcaaacattctgctggatgagacttttgaggctcatctttctgattttggcactgcaaaatgtatctcaaccacaagaactcatgcatcgacttatgtccttggaactataggctatattgaccctgagtatgcccgaacatctaggctgaatgaaaaatcagatgtatatagctttggcatagttctgctggagctacttactgggaagaaggcagtggacaatgagtccaatttgcatcaattgatattgtccaaggcagatagcaacactgtaatggaaactgtggatccagaggtctccataacttgcattgatctggctcatgttaagaagactttccagcttgctttgctttgcacgaaaaagaacccttctgagaggcctactatgcatgaagtagccagggtgttggtatcactacttccttcaccactaagtaaaatccttgcccctcctgcaaagaagttcgactatgcccatttcgtgatcgagaagggacaacaacgaaaagtggaagaacaaaaacctcagcaggataacatcttacccaatgctcaatggtttgttcgttttggggatgttatatccaaaagcacttgacctttcttacccatgtgcctttgaagggttcatgtcagtgacataagttcaatgggtgaaaaaactagtttctttttgtgattagatatatcctttatattatttttacatatagagtatggagcatatggataggggatacaaaacactttactgttagagaacgtttctactgtatatcttacaagcacttgttttcaggcattattatgtcaaatgtttagagcacttacgatgcttcttttgc

SEQ ID NO: 11773 - DNA, 1371 bp, Glycine max
  Clone ID: 701128902_FLI
actccaatttctgattatcatttcattaaatcgactataaacaaccagatatattggtcaaaaacaagaaccacggtgacacaaaaccataaagatactcaaactcaaacacaactaaaattactgagcataatcataaaccctaatcaacgacatcaagccctagtttctccagcctccatcaccaccgtcaccaccacgagagtaaccacggtcaccaccaccaccataaccacggtctctgccaccgccatagccaccgccaccgccaccgccatatccaccgccgccgccatagcctccaccgccaccgctacggttgtatccccctccaccaccgcgaccaccaccaccatatccaccaccgcgaccaccaccatatccaccacctccaccgcctccgccgccaccgccaccacgggcaaaaacctcaaactaagccccaaacgcttctttcgtaaaaaggaaccatctttagtctcacgctccgacccgccttctttcggatccggatcctcctccgttgactcttccaccgcaaatcacaaaccttcccccggtaaccaaactccgaccagcgttctcccggacgtctccggcgagtggtccgaggtcgccgccgccgccgttgacgtgcggtgggacctcgcgcaggccttgcgcctcatcgaccgcgacaacgacggcgtcgtcacgcgccaggacctcgagtcgcttctcacgcgccttggcgcgtcgccgagccccggcgacgtggcgctcatgctcggcgaggtcgacggcgacggcatcacggttgagtctctcatgagctacgtcgggtcgggtctcgaaactgggtcggatcccgacgagctcaaagaagccttcgaggtgttcgacacggatcgagacgggaggatctcggcggaggagctgcttagggttttcaaagccatcggcgacgaacggtgcacgttagaggagtgccggcgcatgatagagggagtggacagaaacggggacgggttcgtctgcttcgaggacttttctcgtatgatggacctgcagcggtgatgatgacgtggttgtgattgtgatgatgtcagatgatgatcatgatcatgttatgatgagacgatgtgaaaaaatatatataagaaggaaggcaacttctccaatttttttttttaatcccttctgttattttctgtttgttattattattttattaattttttttctctcttttaatttgggtgtaaaattttcaaaggcgaatgtgcaaatccactgagaaaatgcgttctgagttgaatacttgaatgatgcatgtgattgggggggcaaagagaaaatatctgaatatatctaacgtggctttaagctctg

SEQ ID NO: 11774 - DNA, 1996 bp, Glycine max
  Clone ID: 701128906_FLI
acttgctctacctctgccactttctgagtacaatacaacacggccatggctgcctcagtctccactattggagctgtcaacagagctccagagtcgctgagttttggtacacttcaaaaagtgtcaatttcaagaatatgatacatagagggaaaactcttatgatttttaactcctcatttatattgatagtaaactcaatataggttaataactgtgttatgtaatgtaataatcaatatatgtgatagcaaattagaaaagaatggtgttatttcttacttgagtcaagataaaatcaacagatttggatattagaagcatgtgacaagtgagtgtgaagttttaaaattagtttggacagtataaaagagtggttactgtgaatattgcagctgagcttgaacagctctgaagctggagattcggttcccagttcagccttctttggcacaagcttgaagaaggttactgcctcaagggtccctaacgtcaagatttcttctggaagtttcaaaatcgttgcggcggagaaagagattgatgagcaacaacagacaaacaaggacagatggaaaggtcttgcctatgatatttcagatgaccagcaagacatcacaagaggaaagggtatggttgattccctcttccaagctccacaggagactggaactcactatgcagtcatgagctcttttgagtaccttagcactggacttaaacagtataacttggataacaacatggacggtttttacattgctcctgcttttatggacaagcttgttgttcacatcaccaagaacttcatgaccctgcctaacatcaaggttcctctcattcttggtatttggggaggcaaaggtcaaggaaaatccttccaatgcgagctcgtctttgccaagatgggaatcaaccccatcatgatgagtgctggagagttggaaagtggaaatgcaggagagccagcaaagttgataaggcaaaggtaccgtgaagctgctgatataatcagcaaggggaagatgtgctgtctcttcataaacgatcttgatgcaggagctggtcgtcttggtggaaccactcaatacactgtgaacaaccagatggtgaatgccaccctcatgaacattgctgataaccccacaaatgttcagcttcctggcatgtacaacaagcaagagaacccccgtgtgccaatcatcgtcaccggtaacgatttctcaacactctatgctcctctcatccgtgatgggcgtatggagaagttctactgggcacctacaagggatgaccgagttggtgtctgcaagggaattttccgcactgacaatgttcctgaggatgaaattgtcaagcttgttgacaccttccctggccaatctattgatttctttggtgcactcagggctagagtatatgacgatgaagtgaggaagtggatttctggtgttggtgttgacttgattgggaagaagcttgtgaactccaaggaaggacctccaacctttgaccaaccgaagatgactttgagcaagctcttggagtatggtaacatgcttgtccaagaacaagagaatgtgaagagagtacaactggcagacaagtacttgaacgaggctgctcttggtgatgctaatcaagatgccatcaaaagaggaactttctatggcaaagcagcccagcaagtaaaaattcccgttcctgaaggttgtactgatccaaatgcctcaaacttcgacccaactgcaagaagtgatgatggaacctgcttatacacaccctgagaacctaagcattctccacttgaagagaagctatgacttgagataatcaaataatttatcttgttcatattggattgttatcctttataattttgagttacattgtctcactactaaaaaaaacacttgagataatcaattaatatttcctggtgttcattgtggttctgctgaactttgtggcttcaaataatagaaggtgttttact

SEQ ID NO: 11775 - DNA, 1390 bp, Glycine max
  Clone ID: 701128925_FLI
cttctctccacgcccttcttgggtaaccgtctgaagtgcagcaatggcagatggattgcattcgcagcatccatcggtagttcagaagttatctggacagtcttatcttgtgtccaggcttgctcctaatcactccagaaactgttctaccactggtagttacttcaatggaggtttgcagtcttcaggtttggttccagtcacggcacacgcgccggctgagaaaggggtgtctggatttttgttggatttcctgatgggcggagtgtcggcggctgtgtccaagacagctgcggctccaatcgaacgagttaagttgctcatccaaaaccaggatgaaatgatcaagagtggtcggttgtctgaaccatacaaaggaattggcgattgtttcactcgaaccatgaaggatgaaggggtgattgctctttggagaggaaacactgctaatgttatcagatacttccctactcaggctctgaattttgcttttaaggattatttcaagaggcttttcaacttcaaaaaggataaagatggctactggaaatggtttgctgggaatttagcatctgggggggctgctggggcttcctccctcttgtttgtctattctttggactatgcccgaacacgtttagcaaatgatgcaaaggctgcaaagaagggtggtgagaggcagttcaatggcttgattgatgtttacaggaaaaccattaagtctgatggcattgctggcctttatcgtggtttcaacatctcatgtgttggaatcatagtgtaccgtggtctttactttggaatgtatgattctctgaaaccagtggtcttggttggtggattgcaggatagcttctttgcgagttttctcttgggatgggggatcacaataggtgccggcttggcctcttaccccattgatactgtgcgtagaagaatgatgatgacatctggagaagctgtaaaatacaagagctctttggaagcattcaagataattgtcgcaaaagagggtactaagtcactctttaaaggtgccggtgcaaacatattacgtgctgttgcaggtgctggagtgctcgctggttatgataagctacagctcgtcttgttcggaaagaaatacggttctggtggtggaggttaatatacagataatgacgacgacaactatctgaggcaatgatgttgcttcccctttgcattgaataatttggatgaaaaatagtggttttgaagtttccccgaatgtagggtaggggctttataataagaaatcatagttttgcaaacttgaattttagttggttattacttgccttaagcttataatcgtgtagtttgttagaccttttggttgaagtaattgaagactactgttttatttgtt

SEQ ID NO: 11776 - DNA, 2550 bp, Glycine max
  Clone ID: 701128931_FLI
gtagggttttgaagagcctcctcctccgttaccagtttcttcttctttatcctctctcctttcttcttccattcctctaacctaagatgggcaagtcaagcaagaaatcagctatcaaggttgacgctgctccagctgtggttccgccatccaagtctgccaagaagggaggcaagcgacaagctcaagatgaaattgagaagcaagtgagtgccaaaaaacagaagatagaggaggttgctcagaagcaaaagaaggaggccaaggtgcaaaagaagaaggaaagtagttcagatgattcttcggaatctgaagaggagaaacctgcacccaaacctgtactttcaaaaaaggtacctgctaagaatggtgctgccctgccaaagaaagacaagccagtctccagttcttctgaagatgactcctctgacgaggatgaagtgaatgcaaagaagccacacaaagtggttgctgagaaacaaaagaatggagcaaccgtgcaaaagaataagaaggaaagtagttcagatgattcttcttcagactctgaagatgagaaacctgtagcaaaagctgccgtaccttcaaaaaagacacctgctaaaagcagcaatataagtaccccagccaagaaaggcaagccagctagcagctccagttcttctgattcatctgaagatgactcttctgatgaggatgaactggctacaaaaaagcaaatgaacgaagtgaaagtgcaaaagggtaaggaggaaagtagttcagatgattcttcatccgattctgaagatgagaaacctgcagcaaaagttgccgttccttcaaaaaatcaatctgccaaaaatggtactctaagtactctagctaagaaaggcaagccagctgccagttcaagctcttctgaatcttctgatgataactctgatgaggatgaggcaccaaaaaccaaggtggcccctgctgcaggcaaaaatggacatgcttctacaaagaaaactcagccaagtgaaagttctgacagtgatagctctgattctgatagcagctctgatgaaggcaaaagtaagaaaaaacctacaactgctaagctgcctacattgccagttgctccagcgaagaaagtggaaagctcagatgatgaatcaagtgaaagctctgatgaagacaatgatgcaaaacctgctgtaactgctgtatcaaagccttctgctcgtgcacaaaagaaggttgaaagctctgattctgatgatagcagctctgatgaagacaagatggatatcgatgatgatgatgatagttctgatgaaagtgaagagccacaaaagaaaaaggctgtgaaaaattcaaaagaaagcagtgacagttctgaagaagacagcgaggatgaaagtgaagagaaaccctccaaaactcctcagaaaagaggcagggacgtggagatggttgatgctgccttgtctgaaaagaaagctcctaagaccccagttacaccaagagaagaatctggcacttcaaagacactatttgttgggaacttgccatttagtgttgagcgggctgacgtggaagggttcttcaaggatgccggagaagttgttgatgttcgttttgctacagatgatactgggaagtttaaaggatttggacatgttgagtttgcaacagcagaggctgcccaaaatgctcttgggttgaatggacaacaattgtttaatcgtgaactccggcttgatttagctcgggaaaggggtgcatatacccccaacagcagcaactggaacaactcatcccagaaaagtgaaagaggccagtctcaaacaatatttgtaaggggtttcgatacatcccttggggaagatgagataagagggagtttgcaagaacattttggatcttgtggggacattaccagggtgtcaattcctaaagattacgagtctggtgctgttaaggggtttgcttatgtggattttggtgatgctgatagcatgggcaaagctctagaactccatgaaactgaacttggaggttataccttgacagtggatgaagccaaacctagagataatcagggttctgggggtagaggtgctggtggtaggagtggtggtggtggtcgatttggtgctaggggtggtggcggtggtcgatttggtgctaggggtggtggcggtcgatttggtggaagtggtggtggcggtcgatttggtggaagtggtggtggtcgatttggtggaaggggtggtggtggaaggggtcggggaaatagacccaaccttgctgcggaaggcacagggaaaaagaccaaatttgctgatgatgagtagggtggcaactctagcagatacttaaagtttaatatttattttctaaactttcctgtagtgttggctccccagttttgttttggtattccgtagttagtatgaattcgtagaattcagttgttatatgatttgatacttatcgcatggattattatttaaatatagtatttgtggctcttcagaattatgctttcattatttgaatcaaatccgatattaatat

SEQ ID NO: 11777 - DNA, 1306 bp, Glycine max
  Clone ID: 701128942_FLI
gttcgcgtttgttctgcttttcctatcggcctcagcagacgacgtcgttgtgctctctgaagataacttcgagaaggaagttggtcaggacagaggagctctcgttgagttctatgctccttggtgtggacactgcaaaaagcttgctccagaatatgaaaagcttggtagcagcttcaagaaagccaaatctgttttaatcggcaaggttgactgtgatgagcacaagagtttgtgcagcaaatatggagtctctgggtacccaacaattcagtggtttccaaaaggatctcttgaacccaaaaagtatgaagggccacgcactgctgattcacttgctgagtttgtaaatacggaaggaggaacaaatgtgaagattgctacagctccttccaatgtagtggtgcttacatctgaaaattttaatgaggttgtcttagatgaaaccaaagatgtcttggttgagttttatgcaccctggtgtggacattgcaaaagtcttgctcctacttacgagaaagttgccacagcatttaaattggaggaagatgtagtaattgcaaatctggatgctgataaatataaggatctggctgaaaagtatgatgtgagtggatttcctaccttgaagttcttcccaaagggcaacaaagctggtgaagagtacggaggtggaagagacttggatgactttgtggcttttatcaatgagaaatctggaacaagtcgagatgtaaaaggacaacttacttcccaagctggtatagtagaaagcttggatgtcttggttaaggagtttgtagctgccagcgatgaagagaagaaattcgtgtttacccgaatggaagaggaagttgagaagctgaagggttctgcctcaaggcacgggaagatttacttgaaagctgccaagaattacttggaaaaaggttctgattatgctaagaacgaaatccagcgcctacagcgcatacttgacaagtccattagtcctgccaaggccgacgagttaactctaaagaaaaatatcttgtcgacatatgcggcttgactttttggtgcatcattaaccatctctcatggaagctcgtgatcaatcgcagctcctgatgattgtttgactttgatatcgaaaatgctgggagatattcaacgtggatacttgtagtgcttaatttgagtctgtactattgaccttatcttgcatggcgcttttggggttaaaaattccgaacttacgattcttctccccattgtagtctacctgagcggtttaaaattttgggagacgatagcttttgttttt

SEQ ID NO: 11778 - DNA, 1710 bp, Glycine max
  Clone ID: 701128972_FLI
ggggtagtcacagaaacacataaacaagaagacacccaccaatattttgctttctcttttcttttcctgcttataactgccttttgttttggttttaattccacctcatattttatatgtgttccaaacttcttcttggaatgtcccttccttaatacccctcaaagaaaagccaccttaacatctcttctctgaaaattctctttagagagatagagagaggaagaaagaatggcagcttgcactgtctactcaacacaatctctgagcacaaattgctccatctcaaccccatcaaagacgcaactcagttttttccaccaaaagcaggtagttttctggaggaacagcaagaagggcagctgcagcagcagaagaagctatgtgataacatgtgcagcaggtgactcacagacagtggtgattggcctggctgcagactcagggtgtgggaagagcaccttcatgaggaggctgaccagtgtgtttggaggagcagcagagccaccaaagggtggcaaccctgactccaacactctcatcagtgacaccaccactgtcatatgcttggatgattaccactctttggacagaactggaagaaaggagaagggtgtcactgcccttgaccctagagccaatgattttgatctcatgtatgaacaagttaaagctcttaaggatggaattgctgttgaaaaaccaatctacaaccatgtcactggtctcttggatccccctgagctcattaaaccccccaaaatcttagtcattgaaggtttgcacccaatgtttgattcccgtgtcagagatctcttggactttagcatctacctagacattagcaatgaggtcaaattcgcttggaaaattcagagagacatggcagagcgtggacacagtcttgaaagcatcaaggctagcattgaagcaaggaagcctgattttgaagcatatattgatccacaaaagcaatacgcagatgcagtgatagaagtgttgccaacgcaactcattccagatgacaacgagggtaagattttgagagtgagattgatacagaaagagggggttaagtactttagcccggtttacttgtttgatgatggctctaccatttcatggataccatgtggaagaaagcttacatgctcctaccctggcatcaaattcttctatggacctgagacttactacggaaatgaggtgtcagttgtagaaatggatggacaatttgacagactagatgaactaatatacgttgagagccacctaagcaacctctctacaaagttctatggagaggttactcaacagatgttgaagcatgctgattttcccggcagcaacaatggaacaggtctcttccaaaccatagttggtttgaagataagagatctatatgagcagctaatagccagcaaggctgagactccagtagctgcaaaagcttaggaattgaacctgccataatatatatacatatatcgatcgagcaacgcagccaaattgagttctctcatcatcaaaatcatcattttctttcttctttcatgttttccacaattccactctatttcatgttattttgtcaattgttattaggctgttctgcatgataattaatgaaaaaaacactatgtatgtatgtacttatccgagaagaaaaagcgaggctgagattcagttatgttgatacaagattgagac

SEQ ID NO: 11779 - DNA, 1002 bp, Glycine max
  Clone ID: 701128973_FLI
attgctctctaagctttgattcttcttaattcatacccttcccacactcattcattgttgtgcgtctggttttctgcctgaaatggagtacatgaaccagagaccaaaatatgattgccttctttttgatttagatgatactttgtatccactaagcactggtcttgcaaaagcatgtggccaaaacattaaagactatatggccgaaaagcttggcatagagaaaagcaaaattgatgacttgtccaacctcctctacaagaactatggaacaactatggctggtttaagggcaattggatatgactttgactacgatgaatatcacagttttgttcatgggagattaccttatgagaatttgaaaccagacccagttctgaggaacctcttgctgagcctaccctataggagactgatcttcacaaactcagacaaagtccatgcagttaaggcactaagcaggctaggattagaagactgctttgaaggaatcatatgctttgagacccttaatcccatccacaaaagcactgtctctgatgatgaagatgacattgaatttgtggggggttcaggcacaaccaatccaaccacaaaaaaagatgctagcagctttcaaatctttgacatcattggccattttgctcaacccaatccccacacagttttgccaaagacaccaattatttgcaaaccatcagaaaatgccattgagttggccctcaagatagccaaccttaatccacaaagaactttgttctttgaggatagtgtccgcaacacacaagctggaaaacgtgtgggtcttcacactgtgctggttggaaaatctcagagaattaaaggagcagattatgcattagaaagcatccacaaccttagggaggcagtgccagaactatgggaagatgacataaaatcagaagttgcttatcctggcaagcttgctgtggagacatctgtgactgcttagatcattgatgaacaaaaaaataaaat

SEQ ID NO: 11780 - DNA, 1625 bp, Glycine max
  Clone ID: 701128976_FLI
ctgatttaagaacaaaaaaaaaatacttcagactgtgggggagcggtggagacagtttaagtctgatttgacgtcgaaatgagaacttgcagctgacaaggatagtgtccatgacactgtatgcaaaatgtacaacattagcaaggagaaatgagccccattttgtcagagccgcagagacccttcatgggaggatgtgcaaaaaaaagcataagccgtccaaaaacaaaacactgcccctcacgtgatgtctcgtgggggttatgaatatttagaaaaaaagttgatggatgagaagagaaagaaaaaactagaggaagctactcaatccggaagcactgacaccgtcattaatcctccatctcccatcaaacgacacgtgaagtggaagctagcccgcaccaagaaaattggtgacatgacatctgaggcaacaaaggaaatcgctgacaagattgtaaatcactttcaattcataattgtaattattttttattattgtgtgattgagtatagaataaatgtgttcttcacaggatgcgcttgaggagcaggcctcacagggttcctttgttacccatggacgtcatgatatattgactgctgccattgggcgaccagaacaccctggtcgtgtgcgtgctgtaggagccggtataaccatcaagcaatactttggatcagcttcaaggacctcctccattgctcccgaataactgcaacagttgacgcaacaaatcaaggaccagctgaaggattcaatcacagaaaaagtcactcgacgactaatgttatccctcagccatatgcaatcacagggactcgcactgcctcctgaacctggtgttggtccttcaactgctcgtgtcagtacaaaggagagttgtgctgatccctcagggaacgatccagacacgggtgactcatacaaatgcgggttgtatattgaagaatatcctcctcgcctggttgccctaggaagagtttatgaggggtccacaagcattcacaacattcctttgctgcatgatcaagtcaaggttggtgttgaggagattagagatgcaaatgctcccattcctgtacccactaaagaggttaaggtcatgggacaggctcttaacacattccttgcttggccgacacatcttgtcaagcgtttatcagaacagggagttgtgggacccgcgaaacctgtagatagaccggatgatgaggttgatgatcccctatatctaatgacattgaccatcccacagctttttctgaagccattgcaggttatgtgggatgctaccttgtttggcctattttatgaaaacttccctttgtacataaagcatgaagatctgtctgaaattgcacacggtggtcaatatctcagcatatctgttatacagttgtggattctgtaagtcaatttagattattgttaattacctaatttattgttttaccttcatgcataatttactttgtgttaacaacaatagacatatgactgagacaagtatgcgagccgggaatatcgatgtgtatggattcctcgaaccacagtctatccagagatctggccaatcacaatttgaatcagaaagttacattaagaattgaatgcaaaattc

SEQ ID NO: 11781 - DNA, 1124 bp, Glycine max
  Clone ID: 701129012_FLI
gttcttttggagtgtgtgtgcacccattgatgacaagcaaccccattgcatggaagcctaagaggaggagaagacgaagaggacaagggtaactgaatcgccgcttctgcagcttcgttctttcgtttttgtttcatctttttagcttcagagggtaaataaaaaatggaggttttggtgggtcccgctttcaccatcgacgttccctcgtctccgccgcagcatgccggttccgatgatcggatctttcttaacgtgtcacccgaagaaggtgatgggtcgaactttcgtatttcgggcccacccaagttcttcgccggcggcgagtcggagagttcgtcgtcgatcggaacccctgatgacagcgacaacgaggaggaggaagaagtgcagagccagttaaagatacgaactgggttgggttctttggatgctttggaagaatctcttcccatcaagaggggattgtcgagtcattttgatggaaaatcaaaatcgttctcagatctatctcaaatgagtaatttgagtaatctgaaggagttgcaaaagcaagagagtcctttcaacaagagaagaagggttttgattgcatccaagtggtccagaagatcatctttctattcctggtccaacccacaatccatgcctcttttgcctgtggatgaggatcaggattatgattatgaagaggaagaagaagaagaagatgacgaagaaaaagctagaaaagttccctctgcttcatcttcttcgtcttcctccttggccgaggaaaagaaacaagaagatcaggttcagctaagactcaacagagtgccagaatcttatgctgctcatatgagacttagacttggaagcttcaaggctagaagcttttctcttgcagatctgcaagagcatgatgatgaggaagaagatgatgattgattaaattaacatttaacataggtttttttttttttggttttattcttttgttattgttgttgttactaaataaaattaaatagtgtattaattttaagtaagtgttaaaaaacttatccttctctttttactttgttaaaaaaaattgaattttgctaaggaatatactgtgcatatcctttgggtattctagt

SEQ ID NO: 11782 - DNA, 1893 bp, Glycine max
  Clone ID: 701129024_FLI
ctttatttgtttattttcctatctctctctctccacataccaaaccccaagatcacttataaatacacagaaagagagtgaggaagttgccccagttgagtagtaagtgatgatggagatggattccatgtgtatgtgggtggtccttgtggccattgctggtgctcttttagtcctaagatctatgctcaagaatgtaaattggtggctctatgaatccaaattgggtgtgaaacagtactctttgcccccaggtgacatgggatggcccttcattggcaacatgtggtccttcctcagagctttcaagtccaaggaccctgattccttcatctcctcctttgtctccagatatggaagaactggaatgtacaagaccttgatgtttggaaatccaagtgtaattgtgacaacacctgaaacatgcaaaagggtgcttacagacgatgataaattcacaactggttggcctcaatctactatagagctcattggaaagaggtcatttatttcaatgtcttatgaagaacataaacgccttaggcgtttgacatcctcttcaatcaatggcatggaatcactgtccctctacttgacatatattgaagaaaatgtgaaaaattcattggagaaatgggccaacatgggacaaattgagttcttaactgagatcaggaagcttactttcaaaatcatcatgcatattttccttagctcagaaagtgaacctgttatggaggctttggagagggaatacacagcacttaatcatggagttagagccatgtgtattaatattcccggatttgcataccacaaagcattcaaggcaaggaaaaatctagtggccatatttcaatctattgtggatgagagaagaaacttaaggaagggatatctgccaggaaaagccaaagatatgatggatgctctgatagatgttgaagatgatgatggaagaaagttgagtgatgaggacatcattgacattatgttgatgtacttgaatgcgggccatgagtcttcaggacatattaccatgtgggcaacctttttcctgcagaagcacccagaatatctccaaaaggctaaggcagaacaagaagaaataataaggagaaggcctccaacacagaaagggttaacacttaaggaagtccgggagatggattttctttacaaggtgattgatgaaacattgcgtgtgattacattctcactagtggtctttcgggaggcaaaatctgatgtcaatatcaatggatacacaattccaaaaggttggaaagcgcttgtgtggttcagatcagttcaccttgatcctgaaatatatcctaatccaaaggaatttaacccttatagatggaataaagaacacaaggccggagaattccttccctttggaggaggaagtagattgtgtccggggaacgatcttgccaagatggaaatagcagtttttcttcaccatttccttctgaattaccgatttgaacagcataatcctaattgccctgtgagatacttaccacatacaaggcccatggacaattgcttgggaagggtcaggaaatgttcatctacaacaacctaagagcacatgtctatggctatttttaatttgaaaatccatctccatgttttccctcagctaaatgcttccaggtccactttgagctacgttggcatagcttcaacaaaatggacaaaaaaaggaaaaaaaaaagtttttcacagcacatacaaataagtataatttcgaaagctccatctaccaccctctttaagcactagctagtaagtcttccatctggtccatatgttctgaaaaatggacaaaaataactttgtttcattaggtatttgtttaaaggaaagaatctagtttctatt

SEQ ID NO: 11783 - DNA, 761 bp, Glycine max
  Clone ID: 701129032_FLI
ctgtctcatgatgaggtggaataagttagattttttttcatcttattttggggcaacatgttcataaaatataaatctacattgacaattttcttgtatttttttattaggcttgggactcggagatatattgaagcctgatctaataatgccattgatggacatgttacctttggagcagcgtttagctccctacttacctgaggtatatgtcaatgtggagattaagttttagtattctttcatttacagattcatgcaatattctttgatgtagggtaaatggtctccagaagagatattggagttgttgcagagcccacctttccgtcagcaagtagattcgtttacttatgtacttcgaacgggacagatagacttgtctcaatttggaattgatccaagtaaatacaagttcacagttttgtcttttcttgaggctcttgaggattctgtttccaagtcggttgagtctgaagaggctaggcaagatgatcaggatttgagatctcaatcttgtaaccgtcatgacccaatggatgaatctcagtagcgtggttcgttcagcattgttcttttttctatagatacaagaaacatctcatgtttttatttttatttttattttatccgacacattttctgcttgaaaaaggaaatttaaaatgcagtgagaaaaaagtacaaatattatttgagatcttttaaggttatacgttgaattattgatcaataaaggccaagccatttgtttccctttc

SEQ ID NO: 11784 - DNA, 2413 bp, Glycine max
  Clone ID: 701129039_FLI
gcagatggctgatgctgggatcaagtacatccccagcaacactttctctcactatgaccaggttctcgacgccaccgccaccctcggtgccgttccaccaaggtacggctggaccggcggcgagattgggtttgatacctacttctccatggccagaggtaatgctaccgtgccagctatggagatgaccaagtggttcgacaccaactaccactttattgtccctgaattgggccctgatgtgaacttcacctatgcttctcacaaggctgttgatgaatacaaggaggccaaggcgcttggagtggataccgttccggtcctcgttggccctgttacatacctgttgctctccaagcctgccaagggagttgagaaatccttttctctcctctctctccttcccaaggttcttgctgtctacaaggaagttattgctgaccttaaggcagctggtgcttcatggattcagtttgatgagcctacccttgtcttggaccttgagtctcacaagttgcaagcattcactgacgcatatgcagaacttgcgcctgctttgtctggtttgaatgttcttgttgagacctactttgctgacatccctgctgaggcatacaagaccctcacatctctgaatggcgtcactgcatatggatttgatttggtccgtggaaccaacactcttgatttgatcaagggtggatttcccagcggaaaatacctctttgctggagtggttgatggaaggaacatctgggccaatgaccttgctgcttctctcactaccttgcagggtcttgagggcattgtgggcaaagataagcttgttgtgtccacctcctcctcccttcttcacactgctgttgatctagttaacgagaccaagttggatgatgagatcaagtcatggctagcttttgctgcccaaaaaattgttgaagttaacgcattggctaaagcattgtctggccacaaggatgaggccttcttctctggtaatgctgctgctctggcttcaaggaagtcttctccaagagtgaccaacgaggctgttcagaaggctgctgctgcattgaagggttcagatcatcgccgtgcaacaaatgtcagtgccagactggattctcaacaaaagaagctcaaccttccaatcctgccaaccaccactattggatccttccctcagactgtagaactgaggagggtacgccgtgaattcaaggctaacaagatctccgaggaagagtatgtaaagtcaattaaggaggaaattcgcaaagttgttgagcttcaagaagagcttgatattgatgttcttgttcatggagaaccagagagaaatgatatggttgagtacttcggtgaacaattgtcaggctttgccttcaccgttaatgggtgggtgcaatcctatggttcccgttgcgtgaagccaccgatcatctatggtgatgtgagccgcccaaagccaatgaccgtcttctggtcatctctggctcagagctttaccaagcgcccaatgaagggaatgcttaccggtcctgttaccattctcaactggtcctttgttagaaatgaccaacctagatctgagaccacctaccagattgctttgtctatcaaggacgaagtggaagaccttgaaaaggctggcatcactgttatccaaattgatgaagctgctttgagagagggtcttccactgaggaaatcagagcaagctcactacttggactgggctgtccatgccttcagaatcaccaatgttggtgtccaggataccacccagatccacactcacatgtgctactcgaacttcaacgacatcatccactccatcatcgacatggacgccgatgttatcaccattgagaactctcgctccgacgagaagcttctgtcagtcttccgcgaaggtgtgaagtatggtgctggaattggccctggtgtctatgacatccactccccaagaataccaccaactgaagaaattgctgacagaatcaacaagatgctggcagtgctcgagaagaacatcttgtgggtgaaccctgactgtgggctcaagacccgtaagtacactgaggtgaagccagccctcacaaacatggttgccgcagcaaaactcatccgcaacgaacttgccaagtgaatggtataagaaagtagaatcttccaagtcatttggttctgctttatattataatacaccaaagaaaaattttctctatattgggttgtttcaataactgtgtgtggaatatttaggtgtcttagcatgctctgtgagcaattgattcttcctcaacccctccccccttatttttccccactcctgttttccctaatgaatgttgtatctttgcggcttcgccgcaatccttattgatctggaattttaccagttttgtgc

SEQ ID NO: 11785 - DNA, 630 bp, Glycine max
  Clone ID: 701129155_FLI
gaaaattcaaaatccaaggctcaggaacttgatattaagttagttggaagtcagaaggttattgatgaattaacgaccaaggttaaattacttgaagattcactccaagataggacttctcagccagacattgtacaggagaggagcatatatgaagcaccctcattacctgctgaatctgagataattgaagttgaagagggatcatcacttagcaagaaagcaatatctcctgtcccatcggctgctcatgtgcggaatatgcgaaaaggatctactgaccatcttgcactcgatattagtggggagtctgataatttgattaacagggtagataaggatgatgataaaggtcatgtattcaagtctctgagcactactggattcgtaccaaaacagggaaagctcattgcagatcgtattgatggactctgggtatctggtggccgggttctcatgagtcatcctagagcaagattaggacttattggctatttgtttgtcttgcatatatggctactggggacgatcttgtagaaaagttgtgaccaaacctacctggactgctcaacattgaatgtcctgcgtctgcaaattgtattatcgatataaaattgtccctttttattc

SEQ ID NO: 11786 - DNA, 2575 bp, Glycine max
  Clone ID: 701129156_FLI
ggaagccctcactcttccaaaccttctcttccctcttttctttctttcatccccaaatcaaaacctaaaattcccaccttcaactttctcccccaaatcgaccacccccaccactgccaagtcccattattttatatatttattcgtatatatacatacaaagagaggggggagaatggattcggatcagggaaagcttttcatcggtgggatttcatgggatacgacggaggacaagctcaaggagcatttcggaaactatggcgacgttttgagcacctccgtcatgcgggagaagaacactgggaagcctaggggcttcggtttcgtcgtttttgcggatcctaacattctagatagggttttggaagacaaacatgtcatagatggcagaacggttgatgccaaaaaggccttctcaagagaggatcaacaaatttctgtcacttcaagaggtggaaattccaattctggcatgaattctggaaatggaggaaacatcaggactaaaaagatatttgttggagggttgcctcccaccctgactgaagaaaaatttcgccagtactttgagtcttatgggaatgtaactgatgtagtagtcatgtatgaccagaatactggacggccacggggatttgggtttatttcatttgatactgaggatgcggttgatagggttttgcacaaatcatttcatgatttaaatggtaaacaagttgaggtaaagcgtgcacttcccaaggatgccaatcctggggcaagtggtcgtatgatgggtggtgctggaggtggtgggtatcaagggtatggggcatctggtggcaaccaaaatgcatatgatggtcgtatggattctagtaggtatatgcagcctcaaagcgctgcaggtggattccctccttatggttcttctgcctacagtgctcctgggtatgggtatggtccagctagtaatggcattggttatggtgcatatggaagttatggtggtgccactgctgggtatggtggacctgctgctgcaacatatgggaatcctaatgtccctaatgctgcttatgctggtggtccaccaggtggcccaaggagtacatggcctgctcaggctccttctggttatggatctatgggctatgggaacactgctgcttggggtgctccaagtggtggtgctggctctggtggcggtggtcctggttcagcaactgcaggtcaatctcctggtggagctgctggatatgggaatcaaggttatggatatggtgggtatggtggatatggtggaagtgatagttcttatgggaattctggtgcatatggtactgttggcggacgtactggaagtgctccaaacaataatgctagtgcttctggtggtagtgaactaacaagtagtggtggcagtggcaactatatgggtgggggctatggggatgcaaatggaaattcaggttatggaaatgcagcttggagatctgaacaaactcatgcatctggaaattatgggactcctcaaggtaatggtgggcaagttggttatggtgttggctatgggggtgctcagtctcgacaagcccaacagcagtaattttggtagatgaatctcttgctggatcttaaacttcaacttgaggatccctggcttttaaaagtcttaaatcatgaggtcacaatgaattcttccagcagcaatggagtggctcaaagatcaatgtcaatacacaatgggactggttgggttgcttgaatcccagtagtttgcagtacccgctttcctagtttataataagtagtatggttgaagagatactagatgctactttctatttagtatttgtttctgcgtgtagctttaatttgcttgcttatgattttagttgatctggatttgtttgttcttgcagcatttaagctatagtatcatatttcaccttatatgatggtttgatgtagtttattatctgtgttgtctttttattggtgtgtgaattttatttcttgtctgtgttcacttttgattacacagtttggcagtaagaaatcttattgtgtaggctcattaaattgccatgacaaatagaaatatgaagatgtagtcaaggtatttactgataacagtggacacttggttgaacacttcgtattgggtagcataatggtagtcatagtaaaaactttgaggatggcataatcattttccccctgtatttgcacttgtgttgtacaggaggagaggtgcacgagtgttgaagtggagccaagtgtccactcattgctaaggaatgaactttggtcagtcagtattgtgtttttctggaccaatgcgtcgccaaatttggagattcctggcttttcatgtgataaaatcccataactttcaatctggtgtgtggtggctgacagaaattgtgagggttagcagcgcattgtctatgacatgttagaagtttatcctaattttaggtctccagttgattgatacttctgattctggcacgtgtgtttgaatattcatgctccaagtaattccttgtctggaacatcttttaatgtgataagcaagatttttaag

SEQ ID NO: 11787 - DNA, 1184 bp, Glycine max
  Clone ID: 701129191_FLI
gactgctatagccttcctgtttatccttctaatcacttatacaggcacaacagatgcacaatccggggtatgttatggaagacttggcaacaacttaccaacccctcaagaagttgtggccctctacaatcaagccaacattcgcaggatgcgaatctacggtccaagcccagaagtcctcgaagcactaagaggttccaacattgagcttttgctagacattccaaatgacaacctcagaaacctagcatctagccaagacaatgcaaacaaatgggtgcaagacaacatcaaaaactatgccaacaatgtcagattcagatacgtttcagtgggaaatgaagtgaaacccgaacactcatttgcacaatttctagtgcctgcattggaaaacattcagagggccatttctaatgctggccttggaaaccaagtaaaagtttccactgccattgatactggtgccttggcagaatcattcccaccatcaaagggttccttcaaatctgattatagaggagcatatcttgatggtgtcatcagatttctagtgaacaataatgccccattaatggttaatgtgtactcttacttcgcttacactgcaaaccctaaggacattagtcttgactatgcactttttaggtctccttcggtggtagtgcaagatggttcacttggttaccgtaacctctttgatgcttcggttgatgctgtttatgctgcattggagaaagcaggaggagggtcattgaacatagttgtgtctgagagtggatggccttcttctggtggaactgcaacttcacttgataatgcaagaacttacaacacaaacttggttcggaatgtgaagcaaggaacccctaaaaggcctggtgcaccccttgaaacttatgtgtttgccatgtttgatgaaaatcagaagcagccagagtttgaaaaattttgggggctcttttctcctataactaagcagcccaaatactcgattaatttcaattaatttttagcagaagcataatttggtgtgaaataagggccacgagtccaaatgaaacttcaataattgttttagaagaggcaggtatagaactttaatttatctgcattcttgaagtctgcatgtaccatttacgagctaagttaattagctttaaataaaagttctcttattaatgatc

SEQ ID NO: 11788 - DNA, 1185 bp, Glycine max
  Clone ID: 701129227_FLI
gctatatcagatgcaggcgaatgggactctactcttccctgctattaatgtcaatgactctgttaccaagagcaagtttgacaacttgtacgggtgccgtcactctctccctgatggtctgatgagggctactgatgtgatgattgctggaaaggtggctgttgtggctggatatggtgatgttggcaagggttgtgctgctgcattgaagcaggctggtgctcgtgtcatcgtgactgagattgaccccatttgtgcccttcaggctctcatggaaggccttcaggttctgaccttggaggatgttgtttctgaggctgatatctttgtcaccaccacgggtaacaaggacatcatcatggttgaccacatgaagaaaatgaagaacaatgccattgtttgcaacattggtcactttgacaatgagatcgacatgctggggctggagaactaccccggcgtgaagcgcatcaccatcaagccccaaaccgacagatgggtcttccccgagaccaatgtcggcatcattgtcttggccgagggtcgtttgatgaacttgggatgcgccacaggacaccctagttttgtgatgtcctgctccttcaccaaccaggtcattgctcagcttgagttgtggaaggagaagagtaccggcaagtacgagaagaaagtttacgttttgcccaagcaccttgatgagaaggtggctgcacttcaccttggcaaacttggagctaagctcaccaagcttagcccggcccaggctgattacatcagtgtgcctgttgagggtccatacaagcctgctcattacaggtactaagtaattgagattatcaacggaaagtgagggaaagacaaaatcggttttatgaatcggattgattgtttaattttcctttttttgaatttttgttgttagacttttcagatttgaggtagaagaagtttagctttttttatttttaatttccgtagaatttctgttcgagtgggtgggacgggtaaggaggaagacatcctgttggtttctgtgatatgaaaccaatttgggttgaataagcatgttttgtttggggaatgtgtgtgcattttgcttttgctttattaaatactaaattatgtgtttctgtccaccttttcaatatatcaaaagaaaataagagaaaatgaaaaaattcctac

SEQ ID NO: 11789 - DNA, 720 bp, Glycine max
  Clone ID: 701129246_FLI
aaaatataggccaaccatgccagttctctctgttgtgatcccccgactcaagacaaatcagctgaaatggagcttcagtggagcttttgaggctaggcaatcacttattgttagaggcctctttcccatgcttgccgatccccgacatcctgccgagtcgacaagtggcacaaacgagtctattctaaaggttgcccttgatcatggaaaagcatcaggagttataaagtcacacgaccgagtagttgtttgccagaaagttggtgatgcgtctgtggttaagattatcgagcttgaagattaagtgcattgatctaactacagtttaggcttttctgttttttggcctgcaagtttttggcagtcgcagatcattctgcttccacattttgaggttatctccaccgggtttggtgactagctatattttgtgattgaaaatgaatgttaggctaactattattacaggatgtcaaacttaaaaaataatagggaatatgttcgatgccaattttttggttaaagttttccacatggagaatgtaaaaggaagtgtatacgttctatattgtagcaatagccagttgtacgacgttatacggtttggtggtatacatctaggtctagttatgagcaatattgtggtgtgctatggtttccaatgcatacgggccaagcaattcgtaattgaacatccttttatattgatctgatttactt

SEQ ID NO: 11790 - DNA, 785 bp, Glycine max
  Clone ID: 701129275_FLI
gcttgtggtcccctcattgattccgttgccctcaaggtcttgtacccacccaaaagaacaagagctaatttgttgaaaaatggaaacttggaagaagggccatatatatttcccaactcgtcttggggggctttgatcccaccgcatatagaggattctcacggtcctttaccagggtggattgttgagtctcttaaggccgtgaagtacattgattctgaccactttgctgtgcccgagggaaaaagagctattgaacttgttgcagggaaagagagtgcacttgcacaggtagtgattactacaatcggcaagacttatgacctcactttcgccgtgggtgatgccaacaatgaatgcgaagcttccatgatggtagaagcatttgctggcgcaaacactgtccaagttccatatcaatctaagggtaaaggaggttttgtcagaggcaagcttcggttcaaggccgtctcaacacgtactcgtcttaggttcctaagcacattttacaccatgaagagtgataactctggttcgctttgtggacccgtcatagatgatgtaaaattgcttggtgttcgttatcccacacatgcttgatgatgaggtttcaatcaaaacacgtacatgtgctacattcatgtagttgagcatatataccacaggattcttgtaataataggagggtttactattgttgagcgactttaccaagtctcacatttatttatgtatctatttttccatcaaatcaaatgcagtaatgacggggagttccttcaatg

SEQ ID NO: 11791 - DNA, 2803 bp, Glycine max
  Clone ID: 701129319_FLI
gattaaagcagcatttagcccgagtttctggtgaagtaacatactgtgaaaaggctcctgatgaagtctacctgaaaatgaaagaaaatcttgaaggctgccgttcccataagaaacaaaaacaagttgacacacaagcatatatgaattttcactctaatgatgatgaagatgaagaagagcaagttgggtgtagaagcaaagggaagcaattgatggatgatcgaaatgtatctgtaaatttgactcctcttcgctccttaggatatgttgacccagggtgggagcatggtgttgctcaggacgagagaaagaagaaagtcaaatgcaattactgtgagaaaattgtcagtggaggtattaatcggtttaaacaacatttggctagaattcctggagaggtagcaccttgtaaaagtgctccagaagatgtttatctgaaaataaaagagaacatgaaatggcatcgtactgggaggagacttaggaggcctgagattaaggaattgatgcctttctatgcaaagtccgataatgatgatgatgagtgtgagctagtagaagatttgcatcatatgaacaaggaaactttgatggatgttgataagagattctctaaagatataatgaagacctacaagggagtgtcacatagtactggtcctgaaccagtattgagaagatcaagattggataatgtttacctgaaactacccaagaatcagactcctcaagcttacaaacaagtaaaagttaagacagggcccactaagaaattacgcaaggaagttatttcttcaatttgcaagttcttttaccatgcagggattcctatacaggctgcagactccctatattttcataaaatgctggaagtggttggtcaatatggacaaggactggtgtgcccagcaagccaacttatgtctggtcgctttttgcaggaggaaatcaattctattaaaaattaccttgttgaatataaggcttcctgggcaatcactggttgctctataatggcagatagttggatagatacacagggtaggacaattattaactttcttgtttcttgtcctcatggtgtatactttgtttcttcggttgatgccactaatgtagtggaagatgcaccaaatttattcaagcttctggacaaaatagtggaagaagtaggtgaggaaaatgtagtgcaggtaatcactgaaaatactcccaattataaggctgctggaaaaatgcttgaagagaagagaaggaatttattctggacccctagtgccacttattgtattaattgtatgcttgaagattttatgaaaataagatgtgtggaagagtgcatggaaaagggccagaaaattaccaaactaatatacaatcaaatatggttgttaaatcttatgaaaagtgaatttacccggggccaggagcttctaaaaccagctgccacccagtttgcctctagctttgctacactactgagcttgctggatcatcgagttgctctcagaagaatgtttctttccaacaaatggatttcatccagattttccagctcaaatgaggggaaagaggtggaaaaaatagttttgaatgtcacattttggaagaagattcagcatgttaggaagtcaatagatcccataatgcaagtacttcaaaagctttatagtggtgagagcttgtcaatgccatatctatataacgatatgtacagggcaaaacttgcaatcaaatctgttcatggtgacgatgcacgtaaatatgaaccattctggaaggtcatagacagtcattggaattctctgttctgtcaccctctttacttggctgcatacttcttaaatccatcataccgatatcgtcaggattttgtggcgcattctgaggtagtacgaggactcaatgaatgcattgtccggctggagcctgataatatgagacggatatccgcatcaatgcagattgctcattataatgctgcacaagacgactttggaactgaattggcaattagcacaagaacaggtctagaacctgctgcttggtggcaacagcacggaataagttgcttagagttgcaaagaataagtgtacgcatattaagtcaaacatgctcgtcctttgcatgtgagcatgattggagtatatatgatcagatacgttgcaaaagacaaaatcgtctatctcagaagaaattgaatgacattatatatgtccactacaacttgcgacttagagaatgccaattaagaaaaaggtccagggactcgaagttgtcctctgttgacagtgttctgcaagagcatttactcgatgattggatagtagatactaatgtgcaaaactttgatgttgataagaatttcctatttggagttgaactagatgatgaatatgaaaacgattcaattgattatgaagatggagctgcaaggcatctaaagggatcccttgagctggtgactatggctgatgtagcagtaggatcaccagatgtagatcatgctaacattgatgctgacactgatgatgagtctgatctgaattattttgatgatgatttgagcgagtaattgacttacatggttctcatttcggaacagtaattatttggtcgcctggttgtgagcccgtacttgtaattttccagcgaaaaatcaagatgtctatcttagtgcgtacaatcatatttatatcattttggatcgtaataattttagatcgttctaaccagttcaagaagttattactgttatataagatcctcagtaagagctggcacgtagtcatacccatt

SEQ ID NO: 11792 - DNA, 1583 bp, Glycine max
  Clone ID: 701129370_FLI
ctgtttgcagatgggttgaagattgggaagataacaaaattattatttgtaacagatgccaaatagcagtccaccaagaatgctatggggcaaagaatgttcaggattttacttcttgggtttgtagagtatgtgaaactcctgatgttgagagagagtgttgcctctgcccagtaaaaggtggtgctctaaagccaacggatgttgaaatgttgtgggttcatgtaacatgtgcttggtttcgacctcaagttgttttccaaaaccatgaggccatggaacctgccatgggaatccttaaaattcctcctaattcctttgtgaagacttgtgtgatctgtaaacagagccatggttcctgcataagttgttgcaagtgttctacttattttcatgtgatgtgtgcatcaagggcaggatatacaatggagttacattccatggagaagaatgggactcaagtaacaaggaagctaatatattgtgcaattcacagggttccaaatccagattctgtactggtggtacacacacccctggggattttctctcccagaacttcacttcaaaatcagaagggatgcttcaggggatcaaggctaattttatcaaagaatatagagcttaatgaatcttcaaccactgaaaatgacttagtagagccgctgtctgcggccaggtgtcgtgtgtaccgaaggtctcctaataagagagctgatgtgccaataattcacttgctggggggacccagccttcattctttaggtgcaataactcagttgaacatttttaaggatgctgatgaatctaaagtattcacttctttcaaggaacgtcttcaccatttatgggaaacggaaaaatttagagtttgctttggaaaatcgggcattcatggatggggtctctttgctcgtagagatatacaagaaggagagatggttgttgagtatacgtggtgtgcacgtaaggcgtagtgttgctgacctgagggaagaaaaataccttcagaaggcaaggattgctatctgttcaagatcagtgaggaagtggtagttgatgcaacgaacagaggcaatatatcacgtttaataaaccattcttgcatgccaaactgctatgcaaggattatgagtctgggtgatcaggggagccgaattgttcttattgccaagaccaatgtttctgctggtgaagaactaacgtatgattacttgtttgatccagatgagcgggatgaattgaaagttccttgcctttgcaaagcccctaattgtaggagatttatgaattaggcttaggcattttttttctctctttttgagcaattgcagttgccaaacccgtgaacatttgtcaattgagccatttttaaaatttttttaaaatagtttagtataatttgtatagcattatattattataaaataaaatagaaaacttctgagcaaatgagctggaggcatttttgtaacttgcacggatgttcttcacattatgacatttagaggcaatttacttgaaggcaaaaggtgtatagagaagcacacatgttacataatacattttaggcttttcatgtg

SEQ ID NO: 11793 - DNA, 1250 bp, Glycine max
  Clone ID: 701129470_FLI
caggaatcctcaatctgaaactagcttgacgccgctctgccacggctgagaaaatagcgacgcggaaacacgctcgtcttcacgatccagcgattccgctctccgacgagtctgcgtaaggtgaagaatcacgaggccagccgccggtgaagaatcgcgcgattcgtctggaaatcgcgattcaagctcgattcatctccgttatagagattcaaccacgattcaggaacaaaaacaagacaacttccgattcgtttcagtagcagctagaatcgtatcgaatcgtgcgacacgtatcgtgaaccattgaagatgataaaacaatcataccacggaattcattggttgaagttaaccagtcgggtcttcttatggaaactataatcgacattactcctcgtgatcctattccaacaccttccgctggacctcttgaccaagaatgttctagagaagctctcatagtttgtgatagagaaaagattaagggtatagaaggagtaagtttggataaattggttgggatatttacccgtcttgggcaagatgtagagaaaattggcattgctaatagctattcgttggctgaacgagctgcttcaataatcgaagaagcaaaaccacttcttataaagatgaaagccatggctgaagatgttcaacctttgttgactgaagtccgtgatagtggcctgttgaaggaagttgagactttaacccaaagccttacacaagcgactgaggatttgagaagggtacactcatccattatgacccctgagaacactgaactgctccaaaagtccatatatactctgatttttaccctgaagaacattgagaatgttagctcggatattttgggtttcactggcgatgaagctacaagaaagagtttgaaattacttatcaagtccctcagcaggttattgtaggtcaaaattccaattaaagtaggatataacgcaattaggttatttccaatgtgtttcaccaaccacaacattgaaggagtaaatagtattttgttactgttttttgttgtctctaaggagtggcagtactgatggtttttacattctactgtaatagaaatttgtttacaatgaggtgcagagatgttattgattggggcagatgattgctgtgcacattcttatgattgtcatacttcggctaaaatgtttgaccctcacttttgttagttgtcattgcaaaacaaacaattaatggaaattatcatctttgat

SEQ ID NO: 11794 - DNA, 1813 bp, Glycine max
  Clone ID: 701129482_FLI
gtaacctggcttcgtgcctatcctccaccctcaacacagccttcctttcctcttctccttttctttaccaattttataataatatatttatatcttttcttttcctttttaccatttcgatcccaattcttcctcacaccattttcagttcacagggttaggtttaggtcccttgtctggtctggtgtgcaattctccccatacaataacaatacacccactttatcaaccaatcaatcaatatacctagtagtgattagatttagtgatcgatcctctcctttcgttctcaaaccgtagatttagattttagggtttctctcttaatataatcttttgacacttccgtaacaaacaaaaaaattacataaattttcccttataattattattatttggcttttatctttggattaactaggcttgagctatcacaaataattgtttcggagaatggaaaagaaaaaggtggcagttcccctcgtgtgccacggtcattctcgccctgtggttgatctcttctacagtcccgttacgcctgatgggtttttcctcatcagtgccagcaaggattcgagtcctatgctcagaaatggagagactggagattggattggaacatttgaagggcacaaaggtgctgtgtggagttgctgcttggataccagtgccttacgtgccgcaactgcttctgctgatttctcaacgaaagtttgggatgctttaacaggagatgaattgcactcttttgagcataagcacattgttcgagcatgtgctttttctgaggatactcaccttttgctcactgggggagttgagaaaattctccggatctatgatatgaataggcctgatgcgccacccagagaagtggataagtcccctggttctgtcagaactgttgcctggcttcatagtgaccagacaatattgagttcatgtactgatatgggaggtgtcaggttatgggatgtaagaagtggtaaaatagtccagacacttgaaactaagtcatctgtgacaagtgctgaagtgagtcaggatggccgttatataaccactgctgatggttctactgtaaagttttgggatgcgaactactatggattggtgaagagctatgatatgccctgcactgtggaatcagtttcactggagcctaagtatgggaacaagttcgttgccggcggagaagatatgtgggttcgtgtgtttgatttccatacagggaatgagattgcatgcaacaaggggcaccacggtcctgtccactgtgttcgtttttctcctggtggagaatcctatgcctcaggatctgaggatggaaccatcagaatatggcagactggccccttgaccctcgatgactcagagactgtgtctgcaaatggttcagttgataaggtgaaggaaactgcagatgaggtttcacgcaagattgagggttttcaaattgcagatgaggggaaatctaaagaaaaggatgaggctgtggaggaatcaagctaatatagtctcgcattttgtctggcagagtgttagaattaactagatcaagtgcctactactcatgtacgtgattagtaaagtaaattttgtaaattttagtttgtttgagattttactgaattgaacgagcttgttgcatctggcttaaataagttctatgtttgcttttatttcaattctgacattggagtttatggaatataggaagtgacttggtatacttcaagaatcatggccactaaagcggctttaatctatagattctggccagttcaattttggccggggcttgcggtctagt

SEQ ID NO: 11795 - DNA, 1713 bp, Glycine max
  Clone ID: 701129503_FLI
cgagactcaatctctttctctctctttctttgccctctctttctctctctagaattctcagatttgcggggcgagatgatgcagcagccaggacccggcatggcacctcccaccatgggccagcagccgccgcaacagtaccagcagcctccgccgcagcagcagcaaccctacgtcatgatgccgccgcaggcccaggccccgcaggccatgtgggccccctccgcccagcctccgcctcagcagcagcccgccagcgccgacgaggtccgaaccctctggatcggggatctgcagtactggatggacgagaactatctctatacctgctttgctcacaccggcgaggttacatcggttaaagtaattcgaaacaagcaaactagtcaatctgaaggttatgggtttattgagtttaatagtcgtgctggagctgagagaattcttcaaacatataatggggcaataatgccaaatggggggcagagtttcaggttgaattgggcaacttttagtgctggtgagaggtcgcgccacgacgattctccagattacaccatatttgttggtgacttggctgcagatgttactgattatcttcttcaggagacatttagggctcgttataactcggtgaagggtgcaaaagttgtcattgataggctaactggccggaccaagggatatggctttgtaaggttttcagatgagagtgagcaagtgagggctatgactgagatgcaaggggttctttgctcaacaagacccatgaggattggacccgcctctaataaaacccccaccactcagtcccagcccaaagttacacacttgaagattcgcagtcaaactcatttcttcctgcaatttcctttaaaaatttgggcaaaataaattatatataataataaaatcttatagaactcatgttgtctcgaagcagggtgtcaagaggctctgtcatcccggagcctggaactgatttcagctgaaatggttaccattttagtgcatatccttgcttagcttcatatcagaattctcaacctcaaggttcacagaatgagaatgatccaaataatacaactatttttgttggtaatttggatcctaatgtcactgatgatcatctgaggcaagttttcagccagtatggagaattagtgcatgtgaagattccagcaggcaagcgatgtgggtttgtccaattcgcagacaggagctgtgccgaagaggcacttcgggtgttgaatgggaccctgttgggtggtcaaaatgttcgtctttcatggggccgcagtccttcaaacaaacaggctcaggcagatccaaaccagtggaatggtggtgctggttctggtggtggatactatgggtatgctgcacaaggttatgaaaattatgggtatgctcctgctgctggacaggatcccaacatgtatggcagttatccggggtatcctggttaccaaccacctcagcaacagcaacaaataggatatagttgagaagagaatgttccttttcttctgtaatcttttgtgatacttatcgagttgcgtgtctcttctcgtctcgtggaaaaccgactctgctactctttttcttttttccccttgtttgcttaataacattaaattttatcggagccgccttttgtatccataaattgcttgctgaatacttatttatgaaatgatctctattatgcat

SEQ ID NO: 11796 - DNA, 1446 bp, Glycine max
  Clone ID: 701129526_FLI
cgcagacggtaaatcaaggtgttttggctttgtcaattttgaaaacccagatgatgctgccaaagctgttgaaggacttaatgggaagaaagttgatgataaggagtggtatgttggaaaagcccagaaaaaatctgagcgtgaacaagaactgaaaggacggtttgagcagagtataaaggaatctgctgacaaatatcaaggtgtgaacctgtatctcaagaacttggatgatactatcagtgatgaaaaacttaaggaaatgtttgctgaatatggtacaataacttcatgcaaggttatgcgagaccccactggaatcggtagaggatcaggatttgttgcattttcaactcctgaggaagcatctcgtgctctcggtgagatgaatggtaaaatgattgctggaaaacctctgtacgttgcccttgcacagagaaaagaagacagaagagcaaggttacaggctcagttttcacagatgaggcctgttgcaataacgccttctgttgcgccccgtatgcctctctaccctcctggtgctcctggtcttggacaacaatttttgtatgggcaaggacccccagccatgatgcctccacaagctggatttggataccagcagcaactagttcctggaatgagacctggtggtggtcccatgccaagcttctttgttcctatggttcagcaaggccaacaagggcagcgcccagggggccgccgaggaacaggtcctgtgcaacaaccccaacagccaatgccaatgatgcagcagcagatgcttccaagggggcgtgtctatcgttaccctcctggccgcaacatgcaagatgtcccacttcaaggtgtagctggtggaatgatgtcagtcccttatgacatgggtggtctgccaatccgcgatgctgtgggacagccaatgcccattcaagctttggccacggctcttgcaaatgctccccctgaacagcagaggactatgctcggtgaagctttatacccgcttgtggatcagctggaacacgatgctgcagcaaaggttactggcatgcttctggagatggaccagcctgaagttttacatctgattgagtcaccagatgctctgaaggcaaaagttgctgaagccatggatgtgttaagaaatgttgctcaacagcaaactaacccagctgatcaactagcttcactctctctcaatgacaatcttgtgtcttagattcctttagtcttttgactggaatctgctttccagttattcctattccgtatgcttccccccagtttatttgcaggtgtcttagatgttttgttttagtcagagtactaaggaagtttatgttcttggtacttttggtttcactttttttcgtatctgaattgctgtaggatggattagcataacttgttggatttattagatatgcatttgcggtttggatt

SEQ ID NO: 11797 - DNA, 1069 bp, Glycine max
  Clone ID: 701129548_FLI
atgcctaatagtccatcttttcgtgttcctttgaatgatcacactggggagttaaataggctttcaggggtgaagcctgctaaccttgaagatatgtttggatcgctcgatccatcaattttgtctaaataccatggaatctcacttgatgttgcaggacctcagttacagtctccaaccggaatccagatgcgccagaatgtgaaccagcagctaggaggctattcatccagcctttccactttgaatgtgattggatcgcggtccttcaggcttgatcagtctggcgaagcagcctcggtggccttgaatccaagagttgctgcctttgcaaagcggagccagagcttcattgagcgtggcgtggtgaaccatcattctgaacttccttctccaaagccctctaccttctctaactggggctcacctgttggaaaattagattgggccgtaaatggagaagagctgaataagctgaggaaatctgcttcctttggatttcgaggcagcgacactcctctaacaaagacttcaaccaaaatgtcagcaaatgttgatgatgagccagatgtgtcttgggttaactcacttgtgaaggatgctccaccggaatccggtgaatctggtgaatacagtgtggaagatcagcgaaagctactgcaatgccacaatggaacagatgcgattccagcatggttggagcaattgtacttggaccaggagcaaatggtggcatgattgcaatttcgtggcttgcggtagcaactccttttgcaactcaacagtttatttatttgatgaattttttgaattttatagaatttagttagatgacaattcgcaaaagggatcttaaaatagcctaccaaggctataggatgtagaagttgggcaggaagcaagttttctgcttcagtaactcattgattccatttttttttcctgatctattttctttcttatatgttatattgagttgtaagttggaactttccattgactgaattacagcattgtagtggggatatagtattcaatataatgagactggagatgtaataattttatt

SEQ ID NO: 11798 - DNA, 992 bp, Glycine max
  Clone ID: 701129550_FLI
gcgaccaccgagccggagcaccgccgcgacgaaaacgacgacgacagcgtgacggcggaggatgaggacaccggagcgcaggtcgctccgatcgtgaagctcgaagaggtcgccgtcaccaccggcgaggaggacgaggatcccatccttgacctgaaggcgaagctgtatcggtttgacaaggaggggaaccagtggaaggagcgtggcggcgggaacgttaagctgctgaaacataaggtcaccgggaaggtgagactagtgatgcgccaatccaagacgctcaagatctgcgcaaatcatctcgttcatcacagtttgacggtacaggagcattctgggaatgagaaatcgtgtgtgtggcatgcttctgattttgcagatggggaattgaaggatgagctgttctgtattaggtttccctctgttgagaactgtaaggccttcatgacaactatgcaagaagtggcagaatcacaaggagaaggggaggaaaacaaagatgcttcggctactgccgatctcctcgagaaactaactgttggtgaagacaaatcagacgagaaagagccggaaaaggtccagatcaccaagaaactaactgttggcgaggataaatcggaggacgaagagccggaaatggccacaaacaccaatgagaaaggtgagcatgatgtagaagcctgaggatcataagatgaatcagctccaccagcatagaatttaatgtggctggtgaatgatttgttctctcataggttgctgatatgcttaaaagattggtaacctagattggaacctcaggatatagaatggttggcatgcagtatggaaatgtgatggactgtgtatctgttgagtactgtttttgttctggtttgcaagtatggttggatggttttgtgattgtgggttttcatctttctcatgtttccttcaattgagttgtttttgtacttttaaaaaaagtttttttttttttttggtttttt

SEQ ID NO: 11799 - DNA, 1141 bp, Glycine max
  Clone ID: 701129720_FLI
ctcaaatcgacaacaaaaccagcccacattgatatgaacatagaaaatgtggtcaaactacaaatattacatattatagatctataatcaacatgagaatgcaaaacgaaaataagttctcaatcaagtattgataagattcatatccagtctcagatctacaaatttaagaaaccaatccaaaaatcaataaaaatatatgaaacaagtcaagatgcatctgaatcaaaaaccgaaaaaacaaagtgaaagaaactccagatttgtgttgctagggtcgaagtcgaagggatcaccacccatgatttccgttcgcgttgctcttctcgccgacacccatggttttcgttcatagatctgtaactgatcttcgcatgcgacgtcgcacatagtaatggaagtgatactcaccctctaacgcacgtgattgtctccatcttcgcgtcgctcttgtggtggtttcggtgactccacgaaggtttggggttagggcggtgcccgaagaggaggggtggcgagggtttgaagggggtgggagccatcagttttccaattaagaagaggggaaggaagagaaaaaggttaaagggtataatgggaaagaaggaaaaaaactaaaaagaagaaaaattgacagtcatataatatatctttaaatctggtaatccaacggacatggataacaaagggtttaagttgggcacgctagacatcgtcttcaatcacggtctaaagtgacactgtagactctggctcacgccttagacgacgaagctcgctctgtactctcactcacctgaacggatccttcttcttccttatcgcgaaatccgttacttcaaaacctaattgcgtgagtgtggtttctgatttgtggtgcgtctctgattctccctaacctaaaccctgatttctctttatttttcttttcccctatttttcacatctaatcatctttgtttgaattgttttgttgctgtctgtagttgaagcgaagatgaggattatgattaagggcggtgtttggaaaaacaccgaagatgaaatcctgaaagcggctgttatgaaatatggtaagaaccagtgggctcgaatctcttcgctccttgttcgcaaatctgccaagcaatgcaaagctcgc

SEQ ID NO: 11800 - DNA, 778 bp, Glycine max
  Clone ID: 701129793_FLI
gctttctctcatccatcatgaaaggaggaaagtccaagaccgaatctaagagagccgatgccaaacttgctgtgaataagaagggcgccgccaccaagactaggaaacccgccggaaaggggaaggcagcgaaagatcctaacaagccaaagaggcctccaagtgctttcttcgttttcatggaggaattcaggaaggtgttcaacaaggaacatcccgacaacaaagcagtgtctgctgtgggcaaagctgctggagcaaaatggaagacgatgtctgatgctgaaaaagcaccttatgtggcaaagtctgagaaaaggaaagtggagtacgagaagaacatgagagcttataacaagaaacaggcggaaggtcctactggtggggatgaagaagaatctgagaagtctgtatctgaggtgaatgatgaggatgatgacgaggaaggcagtggcgaggaggaggatgacgattagagaatggactgatgataatagcatttatgtaggttctgatgattttgatcatccgtgtaggtggtctggtcatttccttataaacatatttctctttccaaaaaatatttccctgctcctccttccgtaaattgctcgtctttccaaaacgtgaatagtttaaagaagggagttctctttatttgtatttctaaatccaactgtttagttaagggatggttatctcttgtagagcttttagtttgatttagagttttcttgttgaaatctggttaagtttgtatcaatataattgacttatc

SEQ ID NO: 11801 - DNA, 1326 bp, Glycine max
  Clone ID: 701130161_FLI
gctacttcctactccaaccgcacttctgctccgcaattatcatgggcaaggtcaagatcggaatcaacggatttggaagaattggccgtttggtagccagagtggctctgcagagagacgatgttgaactcgttgccgttaacgaccctttcatcaccaccgattacatgacatacatgtttaaatacgacagtgttcatggacactggaagcatcacgatgtcaccgttaaggacgagaagacccttctcttcggtgacaagccagtcactatttttggacacagaaaccctgaagagatcccatgggggtcaactggagctgacatcattgttgagtccaccggagttttcaccgataaggacaaggccgccgcacatttgaagggtggtgcaaagaaggttattatttctgcccccagtaaggatgcccccatgtttgttgttggtgtcaacgagcacgagtacaagccagagcttgatattatttccaatgctagctgcacaaccaactgccttgccccacttgccaaggttatcaatgacaggtttggcattgttgagggtttgatgaccactgttcattccatcaccgctacccagaagactgttgatggaccatcagccaaggactggagaggtggaagagctgcttcatttaacatcattcctagcagcactggagctgccaaggctgttgggaaagtcctccctgctttgaatggaaaattgactggtatggcattccgtgttcccaccgtggatgtctctgttgttgacctcacagtgaggctggagaaagaagcttcctacgatgaaattaaaaatgctatcaaggaggaatcagagggcaagttgaagggaattcttggttacactgaagatgatgtggtctccactgactttatcggcgatagcagatcaagtatttttgatgcaaaggctggaattgcattgaataagaactttgtgaagcttgtttcttggtacgacaacgagtggggatacagctcacgtgtcattgatcttcttgtattcgttgccaagaagtctctttaaggtgttacttcaaagtagcttgtcttcacattattaccgtatgtttatgtttagctgcgatttagtgtcttgctcgagcaaaaaatgagaggtctgaataaatcggtttctgaaaccagtggtgttacttgttggaggagcattagctcttttttggacttttgatgttttctcttgtggagggggatcgagtttttggatttttatatactcgctgatgtacttggcttgaatacttgctaatgtacttgttattgattgttatagt

SEQ ID NO: 11802 - DNA, 1191 bp, Glycine max
  Clone ID: 701130201_FLI
atccacaccaccaaatccaaattccaatgcttcttcttccttcttcttatttcaatttcaatcactactacttcacgcttttgtttctccatttttaaaccctaaatctatctatctaatagagataagatagggcaaaaacaaaaccctagccaaagaaaaaccttgttgagcagcaacagcagcagcagcagagagagaggaatatggaaggagtaccgcacccaatacccagaacagtcgaagaggttttcaccgattttaagggcagacgcgccggtttgatcaaggctctcactaccgatgttgaaaagttttaccagcagtgcgatcctgagaaggagaatttgtgtctatatgggtttccaaatgaaacatgggaagtgaatttgcctgttgaggaagtgcctcctgaacttcctgagccagcattaggtataaactttgccagggacggcatgcaagagaaggactggctatcactggttgcagttcacagtgactcatggctgcttgctgttgctttctattttggtgcccgctttggatttggtaagaatgaaaggaaaaggctttttcagatgataaatgatctgccaacaatcttcgaacttgtgactggaagtgctaggcaatcaaaggatcaaccagctgcccacaacaatggtagcaaatgcaaatcaagtggaaagtcccgtcagtctgagtctcaggccaaggggatgaagatgtctgcaccacccaaagaagaggatgagagtggagaagaagaagaagaagatgatgaacaaggtgcgacatgtggtgcttgcggtgataattatggcactgatgaattctggatctgttgtgatatgtgtgaaagatggttccatggtaaatgtgttaaaattactcctgctaaggctgagcacatcaagcaatacaagtgccctagctgcagtaacaagagggttagagtttgaaagctctaaacctttgaaccaatcaccaattaaacagacaagatttagaatgtttgataacatttttacaagtgaaaattgcttcctgttcaagtcaatgatgcactttaatgactatgcagatggaatttcaagttttgctactgttcattactactgtctaatcttcttgggaattgtgttaagtagtcattggcaacaaggatattatataaatatattctgc

SEQ ID NO: 11803 - DNA, 988 bp, Glycine max
  Clone ID: 701130256_FLI
ggctcgagggggaagcagctttgtggtgggacatttttgaaccctggatcatgggatgctgcacttcttgctgctgggactacactatctgcgatgaagcatttactgaatggggatggaaaagtttcctatgcattggttaggccccctggtcaccatgctcagccttctcaggccgatggctactgtttccttaacaatgcaggtctagctgtgcaattggctttagattccggctgcaagaaggttgcggtcatagatattgatgtgcattatggaaatggaacggcagaggggttttatcgatctaataaggttcttaccatctctcttcatatgaaccatggatcatggggtccatctcatccgcaaagtggctctgttgatgagctaggtgaaggagaaggttatggctttaacttgaacatacctctaccaaatggaactggggacaagggatatgtacatgccttcaatgagttggttgttccatccatccaaaagtttgggcctgatatgatagttttggttcttggacaagactctaatgcatttgatcccaatggaaggcaatgcttaacaatggagggttatagagaaatagggcgaattgtccatcttcttgcgaaaaggcacagtgcaggacgccttctaattgtccaggaaggtggatatcatgtcacatattctgcatattgtttacatgcaacacttgagggggttctcaacctaccaatgcctctactagcggatcctattgctttttacctagacgacgagacattttctgtccaagttatagaagccattaagaattatcaaaaagataaagtgcgctagtggagaaactcactagacacttcctctctgtgcgtgtgaaataaatgttgatacttttcaagaagggttaatatttatcgtgtaactattgagggattttcaaggttattttaaataaatttaatcttgtccagttgatcttttgatt

SEQ ID NO: 11804 - DNA, 2960 bp, Glycine max
  Clone ID: 701130310_FLI
gggggcgtgcgttcaaaacgtgctcgattccctggtaaccgcattgctggcagataagaatcgcaagttcatatatgttgaacaggcatttttccagcgatggtggagggagcaaagtgatgatatccagaatatagtcaaggagctggtcaactctggtcaattggagttcataaatggtggtttttgtatgcatgatgaggctgctactcattacattgacatgattgatcagacaactcttggacatcaatttattaaagaagaatttggagtgactccgagaatagggtggcagattgacccatttggacattctgcagtccaggcctacttgttgggggcagaggttggatttgactctctattctttgcacggattgattaccaagacagagccaagagaaaagatgaaaaaactcttgaagttgtgtggcggggctccaagagctttggttcatcatcacagatattttctggtgcattccctgagaattatgaacctcccagtagtttctactatgaagtaaatgatgattctcccattgttcaggatgatgtcagtttatttgattacaatgtccctgaaagagtaaatgagtttgtggcagcagcaatatcacaggccaatattacgcgcacaaatcatataatgtggacaatggggacagatttcaagtaccaatatgcacaaacttggttccgacaattggacaagtttattcactatgttaatcaagatggtcgtgttcatgccttatactcaactccatcaatatatactgatgcaaaacatgctgccaaggaggcctggccaatcaagactgatgacttctttccgtatgcagatcgtgtaaatgcctattggaccgggtattttacaagcaggccagcaatcaaaggttatgtcagattcatgagtggctactacttggcagcaaggcagttggaatattttaaagggaagagtcccttatgtcccaaaactgactctttggctgaagccttggctattgctcaacatcatgacgcggtatctggtacagaaaagcagcatgttgctaatgattatgctaaacgactttcaataggttacacagaggctgagaaagttgttgcattatcacttgcttgtttgacagagggagcaaccaaaacaggttgtaagaacccacagactaaatttcaacagtgtccacttctgaacataagttactgtcctgcatcagaagttgatttctcaaatgggaaaaacttggtagttgttgtttacaatgctctaggatggaaaagagaggatatcataaggattccttggaaaaaacatccaatcccagctggtgccaatacttgacgattttcgtggtttaagaaactaccacactgtcgcatacttgggagtgtctccaactgcaaaacccaaatactggcttgcttttgcagcaacagttccccccattggttttagcacttactatgtatcctatgccaaaaaagaagctactatttcagatagagatacagcttaccaaccagggaataagagtgatacaattacagtgggcctaaaaaacttgaacctagtttattctgtgaaggaagggaaacttattcaatatatcaacagcagaagcaaggtcaatgaatctctagagcaggcatataaattttacgctgggtatggaaatgatggaacagaaactgctcaggcttctggagcatatattttccgccctgatggttcaccctctcccatcaaatccaacgggaagtctcctctcacagtttttcggggaccaattgtgcatgaagtgcatcagaagatcagtccatggatataccagactactagactgtacaaggggaaagaacatgctgaagttgagttcattgttggacctatacccattgatgatcgagttggcaaagaaattgcaactgagatcaaaacaaatctagcaagcaacaaaaccttctatactgattccaatggacgtgatttcattgaacgtgttcgagactatagagaagactggcacttggaagtaaatcaacctgttgctggaaattactaccctatcaaccttggaatttacctgaaagataaaagcaaagagttctctatattggtagatagagccgtggggggctccagcatcatagatggacaattggagctaatggttcataggaggttacttgaggatgattccagaggtgttgcagaggcactgaatgaaacagtttgcattcatgataactgcactgggttaactgtgctagggaagtactatttcagaattgatcctgtaggagagggtgccagatggcgccgatcattcgctcaggagatatactcacccttgcttttagccttcacagagggtgaaggtcactggggagattctcatgtcacaaccttctcagcaatagattcctcatacaacttaccagataatgttgccataataaccctccaggatctaggtgatggaagagttctcctacggttggcacacttatacgagattgatgaggacaagtatctttcagtgaaggcaactgtagaacttaaaaaggtgtttcccaacaagcagataaacaaaataactgaagtgagcttatcagcaaaccaagaaagagcagaaatggagaggaagagattggtttggcaagttaaagggtcacctccagaacccaaggtgtggaggggaggaccagtagatccagaaaatctaattgtagaacttgctccaatggaaataaggacttttatcatcagttttaggcattaaaagtccactaggagcactactgaaaaataactaaaataagaaattgcatcagattagatatttccaacatcatgtaagccagcaacaagaaatatgttcagagttcgtttggctaaaggtgtatggactcaatcaagttcattgccaataaaagtgcattgcttc

SEQ ID NO: 11805 - DNA, 2058 bp, Glycine max
  Clone ID: 701130344_FLI
cgattccgccggagaacgcgtcggaatccgccggaaatggaaatctccggcactgttccgagctcggggtcctctttccgactcagcagcgatgatggcgaccctttgttaggttctcgtatcggagctggaacagatgatggtgatgctttaacaacggaaacagatccagaggtttcgtcctctagtagaattgctgccagaaagaacaaatatcgtacgagcagcatcaaattgtttggggtagaattatcccctgataatgttgctgttgcgatggtgtattttgttcaaggtgttttagggcttgcaagactggctgtgaacttttacttaaaagatgatttgcatttggaccctgctgaggcagctgtgctttctggtttttctgcattgccgtggcttgtcaaacctctttacgggtttattagtgattctgtcccgctctttggttatcgaagaagatcgtacctagttttgtcagggctgcttggtgcgctctcatggagtttgatggctacttttgttgacaacaagtatagtgctggtttttgcatacttcttggatctctctctgttgccttttcggatgttattcaatggttgtggagagggcacgtggtgagtcacaaagcacctcaggatctcttcagtctttatgttggggttcttcggcctttggtggaattgtgagctcctacttcagtggatctttgttggatgcatatggagtaaggtttgtttttggtgtcacatcattgcttccgttgataacatctgtagttgccgttcttgtaaaagaacaacctatgattggtacagcaagagggctaaatcttcttttttccgggccagagtttttggaaagttcaaaacagcgcattattcagctgtggggttctgtacgacagcgtagtgtttttcttcctactttgtttattttcttgtggcaagcaaccccgcagtctgactctgctatgttctactttaccacaaattctcttggttttactcctgagtttttgggacgtgtcaagcttgttacctcaattgcgtctctgcttggtgttggtctttataatggatttctgaagaatgtgcctttacgaaaagtattttttgcaactacacttttaggttcaacgcttgggatgactcaggttttcctcgttactggactaaaccggaagtttggcattagtgatgagtggtttgcaattggtgattcattaattctcactgttttgagtcaggcttctttcatgcctgttcttgtgctagcagcaagattatgtcctgaaggaatggaggcaactctttttgcaactctcatgtctgtatctaatggagggagtgttgttgggggattgttaggggcgggcttgactcaactatttggaattaccaaggacagatttgataacttagcagctttgataatcctttgcaatcttagctcattattgcctctgcctcttcttggccttctccctggggacaatcctgatatgaatgaggaggacaattccgatattgagatgaaatgtaattgattttggttgtttgcccctggcttttcgtggacttgtctgtctttgtcaagctatacccaagttttgctctcattgcttgcaaatctaacagacatcacttacacatgcagaaaattttgtatatatgtagtatgatgctaaagttgctaccaaggccttattttatcatgacatccagttcacttcaaaactaaaacggactgattttatggagaaagaaccttgtgcacaatatgctctggagtaactcaagacagtgctaacttatcgatgacagaatatcagtctcggcagaactcagaactatcacaggttcttttgtaacgtactttctcctttttgtttaatcatgtacctctttacttctttgcaagaactcgggctttgtacttattagccaataattgtcatttggcaatgggaaccgagttttaggcctcggacgtgtttgtataagctattgtcattggcaatttcctatatcagacaacaggcaatttgtttt

SEQ ID NO: 11806 - DNA, 1118 bp, Glycine max
  Clone ID: 701130349_FLI
tcgggactgtttacaagggcgtgttgccagagagcggcgacattgttgcggtgaagaggtgtaaccatagtggtcaggggaagaatgagtttttgtctgagttgtctataattggaagtctaaggcataggaatttggttcaccttcaaggttggtgccatgagaaaggtgagattttgttggtgtatgacttgatgccaaatgggagtctagataaggccttgtatgagtctagaatggctctgtcttggcctcataggctcaaaattttgttaggcgtgtcgtctgttttggcctacttgcatcatgaatgcgaaaaccaggtaattcatagggacattaagactagtaacattatgttagatgaagggttcaatgctaggttaggtgattttggtttggcgaggcaaacggaacatgacaagtctcccgatgccaccgtagctgctgggacaatggggtacctcgcgcctgagtacgtgcttaccggtagagccactgagaaaactgatgtgtttagctatggtgctgtggttcttgaggtggccagtgggaggaggcctattgagaaagatgatgatgctgctgctgggaatggtaaagttggaattagcagcaatttggtggaatgggtttggagtttgcatcaagatggtaagttgctaacggcagctgatccgagacttgaaggcgagtttgaggaaggggagatgaggaaggtactcttgattggattagcttgctcacaccctgattcaatggcaagacctactatgaggtgtgtggttcagatgctgctgggtgaggctgaagtgcctattgtccctagagccaagccatctactagttacagtacttctcaactcttaatgaacttgcaagatagtgatactgactgtaagaatggtatgatcacaatctctacctcttcatcagagaacagctccaatggcaaagatatagtctgatggaagtctttggctgagatcttgtcatttttttttaattatttactcaaaatgtagatagactgaaatgtattcttttgctcatgtatgtaaactccaataacattacaattaaaggccttcttgagaaaggaaagaattttggggatt

SEQ ID NO: 11807 - DNA, 596 bp, Glycine max
  Clone ID: 701130375_FLI
gacagtggatcgactacaccaaatccctcttcctcgagagatcagaatggcgttgacttcaaaaaagttgatgctcatgtgcaccagttaaagggtagcagttcaagcataggtgcacaaagggtgaaaaatgcctgcattgctttccgcaacttctgtgaggagcagaacacagatgcgtgcgtcagatgtctgcaacaagtgaaacaagagtactgccttgtcaagaataagcttgaaacaatgttcaggcttgagcaacagattgtggcagctggtgggtcaatccctacggaactgagtttcagtggatgatgggtgggtttgtagagatgcttgtattatgatcctcttctttgttaaagattatcctttatcttatttagtccatggtgaatgtatgggtttttatgaagatagaagttttccatccaatgtacctttttcttcaccaaaaagctcttcataatttgtaatcttttgcatgctttactgaaggatgatagtagcaccattaattgaactttcctcttttatctctcttccaaacaagaagaaaattagtggtgacaacacaatacaatcctttgaacacc

SEQ ID NO: 11808 - DNA, 1067 bp, Glycine max
  Clone ID: 701130443_FLI
atcatcttctctctatctttgttgcaaacttaccaacacagtactgagtttaagtgttcaccaaaaaaaacaatggatgatgatattgtaggactcggttttcgtccaacagaacaagagcttgtcaacttttacctcaaacacaagttgctcggcgatgatccccgtgtccacgtcatccctgtcattgatctttgcgatgtggaaccttggaatgtaccagccctgttgatttcaagtacttgaaaagcaaaaggtttaacaggacaaccaagtgtggattctggaaagccactgggaaagaccgtgacattaggacaggggacactgataacactgtcattgggactaagaagactcttgtttactatcaaggccgtgtttcctgtggtgtcaagtccaactgggttattcacgaatatcatgctgttacctttcatgaaaaccagaggacttttgttttatgttgcttgatgaagaaacctgggaaaacaactgaaggcggaactgatcccctgatctgtgatgaaggggagcccagcagaagcatgatttctgactatgaaaatcagccaacagcagaaggaattgcatctgaaggtacttttacaggaatagaggcaatctttcaggcaaccccttgggcagagaattgcttctccccaatacaacagtctctgactcttattgagcaggaaggagcatcctttccaaactatgcatttaacaatgcctattttagaaatgaagacaacattatgcagactccatttgaaactacaaaggaagatgaattcctaaatttaatcttagccgatgaaagtatagtgatcaatgaagaaaataagcatgattttgtcaatagctctacccaatcagagtcattgaaaagggtatactgtgaaagcagtgatacagatgctgaagtcatctctaaactggtaaagatttatcaagttcaaataatactggggagagtatctccatttgtttctgaagtggcattggatctataggttaaaattgtagtgtgcattgtggttatgtgaatgttgccacatttttgc

SEQ ID NO: 11809 - DNA, 646 bp, Glycine max
  Clone ID: 701130512_FLI
gatgcctcgtggaacacttgaagttgttctgatcagcgccaaaggaatcgatgacaatgattttctctccagcatagatccttatgtgattctcacatacagggcacaggagaaaaagagcactgtgcaagaagatgctggatccaagccacaatggaatgagagctttcttttcactgtctctgacagtgcttctgaacttaatctgaagataatggataaagacaactttagtcaagatgattgtcttggcgaggcaaccattcatttagatccagtgtttgaagccggtagcattccagaaactgcttacaaggttgtgaaggacgaagaatattgtggtgagattaaggtggctctcactttcactgctgagagaaatgaggagcagggttatgatgcacctgaagagagctatggtggatggaaagaatccagtggggaatattaaagtgaaagaagaatttacatacttcaatggccagacttacctttataatgaaaaataagcagttttggtgtcactcttaggcaatttccattattgtgttttctggtgtgaagatccaatagtgttgtgcttttaggttgcattcctccctttggatattaaagtacattatgcttgatatattatcttttatgc

SEQ ID NO: 11810 - DNA, 2338 bp, Glycine max
  Clone ID: 701131711_FLI
tgacatggatggttttaaacttcttgagcatgttgggcttgagatggatcttcctgtcattatgatgtctgtggatggggaaacaagcaaggtgatgaaaggtgttcaacatggagcctgtgattatctccttaagcctataaggatgaaagaactgagaaacatatggcagcatgtctttagaaaaaagatacatgaggcaaaagaatttgaaagttttgagagcattcacttgatgagaaatggatcagagctatcagatgatgggaacctgtttgctgtagaagatgttacctcatcaaagaaaagaaaagatgcagatagcaaacacgatgacaaagaatgtttggatccatcatccaccaagaaagctagagtagtctggtctgtagatcttcatcagaagtttgttaaagcagtgaatcagattggatttgataaagtggggcccaagaaaatactagatctgatgaatgtcccatggctgactagagagaatgttgctagccacttgcaggtgatgctatattttcacaccagtatgttatacttagactatagagaaagaaacatgtatactttctttcattcagatgagcatctagattcttaatattttttattgtatgcatgattacatctcatttatatcaccgtttggtagacttagaatcacaacaaagcttcactttaatacaatagggtgtaagtgtaacctccaaaccataggtcctgtacaaatgtttcgtagaaatattacaacttaacacgttactcagcatgtccatctccatctaatgtaggttttgttactcaaacttgcacaccaagaagatacagatcctctcataaattcaataaagcaaaataataggatagaaaaatggcaaaacttatatacagttccttatgttctgtttgtactatttactaatcaaaattgaagtttcatctcgataatctgcacaattctttaatgcaaacctttatatgatgaaactgcaattctaattagataacaacacaaacatctatagaactgtatctaagttttgtccatagaagaaatgtatgtttctataatgtttcataagtttgaaaccaaggttcttactaagaaatctttaattatgcagaaatacaggctttatttgagtaggattcagaaagaaaacgatcagagatcttcctcaagtggaatgaagcattcagattttccttcaaaagatatgggaagttttggttttcagaactcagtaatcaagcaacaaaatgatgttgcaattgacaactacaatcattcagatggatcattacaacttcagaatgtggaaactaaaagtcatgaagctgatcccaagggaattgtttcacagtccaccatagcaaaaaaaggaaggattttgactggtaacattgctgacacgaacatgagagagagtttaagggttggccttaatcaaacttttccccctctagagtcagaaggaaaccatgcagtgtttgattgttccatgccaacaccatactcttggactgaagttccacacatgcaactcaaagaagaacacaagtcacttgtttatttagaagatagcttcaatcagttgccattacatggtaagcagcagcaacacatccatgtggatcaatcacaatcagttgcttcaattagttccgctccctcaataaccgaggaagaggctgctgcttgtatagaaccaaaacctttgtttgcagattacaacaatgattatgccagttctgtgagttcaacagggaatgcagttgccacctttcctattcaaccaggaagtcttattatgaatggtcaatcttcagaacgcatttccactacaacttctggattgaaaacacaggaatataataatctcagtagcatttctgatcaggaaatttaccaaagaaaccttttgggatgtgaggcagcttctgcatcattggacgaggacttgcatttctattggctagaaggcgaatgctataataatatgaactttggtctgcagaatataggaatgtctgaatattatgatccaggacttatttcagaagctccaatccacttatatgattcagctgattactcagttatggatcaaggtctattcatagcatgatttgctttgcctttcctgcatcttcaacaaaaatcataattcactcatgaaaggacaatttagtgtttcttgtagctaactactgctttattggagaatttcaacctcaagggttggggtattctttttccaatcatcgaggatttggatatatattgcagtatgtataaaaatgggtgctgacaagtattgagctt

SEQ ID NO: 11811 - DNA, 413 bp, Glycine max
  Clone ID: 701131931_FLI
ggcagcatggcggttaagcagggtggagctgcagttggagtctgagaaggctgggcgaaggagggagaagatggaggaaatcgaagcgaaaatcaaagctctgagggaggagcaaacggctgcattggatagaattgaagcagaatatagggagcagttggcagggctgagaagagatgctgaaagcaaggagcaaaagttggctgaacaatgggctgcaaaacacttgcgacttactaagtttctagaacaggtagggtgcagatcaaggctcactgaaccaaatggaagatagagtgacatcaatcattcacaaattgggaaaatctagtttgcttttacttattattatgtcttgaatttatatgatatgaactttatagtcatagtagttttgttcctgtcatttttct

SEQ ID NO: 11812 - DNA, 1056 bp, Glycine max
  Clone ID: 701132039_FLI
gcaaagttgggttatgctagtgaccttgcaggaagtcaggaacttgctgaaggtagtcgtgcaacacaggctcttctgactaattatgcacagacacctggccaaggaatgactcctttgcgaacccctcagagaacaccggctggtaaaggtgatgctatcatgatggaagctgaaaatctggccaggctgagggagtctcaaacaccattgttaggaggagagaacccagagttgcatccttcagatttttccggtgtcactcctaagaaaaaggagattcagactccaaacccaatgctgactccttctgcaactcctggagctgcaggtctcactcctagaattggcatgacaccaacaagagatggtttttcttttagcatgacaccaaagggaactcctcttagggatgagctacatattaatgaggacatgaatatgcatgacagcactaaacttgagctacagagacaggctgatatgagaagaagtttgcgttctggtttaggaagccttccacagcccaaaaatgagtaccagatagtgatgccacctgttctagaagatgccgaagagcctgaggagaaaattgaagaggatatgtctgatagaatagctagagaaaaagcggaagaagaggcaaggcagcaggcattgcttagaaagcgatcgaaagttcttcaacgggaacttcctaggcctcctacagcatcattggagcttataagaaattccttgatgcgaactgacggggacaagagttcctttgttccaccaacctctattgagcaagctgacgagatgattagaagggagcttctaactttgctggagcatgacaatggtaagtatccacttgatgataaagtgattaaggagaaaaagaaaggagccaagcgtgctgtaaatgggtctgctgtccctgtgatagaagattttcaggaagatgaaatgaaagaggctgataagttgataaaggaagaggccctgtatctttgtgcagcaatgggtcatgaagatgaaccccttgatgaatttcgcgagcggccgccg

SEQ ID NO: 11813 - DNA, 1415 bp, Glycine max
  Clone ID: 701132627_FLI
cttttttggtcaatttctgagggcaagagaggttctgtcaccgagacagcatgaagaaccaagcagtgaattgtcttctttgcagaaacagaagatgcaccctgccatgtatgaggatcatgttgctcttggttgccatgctacaagaaaattgagatgcagtgaaaggttgccgtcctttgttaaatctcggtcgtgctcgtgctgcaatccatgttcccccaacggaaatagattgacaggctcacacattatggaggcagaaaaatgtcctctggagaaaacaactgaaacaccagatgtatcaaccacaataacaatagctaagccatctggggatgagtctctcgaaaagcaagtttctgtaggtcctcgttttcaagcagaagtcccagaatggactggtgtattttctgagagtgactctaaatggttgggcacacatgtatggtctttgaaaaatgacactgaacctgctacagcaacagatgttgggagaggaagacaagagatgtgtagctgtgaatttcatggttctgttgaatgtgttagattgcatattgctgaaaataggatgaaattgaagcttgaattgggttctgaattttaccgtttgggatttgatcgtattggtgaggaagtttcacttcaatggacaactgaagaagaacagagatttaaggatatcatgaaatcaaatatttcctccaaaaataaatatttttggaacaatccatccaaatactttccaaagaagacaagaagaaacttggtgaactattacttcaatgtatttcttattcaactaagaacctatcagaatcgggtgactccagagagcgttgatagtgatgatgatgaagtagaatttggatctttcagcgatggttttgggatggacgctgtcaagagtcttggtgatgatttcctggagtgttctctgaacaagcagtgtactgatctcaaatacacaaaattagagtgcaaatttgataattggatctgagccactttgagcttgagaaaatattttcctgaggcaaacttgtataaaactcccttcctccatgatcagtggtgaatgcattactagtaccagaaaacttttgtatgatatgaggttagtgttggaacttggaagcaaatatggacatgtactcgagtcttgtctatagccataatgaagaacttgccgaggctgctattaattttgttggagatggttgtatctgttggttgaaatagcagtttaacatgatgcttcttggaggctgcactattcgtgctgtaaaactagttgtttagtctgagctaatgctttcaattttatgtttctagtcattattttgtaaattaaatttataaattttattcgtgacatgttttgactttcaaatcgaaaaactttttctttg

SEQ ID NO: 11814 - DNA, 1753 bp, Glycine max
  Clone ID: 701132665_FLI
gaaagatgctataacaaatcatcaaagtgaaggcagcttgaagagtgcaaggagtactgaaggatctttgtctaacttagaatccgaagctgttgtaaatgatggatgtatatctaattctaaagggaacgatttacattctgtgcaaaatcaaagtcagagccaaagtctttctaacatagcaaaaacttttattggcaatgaaatgtttgatgggaagacggtgaatgtggttgatggactaaagttgtatgacgatttatttgatagcactgaagttgcaaatcttgtttcactggtcaatgatctaagggtttctggaaaaaaaggacagttacaaggaagtcaggcatatatagtttcaagaaggcccatgaaagggcatggaagggagatgattcagttgggtgttcgaattgctgatgccccagcagaaggggaaaatatgacaggagcctccaaagatatgaatgtagaatctattccttccttgtttcaagatattattgagcgtatggtttcctcgcaagtaatgactgtgaagcctgattgctgcattgtggatttctataatgagggtgatcactcacaaccccacagttggccatcatggtatggaaggcctgtttatgtgctttttctgactgaatgtgaaatgacttttggaagagtaattgcctcagagcatcctggggattataggggcagtatcaagctttctctagttcctgggtcccttctggttatgcagggtaaatccagtgattttgctaagcatgctcttccttccacacgcaaacaacgcatactggttaccttcacaaagtcccaaccaagaaagtcactatcaagtgatgctcaacagcttgcctcggcagtagcatcttctcattggggtccaccgccaagccgatctcccaatcatgttcgtcatcacgtaggccccaagcattacgctacacttccaacaactggggtactgccagctccacccattcgaccacaaatggcagctcccgttggcatgcaaccattgtttgttgctgctccagttgtacctcccatgccattttctgcacctgtgccaatcccagctggttctaccggatggacagctgcacctcctccaaggcatcctcctcctcgagtccctgctcctggaacaggagtcttcctacctccatcgggctcaggtaattcatctcaacagttaccagcaagtactttggctgaagtgaacccaagcacggaaactccaaccatgccggagaaggaaaatgggaaaattaatcataatagtacaagtgcttcaccaaaaggaaaagtgcaaaagcaagaatgcaatgggcatgctgatggaactcaagttgaaccagctctagagacacggctagatagcaatgacaaagctgcaccaagtcattgagctgtaccatacttatagagagagagagagagagagaggtaaagcttatcacacgaacacgataggctgtgaacttaacttgagtttgaagcaaatgtaaagcgcggcaacaggagatatcactatatatatactgcagaggagaacaagggaaggaggtagaacttttggttctctctgtaatcctttctttgctccattccttttttgttgtcttaaaatattaactattacaggaagggaaacccattcttaattctatttttggcctttcctatcttaattattttattttattttaattaatgcatcttgctgttaatattg

SEQ ID NO: 11815 - DNA, 2598 bp, Glycine max
  Clone ID: 701132824_FLI
aggaaagtcgccttgtcatcattaacagtgtttgtgtatatcggagaaattagggtattgaagaggtcgctcatggacggagatggagcgacgacgatcgcggaggcgcagtacgcgacggcgaagacatcggtgtggtgggacatcgagaactgccacgtccccaagggttcggatccgcacgccatcgcgcagaacatcagttctgctctcgttcgcatgaactactgcggccccgtctccatctcctcctacggcgacaccacgcgcatcccagcatctgtacagcacgcgctctccagtaccggaatctccctcaatcacgtcccggccggtgtgaaagacgcaagagacgagaagattcttgttgatatgctgttctgggcactggacaatcccgcacctgctaattatttattaatttcgggtgaccgagacttctcgaatgctctccatcaacttcggatgaggagatataatattcttcttgcgcaacctcagaaggcatctgcacccctagttgcagccgccaagagtgtatggctttggactagcctcttagctggaggacctcctctttctaatggtgaatcacaacaacttggtaatggtagcctcagccatgtatcatcttctgactccttacaaattccggttacaagtgctactcagatacaacaacaggtggattcctactcagaagtacatgtaggaaattcaaaatttacaaatggaggaaggggatttgattctagatatcaggggaaaacaaattggagaaacctgagccaatcgaatggacctagagccatgaatcctctgcctgttgtacttcaagataatcgtaatcgtaataatgcaaactcttctcaacctggcaactttaatctaaatgttccatcaagtgctacaaatcatggtcatggcaatactgatcagttatggagcaataacagtaatctacagggcaatcatcaaatcccttattcacagccattaagaccaaacaacttcccattgcaacctccttttgcacctagtaattcatatacaccaaattcccatacttttccaacttcagtggttccacctaggactggtggtcccaatttcacttcaggaccacataccaatgtgccagatattggtagtctgagcatttctggatatcctaatagtgttcataacccacctattgttccgcaacggagtggagagttgaaacagaatcctaatagtaatgctccacttcttttaagatcaattgatgacaaaaatggacatatggtacagaacagtggcacacaacaattacaccaaggttatcaacatggtccagaatatcaacctatgccgttggcagcaatgggtaataataacccttctggtaatggtatgtggggttctccgggatgtcctaaaccttctgaatatgtacaaggcctaataggggttgttttacttgccttgaactcactaaaaaatgcaaagatgatgccaactgaggcaaatataactgactgcatccggtatggagatcccaagcaccgcaacactgatgttaagaaggctcttgaaagtgctatagagcagaatatggtggtgaaacaaaatttaggtgctttgccgttgtatgttggtaagaatgataaactttggaaatgtgtaaatcctttaggtggtactcctaagcagcattcaaaagaaacatgggatcaaattggaaagtttttaacaactcctgctggaagatcagcactaatgggtacacagtgcaagtatgaagcaggtattgtgattaagagtatgtgctttaaagatcttgttttgggtgatgtccttcagatattgaacatgttaattacccataaaaaatgggttacacatcatccatctggttggcagccacttaacattactcttcccgagataaaccccacttcaggggttgtagctggtgggcaaatttccccatctggggtagttttagaaactatttccccagatggggtcgtttctaaaataattgcagcatggggcagttttttacgtgcatggaagacccaaaccggtgtcagtgagcaacccgccagatgcaatggcgatatgaccgtgcagagcctaagtcgccagtcctaatggcgatacgcagaagcagctgggaaccgccagtcaaactggcgagttccatggtacaggcgtgcaggcgcttttgcaggggtgcaggagcttgcttttcagaaaagggagttgcaactgccattggcgagttgcttgcaagttgcaactcccattggcgggttgcacaagaagaaatagccatcaccaatggcggtttgttaccagtgctcacgttttgaacttgaactcacgttttcagctccaaattagaaataaatctttcattgctcacggcttcaaattagaaatttctttcttctttcattgtatgctgagagctctagttgtgtgtggtcagtgacttagagttttctgaatacagaaagagccttgagttttgtaagtgtgtagggatttctgttttaaatttgtttggttgaagttaaatatttgaattaggtttataattttgaaatt

SEQ ID NO: 11816 - DNA, 783 bp, Glycine max
  Clone ID: 701132964_FLI
gatcacagaagatgaaacgactcttacagcaagcaaagaacaacaaagtgaaatgatgaacggagacaaggacaatcatggaagcgaagatgacaactccaaagagtggttgaacctgagcataggtggaactactactttactctcaacagctgtaccaccagccactgccaaagttttttcatgcaacttctgcatgaggaagttctttagctcacaggcactaggaggccatcagaacgctcacaagagggaaaggggtgctgccagaagataccaatctcagaggtcgatggcaataatgggattctccatgaacacactaactatgtgtcgatcacttggtgttcagccacactcacttgtgcacaagccatgcagagatggtatcatggtggcaccgagctttcatgatgcatatgcaaggattgggatggcatggacacctttctggaccgaggatcaagcggatatggtgtggccaggcagctttcgcttggttccaaaacagccacagtcaccacaggagccactcaagcttgatttagacctcagactctgacaagaggtttggtctcagcttggagccttatcctcctttttagccaaaagagcttgttcgttagtgagctgggagagtcaataactcagatgctgctgctactgcatagtaaatggtaggagatttttgtttttcattgtctatatgactacatgtttagcaccagaaaacccaagttataactccctggctatctattttagttccttcaagtttgatat

SEQ ID NO: 11817 - DNA, 1030 bp, Glycine max
  Clone ID: 701133177_FLI
ttttaattgataaaaatgggatgcttaagattgcagattttggtcttgccaatttttatggtccagatcgtcaccggcctctcacaagccgggttgtgacactatggtacagagctcctgagttattgttaggtgacacagattatggagttggtgttgatctatggagtgctggatgtctcctggcagaaatgtttacaggaattccaatcatgcctggcagaaatgaggttgagcagcttcataaaattttccggctatgtggcacaccatcagaggagtattggagaaaattgaaactttctacaacttttagacctccatcttctttaggtcttttatgcactttgcttgctttggatcctgcattccgtggcagtgcatctaaagctcttaaaaatcagtttttcattactagcccattggcatgtgacctctctggtctgcctgttatcgtcagagaggatgatgagcttgttcaagccaatgaacagatcaagtacatgaactctaaaatcaggcgttctcgtacatatctggagcgtcgtaagaattcaacatctaagagaccaatagaacatactgtatcttccaaacaggaattgataaggaatgcgaaacctgaaacttttgttccaattgaagacacggatagcactagtacctcatctagtgtaaacccaggaggggctaaggaccaatcacctttttttctatctccatttggagctttagatcaaaagctatctccaaaaacccatcaccatgttaatggtggtgaaaaaaacatcaagaaccttcctccattacccaagtcaaaaccaaatgctaccaagaaagatgatatcaaatacagaccagaccactttttcaggtcagcttccaccagagaatttagatacttaaaaagggaggaacgtttactcttggaaattgatgattaggctaatacgagaatatgtaaaggccaatatggttgttttttattttagtatttgatgtattctgaaaagctctacacattctttgc

SEQ ID NO: 11818 - DNA, 1782 bp, Glycine max
  Clone ID: 701133186_FLI
gaaaaaggcagtgttgatcggaataaactacccaggaacaaaggcggagctgagaggatgcataaacgacgtgtggagaatgcatcgctgcctgatcgagcgatacggtttctccgaagacgacatcaccgttttgatcgacacggacgagtcctacacggagcccaccgggaagaacatccggtcagcgctgaccaggctggtccgatcggcggagcccggggacgttctgtttgtgcactacagcggacacggcacgcgcctccccgcggaaaccggagaggacgatgacactggttatgatgaatgcattgttccttctgacatgaaccttatcaccgatgatgatttcagagaatttgttgatggggtccctagaggttgcaggatcacaattgtgtctgattcttgccacagtggtggcctacttgaagaagctaaggagcagataggagagagcacaaagggagaggaggaacaatctagctctggctttggattttcaagttttctacatcggactgtggaagatgccattgagtctcgcggattccatatccttcagcgttgcgccacaacagaggcagggatgatgatggtgatgaagctcaaaatagggatattgaacttccggatgggggctatgtaaagaacaggtctttgcccctttcaaccctcattgatatactcaagcagaaaactgggaaagatgatatagatgttgggaaactgagacctacccttttcgatgtttttggggaagatgctagtcctaaagtgaaaaagttcatgaatgttatttttaacaaactccaacatggaagtgatgaaagtgggggtggaatattggggctggtgggtggtcttgcccaagagtttctcaagcaaaagcttgatgacaatgatgagggatatgcaaagcctgcactggagacaaaagtggaaagtaagcatgaggcatacgctggaccaaccaaacgcggccttccggatggtgggatattgatgagtggatgtcagactgaccaaacttctgcagatgcaagtcctgcaggcaacgctgccagtgcttatggtgcttttagcaatgcgatacaggctataattgaggagactgatggtgcaatcacaaaccaagaacttgttcaaagggcaagagagaagctgaagaactccggtttcacacaaaaacctggactctattgcagtgatcaccatgttgatgctccttttgtgtgttgatctcttctcatctgatgactgatgcagagaaagagagaataatgtgtgttgtttatagtatgcttgtgtattgctgtatatgtttggacaatcaaattgaagttagtgtgttttcatacagttttcctatgcatcactattatcaggtacggaccattccctccaacattttagcacttctaatgtctccgctgattacagcattatggtgtatttgctgctacttgaccattttgcggggagaccaaactatcagagcaagttctatgcaccaaaccacagacttcggctctgtaaatctgaataaaatggtgtatgtgaaattattataaaatatatggttaagttttgtatttcctttgcaacattcttgcaactttgtaaggattttaatttgttgaacttagttgtagtatacttataatgttatgtttgtttctctttgttgagtagtctagaaaataggagaaattgactgtatttggatgaagaatttcaaaattttaaagaatttgaaatgcttagaatttaattttcttc

SEQ ID NO: 11819 - DNA, 1502 bp, Glycine max; identical to SEQ ID NO: 11438
  Clone ID: 701133316_FLI

SEQ ID NO: 11820 - DNA, 1233 bp, Glycine max
  Clone ID: 701133385_FLI
cacaaaactaaattaattcagaccacaccacatcgtacacacacacacacacacttttgtcaaggcataggattggtgaggtaaacttgaattgaagtgaagaaggagatggctgcaacctcttccttgtgctcatcgaccctccaatcccagatcaatggattcttccttcacaaaacctctctttcccatactccttccctcactttctccaggaggaaaatttcaaccacagtgaaggctacatctcgagtcgacaagttttcaaaaagcgatatcattgtctctccgtccattctttctgcaaacttttcaaaattgggagagcaggtgaaagcagtggaattggctggttgtgattggattcacgttgatgtaatggatggtcgctttgttccaaatattacaattggacctcttgtggttgatgcattgcgccctgtgacagatcttcctttggatgtacacctgatgattgtagagcctgaacaaagggtaccagattttattaaggcaggagctgatatagtcagtgttcattgtgaacaatcttccaccatccatttgcatcgtacagttaatcaagtgaaaagtctgggagctaaagctggagttgtcttaaaccccggtacccccttaagtgcaatagaatatatccttgatgtggttgatttggtcttaattatgtccgtaaaccctggctttggtggccagagttttattgagagtcaagtaaagaaaatttctgatttgagaagattgtgtgcggagaagggagtgaatccatggattgaagtagatggtggagttggtccagcaaatgcatacaaggtgattgaggctggagccaatgcactggttgctggctctgctgtttttggagctaaagattatgccgaagctataagaggaatcaaaaccagcaaaagacctgaagtagttgctgtgtgaaatgcctgtgtggttccatattcaccgtacgctccaatgtaagctgtattttttgccccatagaggtttctccattaaattttggcatatcgttttactgattgggtggttgaatataagcaaaattgactgccagtatgagaaacaatcaagtaaaataatggcagacattgcttatgcgccagtttcaaagtcaactatattatataattaagttatgcttgtggctcaatcatcacatgtatctgactgataattactcaatactagtagaaattttac

SEQ ID NO: 11821 - DNA, 1304 bp, Glycine max
  Clone ID: 701133623_FLI
ggagtatcaaaaccaaagggccaaggagggtagattctgtgagaaactcaagatcaagaataggccaaagtttgtaggagtgagacaaagggcttcagggaaatgggcagcagagatcaaagacacatcaaagaagattaggctttggcttggaacttatcaaactgctgaggaagctgctcgagcttatgatgaagctgcatgcctccttcgaggttcaaacactcgcaccaatttttctactcaagggtgtggcgttgctacaaattctcctatatctctcaaactcagaaacctccttgatcgtaaagccatgtcaaatcaaagtcaaagtcaaattcaaaggcaatcctctatgataagttccactttccaaggtgctgatacttcagctagtccaaatgttagtgccatcaataagatcatggttatggaaaactactctgcttgtagtagtgaaggtaagtctttgtttttggttcagaaccaccaagtctgtgataacccgtatggactagatatgaatatgatcaactgttcaacgggtatcacaccaaatacatcgcagtttgattattcttggccattagcccaacaaaggattaacgaattgccaatatcaaaagatgattttggtttgaatgcagaaaggcaattgtcaggatatgccaccaatgagtgccatgaggaggatacgtatgcatatgatgtcaattatcctctctcccactttttctgcttcacttgatatctatcttaatcttcctatctcttcttaaaacatagtttgtataatattaccttgtttccgtgtcattttccctgagaggataaaccaagagtcaagaccattgaatttctaaactcactctgctttaccaagtgcttataggaatcagtaacaagattttcggtacaatggtactttgcccagagtgtaacaattcttttcaactcctcaaagttaacccattggatattttgcaagctcgtgatcacttacagtcacaccccatctcagtataataaggaagactaatgtgtgaagtcaaatgtgtacgcactatatatcagtcttcattcttctacaaatgtacttagtgcttacgatatattcaatcccactccttatggttggataattagatgaaaacggatattaagatgtattttacttttttgtgttatatatcacctttaaaataatttctgcacacacatataagtgcatctcctagctaggttcacttgggggtccatattattttgtgatcaagtcatgtataatacaagtatttttgttt

SEQ ID NO: 11822 - DNA, 1378 bp, Glycine max
  Clone ID: 701133796_FLI
attttgatggccagcaacaccttttgagtgacttgggctgtttctcgcagccccgtcctggcgccatttcagtgagtcgatctggtcggtctaagacactaaccccatcaaatctggatgaactattctctgccgagatttcttcatctccccggtattctgacccagcagtggcttctgtattttccccaagacacaaatcaactattatgaatcagtttcaacagcttcaaagttcgttatcacccataaacacaagtgtctcctctcctaggaatgttgagcatcctctattacaggcttcatttggtgtctcttctcctggaaggatgtcaccaagaagtatggagccaatctctccaatgagctctcgattatcagcatttgcacagcgtgagaaacagcaccaacagctgcgaagccttagttcaagggaccttggtgccaatgttcctgcctcaatggttgggtccccagttaactcctggtctaattggggttctcctcatgggaatggaaaagtagattggtcagtaaatggaaatgagttaggtcgattgcagagatcatcatcatttgagcttggaaacaatggggaggagcctgatctatcctgggttcaatcccttgtcaaggaatctccgtccgagataaaagagaagttgacaggttctggccctgttgcatctgttgatggaccgagttcaaatccaaagtcaaatccgcaagttgagtctgttgatcattctgttctaggagcctggcttgagcaaatgcagctggatcagcttgtagtctaatcaaatttgacccattccatcttgtgataggtatttaatttcacaacgtattctttttgtcaatttttttgggtggagcaaggagagggaatgtaatgatactgaagcgagggatggctgcaaagtacccgaatgataatctatttttccccccccattattttgtcattcattgttttactaaagagcttcagggggagtggtaagaaaccctctctctggggttgatgatatcccagtaaaaaagaaaatattcttccaaaactctagtttcaggactcttttcttcattttattcctagccatggaaaaaccaagagcctcatatttgtattcaagttcgttttcttggtaggaatctgctagtatattgctatgctattgcatgtatagaagactagagtgtgtttattgttaaggaattagaggtgatctgcgccattaatatttattgccggcagatcgtttagacatactgaaggctactgtgtatgtatcggttattttcaaattcaatgtagctgttatatttatgggtattatctaaattcaatggaaattattaacctttttttttt

SEQ ID NO: 11823 - DNA, 2063 bp, Glycine max
  Clone ID: 701133880_FLI
gctcttttctcttttcttttctctttagttctctcttcccctttctttttctttttcttcttcttctgagcttgtttaagcttttcttccattaacatattatcacaatgtgtggtattcttgctgttcttggttgttctgatgactctcgagccaaaagggtccgcgtgcttgagctctctcgcagattgaagcaccgtggccctgactggagtgggctccatcaacatggtgactgctttttggcacatcaacggttagccatagttgatcctgcttctggggatcaacctctctttaacgaggacaaatccgtcattgttacggtaaatggagagatttacaaccatgaagagctcaggaaacagctgcctaatcacaacttccgaactggaagtgattgtgatgttattgcacacctgtacgaggaacatggagaagactttgtggacatgctggatggtatcttctcatttgttctactggacacccgtgacaacagttttatagtggctcgggatgctattggggtcacttccttgtacattggatgggggttagatggctctgtttggatttcatcagaaatgaaaggcctgaatgatgattgtgaacactttgagtgttttccacctggtcacttgtactctagcaaagaaagagggttccgcagatggtacaatcctccttggttctctgaggctattccatctgccccttatgatcctcttgttttaagacacgcctttgagcaggcagtcataaaaaggttgatgactgatgtgccttttggtgttctactctctggaggtttggactcttctttggttgcatccatcacttctcgttacttggccaacacaaaggctgctgagcagtggggatcaaagttacattcattctgtgtaggccttgagggctcaccagatttgaaggctgcaaaagaggttgctgactatctaggcactgtccaccatgagtttaccttcactgttcaggatggaatagatgccattgaagatgttatctaccatattgaaacatatgatgtgactacaattagagcaagcacacctatgtttctcatgtctcggaagattaaatcacttggtgtcaaatgggttatctcaggagaaggatctgatgagatctttggagggtatttgtacttccacaaggcacccaacaaggaggagttccacagagaaacatgccgcaagatcaaagcacttcaccaatatgattgcttgcgagccaataaatcaacatttgcttggggtctagaagcccgtgtaccatttttggacaaggcgtttatcaatgctgcaatgagtattgaccctgagtggaagatgataaaaagagatgaaggacgaattgagaagtggattctgaggagagcctttgatgatgaagagcatccttatctgccaaagcacattttatacaggcagaaagaacaattcagtgatggagttggctatagttggattgatggccttaaggcccatgctgcaaaacatgtgactgaaaaaatgatgcttaatgctggtaacatttacccccacaacaccccaaaaaccaaggaagcatattactacagaatgatctttgagaggttcttccctcagaactcagctaggctcactgttcctggaggagcaagtgttgcatgtagcacagccaaagctgttgagtgggatgctgcttggtctaacaaccttgatccctctggtagagcagcacttggagtgcacatttcagcctatgaaaaccagaacaacaagggtgtagaaattgagaagataatacctatggatgctgctccccttggtgttgccatccagggctaatacaaagatgtgacaaagaataatttgggcgacaatgaagataactaagctaaaggtgaatgaaaaatttgcctgcagtgtaatttcatctgggcaaagcttttatagtttatagttataaggctttctaaaaagtgttgcgtattgtattatcttgaatgctgtgatttgaagtcttaataaaagtgtttcctttatcagttcataatg

SEQ ID NO: 11824 - DNA, 1462 bp, Glycine max
  Clone ID: 701134208_FLI
accctcttgtccctctctctcttctttcttctctcaccttttcctctctcaatttcctttcccttttgaaattatgatataagagaacaaaaactcccccttaaacagataaggtatatataagccacccttcagagcaatttgtccatcttcttcaatttattagcagaagatgtggtgcattagattaccttagtctttgtcctagtgtcttccacaacaacttggtccaacgtttccaaatattcacataagagaagaacaatagttctctccctagaaactcatgatatgctagataagccatccttaggagcaatatatccgtcctcttcaatttattagcagaaggtgtgttgcgtattagaccatagtctttttgtcattgttgtttcccaacaacgcagtttagcctttgagagcatcagcaatcacatggtgatcagaatatcattcagcaattgaagatcagtggcatcaggcataggctagcaagcaatgatatggctttcttcccagcaaatttcatgctacaaacacctcaccaagatgaccatcaacctccaccttcactcaactcaattataacttcatgtgcacctcaagagtaccatggtggaggagcatcctttcttggcaagagatctatgtcattttcagggattgaacttggagaagaagctaatgctgaggaagattctgatgatggatctcaggcaggagagaagaaaaggaggcttaacatggaacaagtgaagacacttgagaagagctttgagttgggaaacaagcttgaacctgagaggaaaatgcagcttgcaagggctcttggattgcaacctagacagattgctatatggttccagaacagaagggctaggtggaagaccaagcagttggagaaggactatgatcttctcaaaagacaatatgaagctatcaaagcagataatgatgcacttcaatttcagaaccaaaaacttcagactgagatattggcactgaaaagcagagaaccaactgaatccatcaacctcaacaaagaaactgagggatccagcagcaatagaagtgagaacagctcagagattaagttggatatctcaagaacaccagctattgatagtcctctatccactcagcagaacaacaacaacagaacactctttccatcttctgctagaccaacaggagtggctcagcttttccaaaccactccaaggccagagattcagtgccaaaagattgatcacatggtcaaagaagagagcctaagcaacatgttctgtgccattgatgatcaatctggcctttggccttggttggagcagcaacatttcaattgatcatcatgcaaaaggagagtgtgagagtgagtgagagagtttcatattgcaatgtaatttttccttttccgaatgaaaatgaaatcatctagaggtgtctgtgtcaattgattacc

SEQ ID NO: 11825 - DNA, 1657 bp, Glycine max
  Clone ID: 701134260_FLI
aacaaacgaggaatcctttattgctgccgatgaggtaggtgtggctggtgatagcaacaacaatttaatacctcaaaaatggttcactctctgctcctacttcttctcctcctcactctcactgcaacctctgctcaacatgacggcccttcgatcacagccaccatggagcaattctccggttacaaaatccacgaacctcactctttccaaccctcttcactctccgttgatgctcaggctcttcagaaccagattgatgagcttgcggcgttttctgactcacctgctccatcagtaaccagggtcttgtatactgacaaggatgttttaggtcgcaggtatgtaaaaacccagatggaacttgctggcctatctgtgagagaggatgctgttggtaacatatttggtcgttgggatggccttgaacctgagcttgctgcagttgcaacaggttcgcacattgatgctataccttactcgggaaaatatgatggagttgttggtgttttaggtgctattgaagccatcagagtcctgaaaaggtctggttttaaacctagaagaccattggaagtcatatcattcacatcagaagaaccaacacgctttggaataggttgcttgggaagccgcctattggctggaagtgaggatcttgcaaattctctaaagacatcaactgatattcaaaacatatctttcctagatgctgcgggatctgctgggtattcaaaaaatgaagatgacttatccagtgtatttttaaagaaaggaacatattctgcttttgtagaactgcacatagaacaaggacctattctggaagatgaaggtatatctataggcatagttactgccattgcagctccagcaagtctaacggttgaatttgaaggcaatggtggccatgcgggtgctgcccttatgcctaacagaaatgatgctggtctggctgcttctgaattagccctggctgtagagaggcatgtgttggattctggttcaattgatactgttggcactgtcggtatcctggaactgcatcctggagcaatcaacagcatccccagcaaatctcacctagaaattgacacaagagacattgatgaggaaagaagaaataaagtggttgagaaaattcatcaatcagcaattaaaataaccaaaacacgaggtgtcaagctctctgatttccgtgtcatcaatcaggatccaccagccatttctgatgaagcagtcatcaaggcagtagagactgcaacaaaagaactaaacttgacaagcaagttgatgattagtagagcctatcatgattcattgtttatggccaggttgtctccaatgggcatgattttcattccatgttacaaagggtacagccataagcctgaagagtttgccaccattgaagatatgtcaaatggtgtaaaggtattggcgctcaccctagccaaattgtccagtcagtaacatcttctgtattgagtttatgtggactatcattgtagaaaaaggacatgtaatttatttctgttacagcctactgattaaataatttcaaattttggatataccccctttaatctatcagaatgaggggctgaaccattcaatatgaaaagtggatctataagaaccacttttttataggact

SEQ ID NO: 11826 - DNA, 927 bp, Glycine max
  Clone ID: 701134327_FLI
ctcgtttcaatcgaaaccaaaacaaaaacatgggcagaaaattcttcgtcggtggcaactggaaatgcaatgggaccactgaggaggtaaagaagattgttactactttgaatgaggctaaagtccctggagaagatgtcgtagaagttgttgtgagccctccttttgtgttccttcctgttgtaaaaagtttgctgcgccctgatttccatgtttcggcacaaaactgttgggttcgcaaaggtggtgcttataccggtgaggttagtgctgaaatgcttgttaatttgggaattccttgggttattattggtcactctgaacggaggcagcttttaaatgaatcaaacgagtttgtgggagataaagttgcctatgcacttcaacaaggtctaaaagttattgcatgcattggggagactctcgaacagcgtgaagctggtacaacaacggctgttgtttctgagcaaacaaaagcaattgcagctaaaatatcaaattgggacaatgttgttttggcctacgagccagtttgggccattggaacaggaaaggttgctactcctgctcaggctcaagaggtccatgctgatttgaggaaatgggttcatgacaatgtgagtgccgaagttgctgcatctgtaagaattatctatggaggttctgtaaatggaggaaactgcaaagaattggccgcacagcccgatgttgatggatttttggttggtggtgcctccctgaagccggagttcgtggacatcataaatgctgccactgtgaagaagaattgaaattcgtagttaggaactgatataatgctgcctttcaagctgcttcggaaattgctgtttttgagttttggatctgtgctttgtggccaatgttttgaactctgtttagtactgaataaacacgctttcctttgac

SEQ ID NO: 11827 - DNA, 1040 bp, Glycine max
  Clone ID: 701142035_FLI
gtggagaagtgtttgcgggatgccaagatggataagagtaccgtccatgatgttgttcttgttggtggttctactaggattcccaaggttcaacagttgttgcaggacttcttcaacggaaaggaactttgcaagagtattaacccagaagttcgatgagaaggaaaacattgtgttcatcacagtggtgtgttgcagcccagagaagataagagacaagctttgctacaaaggtggaggctcaatcaaaagcattgagatactggaaccgcccaagcccaagcccgccgggcccgagaagaaggaggccgagaaacccaaggccgagcccgagaaaaagaaagacccagagaagcctaaagcagaccctcccaaagccgaaaagcccaagaccgagcccgagaaaaagaaggacggtggtggcgagaagcccaaggaagagcccgaaaaaaagaaggacggtggggagaagcctaagcccgggcccgagaagcccaaggataagccaacacccgcgccgttacctgtgcagccacatatagcggcaccgatggcggtcccagttgggatgctctatgctcctcctccgtgctacggaggcaggcccgttgggcctggctacgagtacggtgggcccatgctctgttacgacggttactatgcaaggcccgtttacgatagttacagtggaggcagaccctgttatgggaaccgttgtgatcaatatttcagcgaagagaatccacaaggatgcacaattatgtgacaattacatccacggcgttgcattattgttgggatctgtaaatgatggtggccattcacaatttctctcaattatcatcatgtttaatcacgttcaatccaatgagctagtatttctctgtttttgttatttaaaattcgacgagagaaaaaaaaaacaatgaggggggaaaagaaaaataaggttatttaatcaatggttataaatgctatactgcagtgatgttttttttttttcgttccatgagttaataaaataaagtttctttaccaac

SEQ ID NO: 11828 - DNA, 2226 bp, Glycine max
  Clone ID: 701142095_FLI
gaaaattgaactgctcaaggatggcatgtcggtccttgtcttgactggtttgcctggatccggcaaaaccacactggctaagaagatctgttgggacactgacatcaaaggcaagttcggggtaaacatatttgtcacagtctccaaaacacccaacttgaagagcattgtagggacagtgtttcatggctgtagacgtccggtgccggagtttcaaagtgatgacgatgcaattaaccgattaagagctctgctgctgagtgtggggggaaatgataaaaatccaatattattggtcttggatgatgtttggcctggctcagaagcccttgttgataagtttacagtccaaataccttattataagatcttggtgacttcaaagggttgcatatccaagatttggcaccaagattttgttgggtcaacttgatcacaatcaagcagtggcccttttcgctcactatgctaaactaaatgacaatagctcatacatgcctgaagaagatcttttacacgaggtgcttactcttttaattgatcacaatcgaacagccttttatcttattcactgatttgctctgaaactaatattgcagatcgtgagacgttgtatgggttcaccattggtgcttaaggtcactgccggatcactctgtgggcagccttttgagatgtgggaaaaaaagaaggatcgtttacaaaatcaatccaaaatggaatttagtcaaactgatttgttttgtcatcttcaacgaagtttagatgcgttggaggatgagttccacatccacgaaaaggtgtgcttcatggatctagggcttttccctgaagaccaaaggatccctgttcctgccctcattgatatgtgggcagaactgtatgaacttaataacgatggtagcaacgcaatggccatcatccatgatttaaccaccaggaatttgattaatttcatagttacaaggaaagtttcaaaggatgaagacaagtactacaataaccactttgtaattctacatgatctccttagagagttagcaatccgtcaaagcacagagaaaccatttgaacaagacagactgattattgacataacgggaaatgattttcctgaatggtgggtgggagaaaatcagcaaggaaccatcggccaaatgttcccatgtttctccagaatgataagacagaaacagctaaaggttgctgcccgcatattgtgtatttcaactgatgaaacgtttaattcagattggcgtgacatgaaaccttacaacactgaggttctgattttaaatcttcactctagccaatactcattaccgtgttttacaaagaagatgaaaaaacttaaagttctgatagttacaaattatggttttcatcgttctgagataaagaagtttgagctgcttggttctttatctaacttgaaaagaatcagattggaaaaggtttcagtcccttccctctgcgaattgaagaatttgcaaaaattgtctcttcgtatgtgtaatacaaggcaggcttttgaaaactgttctatccaaatctcaaatgcaatgccatatcttgaggaaatgagcattgactattgcaatgatttgattacattacctgatggactgtgtgagattagcccattgaagaaacttagtatcactaactgccacaaactttctgcactgccacaaggtattggaaaactggagaatctggaagtgctaaggctatgttcctgctctgatttgctagagatgccaaattcttttgaagggcttaacaagctaagctgtcttgacatctcagactgtgtaagtcttaccaaattaccagatgatattggtgagttgaagaagcttaagaagctatacatgaagggttcaaaactgggtgaattaccatactccgtccataagtttgaacaatttaagcatgaaataaatgtgatctgtgacgaagaaacggttaccttatgggaaaattttcgtgcctttcccaatttgaagatagagatatttagagaggacattgacttgaattggcttcatggagttcattcctgagacttgtttcctgaaattgattgtgactcagcatcatgttgggattggagaacgatgttcgtctagtgaaaaacacgagtttgtgttagcatcaatgtggaatgtgttgaaagaacattcatgtgttattttagcatggtcatttatactttttgttatc

SEQ ID NO: 11829 - DNA, 1032 bp, Glycine max
  Clone ID: 701142119_FLI
gtccctttctgttctcttcactcttggtcttgcgagagaaagccatgccagagacgaagatttttggcatgctgtttggccaaacactcccattccaagttcattgcgagatcttctaaagcctggccctgcaagtgttgaaatcgatgatcaccctatgcaaattgaagaaacacagtacccgaaaaccttcttctataaagaagaccttcatccaggcaaaacaatgaaagtacaattcagcaagcctccctttcaacaaccatggggtgttggtacatggttaaaggaaattaaagacactactaaagaaggatatagttttgaagagctatgcatcaagaaagaagccattgagggagaagagaagttttgtgcaaaatccttgggaacagtaattggttttgccatttcaaagctgggaaagaacattcaagtactttcaagttcctttgtcaataagcaagaccaatacactgtggaaggagtgcagaatcttggagacaaagcagtgatgtgtcataggctaaatttcagaactgcagtattttactgccatgaagtccgtgaaacaacagctttcatggttccattggtggctggtgatggaaccaaaactcaggcacttgctatttgccactcaaatacttctggaatgaatcatcaaatgcttcatcaacttatgggagttgatcctggaactaaccctgtttgccatttccttggaagcaaggccattttatgggtacccaatttatctgtggacactgcctatcagaccaacattgttgcttaattagtccatgcatcttgagcaccatgagaatgagattgtgtataaaataaattatcatgtgctgtgtgttgtgcaagtactaccttctctagctagattgctagagctagaatttcaacctacctatgtgtactgataagatctgcttccctacttaaagagagcatcatcctgtgatcagtgtgcttcgtattctctctctctatatatatatggtaaaaagtggttatctcgtg

SEQ ID NO: 11830 - DNA, 1272 bp, Glycine max
  Clone ID: 701142168_FLI
ggcccttcgatgtcttcttgtgtttcaatgaggcagagacacgccacagcttcacaggtactctctatcacgctttacagagcgccagattcaagacttacatggagaatggcaagttgagacgtggcgacaaaatcgcaaccgctattctcactgcaatggaagcatcaaggatttcaatcgtcgttttctcaccatactttgcctcctccacctgctgccttgatcaacttgtccacatccatcgctgtatgaataccaaaaaccaactcattttgccaatcttttacgacgtcgaccagtccgatgtaagagatcagctaaatacatttggccaagccatgcttcaacaccaacatcgtttcggaaagagctccgacaaagtgctccagtggagctcagttttgtctcatgtcgccaacttgaccgccttctgtttctccagtactggggaccaatatgaatatcaatttgtggaagagatcgtggattgggtcaccaagaccgttccccgcaatgatgtttttctgagtttctgtggaagagatactcggtactcctttacaggttttctctacaatgccttgagccggagtggtttcaaaacctacatgaatgatgatggggaccagatttcacaatccactattggaaaatcaaggctttcaatcattgtattttctaaaaattatgcacattcctcgtcgtgtcttgatgagcttttggcaatccttgaatgcatgaagatgaaaaaccaactggtttggcccatattttacaaagtggagcccagggatataaggcgtcaaagaaatagttatggtgaagccatgactgaacatgaaaatatgttgggtaaggactctgagaaggtacagaaatggagatcagctttgtttgaagccgcaaacttgaaaggatggacctttgaaaccgggtatgaatatgaagttattgaagaaattgtggaaagggccattaaaatttaaaatggattctatgtaccaaccacgaagtccttgctcaagtgtcaactagaaatcaaccgataaaattcaactggcggttctataagtagcaggagctggttcacaaattgacgataacatgtctcattaggagggaatgaatgaaggatattcagaaacttgatcagcatgtcatatttctcagcgtaataaatacgaaaccttgtcttcagccaggctattgtagccactgcctatttctacacatttgatctgacatttctatggatttcattggacgtct

SEQ ID NO: 11831 - DNA, 212 bp, Glycine max
  Clone ID: 701142214_FLI
ctacttgtttgtatgtgttcaggaccattcaagcattggttcttctatttgaagttcactattacaaaatctaacatgattatgtcagattatacaaactgtgctgattctgtcttgaaatttatcaattattgtctgcagaaaatatttgttaacaattataaccttgttggaaatcagatgacccatgtgtggcaacacagtcacaaaac

SEQ ID NO: 11832 - DNA, 855 bp, Glycine max
  Clone ID: 701142328_FLI
gcgaccccctcttctgatctgtccatgtcaagcaatttttctacagtggtgaagaacccggcggaatcttcaataccaaatctttctttttcaataccttcagtcttctcaacgcctacagcagatcctttgcctaatcacaattatcaccatcttcccaactctactccaacaagatgggcacatcgatctccagcacaccctctgttgagacagatttctgatagtcgaatcatgggtctgaaatcgccagacaactcaatttctgaaggtaggccatcatttgtactctcaacttgcagcaatgaaatggcagctggatccatatgcggatcatctgatggctggtcaatgcgcaccttttctgagctggttgcatcatcacaaagggaaaggtggtcctttgatagtgagtgttttggatctggtcgtcacaagataagtggatccagtagcaggttctcgtattctccctccatggaactacaatcttgtggggcttgctcaaagctattgaccgagagatcaacatggagcaaccagaagtttattgccaacagtgacctctcagttgttgctgtactagtctgtggtcattcatatcatgcagaatgtttagaggctatgacatcagaggcagataggtatgatccagcatgtccaatttgtatggttggagataagaacttgtcaaagttgttgtccagaaaaggtcttcgggctgaatcagagatgaaggccaagaaccacaagatatccagaaaccgtgtagttgatagctaccttgatggtgttattacaactataattagagaatgattgactcttacagcaaatggaactaaatcttaacgc

SEQ ID NO: 11833 - DNA, 609 bp, Glycine max
  Clone ID: 701155564_FLI
gacagcaaaacaattttcaaactcaattaccattccataacctaaatctcctctttgtttccgagtcagagagcaatggcacgtaccaagcaaaccgctcgcaagtccaccggcggaaaggcgccgaggaagcaattggcgactaaagccgctcgcaagtcagctccggccaccggcggagtgaagaagccccaccgcttcaggcccggaacggtggctctgagggagatcagaaagtaccagaagagcactgaacttctgatccgaaaactcccattccagaggctcgtcagagaaatcgctcaggatttcaaaacagatcttcgtttccagagcagcgctgtttctgcgcttcaggaagccgcagaggcttatctcgttggactcttcgaggacaccaacctctgcgctattcacgccaagagagtcaccattatgcccaaggatattcaacttgctcgcagaatcagaggcgagagagcttaaaattaggtttcattgtgtgatctagaattaaaattaggttactgcttattgtaattcgtatttttcaatcgcctttttgttgtaatattcatcttatttcgaagtatatgctcatatggatct

SEQ ID NO: 11834 - DNA, 628 bp, Glycine max
  Clone ID: 701155595_FLI
gacagcaaaacaattttcaaactcaattaccattccataacctaaatctcctctttgtttccgagtcagagagcaatggcacgtaccaagcaaaccgctcgcaagtccaccggcggaaaggcgccgaggaagcaattggcgactaaagccgctcgcaagtcagctccggccaccggcggagtgaagaagccccaccgcttcaggcccggaacggtggctctgagggagatcagaaagtaccagaagagcactgaacttctgatccgaaaactcccattccagaggctcgtcagagaaatcgctcaggatttcaaaacagatcttcgtttccagagcagcgctgtttctgcgcttcaggaagccgcagaggcttatctcgttggactcttcgaggacaccaacctctgcgctattcacgccaagagagtcaccattatgcccaaggatattcaacttgctcgcagaatcagaggcgagagagcttaaaattaggtttcattgtgtgatctagaattaaaattaggttactgcttattgtaattcatatttttcaatcgcctttttgttgtaatattcatcttatttcgaagtatatgctcatatggatctgaacattttaacttatgtc

SEQ ID NO: 11835 - DNA, 803 bp, Zea mays
  Clone ID: 701158873_FLI
gaggcgcgccgccgcgagctgcgggtccacgccaacgccggcggtggcgcgccgcggtgggcgtccgcgcccttcacgcacccggccacgctcgacacggtggccatggaccccgacctcaaggcccgcgtccgcgccgacctggagagcttcctcaagggccgcgcgtactaccaccgcctcggccgcgtctggcgcaggagctacctgctgtacggcgctcccggcacgggcaagtccacgttcgccgccgcgatggcgaggttcctggggtacgacgtctacgacgtggacctgtcccgcggcggctgcgacgacctccgcgccctgctcctggacaccgcgccgcggtcgctcatcctcgtggaggacctcgaccgctacctgcgcggcggggacggcgagacggcggcggcgaggaccgcgcgcgtgctcggcttcatggacgggatctcctcgtcatgcggcgaggagcgcgtgatggtgttcaccatgagcgggggcaaggacggcgtggacccggccgtgctgcggcccggccggctcgacgtgcacatccacttcaccatgtgcgacttcgagggattcaaggctctggcgagcaactacctggggctcaaggaccacaagctgtacccgcaggtggaggaggggttccacgccggcgcccgcctcagccccgccgagctcggcgagatcatgctcgccaaccgcgggtccgcgagccgcgcgctccgcaccgtcatcagcgcgctgcagcacgtggccccgtcaccgcctccgcagcggaccgtcaccgcggc

SEQ ID NO: 11836 - DNA, 1715 bp, Zea mays
  Clone ID: 701160304_FLI
ctcctgcgctgcgccgtccttcacctccgccgccgaatccgagactctgatctcgggttcaccgcagcgcacagagcacccccgactcccgtcccgatccgcgctctcctctacgacgcttcagtcatggcaggaatggcacccgagggttctcagtttgatgctaagcactatgattctaaaatgcaggagctgctgagcactggtgagactgaggagttcttcacttcatatgatgaagtttttgaaagttttgatgacatgggccttcaagagaatcttttgagaggcatttatgcatatggttttgagaaaccatctgcaattcagcagagaggaattgttcccttctgcaaggggcttgatgtcattcagcaagcacaatctggtacaggaaagacagcaaccttctgttctgggatcttgcagcagcttgactatggtctggttgaatgccaggccctggttcttgctcccacccgtgagcttgcacagcaaattgagaaagttatgcgcgcacttggtgactaccttggtgttaaagtccatgcatgcgttggaggaacatctgttcgtgaggaccaaaggattctcgccagtggtgtgcatgttgttgttggtacacctggtcgtgtgtttgacatgctgcgtagacagtccctccgccctgataacatcaagatgtttgttcttgatgaagctgatgaaatgctttctcgtggtttcaaggatcagatttatgacatcttccagcttctgccatccaagattcaggttggagtcttctctgctaccatgccacctgaagcccttgagattacccgcaagttcatgaacaaaccagtgagaattcttgtgaagagagacgagctgacccttgagggtatcaagcagttctatgtgaatgtggacaaggaagactggaagctggacacactgtgtgacctgtatgagaccctggccattacccagagtgtcatctttgtcaacacccgccgcaaggtggactggctcactgacaagatgaggagcagggaccacaccgtttctgccactcatggtgacatggaccagaacactagagacatcatcatgagggagttccggtctggctcctcccgtgtgctcatcaccactgacctgcttgctcgtggtattgatgttcagcaggtgtccctggtcatcaactatgatcttcccacccagccagagaactacctgcatcgtattggtcgtagtggtcgttttggtaggaagggtgttgccatcaactttgtgacccgcgacgacgaacgtatgctgtttgacattcagaagttctacaacgtgttgattgaggagctgcctgccaatgttgctgaccttctgtgatcaatttgaagaaaaaacaaaacaaaaaagggtggtgagggaacctggtaaggattggttttgtcgaaataccgtgggagagggggtgataaggacggtggggggtttctatgttgaagtcgtggtcatggacaatttgtgattttttctcctttatgccatgttttggaatttttgtagctgcctaggccttgtggtaatgtgctgctgtgggggttcattagtatgaagaggaagacgctgctggcgcggagtctttttctctttattagtattttgtttaaaactatgtatgaccgaatggtggtatttatttgtgtcatccttgactcttattctgctgc

SEQ ID NO: 11837 - DNA, 1223 bp, Zea mays
  Clone ID: 701164854_FLI
cataccttcctgtattcggggtgtcgagtgccgccgcccttcgccggcgccgagcacggagcaacgcaccagtttcagtacctggattcgaactgagagtggattacgaagtcatggcaaggttatgttgcttcggcgccggttgctccgatttcacggggcaagggtcaatagcatccggtaaagggaaaggctgtcaagggcaagtcaagatctgctatggatataaccttgtaagagggatgacaaatcatccaatggaggactatcattttgccgaacttgttgatgtcaaaggaaacgagcttggtctttttgctatttatgatggtcatttaggggacaccgttcctatgtatttacagaagaatttatttacaaatattttgaatgaggaagagttttgtacacacacagatagagcgattataaaagcgtatgaaaaaacagaccaagctattctgtcacatactccagatctgggacaaggtggctccactgctgtaaccgccattcttgtgaacggcaggaagttatgggtagctaatgttggcgattcaagagctgttcttttgaaaggtggtgagcccatacagatgtcgatagaccatgatccgaatgttgagcgcagtgtaatcgaaaataggggtggttttgtttcaaatatgccaggagatgttccccgagtatgtggtcagttggctgtctccagagcttttggagacaggaatctaaaatcactattgagatcagagcctgatataaaagtcgaagacatagatcacactgccgagctacttgttcttgcgagtgacggtctttggaaggtgatgaacaatcaagaggttgtcgatttggccaaaaggtacaaggatccctatgctgctgccaagcaattaaccgtcgaagcacaaaaaagagatagtaaggatgatatatcatgcatcgttgttcggttcaaggtgtaaatcggtctcgaaggattttcatcgagagcaaaaaacaagtgaattaggctgcctgacgatggtagtgataatctgatggttgaataatgactggggtgttggctgtaaatgatttgtctgctccaatgtaaagttcatatataagtatgctaggattatttggtttggcgatttcaaaggtacaggtgcgagggcccgagagctactaaatagctaccatctgtaaataatggttatattggatgttgaatttgc

SEQ ID NO: 11838 - DNA, 1313 bp, Zea mays
  Clone ID: 701184321_FLI
ctcccaccctcctcactagctctatctagctgagtgaactgaacagctcactggctcgtcttagctaagctcagctgtaaagctaaggttcggattagctagcgtggtggccggagagtgtagcgagcggcgttcagctcaccgggggctgcttggtgagtgagggagctagctagcgtcgtcagagctccacgatgattacggggacggacttctaccacgtcatgacggccgtggtgccgctgtacgtggcgatgatcctggcgtacgggtcggtgcggtggtggcgcatcttctcgccggaccagtgctccgggatcaaccgcttcgtggcgctcttcgcggtgccgctgctgtccttccacttcatctccaccaacaacccctacaccatgaacctgcgcttcatcgccgccgacacgctgcagaagctcatggtgctggccatgctcaccgcgtggagccacctcagccgccggggcagcctggagtggaccatcacgctcttctccctctccacgctgcccaacacgctcgtcatgggcatccccctgctcaagggcatgtacggcgacttctccggcagcctcatggtgcagatcgtcgtgctccagtgcatcatctggtacacgctcatgctcttcatgttcgagtaccgcggcgcgcggatgctcatcaccgagcagttcccggacaacgccggggccatcgcctccatcgtcgtcgacccggacgtggtctccctcgacggccgcagggacgccatcgagacggaggccgaggtcaaggaggacggcaggatacacgtcaccgtgcgccgctccaacgcctcgcgctccgacatctactcgcgccgctccatgggcttctccagcaccacgccgcgccccagcaacctgaccaacgccgagatctactcgctgcagtcgtcgcgcaacccgaccccgcggggctccagcttcaaccacaacgacttctactccatggtcggccgcagctccaacttcggcgcggccgacgcgttcggcatccgcaccggcgccacgccgcgcccgtccaactacgaggacgacgcgtccaagcccaagtaccctctccccgtggtgaatgcgacgtccggggcgggggcggcggcggcggcggctcactaccccgcgccgaacccggccgtggccgcggcgcccaagggcgccaggaaggcggcgacgaacgggcaggccaagggcgaggacctccacatgttcgtctggagctccagcgcgtcgcccgtgtcggacgtcttcggcggtggcgccccggactacaacgacgcc

SEQ ID NO: 11839 - DNA, 1394 bp, Zea mays
  Clone ID: 701184342_FLI
ggccgactggagtggtcagtgggtctgacacttccaatgtgcctaatcaggttttggatcccaatgggtatgatcctattgttgctgaattggttgctgagattaaaccaagatatcacattgctggcacaaaaggtgtcttttactcaagggaaccatatgtcaatgattctgctgctcatgttacccgctttattggacttgctaatgttggaaacaaagagaagcagcatctgtcatgtccagtgctgatatcaatgccaagcctccaaacgccactttgtcaccatatgttggttcagcaaaatcagttcctatcgaagaagctccaaaacgtgcagcggagaacatagattcacaatattggcgttatgatgtcaagcggcaaaggcatggggaagctggtgggggtggattgtgtttcaaatttgtatcctcaggatcctgtcaaagagggagtagatgcagttataggcatgatgaagaggcagtggagcattaccagagaaatgtctgttttgattttctaaacaaaggaaaatgtgagaggggcccagaatgcaagtttgttcacagtctttctggggagactgctctaagggatgcaagacctcctagtgaaagaagacgagtggagagcagttgctggttctgcttgtcgagtccagatgtcgagtcacatcttgtcattagcatcggtgaaggttactactgcacacttgcaaaggggccacttgttccaaatcacgttctaatgattcccgtggaacactgccccagtacattgatgatgcctccggaagcagaggcagaacttgggagatataagattgctctgagtaagtactttgagaagcaaggaaaaactgcagtctactttgagtgggtttcaccacgctctcaccatgcaaacctgcaggctgttcctgtaccattgtctaaagcagacgctgttaacaagatatttcatctagcagccaaaaaactgggatttgaattctctatggtgaatccagatggtgcaaaaactgctagagaatcattgatgtctcaatgcgaaagcaaatcagggctgttttatgttgagctcccggaaggtagaattctcttgcacatggtcgacagtaacgagaagttccctgttcagtttggacgcgaggtgttagcgggactgctaagcatggcggatcgtgcagattggaggaactgcaagatttcaaaggaggaagagattaaactggtggacgatttcaaacaaggtttccgcgaatttgaccctgcagagtgaaaacaatgctctgcgcctgtgtttttgttttgcaatttgtagtctatttttgaggtctcatttgaaatggacatatatgaagcacaagaatgtagtaacgttttcc

SEQ ID NO: 11840 - DNA, 305 bp, Zea mays
  Clone ID: 701184374_FLI
ctttggtctcaaatcctcaatcatgcccggaattttgtaccagctcgtcgtcgccgccgccatctgcgccctctccagcggcagcatcgcggtcgcctcaggtttgaatgcgaccgactcgttcctcgtctgcctcgtcggcgcgggcgtcccgccgcgcctccttcagaccccggcgtccccgtcgtactccgcgacgctgctctcctccgtacgcaacctccgctacgtcacgtcggacattcagcggccggtcgccatcgtggccgccaccgagccagcccacgcgcaggcggccgtacgct

SEQ ID NO: 11841 - DNA, 500 bp, Zea mays
  Clone ID: 701184582_FLI
cacacacacatcgcttctccacacgacctcgctgaaccggaagacccgcgcacacacgccacttgtgcaccatggcgccccgggtggcggacaagtcgccattgccgctggccaccggcctgaagcttggcgttggcggaggagtcggaggcatgggcttgggtccacactaccgaggcgtgaggaagcggccgtggggacgctacgccgcggagatccgcgacccagccaagaagagtcgcgtgtggctgggcacgtacgacacggccgaggaggccgccaaggcctacgacgtcgccgcccgcgagttccgtggcgccaaggccaagactaacttcccgttccccctcgccgtcgccgtcgccggcggtgctggtagccccagcagcgacagcaccaccttggaatcgagctgtggcggcagcgggtgtggcgtcgaagcgcctgtgcaggcggccatgccgctgaccccggccctcgacctcgatctcttccaccgg

SEQ ID NO: 11842 - DNA, 1168 bp, Zea mays
  Clone ID: 701185106_FLI
ctctctctcgctcatcacatccaccgccgtagacgatggagatggacccttcgtcgacctctcagttcgtgtagaagttcgtttcgttatgcttgtttcgatttgtttttgtttttttcccttctgtcgcctcttctttcggcttcaagagaacaatccactcttggcggccttgttctgggggcgtagaacgaacttcgcgccgcgggtgctcagctcaaggatctgggtgccgtgtcatcggcgataggttcctcagccctgcggcgcacacagatttgcaccgagcaatcttccggcgctctccctgtcggtttgattcttgcttcccgtctgccaccgcacatcgtgccgatgcacgccgccacccgtttcgttgcgtttgaagctgtcgatagaagcggcttcgctctgtagccctgcaaagtggattggcgagcatggccgccgaagtttgcctgcggaattagtgatcgtgctgtcgattttttttgtgacaagggtcgtgccgatcgtgcaggcgattttgcagtcatctgctgatttgcagtaccacaaacaatgctgccttcaaacaaaataaatgattgaacgggcgaacagccacaaatgattcaacgggcgaacatcattgtggatttctgaacacacaaattattaactttcaaagtatgattttatatataaaaaggtagctgacgtcgtttggtttaggtttagaaactatcaaacgataagacgaacatattaaacccaattagttccatgatttgcttaaggcctgtttggttacttttagtttagggattaaagtttagttatgagactaaaatttagtcacttctatgtttggttttagagagaaagtatttgaaatacattaaataaattataagagaaccaaaatatccttaatcatttttatgtcattagtgcaattaaaataaagaagagaacatggaatttatatggtttagtcttttttagtcacctcttgaatgattacagactaaaacattttagctcttgttttagtcctaccgtttagtaatttagggactaaatgaggctaaaatgaagagactaatctttagtccctcaaaccaaacgagatcttagttgtatgatttgcttatgtgatgttacagtaaatatttgttaaaacaac

SEQ ID NO: 11843 - DNA, 344 bp, Zea mays
  Clone ID: 701185127_FLI
ccatcacctccttctctggctctctctcacacacgcatacgaacacactctctactagtactaacctctccctaatctatctctagcagcaagcacacaccgtaacaacaaagccaacgacgacgcggggccggccgcccatggccttcacgtcctgcttattgggcagcgacgcggagcggaaggtggcggtggcggaggtggcgctgcgggcggtgctgtgcgggctaggcgcgctggcggcggcgctggtggcgacggacacgcagacgcgcaccttcttctccctgcagaagaaggcgacctacacggacatgaaggccatggtgctcctggtggccgcc

SEQ ID NO: 11844 - DNA, 794 bp, Zea mays
  Clone ID: 701185185_FLI
cacccagcttccctttcgttcctcctcgccccagcgacgcggcctcccgtagaccgagcaaggcaacccaccactgagaggcacgcagaggagcaggaagccggagaccaagatgtcgtcggtgttcagcggcgatgagacggcccccttcttcggtttcctcggcgccgccgccgccctcgtcttctcatgcatgggcgcagcgtacgggaccgcgaagagcggcgtcggcgtggcgtcgatgggtgtgatgcggccggagctcgtcatgaagtccatcgtgcccgtggtcatggctggtgtgctcggtatctacgggctcatcatcgccgtcatcatcagcactgggatcaaccccaaggccaagccctactacctttttgatggctacgctcacctttcgtccgggcttgcctgtggccttgctgggcttgcagctggcatggccatcggcattgttggtgatgctggagtcagggcgaatgcacaacagccgaagctttttgtgggcatgatcctcatcctcattttcgcagaagcgcttgctctgtacggtctcattgttggaattatcctttcatcccgtgctggtcaatcccgggcagattaagtgcactaccattctgcaattaccgtactgtttattatgctattctaagagaattgaaaccctatgcccttgtctagtttattcttgttaccatgtattaatgaaacaatttgtagctgaaggaaggtgacacttccagccatgttggttttggcggtgttaagcagaggttatttattgggtt

SEQ ID NO: 11845 - DNA, 1816 bp, Glycine max
  Clone ID: 701203991_FLI
ctttaaccttcagatataacagcagacactacctgcggaagacgatccggagccgccacctattcttttgttcatcacatattcaatggcttcctctcttctctctccatcatttacatccttcctccgcaccaaggatctctctctctctgctttcacttctcagcgatgcttcaaagcggtgccaaggaaaataatccgttgtgctattgcggcgcctcagcgccaaccttccaccactggatcagtgaggactgcaatgaccatgactgagaagatattggccagagcttctgagaaggcacagctgacccctggggataatgtttgggtcaatgttgatattttgatgacacatgatgtgtgtggccctggttctattgggattttcaagagggagtttggcgaggatgccaaggtttgggaccgtgaaaagcttgtaataatacctgaccactatattttcacaagtgatgaacgtgccaatcgcaatgtagacatattaagagatttctgccatgagcagaatatcaagtacttttatgatattaaggatcttagtaattttaaggtaaatccagactataagggtgtttgccatgttgctcttgctcaggaaggtcattgtaggccaggagaggttctcttaggtactgattctcacacttgtactgctggagcatttggtcaatttgctacagggattggtaatactgatgccggctttgtgctgggaactgggaaacttctgctcaaggtgcccccaactttgagatttgtaatggatggagaaatgcccgattatttgctttctaaggatttgattctgcaaattattggtgaaataactgtggctggggcaacatataaatcgatggagtttgttggtacaaccgttgaaagtttaactatggaagaacggatgacattgtgcaacatggttgttgaagctggtggaaagaatggtgttgttcctgctgacagcactacatttaaatatcttgagggcaagacatctctgccatatgaacctgtttatagtgacgatcaagcaagatttctcgcagagtatagatttgatgtctcaaaattggagccagtggtggccaagcctcattctccggataatcgtgctttggcaagagagtgcaaggatgtgaaaattgacagagtatacataggatcttgtacaggtggcaaaacagaggatttcatggctgcagcaaaagtttttctggcatcaggtaaacaggtcaaagttcctacatttcttgtgcctgcaacacaaaaggtttggatggacttgtactccctccctgtccctggatctggtggtaagacatgctcacagatatttgaagaagttgggtgtgacacaccagctagtcctagttgtggtgcttgtttgggtggcccaaaagatacttacgcacgcatgaatgaacctaaggtttgtgtttcaactacgaacaggaacttcccgggccgaatgggacacaaggaaggtcaaatctatttggcttccccttatacagctgctgcatctgcattgaccggttatgttactgatcctagagagttcttgtagtagaatgttgttacaatcatctcattgtgttgtactcgttgttggttatttgtgtattctctactctctactagtcataagttaaaactgacaactttttaagcttaaccaatcttttagtatttctaagttgatctttagaatcattcatatatgtgggttaggtcaattcagatcaacatgaagttcaatttcaaatttagtagtgtttggtctttatatatatat

SEQ ID NO: 11846 - DNA, 1999 bp, Glycine max
  Clone ID: 701204111_FLI
gtcgatgctgtgtgtgatgtcgtagaagagcgttctgcaaaatccaaaaccccgaatttccaacaacaaacgctcccatatttgagttgcgacgattcatccattcactcaattccttccaatgcagtctcccgatgacgttcgcaatctccctatcgacatcactttctctcgtctcggagaatggttggtggatcgcaagcgagtgcccgcggattggcgcaagcgcgtggcggcgatcagggcacgaatttccaaggagttcccctccctccctaaggactccgacccctttttccaaaccctagaccccgaagggattaattatttggaggccaaacagatatatggtaatctcttgaagtctacttcggagagccggaacatatttggtcgtttatcaggtgctgcgggtgtgtgggaagcaattgcacgttcctttgagaaggatcatgttttccttggagaggctgcgcagattctgattcaaaatgtgagctatgaaatcccttaccagaggaaacaggtgcagaagattcagcagcagctttcagagctagatcgcaaggaggctgatataaaaagaagtgctgcactttcagccaccaaatatgctgaagcttgccaggagcttggcttacagcagggaaaaaatgtcagagtagagctcttggagacagcacaattacttccgagcacgtttagcaaaattctggatgttgtaaacagtggcaacatgtcacgggcaattgagtattattccaattttgtcagggatgctcacactgaaaaggatagatctttgggagatgtactacaaaacttgaagagtatgtgcgaaaatcccccatctttaaatgttgctgttgactctgagattattaatgatgttaatgttcactcaagcaaaaatgaattcgatcctgcaataaacaatgctgaaattgctgtgcctgacattgactgggatatttccgtggagagttcacaaattgattgggacattggaactgtagaagaaacggaggataatggtaatggattgggtccatatgaaatcattaatgcctctgatatcggatctgatccaacaatatcaaaccaagaaataggatcacatgcagatatatcttgggatattagtgtggatactcctcaggttgatgtcattgatgatgataatgccccaactgtagtgctggagaatcagacttctcttccagattccctatctcaattgacaggaaacaaggaagaacggagccagcttttagatacggagtatagaaataagattcttgatgatctgtatgagatgaaatcctttttaaatcaacggttggctgaattgaggaatgaggaaactttgtccctgcaacatcaagtccaggcagttgcaccctttgtactacagcagtatgctgctgatgctatagaaacaatgcaaaatgatatttctttggcaatttcattgctgacaaataggaagacaagggatctgattatgattcttaactccaaaagatttctagacagactagtcaattcattagaggaaaagaaacagcatgaagtcaagttgaaagagggattgaaggacttggctgctaaacgtatggaactgcaaaattctttatcttcatcatggtcaaagcaagatgtggctgtggcaaaaacaaaagagctgaaaaaactatgtgagagtacactttcatccatgtttgatggaagaccagttaatataattggagagatcaatgctattttgactagtggcattggagcatgaggaagagaaatttcctcgatgatgatcaagcctttaggtggtggatagtagcggctggccaaaatagctgaagataaatttgtttagttcttattttttacattacctgttcatttctgacaaagaacagtgctttgacaatgccaagggtacatgcgctgataattctcactgaatgaagtaacttttggtacttggtcattcaaaaac

SEQ ID NO: 11847 - DNA, 2126 bp, Glycine max
  Clone ID: 701134487_FLI
cactaaggtgttaattgctcataaaaaaaatggagtctgtcaagttcattaacatgaatgccaaacactcctccatcttcttattagccatgatctttgttctgatcttagcttcagcaaatgccaaaattcacgagcacgagtttgttgttgaagcaactccagtgaagaggctgtgcaaaacccacaacagcatcaccgtgaatgggcaatacccgggcccaacgttggaaatcaacaatggagacactttggttgtcaaagtcactaacaaagctcgttacaatgtgaccattcattggcacggtgttaggcaaatgagaacaggatgggcagatggaccagaatttgtgactcagtgcccgattcgtcctggaggaagttacacctaccgttttaccgttcaaggacaagaaggcacactttggtggcacgctcatagctcatggttaagggccactgtttacggtgctttaatcattcgtcctagggaaggagaaccctaccctttccccaagcctaagcacgaaacacccattcttcttggggaatggtgggacgcaaaccctattgatgttgtgaggcaggccacgcgaactgggggagctccaaacgtgtctgatgcatacactatcaatggtcaacctggtgatctttacaagtgctctagcaaagacactaccattgttccaatccattccggcgagactaaccttctacgtgttatcaatgctgcactcaatcaacctctcttcttcaccgtcgcaaaccacaaactcaccgtggttggcgccgacgcctcctacctcaaacccttcaccaccaaagtcctcatgctaggacccggtcaaaccaccgatgtattgatcaccggcgaccagccaccttccccctactacatggcggcgcgtgcgtaccaatctgcccaaaacgccgcgttcgacaacaccaccaccaccgccatactcgaatacaagtcacctcatcacagtaatcattctcaccatcattccaaaggagcactgaagaaaaaaaccaaaccgatcatgccctcactccctgcctacaacgatacaaacacagtcactgccttcagcaaaagctttagaagccctagaaaagttgaagtccccgctgaaatcgaccagagcctgttcttcactgtgggcttaggaatcaacaagtgccccaaaaactttggaccaaagaggtgtcagggacccattaatgggacgaggttcactgcgagcatgaacaacgtgtctttcgttctcccgaacaacgtgtccatcttgcaggctcaccacctcggaatccccggagtgttcaccactgattttccggggaagccgccggtgaagtttgattacaccggcaacgtgagtcgttcgctgtggcaacctgttcccgggacaaaggcacacaagttgaagtttgggtccagggtgcagattgtgttgcaggacactagcattgttactcctgagaaccaccctatccatcttcatggctacgatttctacatcgttgctgaggggttcggaaacttcgacgccaagaaagatacggccaaattcaaccttgttgatccacctttgaggaacactgtggccgtgcctgtaaatggatgggctgttattcgatttgtcgctgataaccctggtgcctggcttttgcattgtcacttggacgttcacatcggatggggtttggctacggtgttgttggtggagaacggagttgggaagttgcaatccatagagcctcctccgctggatcttcctctttgttaggatatcatttcaaaataatcgttggtccccaacaattggagttttgcagtttcattttcttagtttggaagctggtttatgtttgcattttgggagggttttttttttgcttcattgcttgttttgattctacgttctttttatagacagataaattgggtttgaaacctaggaaaggtggtgatgcggttttaacccaaatatataccatctaaatagtcatagcccaaccagttaaattgatgatgttatttttccctcagagttcatgttacaaacagattgcaagttttgaatataaatatatcacctggattttattttttttgttac

SEQ ID NO: 11848 - DNA, 2074 bp, Glycine max
  Clone ID: 701134503_FLI
ggtgttgttactgctgctcttttctcttttcttttctctttagttctctcttcccctttctttttctttttcttcttcttctgagcttgtttaagcttttcttccattaacatattatcacaatgtgtggtattcttgctgttcttggttgttctgatgactctcgagccaaaagggtccgcgtgcttgagctctctcgcagattgaagcaccgtggccctgactggagtgggctccatcaacatggtgactgctttttggcacatcaacggttagccatagttgatcctgcttctggggatcaacctctctttaacgaggacaaatccgtcattgttacggtaaatggagagatttacaaccatgaagagctcaggaaacagctgcctaatcacaacttccgaactggaagtgattgtgatgttattgcacacctgtacgaggaacatggagaagactttgtggacatgctggatggtatcttctcatttgttctactggacacccgtgacaacagttttatagtggctcgggatgctattggggtcacttccttgtacattggatgggggttagatggctctgtttggatttcatcagaaatgaaaggcctgaatgatgattgtgaacactttgagtgttttccacctggtcacttgtactctagcaaagaaagagggttccgcagatggtacaatcctccttggttctctgaggctattccatctgccccttatgatcctcttgttttaagacacgcctttgagcaggcagtcataaaaaggttgatgactgatgtgccttttggtgttctactctctggaggtttggactcttctttggttgcatccatcacttctcgttacttggccaacacaaaggctgctgagcagtggggatcaaagttacattcattctgtgtaggccttgagggctcaccagatttgaaggctgcaaaagaggttgctgactatctaggcactgtccaccatgagtttaccttcactgttcaggatggaatagatgccattgaagatgttatctaccatattgaaacatatgatgtgactacaattagagcaagcacacctatgtttctcatgtctcggaagattaaatcacttggtgtcaaatgggttatctcaggagaaggatctgatgagatctttggagggtatttgtacttccacaaggcacccaacaaggaggagttccacagagaaacatgccgcaagatcaaagcacttcaccaatatgattgcttgcgagccaataaatcaacatttgcttggggtctagaagcccgtgtaccatttttggacaaggcgtttatcaatgctgcaatgagtattgaccctgagtggaagatgataaaaagagatgaaggacgaattgagaagtggattctgaggagagcctttgatgatgaagagcatccttatctgccaaagcacattttatacaggcagaaagaacaattcagtgatggagttggctatagttggattgatggccttaaggcccatgctgcaaaacatgtgactgaaaaaatgatgcttaatgctggtaacatttacccccacaacaccccaaaaaccaaggaagcatattactacagaatgatctttgagaggttcttccctcagaactcagctaggctcactgttcctggaggagcaagtgttgcatgtagcacagccaaagctgttgagtgggatgctgcttggtctaacaaccttgatccctctggtagagcagcacttggagtgcacatttcagcctatgaaaaccagaacaacaagggtgtagaaattgagaagataatacctatggatgctgctccccttggtgttgccatccagggctaatacaaagatgtgacaaagaataatttgggcgacaatgaagataactaagctaaaggtgaatgaaaaatttgcctgcagtgtaatttcatctgggcaaagcttttatagtttatagttataaggctttctaaaaagtgttgcgtattgtattatcttgaatgctgtgatttgaagtcttaataaaagtgtttcctttatcagttcat

SEQ ID NO: 11849 - DNA, 2271 bp, Glycine max
  Clone ID: 701134613_FLI
cttctaatgccatcatccaatgcacctcttcttcttcgtttgagtatgacgtgtttgtgagcttccgcggtgaagacacacgcaacagcttcaccgcttttctttttggagctctgaaaaaacaaggcatcgaggccttcaaagatgataaagacatcaggaaaggcgaatccatagcaccagagctaatacgagccattgaagggtctcatgttttcgttgttgtcttttcaaaggactatgcttcctcaacttggtgcctgcgtgaactagcacatatctgggattgcattcaaacatcacacagacctcttctgcctattttttatgatgttgatccatcacaagtgcgaaatcagagtggagactatgagaaagcctttgcccaacaccaacaaagttccaggttccaagagaaggaaattaaaacatggagagaagttctggaacaagtagccagtctctctggttgggatatcagaaataagaacacttgttaagctttccaatgaattaggatatcttcgttgggaaaagtatccttttgagtgtttgccaccaagttttgagcccgacaaacttgttgagttgattctacctaaaagcaacatcaaacaactttgggaaggcacaaagcctctacctaatttgaggcgtttggatctctctggctccaaaaatctaattaaaatgccatatattggagatgccctatatcttgagagtcttgatctcgaaggatgtatacaactcgaagagatcggtctgtccattgttctttcaccaaagcttacttctctgaatttgagaaattgcaaaagtcttatcaagctgccacagtttggagaggacctaattcttgaaaagctacttctcggaggatgtcaaaaactcagacacattgatccatccatcggtcttctaaaaaagctcagaagattgaatttgaaaaactgcaaaaatctagtaagcttacccaatagcatactaggcctcaattctcttgaagatctgaatctctctggctgttcaaaactgtacaacaccgagttattatatgaactaagggatgcagagcaatcgaagaagattgatatagatggagctcctattcatttccaatcaacatcttcctactccagagaacataaaaaatcagttagttgcttaatgccttcctccccaatatttccatgtatgcgtgaacttgatctaagtttctgtaatttagttgaaatccctgatgctattggaattatgtgttgcttacaaaggctagatttaagtggtaacaattttgctacactgcccaacctcaagaagctttccaaactggtctgtttaaagttacaacattgcaagcagttgaaatctttgcctgagctcccttcacggatttacaattttgatagactaagacaagcaggattatacatttttaactgcccagaattagttgatagggaacgctgcactgacatggctttttcgtggacgatgcaatcgtgtcaggtgttatacatatatccgttctgccatgttagtggaggtgttagtccaggaagtgaaataccaaggtggttcaataatgagcatgagggaaattgtgtaagcttagacgcatgtcctgttatgcatgaccataattggattggcgttgcgttttgtgcaatattcgtcgtacctcatgaaacactctcagcaatgtgtttttcagagacagaaaggatctaccctgattttggtgatattctagtggatttttatggagatgtagatctagaacttgttttagacaaatcagatcacatgtgcctattccttgttaaacgaatggatttcatttatcattttcatctcaagcacaaatatcttggcagattggttttggaatgtgatgatgagtggaaagagtcatatgcggaggtgaagaaatacggatatcgctggctatatgaagaggatatagaagggccatcaaatccgttggctaggaagagcaaatttgggggaaatgaagaaaaagtgagcagaagggagaaaagatgatgcaagctgctcccaggaaaagacaataaagttgaatgttagggtgtagaatcatcatttcttctctcattttattcatttcagtcgtccttcaaattttgaataagcttggtggcgtaaaatcaggtttttggttgttatgggatgcttgtgtagctgtctttgttggttaagaatattgtttttttttccttttttggtttgagtaatgttaacagatgc

SEQ ID NO: 11850 - DNA, 1024 bp, Glycine max
  Clone ID: 701134693_FLI
gtccctttctgttctcttcactcttggtcttgcgagagaaagccatgccagagacgaagatttttggcatgctgtttggccaaacactcccattccaagttcattgcgagatcttctaaagcctggccctgcaagtgttgaaatcgatgatcaccctatgcaaattgaagaaacacagtacccgaaaaccttcttctataaagaagaccttcatccaggcaaaacaatgaaagtacaattcagcaagcctccctttcaacaaccatggggtgttggtacatggttaaaggaaattaaagacactactaaagaaggatatagttttgaagagctatgcatcaagaaagaagccattgagggagaagagaagttttgtgcaaaatccttgggaacagtaattggttttgccatttcaaagctgggaaagaacattcaagtactttcaagttcctttgtcaataagcaagaccaatacactgtggaaggagtgcagaatcttggagacaaagcagtgatgtgtcataggctaaatttcagaactgcagtattttactgccatgaagtccgtgaaacaacagctttcatggttccattggtggctggtgatggaaccaaaactcaggcacttgctatttgccactcaaatacttctggaatgaatcatcaaatgcttcatcaacttatgggagttgatcctggaactaaccctgtttgccatttccttggaagcaaggccattttatgggtacccaatttatctgtggacactgcctatcagaccaacattgttgcttaattagtccatgcatcttgagcaccatgagaatgagattgtgtataaaataaattatcatgtgctgtgtgttgtgcaagtactaccttctctagctagattgctagagctagaatttcaacctacctatgtgtactgataagatctgcttccctacttaaagagagcatcatcctgtgatcagtgtgcttcgtattctctctctctatatatatatggtaaaaagtggtt

SEQ ID NO: 11851 - DNA, 973 bp, Glycine max
  Clone ID: 701134785_FLI
tctctctctgcgatctgtttcgtgttgtagctagctcctcgaaaatgctggcacgcctcgccgcgagtcgcttcaacgagatccgtcagattttccgtcagccttctagggctttctcaaccgctctgaactaccaccttgacacaccggacaacaaccctaaacttccatgggaattcaccgaggccaatcaagcaaaggttaaggagattttgtctcactatccatccaactataagcaatctgctacaattcctcttttagatcttgcccagcagcagcatggaggttggctacctgtttctgcaatggatgcggtagctaagattgtagaggttcctcccatacgggtgtatgaggttgccacattttactccatgttcaatcgagctaaggttgggaagtaccatctgttggtttgtggaacaacaccttgtatgataagaggttcacgaggaattgaagaagccttattgaaacacttgggagtgaagcgcaatgaagtaacaccagatggtttgttttctgttggagaaatggaatgcatgggatgctgtgtgaatgctcctatgattacagtggctgattattcaaatggatcagagggatatacttataattactttgaagatgtaaccccagagaaagtagttgagatagtagaaaagctgagaaagggtgagaagccaccgcacggcacccaaaatccccgccgaattaagagtggacctgaaggagggaacactactttgttaagtgagcccaagcctcctccctgccgtgacctggattcctgctgaagtgtgatatactttttgccttcaataatgtgaggcttgcatgtgttggagcttgccttaattgaaacattgtcagattgttagatgctcaaccaatttttgtatcaaccgtcctggatggtttccatttcaaaaatttgttccataatcgccataaatttcttggcatgttc

SEQ ID NO: 11852 - DNA, 1747 bp, Glycine max
  Clone ID: 701134884_FLI
gttgttgtgtaatgatactcattgtcaccaccaacacgctttcactttactgaacaacgacttcatcttcactcttccttcaaatttccaacaagaaagtttgttcaactgtccctttattggcgttagctatgctacctactggagcaaaagagacccaattacgtgagaacaacagccagaaggtccatcctcaaccaatggaagaggccatgaatcagaatccagaagcaatggaaaccctaatatctaaagtttttacaaatatctcttccttgaagtcagcttatatccagcttcaagctgctcatactccctacgaccctgataaaatccacactgctgataaacttgttattagtgagctgaaaaatctgtctgaactcaagcatttctacagggagaacaacccgaaaccagtgtgtgtttctccccaagactcacgtttagctgcagaaattcaagaacaacagagccttcttaaaacgtatgaggtcatggtgaagaaattccaatctgaaatccagaataaagattcagagatccatcaattgcagcagcagatcgaagaggctagacagaagcgagcaaaactagagaaaaatctgaagcttagaggtttgtcaaccaaagaatcggaagatgaaattggctttttccctgtcgatctaactccagatctcttcacctctgccgtggaagcagctgcaaaagccattcatgatttttctaaacctttgatcaacatgatgaaagcagctgggtgggaccttgatgctgctgccaactcaatcgaacctgatgttgtttatgcaaagagagctcataagaaatatgcatttgagtcttacatatgccaaagaatgttcagtggctttgagcaggaaaacttctctgtcaaatcagacaatattactgtaactaaagagagcttctttcaccagtttctcgcattaagagagatggatcccttggacatgctggggcaaaatccagattccatttttgggaaattttgcaggagcaaatacttggtggtagttcatccaaagatggaggcatcattcttcggaaatttagaccagcgaaattatgtgatgggtggagggcatccaaggacccctttttaccaggcttttcttaaactgaccaagtcaatttggcttttacacaggttggcttattctttcgagccaaatgtcaaggtatttcaggttaaaggagggagtgagttctctgatgtttatatggaaagtgtggtcaagaatttgataatggatgacaatgatgaaaaacctaaagttggtttgatggttatgcctggattttggattgggggaagtgtgattcagagtaaagtctatctctctggtatgaaggtggctgaatgattcctgaacacactcaagacttcagaaaatgcatagttgattgtatgtggtttgtttgaattgttgtttctttatcttgtaagataatgctgttgtctgtaatttttaatatcctttttagtggttgtaagagtaaatgagccctttaagcttgtttacattcaaggcccctcttgtattgtgaaaatatcctgcacttgaattctagtgtttgtgggagaggggaataggaaggtatataacaaatgttccttaatttaggagtttcaatgctttggggagaagcaatgttctggtgtatgagttttccacagttgagggcactaaactaatcaacaagtgatgcattttcactt

SEQ ID NO: 11853 - DNA, 1042 bp, Glycine max
  Clone ID: 701134909_FLI
gcttggtgatgtccctttctgttctcttcactcttggtcttgcgagagaaagccatgccagagacgaagatttttggcatgctgtttggccaaacactcccattccaagttcattgcgagatcttctaaagcctggccctgcaagtgttgaaatcgatgatcaccctatgcaaattgaagaaacacagtacccgaaaaccttcttctataaagaagaccttcatccaggcaaaacaatgaaagtacaattcagcaagcctccctttcaacaaccatggggtgttggtacatggttaaaggaaattaaagacactactaaagaaggatatagttttgaagagctatgcatcaagaaagaagccattgagggagaagagaagttttgtgcaaaatccttgggaacagtaattggttttgccatttcaaagctgggaaagaacattcaagtactttcaagttcctttgtcaataagcaagaccaatacactgtggaaggagtgcagaatcttggagacaaagcagtgatgtgtcataggctaaatttcagaactgcagtattttactgccatgaagtccgtgaaacaacagctttcatggttccattggtggctggtgatggaaccaaaactcaggcacttgctatttgccactcaaatacttctggaatgaatcatcaaatgcttcatcaacttatgggagttgatcctggaactaaccctgtttgccatttccttggaagcaaggccattttatgggtacccaatttatctgtggacactgcctatcagaccaacattgttgcttaattagtccatgcatcttgagcaccatgagaatgagattgtgtataaaataaattatcatgtgctgtgtgttgtgcaagtactaccttctctagctagattgctagagctagaatttcaacctacctatgtgtactgataagatctgcttccctacttaaagagagcatcatcctgtgatcagtgtgcttcgtattctctctctctatatatatatggtaaaaagtggttatctcgtg

SEQ ID NO: 11854 - DNA, 2398 bp, Glycine max
  Clone ID: 701135234_FLI
tgtctctcttctcttttgttctcgtcaatatcaccactcatctccacccacaacctagataacatctctctaaatttctcatcttctcctctgcccccatcaccttgatctgtctgtctatacactcattgtttgacaaaaaacaaaatataacactgggaagttttgtcatagctgagagctgactctagctagaggataataagattacaagagagaggaattgtttttgattggatccacaaaattcaagatgactccagttaatttggcaggccagtttggtgacacgacatacactaaggtgtttgttggaggcttggcctgggagactcaaaaggagacaatgaagaagtattttgagcaatttggtgagatcttggaggccgttgtcatcactgacaaagctactggaagatctaaaggctacggatttgttacttttcgtgaaccagaagctgccatgagagcttgtgtggatcctgctcctgtaatcgacggcaggagagctaactgcaaccttgcttctttgggtgtccagagatctaagccttcaaccccaaagcatggaggagcagggaggaactttagagtaatgggttctttccagacaggatttggagggggagtgggatcagcttttccttcagcagcaaccttccctcattacgccatccagcaagggataccttataatgtttatgggtactctccttactcgccggattacacttaccctacgagctactatggtgtgtatggaggagcaacagcacagtacccagtttatggaagtggacctgctgcagctgcaggagggatgatgagcggtggtgcagcgttctacccatatctgcagtacggaggagaagggagtggcggcggcggtacttccggacagggttatggtgtgaactaccctcctcaggctcatctttttcagtattctcccattgcttccaccgctggctatgcccagcactatggtacacctactatgtctcttgctccttcccctgccttgcaatcaggcgtgaccatgcctcttcaagctccaattcctcatcgctagagactcatcatctcaaactagctatgtcaaaacttcccagttgctcctgctccttgaagtctctcttccactcatcaacctttgccctaaccatggtgctctctctctctcacacacccacccactctttcactaacacttaaacaaagtccatcaatggcatttggactttttccagcataagaagccccccgtaggggctcaaatgtttctcctcgtttggagagtcatgcattcctttttctcaacataaagaagactctgttgcatcttcaatgaaattaaggttccttggaagaagagaaccaagccaacacaaagctatcggatatagctgacttgttggaaaaaaaaaataattaagaacagcaaagcttggcccttggaaaggccaagcccaaacgaaccatcttcttaacttgggcccaagacgggctaagtaaaagtacagaatggtttcaaaatttgtaaatggcagatcacagatagctagctcatcaactagaaattttaagttagttctgcaaaaataggtattccctccaagcaatgctaatcacctctggatgaagaggaacttttagcaatcaatatcatggacattggatgtcccagcttttttgtatggtaacatctagctagtcttaggctttagtgttaggatcagtcatgtcttcataaatatgtttttgtcaattttcagaaaaaaaggggtttaaccaaccaaccaaccaattaacaatcttccctttgggtaaggggaggcaacaactaactgctgttttttatcctgtaaattcaatgaggctaaactatgggagtttaagcccaatccactaatctttaggagggatagtgttttaatttcccgcttagcataagtagtacatttcatcatcatcttgagaactacgtcaatggatgtggtactcaaaacacttgcatgtaaccctgggagatattttggttcccttgggtacttcacttactcaccaaccatggttaggacataggtgaatctcatcactctctttctctcttctccctgctttctgtctggcaacttttacatcgagatggaccttgatactctattaattatatgtttaagcctatatggtttggattgtaattaggaatactaaagtaggaggatttcattctctatccatgctggatgagaatggatttgctactcatcctactatgcctttaatttgatactatgcttgcttctattcaacctatgtcaagataagcaaatcaagttaatgcttcgagtaatgttcaacttttttgttatatttcaatcaaggatattttatt

SEQ ID NO: 11855 - DNA, 295 bp, Glycine max
  Clone ID: 701135235_FLI
atttaatggcaattgggctcaaatgcaagaggcccaacagtgtagagcacaaaaggaagcctcttgcatttgagccaattgcattaaatgcaagaaattatggatatatcatatttcaagttattttaagttatatgatagagctgtgttgtctctaatttgccttctttctggccttgttttgtttgtcttcatttttatttgtggttttgcgtttgtaggctctgggcttgaattgatcatacacaataatgagtgacagtacgtatgaaatggatagttctagtatgaaatt

SEQ ID NO: 11856 - DNA, 1645 bp, Glycine max
  Clone ID: 701135290_FLI
tagcagtggagctcataaaaaagggtcatgcttatgttgatcatcagacacctgatgagataaaggagcatagggagaagaaattgaacagtccttggagagacaggccaatttcagagtcattgaagctctttgaggatatgaaaaatggcagtatagaagaaggaaaagccacacttagaatgaagcaagacatgcagagtgataactacaatatgtatgaccttattgcatatagaattaagtttaccccacaccctcatgctggagacaaatggtgtatctatccaagttatgattatgcacattgcattgtggattctctagagaatatcacacattctctgtgtacacttgaatttgagacacgtcgtgcatcatactattggttgttgcatgcgttaagcatttaccaaccttatgtatgggagtattcaaggttgaatgtctctaacacagttatgtcaaagcgtaagctaaatcgtctagttacagagaagtgggttgatgggtgggatgatcctcgtttgatgacactagctggtttgcggcgtagaggcatgactccaactgcaatcaatgcttttgtacgaggaattggaataactagaagtgatggcactttgatttctgtggaacgccttgaatatcatgttagggaagaattgaacaaaacagcttctcgtgcaatggttgtcctacatccactcaaggttgttattactaatcttgaagccaactcagtaattgaggttgatgcaaagaaatggcctgatgctcaagctgatgatgcttctgctttctacaagatttcattttccaatgttgtatatattgaacattcggacttccggatgcaagattcaaaagattattatggccttgctcctgggaaatctgtgatactcagatatgcatttcctataaagtgcactgaagttattctagctgatgataatgagactattcttgagattcgagcagagtatgatccttcaaagaagaccaagcctaagggggttctccattgggttgctcaaccttctcctggagttgatccattaaaggtggaagtcagattgtttgagaggctgttcctattagagaatcccgctgaacttgacaactggcttggcgatttaaacccaaattccaaagtgataattcccaatgcatatggtgtgtcttccatacagaatgcaaaagttggggacaatttccaatttgaaagattaggctattttgtggtcgaccaggactcgacatcagaaaaacttgtttttaataggactgtcaccttaaaggacagctatagcaaaggtggaaaatagggttcctgaatattgcttagaaataacaaggtgggggacaggcaggtctggggttaatacttgtttaaatggctacttataatgcatagttttttctttgagggggtgggggggttatgtacaaacacatttactggccacttagccatgtacattttctcaagggattactcaatagttccccagttatttgattaacttttgtttggttggttttgtagtttgaaggttatatttgtatactctcaatgaagtagtagcaacattgctgttattttcctacgatttttgtgagtgtaaaattagtattgaag

SEQ ID NO: 11857 - DNA, 2856 bp, Glycine max
  Clone ID: 701135316_FLI
gggacagtgggggaagttgtaggggtttcagggcacgcattctatcgctgtttctctcgaatcaacaaaacgccaccgtttcattgatctacttcctccaaggccaggtctccaagaattggtaccaattcaagctgcaaatatacttgaacttcaacttatcccacattctccactctcaatggcttcaactctcaaatctggcggaattcatacaggggcaatcaatgatgatttatacaaggaattgtggcatgcatgtgctggtccccttgtcactctccctcgtgaaggggaacgagtctattactttccacaaggtcacatggaacagcttgaggcatctatgtatgagggattagagcagcagatgccttccttcaacctgccttctaaaatattatgtaaagtggtcaatgttcatcttcgagctgaacctgaaacagatgaagtatatgcacagataactttgcttcctgaagcagatcaaagtgaggtgaccagccctgatgatcctctgcctgaatctccgagggtcaagatccattcattttgcaagacacttactgcttctgacacaagtacccatgggggtttctctgttcttcgaagacatgcagacgattgtctgcctccactggatatgtctcagcagccaccatggcaagaattggttgcaactgatttacatgggaatgaatggcattttaggcatatttttcgagggcaacccaagcgccacttacttaccactgggtggagtgtctttgtcagttccaaaaaattagctgctggtgatgcctttatattcttaaggggtgaaaatggagagctgcgagttggggttaggagggtcatgagacagcaaagcaatgtgccttcttctgttatatctagtcacagtatgcatcttggtgttctggccactgcatctcatgccattgccactggaacactgttttctgtgttttacaagcccagaacaagccggtcagagtttattgtgagtgtcaacaagtatctggaagttcagagtcataaactctctgttgggatgagattcaaaatgcgatttgagggtgatgaaattcccgaaagaaggttcagtggcacaattgtgggtgttggagataataaatcatcgtcggtctggcctgattctgagtggcgatcattaaaggtgcaatgggatgaaccatcctcaattttgcgtcctgacagagtttcatcatgggaattggagccacttgtgtctaccactcttgcaaactcgcagccaacccaaagaaacaagagggcacggcctctcattctaccttctacaatgcccgattcttctttgcaaggtgggtttgctgggttggttgtgcagaatttctttgtcattctgctgcccattctgtttttctacataatcatctttctttgtgcaccaggcatatggaaatcatcagttgaatctacctctttctcttattgtgacccccaacaaggacgtggcctctatccatcaccaaagttcaattcttctgcaactaactttattggttttagtgggaatagctctgtgggatctccttccaacaaatcaatatattggtctaataggatggaaaataacttggaatctatttcagctatagctcttaaagaagctggagagaagagacaaggcactggaaatggctgtagactctttgggattcagctacttgagaattctaatgcagaaggaaatctacaaacagtcactttgtcaggaagggtgggtgatgataggtcggttccatctttagatgctgagtctgatcaacattctgaaccatcaaatgccaaccgatctgatattccttcagttagttgcgatgctgaaaaatcatgcctgcagtctccccaggagtcacaaagcaagcaagttcacatgcaaggaatggctgttgggagggctgtggatttaacacgatttgatggatatgaggatcttctcaggaaattggaagatatgtttaacatcaagactgagctctgtgggtccctaaaaaaatggcaagttgtctacactgataatgaagatgatatgatgatggttggagacgatccgtgggatgagttctgtagtgttgtgaggaaaattttcatctacacagcagaggaggtgaagaagctttcaccgaaaataagacttccaatgaatgaaaaagttaacccaagcaagcaggattcagaagcaatagtgaatcctgaggaccagtcatctaatatggggcccagctgctagaagtcgtatgaattccagttccagtatatcctagttgttatgaatgcaataaatgttggtgtggagagaggcgataatgaactaaaggtggccggccaatactaataggagcatgcatatcacttccacttgtgtattgtattgtattgtattgtattgtattgtattgtattgtattgtattgtgcagctaggctggctggctggcatgacgtcagcaagcaagaatcgacgcagagggttgttttgagatactgctgtttgatcttgccttgccttgaatgaaagatattgtgggttttctatttcttctacggctcggttatcttatcgccgggagggagtgtagtggtccttgctcattcggttttgagttggccgcaagcaccaacatgtatgtctttacttaatatcatgccatgcatgatatgatctttttttttttgttttttatgagaggggtgggtattttcttttgtaactcactcaatgtgatgcatgcctttttgtacagaagtatttattattatcttcgaatgctatttatatgtacgaggcataaccctccgttctcccgct

SEQ ID NO: 11858 - DNA, 1056 bp, Glycine max
  Clone ID: 701135508_FLI
caagaatggcacttcgttgcttggtgatgtccctttctgttctcttcactcttggtcttgcgagagaaagccatgccagagacgaagatttttggcatgctgtttggccaaacactcccattccaagttcattgcgagatcttctaaagcctggccctgcaagtgttgaaatcgatgatcaccctatgcaaattgaagaaacacagtacccgaaaaccttcttctataaagaagaccttcatccaggcaaaacaatgaaagtacaattcagcaagcctccctttcaacaaccatggggtgttggtacatggttaaaggaaattaaagacactactaaagaaggatatagttttgaagagctatgcatcaagaaagaagccattgagggagaagagaagttttgtgcaaaatccttgggaacagtaattggttttgccatttcaaagctgggaaagaacattcaagtactttcaagttcctttgtcaataagcaagaccaatacactgtggaaggagtgcagaatcttggagacaaagcagtgatgtgtcataggctaaatttcagactgcagtattttactgccatgaagtccgtgaaacaacagctttcatggttccattggtggctggtgatggaaccaaaactcaggcacttgctatttgccactcaaatacttctggaatgaatcatcaaatgcttcatcaacttatgggagttgatcctggaactaaccctgtttgccatttccttggaagcaaggccattttatgggtacccaatttatctgtggacactgcctatcagaccaacattgttgcttaattagtccatgcatcttgagcaccatgagaatgagattgtgtataaaataaattatcatgtgctgtgtgttgtgcaagtactaccttctctagctagattgctagagctagaatttcaacctacctatgtgtactgataagatctgcttccctacttaaagagagcatcatcctgtgatcagtgtgcttcgtattctctctctctatatatatatggtaaaaagtggttatctc

SEQ ID NO: 11859 - DNA, 852 bp, Glycine max
  Clone ID: 701135882_FLI
ggctgagctacctagctcagaagcatcatcatcagcttccactcgcaagcactcgcattccgtctacagaggggtccgaatgcgggcctgggggaagtgggtatccgaaatccgcgagcccagaaagaagaaccggatctggctcggcacctttgccaccgccgagatggccgcgcgtgcacacgacgtcgcggcgctcgccatcaaaggcaactccgccattctcaacttccccgaactcgcctcctccctgccccgacccgactccaactcgccaagagacgttcaggccgccgccgccaaagccgccgccatggaggttaacgatgctccgacgacgccaacttcgtcgtcgtcggcgtcactgtcgcagtcgtcatcttggtcgtcattggcggttagttcttcctccggcgaagacccgtcgacgccggaggagcttggggagatagtggagctgccgagtctggggacgagttttgaaatacccgacccgagtggggagttggtatttttcgacccgtggccgtattctcaggcgtggagtcacggcatttatgatgagagtgagagttatttttttggggatcagatttcaatgcaggactcagagacagagagcatggttctttgtggctttgcctttgaggcttcattgtggcagcattaatacatgggtgctgttaacatgtgcccttagggcacatgttaatgtgtaataaatgatggttggtccccatttattatattttggaaaaaacagcatcataaatgtgggaccacttattatactttgaaagttaattttctctttgtccaaaataaaataggtgggaccatgagccatttatt

SEQ ID NO: 11860 - DNA, 1042 bp, Glycine max
  Clone ID: 701136167_FLI
agagaaggtaggtaggtataccgttgaggggtgcaagaagcaatggcccgcatgttaaactcgggggcccatatagaaagatgtggtttctgcgtctgcgaatgagaaagaggacgataaaggtggaaccaaacaaacaaacaaaacgaacgaagacagcgaaggagctacgctgcgagatttagaaattgaatccctaatttcgaggttccgactcctgtggagtgatcatatagcgaattttgtgttagcgaatcaatttgcagagtaaggaataaggatgggaaaaaaccaagcctacaaagctatgcagagagccaggctcggcggcgcctccgccggccccgacgaggttgaagacggcatggtggatggttcatttcattcaccagaatggcatgcagctcgtttggctagccttaacacctctcacaccattacctgggaggagtacaaaatgaagcaaaaggaagaagaattgagaaaaggggaattggaagcagatgcagataggatgatgagagagtacagagctcaactagatgctgaaagggctcgtaagctttcccaaggaagaaatcactctaatagtaagtctaaacatgtgaaagataagagggacaaaatttcaaagaagcacagcagcagaaagagaaagcattcaagaagatcttctgcatctagctcctcttcgtcatcctcagactcttccagtagcgatgaagaagaaagagggtcaagaagatccaagtccaggtccaagagatcaaagaaggaaaagaagtccaagtcaagaagcaaggatgctggaagcgctagtgaagacgagggtccagttcgcctttcaagattctttgggaacgtcaagagtgaatagtgcttgaatacttggttgtgtatcataaaaaaatcattttatgcaaatagtaaattatggcaagctttacttctatgatcaacgtattctttctttacagatttgtaattttgtatgtcattttgtattctcttctctttcaaaaagattattttgtctttgatt

SEQ ID NO: 11861 - DNA, 638 bp, Glycine max
  Clone ID: 701136208_FLI
cttgctctttctctgtgtcgatggcgggaaaaggagggaaggggcttgtggccggaaaaccacggcagcgaacaggacaaagacaaggataagaaaaggcctgtctctcgttcatcccgtgctgggatccagtttcctgtgggtcgtatccataggcagttgaagcaaagggtgcaagcaaatggacgtgtgggggcgactgctgctgtgtacttggcctccattctggaatatctgactgctgaggtgctggagctggcggggaatgctagcaaagatctgaaggtgaagaggatcacaccaaggcacttgcaactcgctatcaggggagacgaagagcttgacaccctcatcaaagggaccattgctggtggtggtgttatccctcacattcacaagtccttgatcaacaaagctgccaaagaatgaaaatcaaatgcctctttgtttctcctattatgtgttcctttatgtttatgtagtagttagtgtagtaggccttctttactgtttatgaacagatgttaatgttattgtgtaaatggtcattctattggcttttaacttgcctgttgtgatacacctgggattgtaatgctgctggattttaagagttctttgttttagctttggtgctt

SEQ ID NO: 11862 - DNA, 1102 bp, Glycine max
  Clone ID: 701136258_FLI
ggtggattcccaagaaaagaaggtatggagaggaaggatgtgatgactaagaacgtctccatttacaagtcccaggcttctgcccttgaaaagcatgctgctgccaactgcaaggttcttgttgttgctaacccagcaaacaccaatgcattgatcttgaaggaatttgctccatctattcccgagaagaacatttcttgtttgactagattggatcacaacagggcattgggccaaatctctgaaagactgaccgttcaggtttctgatgtaaagaatgtcattatctggggcaatcactcatcaacccagtatcctgatgttaatcatgcaactgttgcaacctcagctggggagaagcccgtccgtgagcttatagctgatgatgcctggttgaatggggaattcattactactgttcaacaacgtggcgctgcaattatcaaagctagaaagctttcaagtgcactatcagctgctagtgctgcttgtgaccatattagagactgggttcttggaactcctcagggcacttgggtatcaatgggagtatattctgatggttcctacaatgttccagctggacttatatattcattccccgtcacttgtgccaatggggaatgggcaatagttcaaggactttccattgatgagttctcaaggaagaagttggacttgactgcagaagagctttctgaggagaaggcattggcttactcatgcctaaattagacaccattgctttttgtctactgtccttgttagtaggttcccatgttttgcctatagaagtgtagcttcaattttgaataatgctccttctaagatacaaaggaactatcactggagaagagtctgtttttcattggaattacttgtatttcaacatctaatccttttaggaggaggatatttgagcccatgggccgcatattgaattttggattagtcctaattttatgtgcgttagtgcccccggttgaactttttggtgtgtttgtggtggctgtacaagatttttgatgtatgtgggatgcacaaagcgtgcaaacatatacttctaggccttgtggtcgagtattatgcactagtattacgc

SEQ ID NO: 11863 - DNA, 526 bp, Glycine max
  Clone ID: 701136703_FLI
catctgcaccctcctatcccacagtatttggcaatattccagtagctccttcaacctcaacctcacctcaactcacatcaacttttcaacttctcatcattggatttatgatatgtgcgcacttcgcttccttaatgtgaaattaaaatgtccatgtctttgttgccatcgagagcgtagatcaattgactcaagattattcaagcttaattggtaatgttgaggtggaattttggaaatgcatatatgtcaaagagaaaactttatcaagcatcatgatctacttgattcgaacaagatagatacactgtctttacctaaaaaaatgtccatgtcttttattttttcttgcattttttgtcaatgctcaatacgtctccatgttgattttttttttctttttcagttgacccgaatacgggcgtacccagtacctatatattatattataattcttttagcaatgtaattctttgtgattggagatttccgtaaaacagcgtcaattcttcatttattaaggagg

SEQ ID NO: 11864 - DNA, 1559 bp, Glycine max
  Clone ID: 701136709_FLI
cgcacagtgacacatacataaaaaaaaacgaaacacaaacagaaacagagttattggaaaacacgaaacactaattgatttgaattcgattcgattgaggattgctgtttgggtgtcttgatggtgtcggtgaacccaaaccccgctcaaggcttctacttcttcgatccctccaacatgacccttcccggcgtcaacaatcttccaccgccgccgccgccggctccggctgctcctgccgccgtcgaggatccgaataagaagatccggaaaccctacacgattaccaagtccagggagagctggaccgagcaggagcacgacaagtttctagaagctctccaattatttgatcgggactggaaaaagattgaagcatttgttggttcaaaaacagttatccagatacgaagtcatgcacaaaagtattttcttaaagttcagaagaatggaacaagtgaacatgtacctcctcctcggccaaagagaaaagctgctcacccataccctcaaaaagctcctaaaactcctactgtatcccaagttatgggcccattgcaatcttcatctgctttcattgaacctgcatacatttatagcccagattcttcatctgtgcttggaactccagttactaacatgcctttatcatcttggaattataatactacaccacaaccaggcaatgtgccacaagtgaccagagatgacatgggattgactggagctggacaagctgctcctcttaattgttgctacagcagtagtaatgagagcacccctccgacttggcctcgtagcaaaaggattaatcaaggtgaccagggcaagccaattaaagtaatgccagattttgcacaagtctacagcttcattggcagtgtattcgatccaaattcaactaatcacctacagaaactacaacagatggacccaataaatgtggaaacggtattgttgttgatgacaaatctctccgtcaatttaatgagtcctgaatttgaggatcataagaggctgctttcatcatatgataccgactctgacaagtcgaagtttgttaatatttgcagcaaatccttcaccaataaatccgagagtgctgttttgtctgcttaggatgtagccagtggtttgccctgaagagtgttttcaatatattttctgaatgcacataaagtggtggagcaagaaagggaaaagacaaaggttttgctgaaaggaagtgtagtatctagatgcttgcatgtgtatataactcgtatatataagtatatgtataccttttggattgagtttttatttgttttaggcactgttagatcgtagttatgcctgttttgtgtatatcttttgaagatgattgtccttggcatgcaggacaatgagagtccagttaggtcacttttggaggctatactctgtacagtctgttgagtgcttttgtgtgttatgctgtgaagcttagaattagtataaaagaacggtgttaggacttagggggtgccgtctgccttgtatatataaagcaataaaacagtgtagataaagtttcttct

SEQ ID NO: 11865 - DNA, 1208 bp, Glycine max
  Clone ID: 701136723_FLI
aaaggggtggctctgatgatgatagcaatgagaataacaacaacaacaataacggaagcagtggcaagattgtgaattctaatgaggggcagagcaagcccaagcgccagatgaaaaccccttttcagcttgaaaccctcgagaaggcttatgctgtggataattacccttcggagacgatgagggtggagctgtctgagaaattggggttgtcagatcgacagcttcagatgtggttctgccacaggaggttgaaggacaagaaggacttgccgtctaagaagccaccacggaaggtgctggcagagccattgccggattcgccaagggacgaccccaggttgagccttgagcttgctaatgaatatggatccgggtccggttcaggttccagcccgtatgcccgagtggagcccctgaatgtggttcctcggtgtgtgcctggttattatgagtccccacaggctaagttggagcttagagcaattgcttgtgtcgaggcgcagttaggggagccattgagggatgatggaccgattctagggctagagtttgatccattgccaccagatgctttggggcacctatagcagcagttacagaacagcagaagctacctagttttgcctatgacagtaaaatatatgaaagacatgatgctagaacaaataaggctttggcaaggacattccgtgacaatcaatttctaccaaacaagtctggcattaggtctgatgcttctggacagttcagccaatctcatttacacgatccaattgaaggttttgtcagaaatcctccttttgcacatggaaatgaacatctacctagaattcatgctactaaaggtcattcttctcgtgttcgtctcttgtctcaacaagacaagcaattgattccctatcaatctccttctcgggatgatgatgctgcccctcaaagggaattgtacccaaacatagctaatgctggaaagaactctcactctactggtcaccaaattgttgggccagaaaatctccatgctctacctagtgtacaagttttgcataacaatgctacatggattgagaagaaacgaaagagtgatgatgcccacgatgttgaagcccacgagatgaaaatccggaaagagcttgagaaacaagacaacctcagacgaaagagtgaagagcggacaagaaaagaaatggagagacaggatcgtg

SEQ ID NO: 11866 - DNA, 960 bp, Glycine max
  Clone ID: 701137240_FLI
caaaattattagatggatcttccaagtttgtgctcacttatgaagacaaggaaggagattggatgcttgttggggatgttccctgggggtaagtaattggtccacaaacatcaattttattttagcatcaaatatgcgatgttaaaactgatactgcagtacaaaaatgtgttgccaattaattgtcaaatagtacatgtaatgttttcatcaggcaataaagagattggtaaaaatatttggtgctatactctaaaagctacatgtcaaatattggtgctatactctatcctattaagagattgatagggtcatgtcttttttcttggacaaggaaaaagatttcatatttgtagtttcatttagcttgtctttttatgatttaacactggttatgaggatctctgttcctctgctttgatattcatctatcttgctctttcaaattgctatcaggatgttctttagctcagtgaggaggctaagaatcatgaggacatctgaggctaatggacttggtaagcaaatgctttatttttccaaacacaacttacccatgtttttcttttgctaatgcatacttgtttgcagcaccgagattggaagaaaacataaaaaagagatgcaagcccatatagattccgttttcatggctaaggacatgaaaaacctgtcaaatagatgaagaggaaaaaccgaaacagaaaagtataggaatactgcaaatgtatgaagttttgagatttgaatgataaaatctcacacttttgcttaattaattcagtttgtttgtttaatttggtatctttgttgcggcctctctattcatctcacttggagggtgcaggcatcatagattttcatgcaatacaactaatcatacaagtcagactgcttgttagtgttgtaaatgtggaatgtttgctaactatttcagctataaagttttgtttgaacttt

SEQ ID NO: 11867 - DNA, 1070 bp, Glycine max
  Clone ID: 701137242_FLI
gcaaacacaaacacagacccttcccttccttcctccctccctcattcccttcttcaatttcatcaacacaaccatcaatttcatcaaccatcgcataataatagtattatcatgatagccgtggcccgaaaggacatggaccggatcaagggcccgtggagcccggaggaggacgaggcccttcagaagcttgtggagcggcacgggcccagaaactggtcgctcatcagcaggtccattccgggccggtctgggaagtcatgcaggcttcggtggtgcaaccagctgtcgccccaggtcgagcaccgggccttcacaccggaagaggacgagaccattattcgggcccatgcccggtttggtaacaagtgggccaccattgcgcgcctcctctcgggccgcaccgataacgccatcaagaatcactggaactcaaccctaaaacgcaagtgcgcgtccttcatgatggcgggtgatgaagccgtcgccgtgagtccgaggccgctcaagcgatccttcagcgccggcgcggcggtgcctcctcccggaagcccctccggatccgatttcagcgagtccagcgctcccggcgtggtctcggtctctccttcgcacgtgtttcgccccgtgccggttcggccgattgttgaaacggcgtcgtcgcaagacgatgccgacgatgccggacccgcgacttcgctgtcgctgtctcttcccggtgtggagtcggcggaaatttcaaatcgcgcaactacggtgccggtgatgccggtgaataccgttgcggctccggcaccggttccggcggaggttggattgggagcgttgaatttgagtggagagtttatggcggtgatgcatgagatgataaggaaggaggtgaggagttacatggagcagcagaagaatgggatgatgtgttttcagggtatggaaatgatggaagggtttaggaacgtgtcggtgaagcgaattgggattagcagggtggattcgtaattattatgacctatttagtgttttcacaaaatgaggtttattaagaacttcgatcaagggagggaagagag

SEQ ID NO: 11868 - DNA, 1349 bp, Glycine max
  Clone ID: 701137731_FLI
gcaagccccactcaaccaccacacctctcctcgttcacgctacccctttctgctcttcttctacctttcaagttttaaaagtataaagatggcagagacattcctatttacctcagagtcggtgaacgagggacaccctgacaagctctgcgaccaaatctccgatgctgtcctcgacgcttgcctcgagcaggacccagacagcaaagttgcctgcgaaacatgcaccaaaaccaacttggtcatggtcttcggagaaatcacgaccaaggccaacgttgactacgagaagatagtgcgtgacacctgcaggaacatcggcttcgtctcaaatgatgtgggactggatgccgacaactgcaaggtcctcgtcaacattgagcagcagagccctgatattgctcagggtgtacacggccaccttaccaaaaaacctgaagaaattggtgctggtgaccagggtcacatgtttggctatgccactgatgaaacccctgaattgatgccattgagccatgttcttgcaacaaaactcggtgctcgtctcaccgaggttcgcaagaacggtacctgcccttggctgaggcctgatgggaagacccaagtgaccgttgagtattacaatgacaatggtgccagggttcctattcgtgtacacaccgtgctaatctccacccaacacgacgagactgtcaccaatgacgaaattgctgctgacctcaaagagcatgtgatcaagcctgtgatcccagagaagtaccttgatgagaagaccattttccacttgaacccttcaggccgttttgtcattggtggccctcatggcgatgctggtctcaccggccgcaagatcattatcgatacttatggaggatggggtgctcatggtggtggtgctttctccgggaaggaccctaccaaggttgataggagtggtgcttacattgtgagacaggctgctaagagcattgtggcaagtggacttgccagaaggtgcattgtgcaagtgtcttatgccattggtgtgcctgagcctttgtctgtgtttgttgacacctatggcactgggaagatccatgataaggagattctcaacattgtgaaggaaaactttgatttcaggcctggtatgatctccatcaaccttgatctcaagaggggtggaaataacaggtttttgaagactgctgcctatggacactttggaagagaagaccctgacttcacatgggaagtggtcaaacccctcaagtgggagaaggcctaagtaattcattccactgctctatgctggaagttttttgagcgttgcccttataatatgtctaatatccataactttccacgtc

SEQ ID NO: 11869 - DNA, 3015 bp, Glycine max
  Clone ID: 701137888_FLI
caaaaactcacactctctctctctctcttcaaatcaaaacccctcacaaaattcacaacaacatacacacaaatcccaaatcctgtcttctcatataaaagaacccttctttcgaatccttcccgctctctctctctcttattctttttccctatccgattcaattcgcgcgcagttccaaaccctagtccccctctccgaggtctgatttcacaccccaagccccccaattcttgttttcttaaagaaaatttttaaagaaataagagggtttcgtttcattgggtgaaattcataaagaaaaatgttttttttggggggtttttttgactttcgagatctggggtgtttttttgtttatgttttaaaggttttatctttttgtgttttgagttgagaaaaagagaagcgaagttgatttttttttgttattggtactgattggtgttgaacatggtgggttttttttttcttggtgggcagctctgtgatttttgggttgataaaaaaaattagggtttgatggctgaccaaggattggaagggagccaaccagtggatctacagaagcatccttctgggatcgtgcctacccttcagtgagtatctgatttttgatgaacaaattacactttctcttttgattggcttcaatttcaattgcaagcttcagatggttgaatcttaagttgtggggttaccctttttgataatttgttagtgataagtatccaactaagtcaaccgttatgcttgtagagcctatccacagatcacactattgcaagttctcaattgtgtaggaattttgctcccttaagttttgtgacttttgtctatttggcactttaacagacttgttgagtgctatttttgaatatttatgaatactttacatttcttttatttttttatgtacgctttcaattatcaatcatgactgtgcattacaaatttggaagattttagattgcatccactattttagcgttagtgatcccactgcgtcctgctatgccactataggaatttcctaattgagttttaacttttaagaggtggctgtttatgttgtgatctactctctaccatttgttgtatttgattgataacatttgcttttatttatatttgaatgtataataattttgcttctattcacattggaatgctaaggattttgcttcaattttctctggattatttattaattttgtttttgtttacaatttactctggattatggaaataatttccttcaattttcattagcatacatgataattttttctctatttatgcggagtaatctaataatcaagctgtttgtaccgtcagaaatattgtgtccacagtcaatttggactgtaagttggacctcaaaacaattgcacttcaagctcgtaatgcagagtacaatcctaaggcaagtatcatttgcttgtagtgattttcactgaaatatgctatctgcacatgtttacatgtttctttttctgcttttgcatctgaattacaataaagattaactggtggttgtgcagtcacctatcctgctttctggattgttttctgttcctttctggaccagagaagtgtggttaatccaagactattttatatttatatcccacgtgatatcttctgcttgctattcagaatcattaattagcaaatgtattatacacgccagttctaattggtttgtggtatactgtactgatgtttgtgatgtgtttgtttgcagcgttttgctgctgtcattatgaggataagagatcccaaaacaactgctctaatttttgcttctggcaagatggtatgatcctttgctgcactgctatgtctatcttttagatgatagtagtgcattttgttatttttaatgctgtcctcaaattagttctatgttaatttatggttgtgtggttctcttgttgaattctttttggtattggttatattttaattaactatgtttatcaaaccaatggtcaaactggtgttatttagaaactctgtaaaattcaggcttgcctttgcccttagtatgtctttgaaggtgctagtaatgaggttgcaaacatggttgtcacttgtcagaattccttgaatcaactggttctatatagcatgatgagagaatcattaatttatgtaaaatggaaataaggaagatattctatttctaaatttatttttacagttttatttagcagaaaaccatatattttctcttgttttaataattgtgcacaattcttgcaatttactatacatttcaattcgtgatttagattatagcccttctggtctgtgattcatagtttgccaaccatggttgcaaaaagttgaaatttgtcttttccgctttctgtaatggctcttatttggtacccttcttgtaatggtttctctcgtgaactttaaatttaattttttatgactattgactaggtttgtactggagctaagagtgaacaacaatctaaattggcagcaaggaagtatgcccgtattatccaaaagcttggcttccctgccaaatttaaggatttcaaaattcagaacattgtcggctcttgtgatgtcaagttccccatacggctggagggtcttgcatattcccatggtgctttctcaagttatgaaccagagctgtttccaggactaatctaccgtatgaagcaacctaaaatagtcttgcttatatttgtctctggaaaaattgttctaacaggagccaaggtgagagatgagacttacactgcctttgaaaacatatatcctgtgcttacggagttcaggaaaaaccaacaatgattgctgtttcaagaaagagcaggagcagtggtctggcagagaagttcgtggaactgtaaatattaagacaaaggagataatctaaattgatatataaattaaagacagcctgtgttgccttgtcttaattttttgattggtcatgatgtagtaaagtggcagacattgttctattgaattgacatttttaag

SEQ ID NO: 11870 - DNA, 1315 bp, Glycine max
  Clone ID: 701138005_FLI
attccaccaaaaaccctaatttcctttctctctaactcttagatcttcacgttttagggctttctccaccttccgcaatgcacaaattgggaagaggtcatcgtgacaaactccagcagttcataacaataactggagccagcgagaaactagccctgcaggctctgaaggctagtgattggcatcttgaaggagcatttgatttcttttacagccaaccccagcttaaaacatttactgattctaggcacttggaggagctatacaatagatataaagatgcatatgttgatatgattttggcagatggtatcactctcctttgcaatgatatccaggtggatcctcaagatatagtaatgttagttctttcatggcacatgaaggctggcaccatgtgtgaattttccaagaaggagtttattgaaggtctacaatctttggggattgattctctggaaaagttccgtgaaaagataccttatatgcgctctgagctgaaagatgaacagaaattccgtgagatatataattttgcttttggctgggcaaaagagaagggtcaaaaatctcttgcattggatactgctattggtatgtggcaattattatttgctgagaagcagtggccgctggttgatcattggtgccagttcttgcaggctcggcataacaaagcaatatctagggacacatggtctcagcttttggagtttgcaaagactgttggctcaaatttatctgattatgatgccgaaggtgcttggccatatcttattgatgaatttgtggagtatctcaacgagaatggcataatccaaaatgatctgatcaatgattctagtctaaaacgatgatgcattcaaatctcaataaattgttatttaagagaatttgatggagtctcttgtgatgagttgtgctattctgtgattgaactcctctttgttattaagtgggattcggtctaaattcaaaggggacatggctgctagagcaaactcattcttactgacaagtagtagcatcatttgtgagattgttgatatggcatatgaatttccttgggaagtattgtggaattagtaatgggagcctactaattccacggtgttatagtttctggtctctttttaatttaataattaattcttgaacgatgtcttgatagaagataagagacttacgtgattgtgattggctgtccttgtttctggtctagtttcatcttgtataatatgtggcaccaagttattaaaacattcatgaaatagagaaggggaaaaaataactatgttgtgggtctgttttcctt

SEQ ID NO: 11871 - DNA, 1509 bp, Glycine max
  Clone ID: 701138309_FLI
gccttttggttctcttggttctctatgtcacagtggagcagagtaagctactccaccacgtagaagccgatggtgggtttgtaaaaacaagaggagtgcagcttatgctgaatgggagtccctactatgctaatggctttaatgcctattggcttatgtaccttgcctctgatccttcccagagaaacaaaatctcatcggtatttcaacaggcttcaaatcatggactcaacattgccagaacttgggccttcagtgatggtggatatcaacccctacaatactctcctggatcctacaatgaccaaatgtttcagggcttggatttcgcaatagccgaagcaagaaaatatgggatcaagatggtgttgagtttggtgaataactatgagaacatgggtggaaagaaacagtatgtggaatgggcaaggagtcagggacagtccataaattctgaggatgacttttttacaaatcctgtggtgaagggatactacaaaaaccacatcaaggctgtacttacaagacgtaatagcatcactggagttgcttacaaagacgacccaactataatggcttgggaacttatgaatgagattaggtgcccttctgatcaatcaggaaggacagttcaggcttggatcactgagatggcatcttacctgaaatccatagatggaaaccacttgctggaagctggtctagagggtttctacggccagtcaaaacctgagtctaaccctaacttcaatgtaggaaccgatttcattgcaaacaaccaaatcccagggattgatttcgcaacagtgcattcctaccccgaccaatggatatcaagttcaggttatgaggaccaaatctcattcttaggccggtggctgaatgagcacatccaagatgcacagaacacccttcacaagccacttctatttgcggagtttggtatttccacaaagagttatggtggcaactcaacaccaagggatcggttattcaacacggtatattcagcaatatactcatcagcaagcagtggcggggctgctgttggtggcctgttttggcaacttatggctcaaggaatggattcttatcgagacggttacgaggtggtcttagatgagagcccttcaacggctaatttgattgctcaagagtctcaaaaactaaaccgaattcgcaagatgtacgccagactcagaaacattgagaaatggaatgaagctaagcaaattagaggatgaaactgaatatatatatatatatatagagagagagagagagagagaagggtgagttagaaactttaatttataacttaatcgtagtggcaagaattgcctgttattacaagtgaagtgtcctacaaatgcaataaacataactattatagagatatatcgagagaaactttgtaatgtacgagctagcatttcatctactattatgtcggaagtgaatgtacttatgtcaaaactattataaagtggcctgctggataacttgaag

SEQ ID NO: 11872 - DNA, 815 bp, Glycine max
  Clone ID: 701138456_FLI
gacagagcaggggatcctcttctagcccagcaaacttctgaatcagaagctatgaggctggtcaaagctactccttttgattatgggagtggtcatgttgatccaactgctgcattggaccctgggctcatctttgatgcagggtacgaggattatataggcttcttgtgcacaacacctagcattgatgttcatgagataaggaactacactcacaccccatgtaacacctccatgggcaaaccatcaaatttaaacaccccatcaataacaatttcccatcttgtgagaactcaagttgtcacgcgcacggtcacaaatgttgccgaggaagaaacctatgtgatcacagccagaatggaaccggctgttgccattgaagtcaaccctccagcaatgactatcaaagcaggcgcatcgcgccagtttttggtgtcacttacagtgcgctcggtgacaggaaggtatagttttggagaggttttgatgaaagggagcagagggcacaaggtgaggattcctgttctggccaacggataccgacgatagatagcatagtgaagtttggtcagcaaaggaaaggaaagcaagtgctgcttgtaatattctttgtaacctgtggggaataaggtatggcgctacatttattcgtctaaatatataaatatgtaatgttaaattatgaataggtgtaaaggtaagcaggtgtaaggggtcactcctagtttcttccacatatagttttgcttatattgtctagtaattttgttggaatgcttcatcacaagttttaacctgtatctgccccattcccc

SEQ ID NO: 11873 - DNA, 1975 bp, Glycine max
  Clone ID: 701138480_FLI
gcttcttcgtggtcttgagcattgtcacagtcgtggtgttatgcaccgtgacatcaagggctcaaatcttctgcttgacagtaatggcaatctgaagattggtgattttgggcttgcagctttgtttcagccatctcatgggcagcctttaactagtcgtgtcgtaaccttgtggtaccgaccacctgaacttttgcttggagctacagattatggagttactgtggatttgtggagtgctggatgtattctggcagagttgtttgttgggaagcctataatgcctggacgaacagaggtaatctaccattctaggtggagcaactacataaaatcttcaaactttgtggatctccatctgaagaatactggaagaagtcaaagccaccacatgcaacagtttttaaacctcaacaaccttacaaatgtgttatttctcagacattcaaggatattccatcatctgcactgagcctattggaggtccttctttctgtagaaccgaaagatcgaggaactgcttctttagcccttcagcatgagttcttcacagcaatgccacttccttgtgatccatcaacgttaccaaagtacccaccaagtaaggagtttgatgccaaacttcgcgaagaggaaactagaagacaaagagcagtaaataaaggatatgaacatgaatcagttgggagaaattttagagagtccaaagctgtgccaatacctgatgctaatgctgagtttcaggcaactgtggggagacaaggacagtgtaattctaagtgcattactaagaagtacaatcctgaagaggatggtgattacggcttccaccgcgaacctgcaaagtcaagagcactcgatgtattatctcattctggccagtcagtgcatccaagtgtatatggatcctcacgcaatatgaatctgaaagaggaagatctcactagcccagatcatggctttagatcaagaaagtctgagttgagaaaacaaaaatcctattggcaaggtagcactgcaaaattgtcaagattttctaattcagttgcagttcaaggtgatccactgcttgatatgagtggtgactctagtgcgaattcgcagtggccagaagatcagtttggcatgagatgtagccatcaggctgatggtgattccaaacaattgttggatggactcaaatcttcacagaagaatgactttcatcctattgggaaggatcgtgctaagggctatgctaacaaaaatgcccgcatgcaccattctggacctttgctggctccagaggataatcttgaagaaatgcttaaggaacatgaaaggcaaatccaacaggctgtccgcaaagctcgtttaggtaaggacaagacaaaaaaggctgacagtgagagtggcctaactgaatcactatttcaccatgtgagaaatcaatagtgactttcaagagagttttgatgcaatttaatatgggatgggaacacttgaacacaacaagattgtggctatcataattcattgccaagataaatacttcttttggaaattcatcaactcttgatgccgataaattactaatgctcgtggggcttcaacatacttcttcacatcagatatttataactaccgtagaaggtcttgtacagagttctaaccgacaaacttccatgtttcatgaaggtggatagtttatactttacagagcaaatgaaatccatggtgattgactgcataatattttatggtttattaacacaccagcgagttgttccattgccagatggcgaagtcatttccatggcattactttgtatatttgaaactgattttgccgaattaaattttttcatttaatgcataggcttttgttcagagctagaattcggaaggctgaagaaaggcttgcctttcgaaacatagtattcccatcaacatgggcatgcaggagaaataatactaaaacaaaacacttacttct

SEQ ID NO: 11874 - DNA, 816 bp, Glycine max
  Clone ID: 701138541_FLI
atggagaacaaccctagttcatccagagttgacagaaaattcattgagaggaatagaagaaatcaaatgaaagctctctttcgcaaactaaactcacttgtgcctcatcaaagatcaaaggaggccattccactgccggatcagctagaagaagccacaaactacataaagaaactacagattaatctggagaaaatgaaggacaagaagaacatgctactaggaaatgaaaggccaaatgagagaatgaataatgatggaaggagggtgggattaaaatctccacggattgaaatccaacaaatgggttcagccttagaggttgttctaataactgggttggattctcagttcatgttcggtgaaaccattcgtgttcttcatgaagaaggagtagatgttgttaacgctagttataaagttattgaagatgcagttttccattcaatacactgtcaggacaaggaagaaactgccaacggagctgcgaggatatctgagaggttgaagaacttcatccatgattctagctacaatgctttttaaatgggagtcattattattattatatactcaatttttcttccatttcattttacataagttttctttctactttatttttcttatatcatttcttttatgtatcactttcttcttctttttctctgtttttcttttacttccatctgttccccccatatatggaatgtacacgtagccttaactttttccctagtgtaagacgcgtaaattgggaatgtttgctgtaaccattttggtggaaatctaattaaatacggataattctagagg

SEQ ID NO: 11875 - DNA, 1587 bp, Glycine max
  Clone ID: 701138659_FLI
ggtgtggactgtggagtaggatgtttctcaattatgtttttttgggcttgtttgacaggttgggcttggagatacttctggtggtgacagtccgaatgatcactattgctggatgcgtccggaggacatggactatgaccgccctgtgactgaatgccacagttgttccgatctcgcggctgagatggctgctgccttggcttctgcttccattgttttcaaggacaacaaggcctattccaagaaactggtgcatggtgcgaccacgctgttcaagttttccagggatcagagaggcaggtacagtgctgggagttcagaggcttcaatattttacaattctaccagttactgggatgagtacgtttggggaggtgcttggatgtactttgctactggaaattcgtcgtaccttaagcttgctacggctcctggcctggccaagcatgctggtgccttctggggaggccctgattatggagtactcagctgggataacaagcttgctggtgctcaggttcttctgagtcgtttgaggttattcttgagtcccgggtatccatatgaagaaattttaaagacctttcacaaccagacaagcataatcatgtgctcctatctaccagttttcacaagctttaatagaaccaaaggtggcttgattcaattaaaccacggtaggcctcagcctctccaatatgtggtcaatgctgcctttttggctgccctttatagtgattatcttgatgctgctgatacacctggatggtattgtggacctaatttcttttcaactgatgtgctccgtaattttgccaagacccagattgattacatccttggaaataacccaaggaaaatgagctatgttgtaggttttggtaatcattacccaaaacatgttcaccatagaggagcatctataccgaagaacaagatcaagtatagctgtaagggtggatggaaatggagggacacttctaagccaaacccaaatacaattgttggtgccatggttgctggtcctgacaagcatgatggcttccatgatgttcgtacaaactacaattacacagagccaactcttgctggaaatgctggtttagttgcagcactagtggcattgtcaggcgacaaaagcacatcgattgacaaaaataccattttctctgctgttcccccaatgtttcctacaccgccaccaccaccagcaccatggaaaccataagcgcatcatgccattggttatttctttctagcaagtatcccagatgatttgagtgcaccggtaaccttcgttgttttgtatcaactgaaagatcaaggtaattttgcagaaaaaaagctttgagaaatagaagaaatggagcttggcctactgaatatagctgcctggggccaatgatcgactcaagatttagcattaagaattgataaagtggtacttgagagtgtgtctctttaaatttttgtgatacacatatagtatatatgtatctaaatcaaatcttgtattctttaaacatgaaaaactgaacagcttgtaattgtttgacagtttcatctaatgccttcacagttttactc

SEQ ID NO: 11876 - DNA, 1113 bp, Glycine max
  Clone ID: 701138680_FLI
tgggcctttacattttgatctgaatactggtgcaaagattccatcggttggtcttggaacatggaaagctcctccaggtgttgtgggtgatgctgttattgctgcagtcaaggctggttacaggcatatagattgtgctaggatatatgataatgaaaaagaggtaggggaggctctgaaaacactattttctactggggtagtacagcgtagtgagatgttcatcacatcaaagctatggatcagtgactgtgcacctgaagatgtctcaaaggcactgactaggactcttgaggacctaaagcttgactacattgatttatatcttatgcattggccatttaggacgaagccgggttcaagaggttgggaccctgagattatggctcctttgtgtcttcctgagacatggaatgcaatggaaggtttgtttgcctcaggtcaggcacgcgcaatcggggtgagcaacttttcaactaagaagctgcaagacttgcttggatatgctaagattccaccagcagttaaccaagttgaatgtcacccagtgtggcagcaacctgcgcttcacaatttgtgcaagtctaccggtgttcatctcacagcatattgtcctttaggctctcctggatcatgggtaaagggggaaatcttgaaggaaccactgttgattgaaatagctgaaaagcttcacaagtctccagcacaagtggcattgcgctggggactccaaagtggtcacagtgttcttccaaaaagtgtaaatgaatctaggatcaaggagaaccttagtttatttgattggtgccttcctcctgagctcttctcaaaattatcacagatacaccagcaaaggttacttcgaaatgaatccgctgtccatgaaacttgtagtccttacaaaagtcttgaagaattgtgggatggagaaatatgaaatgcagattacttttgataaagctcaggatgtaatttgacattgaattcttattactgatataaaattacaaattgtaggaatgtttaaaatttgtattgtccgaagacaatcacccctctacggttttatgtgaatcctcacatatgaacaaaagaaaatttgaccgattcttt

SEQ ID NO: 11877 - DNA, 1156 bp, Glycine max
  Clone ID: 701138849_FLI
ggagtgtggactttaaaagggtactctataagtttgttgcttgtgatatttgtactttgttcatgtgctgtggtgtgtgttgttgttgagagagtttgagaaagaataatgggaagaacaccatgttgtgacaagaagggtttgaagaaaggaccttggacagctgaagaggatgaaattctttctagttatatcaagaaaaatggtggtcatggaagctggcgttctcttccaaggatggcaggtcttcttcgttgtggcaagagttgcaggcttaggtggacaaactatctgagaccagacattaagcgtggtccctttactcttgaggaagaaaaactagtcatacagcttcatggcatcctaggaaataggtgggctgcaatagcctctcagttaccagggagaacagacaatgagataaagaacttatggaacacccacttgaagaagcgtctcaaaagcatggggcttgaccccaaaactcatgaaccattggcctcatcaacttacccttttcacaaggcacctgcatctgtctccacacgccacatggctcagtgggagagtgctaggctcgaagccgaggccagactctcgaacgagtcgtcaaggttcagccacaacaccaccaacaattccaactctgataacaacaaaaccactgattctgactactttctccgcatttggaactctgaagttggagaggcatttcgcaatgttcatcatcacaaagctgatgatgacaacaacaacaacaaaatcactactaatactcctactagttcctgccacagtcctctttctacagggtcatcttccaacaagtgtgagtcaattgctacaaatgcagacttggcttctaatgcaccagaaattatcacaccctctagcattgtgaaacaagagtttgagtgggggactcgtggttccgactcgtcaagctctaatgacatggaagactcatcagacactgctttgcagctcttgttggattttcctataaacaatgacatgagcttcttggaaggaaactcttttgtgtgtccactttagtgcatgtggaagcatgagtgatattttgtgtcatgcagctttttgtgttggtgttttgtaatattgctatctatataagcagttgaagaagtaggag

SEQ ID NO: 11878 - DNA, 1354 bp, Glycine max
  Clone ID: 701139073_FLI
gtttctcactctctctcatgttcactcaacaacaacgacgcactcactgacatcaacactagtttcaggtgctatctcatccaccaaatgcagcaaatacactccatgcccggagggaggtttttctccggctccggatccgccgaccggaggctccgaccccaccatcagaaccagcaggccttaaagtgcccccgctgcgactctctcaacaccaagttctgctactacaacaactacaacctctcccagccccgccacttctgcaagaactgccgccgctattggactaaaggcggcgtcctccgcaacgtccccgtcggcggcggttgccgcaaatccaaacgctcctccaagcccaacaaaataacaccctctgaaaccgcttcaccgccaccacccccgcaccccgaccacaacaacaactccaactctcattccagcagcgagagctccagcctcaccgccgccgctgccaccaccaccgaggccgtgtcggcgccggagactttaaactctgattccaacaacaacaacaacatgcaagagtcaaagttgttgatccctgctctggaaactaataattctctggagcagggaacaggggactgcggtggtatcttctctgaaattggtcctttcaccagtttgatcactactactacttccactaatgaacctttagggtcagggttcgggttcggtaactccactctccccgatgcgtcgtcgtttcagtggcactaccagaaggttagcagtaacaacgaagaattgaagttgccggagaactcctttctcgatcacaccgttgatttgtcggggatgcatagtaaaaccagccacgggggaggattcggatcgttggattggcagggcggtgcagatcaaggtttgtttgatcttcctaacaccgttgatcacgcttactggagtcacactcactggtctgaccacgacaattcttcttctctctttcatcttccctgaaaatgttttcacgcctcttctaaatcttatctcacctttttttttatttcttatataaatttaactttaaaagaagaagagtaaaggagattggaaatcaaaaccaaagttttaaaaaaatttgaaagagaagtggaaggacttggtataattaattacgcggtgtatatttttttttgaagttataaatttggggggtgattgagcttgatattaattagtgatgtgcatgcacaactaacttccatgttagtttctacagtatctgatttctttctctcttttttgttttctgagttcaggttttaatatatatgtatgtggaatttgattgattaacagagaaattatagcagggtgtttt

SEQ ID NO: 11879 - DNA, 1293 bp, Glycine max
  Clone ID: 701139293_FLI
gaccccaatatacttagccatatctttacttcccaaaacttgctctacaatgagtttccttcgttcttttgcaagaaacaaggatatatcaaaagtaggacgcagaggtatccattgcatgcagaaactatgtgcagaaaaaatatctcctgattcactagagaaggcccaaaatcgtgtgatagatgctgcactcacacttgttcgagaaaatacaaggcttaagaaagaactcgtgcatagtttgggaggtgctgtggcaacttcaactcttcttggagttcctttgggtcataattcatcgtttcttgaagggcctgcatttgcacctcctttcattagggaaggtatttggtgtggtagcgcaaactccacaactgaagaaggaaaggatttaaaggacttgcgaatcatggttgatgttggtgatatccctattcaagaaatgcgagattgtgggataggagatgagagactcatgaaagttgttagtgattctgtcaagctagtgatggaagaggatccattacgtcccttaattttgggtggtgatcactcaatctcatatccagttgtcagagccatatctgagaagcttgggggaccagttgatgttcttcattttgatgcacatcctgatctctatgatgaatttgaaggaaattattattcgcacgcttcttcttttgctcgaatcatggagggtggttatgctcgtcgactcttgcaggtcggtataagatcaataaacaaagaagggcgtgaacaagccaaaaagttcggggtagagcagtttgaaatgcgacatttttcgaaagatcgtccatttttggaaaacctgaatctaggagaaggtgctaaaggagtatacatttcaatcgatgtggattgtcttgatccagggtatgctgtaggagtgtcccactatgaatcaggaggtctttctttcagggatgttatgaacatgctgcaaaatctcaaaggtgacattgttggtggagacgtggttgaatacaacccacaacgtgacactcctgatcgtatgactgccatggtagctgctaagtttgtgagagaactcgctgcaaagatgtcaaaatgataactattaattctgcctcgtgtgtgtgacatttagtttacttcaatgcactcaacttttcaatttatagtgttgttgttatgaataaataatacatgcactattaccctgtttacactaacagtgtaaagatgatgtatgtgtataagactaagttttgttgtgttctattagaagtattaatcgtgttc

SEQ ID NO: 11880 - DNA, 1008 bp, Glycine max
  Clone ID: 701139347_FLI
cggggattcaaaaacagtgatacaactcaaaaaagagaagtgattgatgcaattgaaaagccaaacataaacaagccaaatgctgttcaggataatgcttctcagcacctccttaccttgcgtcaggaaattttggctcataaaaggaaggcagttactttgaaaagagaagggaaactaacagaagctaaggaggaactccggcaggccaagctgttggagaagggcttggaggatggaagtatgcagccagacactgcttctgcctctgtgaagaatgttgtacaaaagaaacaagaattgtcaaatgttagtgcaaaaccattgagtagccgtgatcgatttaaattgcaacaggagtctctagggcacaaacgtcaagccctaaagctacggagggaaggccgaatagaggaagctgaagctttgtttgaacgggcaaaggcaattgaaacccagttggaggagttgacagctcaagattccaataaatcagatggtgtagatgatgtgactgttgaggattttctcgatcctcaactcttgtctgctctgaaagctgttggacttgatgatgtaagtgttgtgtcaaaagccccagaaagagaagagactgtgaaatccaatgctaaagttgaaaactctaaccaagagagaattcagctagaagaaagaatcaaagaagaaaaagtcaaggcacttaatttgaaacgttctgggaaacaagctgaagccttagatgctcttcgacgtgccaaattgtatgaaaagaagctaaattcattgacatctggttcatgatgaagtaaagactgcaacttcaaagtgggaagtcctcccttgttcaaatcggtagttacttttaattcagtttaatttgtgaattttcattgaaagagtactagaaggtgcagaggaggttgctccttccattacatgcacgtttgctttattatgttcataaacattggagaatatatatgtgatcgttcgcaagttacaattttc

SEQ ID NO: 11881 - DNA, 1278 bp, Glycine max
  Clone ID: 701139365_FLI
gtggagattgcggactatatagttcttaaaaaaattattcttgttttgttttgtattattttgttttgtaagattgttagatacatgttcagtcttctcaaagaagagaaagaaccaatcacaatattagtcaccggtgcagcaggccaaattggatatgctcttgttccaatgattgcaagaggggcaatgttgggcccaaatcaacctatgattctacacatgcttgacattgaaccggcaacagaatccttaaaagggctgaagatggaactaattgatgctgcttatccacttctcagaggtgttgttgctactacggatgttgttgaagcttgcaaggatgtcaatattgttgtaatggttggtggattcccgcgaaaggaaggaatggaaagaaaagatgtgatgtctaaaaatgtatcaatttataaggctcaggcttcagcactagagcagcatgctgcaacagattgtaaggtactagtggttgccaatccagcaaacaccaatgctctcattttgaaagaatttgctccttcaattcctgagaaaaacattacctgccttacacgacttgatcacaatagagcattaggccaaatctcagagaggctaaatgttcttgttagtgatgtgaaaaatgtcattgtttggggcaaccactcctcaacccaatatccagatgtcaaccatgccaccgtcactaccaatagtggagaaaaaccagttagagaattagttgtggatgataattggctaaacaatgagtttatcaccactgttcaacaacgtggggctgccattattaaagcaaggaagcagtctagtgcattatcagcagcaagtgctgcttgtgatcacatacgtgattgggtactaggtactcctaagggagaatgggtatcaatgggagtatattctgatggatcttatggtatcccaactggcctcatttactcttttcctgttacgtgtgagagaggagattggaacattgttcaaggactcaagattgatcaattttcaagggaaaagatggacaaaacagcccaagagcttattgaggaaaaaacattggcaaagtcatgtcttaattgacaacacgtgttttcttggaattattcttcaataattgtgtcttttaacaaaaagggaaaacttatctagttacctctatccaaaaaacaaaggatagtttcattctctatctaaattcatgatcaaattaatttatttttattgtatgcttatatgaaatttagttcctaaacaaac

SEQ ID NO: 11882 - DNA, 1095 bp, Glycine max
  Clone ID: 701139414_FLI
caagaatggcacttcgttgcttggtgatgtccctttctgttctcttcactcttggtcttgcgagagaaagccatgccagagacgaagatttttggcatgctgtttggccaaacactcccattccaagttcattgcgagatcttctaaagcctggccctgcaagtgttgaaatcgatgatcaccctatgcaaattgaagaaacacagtacccgaaaaccttcttctataaagaagaccttcatccaggcaaaacaatgaaagtacaattcagcaagcctccctttcaacaaccatggggtgttggtacatggttaaaggaaattaaagacactactaaagaaggatatagttttgaagagctatgcatcaagaaagaagccattgagggagaagagaagttttgtgcaaaatccttgggaacagtaattggttttgccatttcaaagctgggaaagaacattcaagtactttcaagttcctttgtcaataagcaagaccaatacactgtggaaggagtgcagaatcttggagacaaagcagtgatgtgtcataggctaaatttcagaactgcagtattttactgccatgaagtccgtgaaacaacagctttcatggttccattggtggctggtgatggaaccaaaactcaggcacttgctatttgccactcaaatacttctggaatgaatcatcaaatgcttcatcaacttatgggagttgatcctggaactaaccctgtttgccatttccttggaagcaaggccattttatgggtacccaatttatctgtggacactgcctatcagaccaacattgttgcttaattagtccatgcatcttgagcaccatgagaatgagattgtgtataaaataaattatcatgtgctgtgtgttgtgcaagtactaccttctctagctagattgctagagctagaatttcaacctacctatgtgtactgataagatctgcttccctacttaaagagagcatcatcctgtgatcagtgtgcttcgtattctctctctctatatatatatggtaaaaagtggttatctcgtgcctcgccttgagctatccatcactttttttttttt

SEQ ID NO: 11883 - DNA, 1052 bp, Glycine max; identical to SEQ ID NO: 10204
  Clone ID: 701139475_FLI

SEQ ID NO: 11884 - DNA, 847 bp, Glycine max
  Clone ID: 701139603_FLI
gcagctgaagcctatgacattgctgctattaaattcagaggatttaatgctgttacaaactttgatataacaagatatgacgtggaaagaattatggagagcaataaccttcttagtagtgaacaagctaagcggaaaagagagatggatgatggaactagaagcgaggctacagttaaccaaaaaccttgtactactcaagaaaccgttctgatgcagaaaagatgcagaagccaatcagaatggaagatggttcagtatccatcctcccaacagcttgatcagaatccacaaagaattgagtgtagtagaactgagtccttgtcaactgctttagataacatgtttcatcaccaagttgaggaatcgagtaacatgggaacacacttgtcaaatccttcttctctggtgacaagtttgagtagctcaagagaagagagcccagataagacaagcttgccaatgctctttggaatgccttcaacagtgtccaaattattggctgacgtggattctttggatctatcttccaatctcaggccttcgctttctattcctcagatgccaatttttgctgcttggaccgatgcataatcctatgtttttttacctccatcaaaatggcaaaagcttgttttgaatgcttgtttactaaaccagggtgtgaatttccagctagtacaatagggagcttgtgcccatgtttaaaatgttaactgttacattaaacattttcctcgtacgatgagaggaaaactcctaaagtttagtgtatcgcttagcactccaaattcgcatcatcaatttttcggtgttagaatcttatctaaaggttattttgaccctt

SEQ ID NO: 11885 - DNA, 903 bp, Glycine max
  Clone ID: 701139705_FLI
tgaactggtctgaactagctcaaaggccatggtcgctcgtggggatcttggagctgaacttccaatagaggaagttcctttattgcaggaagacatcattcgaagatgtcaaattatgcaaaagcctgttattgtggcaacaaatatgcttgaaagcatgattaatcatcccacaccaacaagggcagaagtttcagacatcgcaattgcagtaagacaaggtgctgatgctatcatgctttcaggagaaactgcacatggaaaatttccattgaaagctgttaaagttatgcacacggtggctcttaggaatgaatccagtgttcaaagtggtgtttcttatccgagtcaactgagttcccatgaaagtcatatgggagaaatgtttgctttccatgcgacaacaatgtctaacactcttaatactcctattattgttttcaccagaacaggatccatggcaattcttttgagccattataggccttactcaacaatctttgcattcacaaatgaagcaagaattaagcagaggttggcgctttatcatggggttatgtccatatacatgcaattttcaaatgatgtagaagagaccttctctagagccctcaagctactattgagtaagagtcatttacacgagggacaacatgtcacacttgttcaaagtggagcacaaccaatctggcgtgaggaatccactcaccacatacaagttcgcaaggttcatggataaaattctatgaaggatctttgttcctcataagtgtacagtttttttccccactatcttgtaactattcatagtaatggctattcactatcttgtaactattcatagttatgactattatgcacttgaaacaccaaagttggatagtaaaggaattttcataatgc

SEQ ID NO: 11886 - DNA, 928 bp, Glycine max
  Clone ID: 701139847_FLI
ggtcacccttcccttcccacaagacccacagttctacttccacagccatcgaaatggttacagcagcacagtcactctttctatattccttgctttctgctttcatcttcactctgtttttgggggtcagatcttaataccgaaggcttcgtattctgtttgaatattgatatctattgggagtggagtagtattgagatcgagcgtaaaagaaaggcgatgtttttgtttgattggttttatgggattctggcatcgcttggattgtggcagaaggaggccaagatcttattcttaggtctcgataatgccggaaagaccaccttgcttcacatgctcaaagacgagagactagttcagcatcagcctacacagtatcccacatcagaggagttgagtattgggaggatcaagtttaaagcttttgatcttgggggtcaccagattgcacgaagagtctggaaagattactatgctaaggtagatgcagtggtctacttggtagatgcatatgacaaggaacgatttgcagagtctaaaaaagagttagatgctctgctctctgatgagtctttgactactgtccctttccttatccttggaaacaagatagatattccatatgctgcctcagaagaagagttgcgttaccatttgggcctgaccaattttaccacaggcaagggaaatgtaaatttgtcagactctaaagtccgtcctatggaggttttcatgtgcagtattgtgaagaaaatgggttacggggatggtttcaaatggctctctcagtacatcaaataaatagtccatgtagtcagagatggcttggtatccccgtttctagatgcttatttctatagaaatgtttttagtacaaattgctgttaaacatattttgttcttagtacaaagaaattgctgttaaatg

SEQ ID NO: 11887 - DNA, 932 bp, Glycine max
  Clone ID: 701139927_FLI
aggaacttcagggtatcttgcaccggagtatcttgacgctggaaaccttacatataaagtagatgtatatgcatttggaattgtattattagagttaataacaggtcgaagaattagcgagttggaacagttcaatggacactcgtatctttctgaatggtttcatcccatacgcatgttagagcccggtcatatcttacaaaacgttcgttctctcaaaccatgctttgattctaaggagtcagtggaatttaatcttcagttgcaagccatggcacgggctgtttcgttgtgtctacgtgtggatcctgatgcaagacccccaatgtcaaagatcctgagagtgttggaagggggtaatccagttcgtcctatgggtttagacatcaattcagttggcaacacaagtggccatttaagtggtttgaagtcgcacactccaccaaaaggtacaataaatcattcccgtagactatcacattgatcattgtttcggctctttgggctagctagaggatctattgttggcaatatagttctgtttgtgagctgcatagtatcagttatccatttgaaacgtggaactctctcgtacgcttatacaaactttcagacaagcacagcacctggtggaaattagtaagaattaagaagtcattatgttagcattctcattaaaaaaaaaaaatggtttgtaatttggagggggggttctgcagccttgtaattcctaactcaccatttttttaatagcaaaaattcatttgacaggggatgcttctctttgctctattttgtctaggatctaaagggaaatccccaaattgattgttcaccgtaattttttttttttttacgtacaccgtattttcttcttgcttgaagaaaatatattaattttgaatacaagggtactcaagtcctttacaatt

SEQ ID NO: 11888 - DNA, 1502 bp, Glycine max
  Clone ID: 701140084_FLI
ggggaacaaccacaacaacaaattttccaattagccactatgagaaagagttggaagaaatgaagcacatgactaggcaagagtacgttgcgtcattgagaaggaagagtagtgggttttctcgcggtgcatccatttatcgaggagtgacgagacaccaccaacatggaaggtggcaagcgaggattggaagagttgctggcaacaaggatctttacttgggaacttttagcacccaagaagaggcagcggaagcatatgatgtagcagcaatcaaattccgaggactaagtgctgttacaaactttgacatgagcagatatgacgtgaaaagcatacttgagagcaccactttgccaataggtggtgctgcaaagcgtttgaaggatatggagcaggttgaactgagtgtggataatggtcatagagcagatcaagtagatcatagtatcatcatgagttctcacctaactcaaggaatcaataacaactatgcaggagggggaacagcaactcatcataactggcacaatgctcatgcattccaccaacctcaaccttgcaccaccatgcactacccttatggacaaagaattaattggtgcaagcaagaacaacaagacaactctgatgcccctcactctttgtcttattcagatattcatcaacttcagctagggaacaatggaacacataacttctttcacacaaattcagggttgcaccctatgttgagcatggattctgcttccattgacaatagctcttcttctaactcggttgtttatgatggttatggaggtggtgggggctacaatgtgatgcctatgggaactactactgctgttgttgcaagtgatggtgatcaaaatccaagaagcaatcatggttttggtgataatgagataaaagcacttggttatgaaagtgtgtatggctctgcaactgattcttatcatgcacatgcaaggaacttgtattatcttactcaacagcaatcatcttctgttgatacagtgaaggctagtgcatatgatcaagggtctgcatgcaatacttgggttccaactgctattccaactcatgcacccagatcaactactagtatggctctctgccatggggctactacacccttctctttattgcatgaataggtggaaaactagggagagaaggaagagtcaaaaaggtgatgaagaagatgcatatattgctgacttgtttcttcctcttgtgaagttgctaatttgatagtgtgcacttttgaagatgaggatatataggatttctttcactatctctaacttgcaggatccttatttcactagggtctaagtaatctagcctcaagtttagtcatggcagaagcatttgctgtgaattttgggaattaactttggagaatgtgtggacagatcattgggatgtttttattatcagcggactttttaattctggaataacaacgatcataccaagggtggagttttcctcaatgt

SEQ ID NO: 11889 - DNA, 1049 bp, Glycine max
  Clone ID: 701140306_FLI
cacttcgttgcttggtgatgtccctttctgttctcttcactcttggtcttgcgagagaaagccatgccagagacgaagatttttggcatgctgtttggccaaacactcccattccaagttcattgcgagatcttctaaagcctggccctgcaagtgttgaaatcgatgatcaccctatgcaaattgaagaaacacagtacccgaaaaccttcttctataaagaagaccttcatccaggcaaaacaatgaaagtacaattcagcaagcctccctttcaacaaccatggggtgttggtacatggttaaaggaaattaaagacactactaaagaaggatatagttttgaagagctatgcatcaagaaagaagccattgagggagaagagaagttttgtgcaaaatccttgggaacagtaattggttttgccatttcaaagctgggaaagaacattcaagtactttcaagttcctttgtcaataagcaagaccaatacactgtggaaggagtgcagaatcttggagacaaagcagtgatgtgtcataggctaaatttcagaactgcagtattttactgccatgaagtccgtgaaacaacagctttcatggttccattggtggctggtgatggaaccaaaactcaggcacttgctatttgccactcaaatacttctggaatgaatcatcaaatgcttcatcaacttatgggagttgatcctggaactaaccctgtttgccatttccttggaagcaaggccattttatgggtacccaatttatctgtggacactgcctatcagaccaacattgttgcttaattagtccatgcatcttgagcaccatgagaatgagattgtgtataaaataaattatcatgtgctgtgtgttgtgcaagtactaccttctctagctagattgctagagctagaatttcaacctacctatgtgtactgataagatctgcttccctacttaaagagagcatcatcctgtgatcagtgtgcttcgtattctctctctctatatatatatggtaaaaagtggttatctcg

SEQ ID NO: 11890 - DNA, 1687 bp, Glycine max
  Clone ID: 701140382_FLI
ggcacttccaggtatgatgatacaaatcctgaagcagaaaagaaagagtatattgatcatattgaagaaattgtccagtggatgggttggaaaccatttaagattacttacacaagtgattacttccaagaattgtacgaattagcagtggagctcataaaaaagggtcatgcttatgttgatcatcagacacctgatgagataaaggagtatagggagaagaaactgaacagtccttggagagacagaccaatttcagagtcattgaaactctttgaggatatgaaaaatggcagtatcgaagaaggaaaagccactcttagaatgaagcaggacatgcagagtgataactacaatatgtatgaccttattgcatatagaattaagtttaccccacaccctcatgctggagacaaatggtgtatctatccaagttatgattatgcacactgcattgtggattctctagagaatatcacacattcactgtgtacacttgaatttgagacacgtcgtgcatcatactattggttgttgcatgcgttaggcatttaccaaccttatgtgtgggagtattcaaggttgaatgtctctaacacagttatgtcaaagcgtaagctaaatcgtctagttacagagaagtgggttgatgggtgggatgatcctcgtttgatgacactagctggtttgcggcgtagaggcatgaccccaactgcaatcaatgcttttgtccgaggaattggaataactagaagtgatggcactttgatttctgtggaacgccttgaatatcatgttagggaagaattgaacaaaacagcacctcgtgcaatggttgtcctacatccactcaaggttgtcattactaatcttgaagccaactcagcaattgaggttgatgcaaagaaatggcctgatgctcaagctgatgatgcttctgctttctacaagattccattttccaatgttgtatatattgaacattcggacttccggatgcaagattcaaaagattattatggccttgctcctgggaaatctgtgatactcagatatgcatttcctataaagtgcactgaagttattctagctgatgataatgagactattcttgaaattcgagccgagtatgatccttcaaagaagaccaagcctaagggggttctccattgggttgctcaaccttctcctggagttgatccattgaaggtggaagtcagattgtttgagaggctattcctatcagagaatcccgctgaacttgacaactggcttggcgatttgaacccaaattccaaagtgataattcccgatgcatatggtgtgtcttccatacagaatgcaaaagttggggacaatttccaatttgaaagattaggctattttgtggttgaccgggactcgacatcagaaaaacttgtttttaataggactgtcaccttaaagggcagctatagcaaaggtggaaagtagggtccctgaatattgattagaagtaacaaggtgggacaggcaggtctgcgggtaatacttgtttaaatagctacttataatgcatagttttttctttgagggggtggggggttatgtacaaacatatttactggccacttagccatgtacattttcttaagggattactcaatagttccccaattatttaattattttgtttggttggttttgt

SEQ ID NO: 11891 - DNA, 1314 bp, Glycine max
  Clone ID: 701140721_FLI
gcgttggcagcgtttgcgtttgctctgctgttccaatcggcctcagcagacgacgtcgttgtgctctctgaagataacttcgagaaggaagttggtcaggacagaggagctctcgttgagttctatgctccttggtgtggacactgcaaaaagcttgctccagaatatgaaaagcttggtagcagcttcaagaaagccaaatctgttttaattggcaaggttgactgtgatgagcataagagtttgtgcagcaagtatggagtctctgggtacccaacaattcagtggtttccaaaaggatctcttgaagccaaaaagtatgaagggccacgcactgctgaatcacttgttgagtttgtaaatacggaaggaggaacgaatgtaaagattgctacagttccttccaatgtagtggtgctaacacctgaaaattttaatgaggttgtcttggatgaagccaaagatgtcttggttgagttttatgcaccatggtgtggacattgcaaaagtcttgctcctacttacgagaaagttgccacagcatttaaattggaggaagatgtagtaattgcaaatctggatgctgataaatatagggatctggctgaaaagtacgacgtgagtggatttcctaccttgaagttcttcccaaagggcaacaaagctggtgaagactacggaggtggaagagacttggatgactttgtggcttttatcaatgagaaatctggagcaagtcgagatggaaaaggacaacttacttcccaagctggtatagtagaaagcttggatgtcttggtaaaggagtttgtagctgccagcgatgaagagaagaaatccgtgtttacccgattggaagaggaagttgtgaagcttaagggttccgcctcaaggtacgggaagatttacttgaaagctgccaagaattacagggaaaaaggttctgattatgctaagaacgaaattcagcgcctacagcgcattcttgacaagtccattagccctgcgaaggccgacgagttaactctaaagaaaaatatcttgtcgacatatgctgcttgacttattggtgcattgttaaccaactctcatggaagctcgtgatccaccgcagctgccgatgattgtttgactttgatatcgaaattgctgggagatattcaacgtggatacttacttgtagtgcttagtttgagtctctattaatgaccctatcttgcatggcgcttttggggttaaagattacgattcttctccccattgtagtcttacctgagcagtttaaaattttgggagacgataacttttgtcttt

SEQ ID NO: 11892 - DNA, 1047 bp, Glycine max
  Clone ID: 701140726_FLI
ctcttggtcttgcgagagaaagccatgccagagacgaagatttttggcatgctgtttggccaaacactcccattccaagttcattgcgagatcttctaaagcctggccctgcaagtgttgaaatcgatgatcaccctatgcaaattgaagaaacacagtacccgaaaaccttcttctataaagaagaccttcatccaggcaaaacaatgaaagtacaattcagcaagcctccctttcaacaaccatggggtgttggtacatggttaaaggaaattaaagacactactaaagaaggatatagttttgaagagctatgcatcaagaaagaagccattgagggagaagagaagttttgtgcaaaatccttgggaacagtaattggttttgccatttcaaagctgggaaagaacattcaagtactttcaagttcctttgtcaataagcaagaccaatacactgtggaaggagtgcagaatcttggagacaaagcagtgatgtgtcataggctaaatttcagaactgcagtattttactgccatgaagtccgtgaaacaacagctttcatggttccattggtggctggtgatggaaccaaaactcaggcacttgctatttgccactcaaatacttctggaatgaatcatcaaatgcttcatcaacttatgggagttgatcctggaactaaccctgtttgccatttccttggaagcaaggccattttatgggtacccaatttatctgtggacactgcctatcagaccaacattgttgcttaattagtccatgcatcttgagcaccatgagaatgagattgtgtataaaataaattatcatgtgctgtgtgttgtgcaagtactaccttctctagctagattgctagagctagaatttcaacctacctatgtgtactgataagatctgcttccctacttaaagagagcatcatcctgtgatcagtgtgcttcgtattctctctctctatatatatatggtaaaaagtggttatctcgtgcctcgccttgagctatccatcactttttttttttt

SEQ ID NO: 11893 - DNA, 809 bp, Glycine max
  Clone ID: 701140765_FLI
agaaagaaaggttagggtagatcacgcaggcttcagccatgagaactcacacaattatctctctcattcttctctccttatttctccgaacccaatccgaggttataacgttatcctctgatacgtttaatgataagatcaaggagaaagacactgcatggtttgtgaaattctgcgttccctggtgcaagcattgtaagaacctgggttctttgtgggatgatttggggaaggcaatggaaggagaagatgaaatagaggttggagaagtcgattgcggcatggacaaagcagtgtgttccaaagttgatattcattcatatcctacctttaaggttttctatgatggcgaggaagtagccagataccaaggtacaagagatgttgaatcaatgaaaacctttgttttggaagaagctgaaaaggcagcagcaaaagcacttgaaagtgacaaagaattataacaacttttgaggcacagtcattatctggattgcaactagctctttactgcaggtggtgctcatcccagattagtaaacacctttgggttcaggctgagacattcattcttctctgttctgatcagcatttgtttgttcgacgtagcagttgtgagttaagaactaactccgtacactaccacaatttctttctgttatgctccacaattttcctttttaggtttagttatactctacaaaactgatagtggcttgtcagtgttaaaagtttcaatacaatgatcagtgaatcatgaatcgtacttcaggatttgtttatataatcattcgatcttttgaatgctc

SEQ ID NO: 11894 - DNA, 973 bp, Glycine max
  Clone ID: 701140979_FLI
gcaggatgtctacaagattggtggtattggtactgtgccagtgggacgtgtagagactggggttgtgaagcctggtatggtggtgacttttggtcccactgggctgacaactgaggttaagtctgttgagatgcaccatgaggctctcacagaggctcttccaggtgacaatgttggatttaatgtgaagaatgttgcagtcaaggatctcaagcgtggttttgttgcatccaactccaaggacgaccctgccaaggaagctgccaacttcacatcccaagtcattatcatgaaccatcctggccagattggtaatggatacgcaccagtccttgactgccacacttctcacattgctgtgaagttttctgaaatcttgaccaagattgacaggcgatctggtaaggagcttgagaaggagcccaaatttttgaagaatggtgatgctggtatggttaagatggttccaaccaagcccatggtggttgaaactttctctgagtatcctccccttggtcgttttgctgtgagggacatgcgtcagaccgtagctgttggagtcatcaagagtgttgagaagaaagaccccaccggagccaaggtcacaaaggctgccgccaagaagaagtgattgcattttggcaattttgctagcacatgtgatcatcaacgtggtttcaaaaaaacttgttcctttacagtagtttatctttgcagagtcttaggtgtttgttttaccagttatattttgaagtgtccgccgatttcatgtagccgtagccttcaaaactgggttcttgatcggcggtaacattttcgttgctgtttgtttttgatgagtactgttttttgttttgatggtaaaagtctgagattttcaaattcacaagcagccatagggttttagtccatttcctttgctgctgaggagggatgtcttaaatttgcatttaatttataaggaagttttgtt

SEQ ID NO: 11895 - DNA, 1398 bp, Glycine max
  Clone ID: 701141076_FLI
tttttcttctctctcaacaacttcaccttcttcctcctcgatcatgtctcacttcaagggcaagtaccatgatgagcttatcgccaatgctgcgtacattggcactcctggaaagggtattcttgctgctgatgagtcaacagggacaattggcaagcgtttggccagcatcagtgtagagaacattgaatccaacaggcgagctcttagggagctgcttttcactgctcctggtgttcttcaatatctcagtggtgtcatcctctttgaggaaaccctctaccagagcacagctgcaggcaagccctttgtgaatgtcttgaaggaagctggtgtgcttcctggcatcaaggttgacaagggcacagtcgagcttgctggaactaatggagaaaccaccactcagggtctagatggccttggtcagcgttgtgccaagtactacgaagctggtgcacgttttgccaaatggcgtgcagtgctgaagattggtcccaacgagccatctgagctgtctatccatgagaacgcctatggcttggctagatacgctgtcatatgccaggagaatggcctggttcccattgttgagcctgagatccttgttgatggacctcatgacattcacaagtgtgccgccgtcaccgagcgtgtccttgcagcatgctacaaggctttgaatgatcaccatgtccttcttgagggtaccctattgaagccaaacatggtcacccctggatcccaatctgctaaggtttcccctcaggtggttgccgagcacactgtcagagcccttcagagaaccgtgcctgctgcagttcctgctgtcgttttcttgtctggtggccagagtgaggaggaggcatccgtcaacctcaacgccattaaccaggtcaatgggaagaagccatggtcactctctttctcctttggaagggcacttcaacagagcacccttaaggcatggggcggaaaagaagagaatgtgaagaaggctcaggaagcccttttggtaagagccaaggctaactcagaggcaactctgggaacctacaagggtaactcacagcttgctgatggtgcctcagagagcctccatgtttcgaactacagctactgatcaatcgaagttggtgttgtttgaagagactagtgcgagtaggaatcggtattatgggtacaacaaccgaatttcttgttgataagtattattgtggtttgactcttcccagaataatcgtttggaattttgctttttgttttcctagtgttccttttatgtcaattttagtaattcagtgtatttggtcaaacctgtgcaacagggaagggaatgtaactttgttttcttgaaagacaccaccgtgctgtgaatgaggctttgtgtttatttttgcg

SEQ ID NO: 11896 - DNA, 846 bp, Glycine max
  Clone ID: 701141080_FLI
aaaaattggttgaacaatcgaaaagctaggctagctcgcacagctagggatgttaaagcagcagcaggtgatgacaatcctgtcccagagaagcagagagggccagtacctgggtcctatgactcacctggcagtccaggtcaaaatgttgtgcttgttggtgtacgaggagacgaaattggcagaggaaaagtgtttcaggtgcacggtaagtggtatggtaagagcttggaggaattatctgcccatgttgtggatattagtgagctcaaagctgataaaggcatgcggctaccctatccatcagaagccactggcaacacatttgcagaggctgaaactaagttaggagtcatgagggtgttatggggttcaaacagagtttttgcattgcgacctgaatgagtttaatcatgcttcattagctgcaatctgttgtcaatcttccatgtggttccttgaatgcgcatgttctttatttccataaacattagctgaagggatagcagattggttggctgagaagaacaataccgaatagaaagagtccagtttgttagccaaggatgggtagaaactagaagaggacacttatgttgaaaacaaggttgattcagcaatggaagatggtttagtttaggatataacccaagagccataatcggcagcaaaaatgttggtagggtcttgtacaatatgtggaactgtggtaacgagtgataagatctgaatttaacttacagggaacaagtgaacgtaaattctgtttagattaaaatttgcgaatcttgctcatttcatgtcaacagttataatatcataagaaaattaaaagattagattatt

SEQ ID NO: 11897 - DNA, 1879 bp, Glycine max
  Clone ID: 701141106_FLI
gaaaatgctgcagaggcagctaagagctgtattgatactgttttgctgtgttcaatttcatgtccaaagttgtgatgaaattgaagatgtaatcagcagatctcaatttccagaagggttccttttcggaacaggcacttcctcttaccagattgaaggagcgtattttgaagatggaaagggtttaagcaattgggatgcttttagtcatacaccaggaaagataaaaaaggatgaaaatggtgacattgcagatgatcattatcatcgctatttggaagacattgagttgatgtcgtctcttggggtaaatgtatatcgattttctatctcatgggcgaggattctaccaagagggatatatggggacataaatccaagtgggataatgttctacaacaagattatagacaatctgctgcttagagggattgagccatttgtgacaattcatcattatgacttgccacaagaactggaagaaagatatggtggttggattagtcccctgatacagagtgattttgtccattttgctgaaatttgttttaagagctttggagacagggtaaagtactggactaccatcaatgaaccaaacctgtttgcagattttggctatatggaaggaacatatgcccctggtcactgttccccaccttttggaaattgtaataccgggaactctgatgttgagcctctcattgtcatgcacaatatgttactgtcacatgccaaggctgttgaattataccgcaagcactttcaggcaaagcaagggggaaccattggcattgttgcattttccttcatgtatgacccacttagagatgaagaatgtgataggcaagcagtgagtaggggcttggcttttgacatagcctgggtcttagatcccttagtttttggtgaatacccacccgagatgcgctctatccttgggagtaagatgccagtgttctctcctgtggagaagagtctcataaaaggaagcctagacttcattggcatcaatcactatggaactctctatgccaaggactgctccctctctacttgttctcttggagcagatcatccaatagcaggttttctagaaagaactgcaacaagagatggcattccaattggtgatccgacaggagtaccagatttctttgtggttccaaggggtatggagaagcttgtagagtacattaaaataagatatcgtaatatgcccatgtatattacagaaaatggatattctcaaccgcctaagccggatgtgacaatacatgatttactacaagatttcaaacgaatagattatcataaagcctaccttgcagctctgctcagatccataaggaaaggtgcggatgtaagaggatatatgatatggtcattgttggacaactttgaatggacaagtggctatgacataagatttgggctatattatgtggacagaggcactcttgaacgaattcctaaactttctgttcaatggttttctagtttcctcaacaacagtagccaccccaacataacagaacacttgagcaagcaacatattgaaagcaaagatgtgagaaatgttggttttgattttatttgaactatcccgtcaaacacggttaacattttcttactcatatcaatttattgtttttggacattattaatcttcagacatttttctaaaacatcgagaggaagacatggaagttgaagaaaggctcacaatgtagatctgaaaatatacaatcaagtatcaaaagagttacaacactttgttgtttaaacaagatttgttgattactaattactagctaaatgtaagtaaccagttgtgtagatccatgctttagtggaaaaataatttttttgaaattat

SEQ ID NO: 11898 - DNA, 1513 bp, Glycine max
  Clone ID: 701141457_FLI
ccatacccccaacacaatcttcccctacatcttggtgtttgaacgttgcatagcttctcatttaccatggccaatgcactacataacgctgccatctccagagtcatgtttggagaccaatattccatttctcgttgcgtggttccatccctatccactcttcctctcagagccatgcacaaaggaaaacacgttgagctgaacagaacggttatggtggtaaaggcaaagactaatagtgattttgatgactcagacgttgacatttctttgagccacagagttaatgctgtgaaactttccaaaactctatccatatgtgatcatgccactgctcttttacaagctggagttcccgttattcgcctatttttcggagaatctgatttcgacacacctggtgctatagctgaggctgggatgaatgcaattcgtgaaggttacacgagatatacccccaatgctggaacattagaattgcgccaagcaatttgtcataagctaaaagaggagaatggaattacgtattctcctgatcagattgtggtcagtaatggagccaagcaaagtattgttcaagcagtgcttgcagtttgttccccaggggatgaggttattattccagctccattctatgtgagttacccagaaatggcaagattggctcatgcaacacctgtgattcttccaagccacatatctagatctgtctactcgaagaaattacttgaagagatagcccaaattgtagcaaagcaccccaggcttctggttctctctgatgaaaattatgaacacataatttatgcaccggcaactcatacaagctttgcatcgttaccgggaatgtgggacagaactctaattgtgaatggactttccaagacatttgcaatgactggttggcggcttgggtatattgctggtccaaaacattttgttgctgcatgtgaaaagattcaaagccagtttacttcaggggcaagtagtatatctcagaaagctggggttgctgcattgggactaggctatgcaggtggggaagctgtttctaccatggtgaaagctttcagggaaagaagggatttcttggttgaaagctttagagaaatggatggtgtgaaaatatgtgaaccacaggggggattttatgtattccttgatttcagctcttattatggaagagaagccgaagggttcggtgtaattgagaattctgactccctctgtcgatacctgctggacaagggcctggttgccttggtgccgggggagtgcatttggagatgatacttgcatccgcatctcttttgcagaatcccttactactttaaaaacagccgttgagagaattaagaaagcacttatccctctaagctcttctgcgcttgtttaattaatggcaattgtgttctctcttcttcttatgttttactttttagttgcagtatgtagtatgtttactatgaaaatgagtaatgtggcaattggcatcctcttattatattttctt

SEQ ID NO: 11899 - DNA, 1038 bp, Glycine max
  Clone ID: 701141515_FLI
gatctgatctgctgaaacacgccacactcttcttaccatgggcctcctcgatcacttgtgggatgacaccgtcgccggtcctcgcccggagaacggccttggcaagctccgaaagcaccacaccttcgctttccgatctgcctccggcaagggtacgcatgcgcatgcccttgctgaacttaatttcccaaattcattttagttattctaaaaataatgataataataataacaagaaccgcagcaagaattagttcttatgatctcacgcgatcataaaacgaagcaagatttgtgaggtttttaatttaactgaagtgataagtatgattattatatattaattctaaggtgaaggcgttttcgttgtgtggttttggtggattcagaatcagacagcggaagcgtgaaatcgtacggtgaagatttgccggaggatgcggtgagagtgacgcgaagtatcatgatcgtgaaaccacctggtggtaaccagagtccgagcggatccgctccggcttcccccgccggttctactcctccggtgtctcctttttcgggagctagagagtccttccgttttcggagaaggtcgacatcagatgcgtacgagaagacaggccagaacagaccaagctcttcttctcctttcgatgtgtgacaaatgagcccgaccactatctcctccatatatggatgactgaaaatacaaatatatagtttgttttcctctggcctttgctgatgatgctgtgtccatttttgtttatcttttgtgcatatagtatatagtatatagtatatatatgaatatgtttacgagttcatcagttgagcggtttaagtcctgagacgatcgaggtagctgtgtgtgtggtttaacagctcagtcttgttttactgttgaacttggttatggttctcaagctgtaaataagtaataacgtagtgtacgtaggtgtgttttggttatgtgtactttgtatataaaagcctttccaaggtttgttcttagtgttaatttgctttcaagctctcagc

SEQ ID NO: 11900 - DNA, 898 bp, Glycine max
  Clone ID: 701141552_FLI
gcttgttttgtttgttgctacagttttggtagcatatgaatgccatggctcagactaccagaagttccctctccaaatgaaaactgggtttggtgggcaatacagcaatgaggtggcatgtgccagttggaggcttggcgtggaagcaaacaacgtagtcaagtggcaaactgttcctgcagcttgcggagagtacatagctgactacgttctaggagaccaatatagatcagattccaaaacagttaaccaacaagcttatttctatgctaaatccctcaaactcaccaacaaagatgtctttgtcttggacgttgacgacactactctctctaatctccagtattttgctaaccatggatttggtgtggaaccacacaatacgacggcgtttaagaactgggttcttgatggcgaggcattcgcactgccagagactcttaaaatgtacaacaaactgttggctctcggcatcaagattgtattcttatcagaaagaccactgagtctaggggatgtaacagccaagaacttaaaggaggttggattcaacacatgggagaagttaattctcagggatccatctgagtactctggtaagttatcatttgaatacaaatcagctgagagagagaagctggagaaggagggatacagaatcattggaaacgttggagaccaatggagtgacctcctgggaagcaacaaagggactaggacttttaagctgcctaatcccttgtactatgattaagctctcaaatcaagcctctaagttgctccttaatttctatgaaataagatcctgagtattattacttagtcatgtaggggcactgaacaatgttgttttcccttttcgaggctttcatgaattatgagctcttgttccattaag

SEQ ID NO: 11901 - DNA, 1130 bp, Glycine max
  Clone ID: 701141706_FLI
aactccatcacacatgagccagcaagtgttgcggcctctaagacagtggccatggttccaccaccaccaccaccgcacttgcgtcaccctttcccttcaccaccttctcacccctccaccaaaaacctctcaccgtttttcttttgccacggtcgctgcttcgtctcgtcccaaggttcgaactccgaagtctcccgtaccaccaccacccactgccgattccgatctggaggagaagaagagccgaaaccaattgaagcgagaagccaggcgcactgtcaagtggggcatggacttagcttccttctcccctccccaaatcaaacgcatccttagggttgcttcctcggaccatcttcttctcttcgaagctcttatgttggttaagagactgggacctgatgtccgtgaaggaagacggagacagttcagttatattggaaaattgctacgggaagtggatcctgagttaatggaacgattaattaaagcaacaaaagattccaatcagaaggagctgcaagctttaactggcttagggcctgatgatcctgaacctgaagatgatgatgacttggtagaatctgaatccgaggaggatgaggaggaatctaattggcatgataatcaagtagcgaggtggtttgatggtttgatcagtaaggacattgaaattaccaatgaaatttattcagttcagggagttgaatttgatcgtcaggagttgcgaaagcttgtacgtagagtgcacaatactcaagaaatgaaggctgataatgaagaagagaagaaaaaaatagagacagcaacaaatggggctaagaaggctctcaaccgtttccttcgtggcctttcaaagaggattcctaatgaataatattttcattattttgatgtgtcgtgtctcggcttgaagaattcaccaaaagaggtatggtaagccatacattgtcttggtgggatacatgctacggaaaatcgtctattctttttacgttgaatgatgaatactactctctatttttttgttaagattagaccattaaattatagtgttgtgctcttaaaacattagtattaggtttatacttgatatcttgaggttttattcataaatttttctccgcaac

SEQ ID NO: 11902 - DNA, 1848 bp, Glycine max
  Clone ID: 701141717_FLI
aagaggggagaaccaggcgaagcatgaaaatctgctcctcggagaaaattgctagtagtaccccacaaccaccatcaccaccatcaccaccaccaccaccgccaccgccgccaccgcaacaacaattgctccgacgacgtcgtttcctctctccaccacttgaatgaatgggcaattgcggtaccagagaggaatctgctgtggtttccaacgctcaagttgttcagcagcttcaccatgcgacgtcgttgggcgcgagtgcgaggagccagaatgcaggtagcgagaagaagcacggtcacggtcacggtcacaggcacaatctgagcgagtgcgcttcggatctgagcgagtcctgttccacaccgcacggtaacaatagcaacaacacgctgctctacacgcacgtgatcgccttcacgctctacgagttggagaccataacgaagagcttccgcggcgactatatcctcggtgagggaggcttcggcaccgtttacaaaggttacattgatgagaacgtcagagtcggactcaaatcgctccctgtcgctgtcaaagtgttaaacaaagagggtttacaaggacatcgagagtggcttacggaggtgaattttctagggcagctgaggcatcctaatctggtgaagttgattgggtactgctgcgaagatgatcacaggctgcttgtgtatgagttcatgtttcgagggagtttggaaaatcacttgttccgaaaggcaactgtccctttatcatgggctacaagaatgatgattgctcttggagcagccaaaggacttgcctttctccacaatgctgaaaggcctgtaatctatcgtgacttcaaaacgtctaatatattattggactccgactatacagccaaactttctgattttggactagctaaagcaggaccacaaggtgatgaaacccatgtatccacccgagtgatgggtacatatggttatgctgcccctgaatatgtaatgactggccacctgacggctaggagtgatgtctatagctttggcgttgttcttttggaacttttaacggggaggaaatctgttgacaagaccagacctggaaaggaacagagcttggtagattgggcacggccgaagctcaatgacaagagaaagctccttcaaataattgatcctagattggagaatcaatactcagtgagggcagcacaaaaagcatgtagcttggcttattactgtttgagtcaaaatcccaaagcaaggccactaatgagtgatgtggttgagacattggagcccttgcaaagttcaagtgttggtccaggtgaagtctcattatctggatcaaatagtgggagtgctgggccttttgctatgaacaaaatctctgactaccggatgcgccacaagttttcaaacaacgttggtcccggtgctacttgtcggtctccgaacccgaattgctcaccaggtggcccagcaacattacgggtcagatgataatcgcatgccatgaatccatgtctggtgtgctttatctcaagaaaatggtgtttgttgttaaaatgtgggtgcatccttgtatttgtttctttgtacatgatatgataatatggtgacaagaagccccggtggatcatttttgtatcaatttttggtcttctgttcatctgggtgggaattagtgtgtgaaaatctgtgtacttgtaatcatcgcggcatcagaactaatataacgggctcctcacaacatcagcagtgcaagagtaagacgacccgaacacgcaagtacctaatgatgtattttatttgagattattaggtaaaatgagggtaagataagacaatcttagtt

SEQ ID NO: 11903 - DNA, 985 bp, Glycine max
  Clone ID: 701141767_FLI
gacgccgtcactaacttcaagcctctcgccggcgccgacgacgccgaagccgagttcctcagcacgcattccaagtccgagatcgtcgacatgctccgcaagcacacctacgacaacgagctccagcagagcacccgcggcggcaggcgccgccgggacgccgaaaccgcgtcgagcggcgcgttcgacgcgaaggcgcgtgagcagctgttcgagaaaaccgttacgccgagcgacgtcgggaagctgaaccgattagtgataccaaagcagcacgcggagaagcactttccgttaagcggatccggcggcggagccttgccgtgcatggcggcggctgcgggggcgaagggaatgttgctgaactttgaggacgttggagggaaagtgtggcggttccgttactcgtattggaacagtagccagagctacgtgcttaccaaaggatggagccggttcgttaaggagaagaatcttcgagctggtgacgcggttcagttcttcaagtcgaccggactggaccggcaactatatatagactgcaaggcgaggagtggtaaggttaacaataatgctgccggtttgtttattccggttggaccggttgttgagccggttcagatggtacggcttttcggggtcgaccttttgaaactacccgtacccggttcggatggtattggggttggctgtgacgggaagagaaaagagatggagctgtttgcatttgaatgtagcaagaagttaaaagtaattggagctttgtaacattacatagtttttgagtttcttttgttaattttgtaactgttgaattcgtgaggtagagatggtgatggcgttgttgttgcaagttgccactcacaaaacgtgtatattcttaatttgatgggaaaaaaaaagagaaattagggcaagaagaattgtataatgcaaaggtttttttcaaaagaaaggaacatggagtgcaactatttatttttgt

SEQ ID NO: 11904 - DNA, 563 bp, Glycine max
  Clone ID: 701141953_FLI
attgcacctgacactcagcacttgttcttgaatgaactgacaaaattaatcttggagaagactgccctgtatttgacaacttatttgaattttgtcagatttatgctggtggaactatagatgctgcacgtcgattaaacaatcaactgtgtgatattgctatcaactgggccggtggactacatcatgccaagaaatgcgaggcatctggattttgttacatcaatgacttggttttaggaatcttggagcttcttaaatatcatgctcgtgttttgtatattgatatagatgtgcaccatggtgatggtgtagaagaagccttctacttcactgacagggtgatgactgtcagttttcacaagtatggagattcgttcttcccgggtactggcgatgctaaggaaataggagaaagagaaggaaagttttatgccataaatgtcccattgaaggatggaatagatgacagtagcttcactcgacttttcaagactattatttccaaagtagttgaaacatatcaacctggtgcaatagttctgcagtgtggagcagattcg

SEQ ID NO: 11905 - DNA, 584 bp, Glycine max
  Clone ID: 701142029_FLI
aaaaaagttaagatgggtaaagtttattttaatttatattaaaaatttgtgcgatacctagcttcttcattattttacttttatctctttctgatgatttgttaaagaaaatcaaatttgtggtacatcaacttggtagtgtcaaattgttaataacttgtgttggtttatgacttgagcagagatgatggggccaacaatggtggcagaagcaagaacttgtgagtctcagagccaccgtttcaaggggccatgtttgagtgacaccaactgtggctctgtttgccgaaccgaacgtttcactggaggacactgccgtggcttccgtcgcagatgcttctgcaccaaacattgttaattttaaaaaattaattaagagtgctttgatagaagatgatagatctatcatctttctactcgtgttgttaattaaccactttgtgtttgagaataagggttacccattctactatgggtttctttgtttgcctcttattttatctagttagagatccttttatgaaacgagtgatcagtgtgaaggaattatgttatctgtgttgttaatttaatattattctagt

SEQ ID NO: 11906 - DNA, 1070 bp, Glycine max
  Clone ID: 701142412_FLI
ttgctactgaggggccacaggaacagaaattgaatggaataccattattgcatggtccagaaacagagcgaaaaggctcacggagtatggttgaaggaatgaactttttccggagagtcaatagaacatcttgcatctcaactgaagctaaaaaagtttctagtcagagcatggacagcaatggggaatgtgatttcatttctgattctgattctggatctgctttacttctccttgggactgttcaaactgctgaattgtcagaacacgataatcctagaaatccctttaaaagctcaaaaagacataaaaataagtttactgagcatttgggtgcccagtgggatgtctttcgcagacaagatgttccaaagctcatcgaataccttgaaagacactatgatgaattttcttatacccatgactatcacaagaagatggttcatccaattctagatcagagcatttttctagacagtactcacaaaatgagactaaaggaggaatttaagattgaaccatggacttttcagcaacatgttggacaagctgtcgtcattcctgctggatgtccataccagatcaggaattctaagtctagtgttcatgcggtattggaatttgtgtcccctgaaaatgttaccgagggtatccagttgttcgatgaggtccgactattgcctgaagaccataaagcaaaagcagacatgctggaggttaagaaaatggcgcttcatagcatgaatacagcaattaaagaagtacgtcaacttacaagcaaaacatgattgcaccagctaaaatatacttacatgcctctgagcctctagagatctcatgtctcaacctgacttccatatcttcattcttgtatatagattaatgctcggacaaatttatatctagtaaggtacttattaaattgattaattttcgcctctattttcttttcttctgtgaagtttatgccctaccggaatttgaaataaatcttatggtctgtatatatatttctttagtttatttgaagtaaaatttgatatgaacttttgctagttttaaatgctatc

SEQ ID NO: 11907 - DNA, 645 bp, Glycine max
  Clone ID: 701142523_FLI
gctcccttcttgagtgacatatgcaaattctatagggactttcatgtaaaatctgaccgtgtccatggaattttcctccatgatcctgtcagttttgtggcagttgtgcgtccagatcttttcacatacaagaagggggtagtgagggtagagacacaaggcatctgtgttgggcacacacttctggaccaaggattgaaaaagtttgtccaaatttaaaactattattattcactctaatttttccttataatttagtgctcaacataattggattcattcatgcaggtggaatacgagtaacccatggacgggttattctcctgttgcagttgcttggactgtgaatgtcaagggagttcttgattatatcagggagctattgatgaaaccctgaagtataggctataggcatttgtactacccatctgacagacaaaagcattggaaagtgatagaaacgatagcttcttatttgcaaaaacatgtataaggtcattttcattatttcactgaatgtcaatcagaactttgggcgtcaaggattcacaaccagttcttacgccgtttaatattataaagttcatgtaccaatggaattctctaccttctttgagaagaaagcagtcattctttacttttcct

SEQ ID NO: 11908 - DNA, 1872 bp, Glycine max
  Clone ID: 701142617_FLI
ttcagtttcacatatgcacatgcattctctctctctctctccacaatctcacctcgcgtgtcagaataactcgtgactcactcagtcgccacaacacaaacatggtaataataataaaatactatacatatatatatatacccaccatcgaaaaatcagaacagaacccaaccaaagcagctatggcggcgatgcagaggccactcaagagaaccattgcaatcgccaagcaacgcgcgtgcttttcctctctcctaccctccgccgctgccgccgccgccgccgataccgtcgcgcctccgcagctccccccgttcgatcaccagccgcacccttacaacggtccctccgccgatgaagtcttcgccaagcgcaaaacgttcctcggtccttccgtcttccactactataagaaacctctgaatatcgtggaagggaagatgcaatatctttatgatgatagtgggaggcgttaccttgatgcatttgcgggaatagttactgtttcttgcggacattgccaccctgaaattttgaatgctatcacggagcagagtaaacttctgcagcatgctacaaccatatatctacaccatacaataggtgactttgctgaggcattggcagcaaaaatgcctggaaaccttaaggttgtttattttgttaattctggttcagaagcaaatgaattagcaatgatgatggcccgtttatatactggtaatctcggtatgatttctttgagaaatgcatatcatggggggagttctagtacacttggtctgactgctctgaactcgtggaaataccaaattccagagggccatgttcatcatgttatgaatccagatccatatcatggagcctttggtacagatgctgctagttatgcaaatgatgtccaagaccatattgactacggaacttcgggaaaagttgctggatttatagccgaatcaattcagggagttggcggagcagttgaactggcaccagggtatttgaaacttgtttatgacattatacataaggctggtggtgtctgcattgccgatgaagttcaaactggttttggccgaacaggaagccattattggggatttgagacacagggtgtcattcctgatatagttaccatggcaaagggtattggcaatggtctgccattgggagctgtagttacaactccagaaattgcaagtgtgatggcccaaaagattcaatttaatacctttggtgggaaccctgtctgctctgctggtggacttgcagtgcttagggttcttgataaggagaagcgtcaagctcactgtgctgatgtcggatcttatttgcttgaacgtttgagatttctcatggaaagacatgacatcataggaaatgtcaggggaaggggactaatggtaggcttagagttggttactgaccgaaccaacaagacacctgcaaaggctgaaactgctgttgtgtttgaaaaactcagagaactcggtgtgctagttgggaaaggaggacttcatggcaatgttttcaggatcaagccaccaatgtgtttctccaaagatgatgcagattttcttgtggatgccttggactattctctatctaagttgtgagctgattgtgcatcttgctagcatgaaatgaaatcttcgacaatggagccaaattactacaagccaacaacaaaaagctcatttagttcatagaaatcaccatgaataatgtaatgttctccccgttgagaagagagggggtttccctccctttttgctgaacattataagttgaatgctgactattattgtatataaatttgggtttcatgacatcaaaaagttgcattcaatctgcagagtaatgtttaaatcc

SEQ ID NO: 11909 - DNA, 948 bp, Glycine max
  Clone ID: 701142764_FLI
ggtagcatatgaatgccatggctcagactaccagaagttccctctccaaatgaaaactgggtttggtgggcaatacagcaatgaggtggcatgtgccagttggaggcttggcgtggaagcaaacaacgtagtcaagtggcaaactgttcctgcagcttgcggagagtacatagctgactacgttctaggagaccaatatagatcagattccaaaacagttaaccaacaagcttatttctatgctaaatccctcaaactcaccaacaaagatgtctttgtcttggacgttgacgacactactctctctaatctccagtattttgctaaccatggatttggtgtggaaccacacaatacgacggcgtttaagaactgggttcttgatggcgaggcattcgcactgccagagactcttaaaatgtacaacaaactgttggctctcggcatcaagattgtattcttatcagaaagaccactgagtctaggggatgtaacagccaagaacttaaaggaggttggattcaacacatgggagaagttaattctcagggatccatctgagtactctggtaagttatcatttgaatacaaatcagctgagagagagaagctggagaaggagggatacagaatcattggaaacgttggagaccaatggagtgacctcctgggaagcaacaaagggactaggacttttaagctgcctaatcccttgtactatgattaagctctcaaatcaagcctctaagttgctccttaatttctatgaaataagatcctgagtattattacttagtcatgtaggggcactgaacaatgttgttttcccttttcgaggctttcatgaattatgagctcttgttccattaagaaattgtccgttccaagttaaaccagtttagtattattattaagtaagtcttaaaaaatggaaggatataagttttt

SEQ ID NO: 11910 - DNA, 2325 bp, Glycine max
  Clone ID: 701142782_FLI
ctccgccctctggaactgccccaaatgcagatccgaataccccaaatctcacattcccaaaacctatttctgcttctgcggcaaaatagagaaccctcctaacgatccatggattttacctcactcttgcggcgaggtttgtggaagaccgttgaagcacagttgcggccaccattgtttgctactctgccaccccgggccgtgcccctcttgccccaaactagttaaagttcgatgcttttgcgggtgccttgaagatgttcggcgatgtggcttcaaggaattttcgtgtaacaaaccctgttccaagtttttagattgtggggttcaccgttgcattgagctttgccaccctggcgcttgccctccttgccggacacgtggagtgcacgcgtgccagtgtgcgaaggttaaagaggagagggagtgctgtgatcgtgttttccagtgtgggaatccgtgtgagaagaggcttggctgtgggaagcatgtttgtgagagagggtgccattctggtaagtgtggtgagtgtccccttaaggggaagagaacgtgcccttgtgggaaaagggtttatgaaggaatgccttgtgatgctcctgtgcagctatgtggagctacctgtgataagatgttgccatgtggctaccacaggtgccctgagcggtgccaccgtggacagtgcgttgagacttgcagggttgttgtgaagaagtcatgtcgttgtggcagcctcaagaaagatgttccttgctatcaagatttggcgtgcgaaaggaagtgtcagaggatgcgtgactgcggtcggcatgcttgtaagcggcgctgctgtgatggcgattgccctccctgctctgagatatgcggcaggaagcttcgatgtaagaaccataaatgcccttctccatgccatagagggccttgtgctccttgcccaataatggtgacaatttcatgtgcatgtggagagacacgttttgaggttccttgtggtaccgaaatggacaataagccacctagatgtcctaaaccatgtcctatcactcctttatgtcggcatgcatcaaatatcaagccacataaatgccattatggagcctgccatccttgtcggctaccttgtgccaaagagtaccaatgtggtcatacatgcaaattaaggtgtcatggtgctaagcctcctcctaatccagagtttactcttaaaccaaagaaaaagaagattatacaacaaagtgaaagtgttcctggcactccatgccctccgtgcccagaacttgtgtggagatcatgtgttgggaaacacattggagctgagagaatgatggtctgctctgataaatcacagttctcctgtgaaaatttatgtggtaatcctctaccatgtggtaatcattattgtacaaaaacctgccatgccttggagaaccagttacaaggaagccaaccttgtgaagattgttatctttcttgccaaaagagagcctgcatgtccacatcactgccctcggcgatgccatcctggagactgtcctccatgcaaggtgctcattaaacggtcatgtcactgtggtgcaatggtccatgtgtttgagtgcctatattacaacggcttgtctgcaaagggtcaagagactgtccgctcatgtggtgggccatgtcacagaaagttgccaaattgtacacatttatgcccagagacatgtcattctggtcaatgcacaaatgctgagaaatgctgtaaaaaggtcactgttcgatgcaaatgccatacattgaaaaaggagtgggtttgtcaagatgttcaagcagcatatcatcttgctggttgccatcctagggatattccaaaaaatcaatttggaattggactcattccttgcaattctgattgtaacagtaaagtgcaggttgttgagtcagaactacaattgcgtaaaactagagttacagaggtacaagagccagatgtagaaaaatcagttcggaagcggcgaaaaaggcgggaacaagttctagaatccaaggaaacttcaaaactacagaaaattatttcaagaatgaagcggcttcttctatttgtctttattttggtcatacttcttgctgctacatattatgggtacaagggacttttatggctcaatgattggatgaatgaagtggatgaacgaagacaaagatattctagaatcaaatgattatttatcagtttgattgccccctttatccaccatttttttcattagtctgattacatttttttaaggactgattacattatttttcttccctttcaatgaggatatataatgcgttaaattc

SEQ ID NO: 11911 - DNA, 1444 bp, Glycine max
  Clone ID: 701142852_FLI
cttgcttgcaccatgacccatgtcatgccttgggtgaccttgttggaattaagaagcatttcaggaggaagcacagcaatcataagcaatgggtctgtgaaagatgctccaaaggctatgcagtgcagtctgattacaaagcacatctcaaaacgtgtggcacccggggccactcttgtgattgtggccgcgttttctcaagggttgagagtttcattgagcaccaagatgcttgcaacatggggaggctcaggcctgagtctcaacctcttcaaccatctgcatgcctttctagaacagcctcaagcccgagtccttcaagtgaaaccaatttcagcacagctccatggccaacaaggatgataataccaaagccatcagaaccaccaacaatcttcatgaataaccctattactgctatcaccactgctgaaacctcatccaagagcaacaacaaactactccaccccaacttggatcttcaactctccacccccaccaccaccaacaacacatcaaatgttgcaaaccgtattgatgctgcaatatcacctaagagggatcatcatcatcatcatgagaaccattcaacccatttgcaactctcaattgggtcatcagatatgagtgagaagaacgaatcaaacaggaactcatcagagaagagcagcaacagcaacattaatgatcagaataataataataagcagtccaacaacatggccttgttgagggttcaagagcaagcaagggagcacttgaggatagccatggcagagaaagcatatgctgaggaagcaaggaaacaagcaaagagacagattgagctggcggagcaagagttcacaaacgccaagaggataagacaacaagcacaagcggaactcgacaaagcctactccttgaaagaacatgcaatgaagcaaatcaactccaccatgctccaaatcacttgccatggttgcaaacaacagttccaagctcgaaatgcagcaaccacccccgatgagaattccttggtgttgagctacgtgtcttctgctattaccacggaaggaggaggagaagtagaaaatgataataatgcaaaagatcatggcaaagacaacaactaactccactacttagagagagataatcatcatcatcaccgtcatcatcatctttctctctaaagtttataattctgtattttattttcctatgtcctcctctatgggttaatacttactagtaatacccttttttccatttcaaggctaatatctttgtgcattggtataccaagtgaagtgaaggtgagtgatcgatgttgattatatgtaagtgggatattataatagcgctcgggatggagaaattaaagagtgtaattcttcgtgtatcttgcagtttattgttgtgccatgtaatttgttaattaaatttggtataaatgcagact

SEQ ID NO: 11912 - DNA, 1067 bp, Glycine max
  Clone ID: 701142885_FLI
ggcacttcgttgcttggtgatgtccctttctgttctcttcactcttggtcttgcgagagaaagccatgccagagacgaagatttttggcatgctgtttggccaaacactcccattccaagttcattgcgagatcttctaaagcctggccctgcaagtgttgaaatcgatgatcaccctatgcaaattgaagaaacacagtacccgaaaaccttcttctataaagaagaccttcatccaggcaaaacaatgaaagtacaattcagcaagcctccctttcaacaaccatggggtgttggtacatggttaaaggaaattaaagacactactaaagaaggatatagttttgaagagctatgcatcaagaaagaagccattgagggagaagagaagttttgtgcaaaatccttgggaacagtaattggttttgccatttcaaagctgggaaagaacattcaagtactttcaagttcctttgtcaataagcaagaccaatacactgtggaaggagtgcagaatcttggagacaaagcagtgatgtgtcataggctaaatttcagaactgcagtattttactgccatgaagtccgtgaaacaacagctttcatggttccattggtggctggtgatggaaccaaaactcaggcacttgctatttgccactcaaatacttctggaatgaatcatcaaatgcttcatcaacttatgggagttgatcctggaactaaccctgtttgccatttccttggaagcaaggccattttatgggtacccaatttatctgtggacactgcctatcagaccaacattgttgcttaattagtccatgcatcttgagcaccatgagaatgagattgtgtataaaataaattatcatgtgctgtgtgttgtgcaagtactaccttctctagctagattgctagagctagaatttcaacctacctatgtgtactgataagatctgcttccctacttaaagagagcatcatcctgtgatcagtgtgcttcgtattctctctctctatatatatatggtaaaaagtggttatctcgtgcctcgccttgagct

SEQ ID NO: 11913 - DNA, 1051 bp, Glycine max
  Clone ID: 701143116_FLI
gtgaaaatgtcagtggtggttgtggttattggtgtcggtgtttgcactgtaactgatgtaaaagttaacctcaaaggtttcatgtgtgcctgtatagcagttttgtcaacatctttacagcaaatttcaataggttctcttcaaaagaaatattcaattggatcttttgaattgctgagtaaaactgctcccatccaagcgctttttcttcttattcttggtccatttgttgattactacctcagtggcaaattgataaccaactataagatgtcttctggtgccattttattcattcttctttcatgctcgctagctgtattttgcaatgtgagccaatacctttgcattgggcgcttttcagctgtttccttccaggttttaggccacatgaaaacagtatgtgttctgactctgggatggctgctatttgattcggagctaactttcaaaaatatcatgggaatggtcatcgcagttgttggcatggtaatttacagttgggctgtagagcttgaaaagcagtcaaatgcaaagaccttacctcacgcgaaaaacagcatgacggaagaagaaattagattattgagggatggagtagaaaagagtcccctgaaggatgttgaacttggtgaggcccaaggatagattgactcagatttggtggtgaaattgatgagaaatgatgcaggcaattatattgtgtattgctttataatttggtttgttcttttgtctagtttacctagtagtaaaacttggtttctatttgctcacactggcacggatccagttttagaaattgtgttcccgttcatcagcaatgtttctttgttagttttatttcatttgttgttatgttgaggttatttatttggcctgccaggaaattgctagatgaacaatatgatggcgccattaagatgtataatgtgcacgctaatgatacgcgatatcaattccctcttcaaacttcttttcgtgtcttcttcttttaatgtgaaaaaatattttattgtgctcttcttatgatatacatttatcattattt

SEQ ID NO: 11914 - DNA, 1898 bp, Glycine max
  Clone ID: 701143140_FLI
gcgagattaaatggacaggaggttgttattaaagtacaaaggcctggtctcaaggatctttttgatattgatcttaaaaacctgagggttattgctgaatatcttcaaaaaatcgatccaaaatcagatggcgcaaagagggattgggttgctatttatgatgaatgtgcctctgtcttatatcaggagattgattacaccaaggaggctgctaatgcagaattgtttgcaagtaactttaagaacatggattatgtgaaagttcctacaatctactgggattataccacaccacagattctgacaatggagtatgttccagggattaaaataaacaaaatacaagctttagatcaactgggtgttgaccgcaaaaggttagggagatatgcggttgagtcatacttggaacaaattttatcacatggtttcttccatgctgaccctcatcctggaaatattgcagttgatgatgtcaatggtggaagattgatcttctatgattttggaatgatggggagtatcagtccaaacattcgagaaggtttgcttgaaacattttatggagtttatgagaaagatccagacaaggttctacaagcaatgattcaaatgggagttcttgtccctactggagatatgactgctgttagaagaacagcacaattcttccttaacagttttgaagagcgcctggctgcacaaaggcaagagagagaggaagcaacaactgaacttggattcaaaaaaccattaagcaaggaggaaaaaataaagaagaaaaagcaacgtctggctgctattggtgaagatttattatctattgcagcagaccagcccttccgatttcctgctacattcacatttgttgttagagccttctcagtgttggatggcattggaaaggggcttgacccacgttttgacatcactgagattgccaaaccttatgccctggagttgctcaggtttcgtgaagctggggttgaagttgtcctaaaggacttcaggaagagatgggatagacaatctcaagcattttacaacttattcagacaggctgatagggttgacaagcttgctgacattatccaaagactggagcaaggtgatctaaagctgcgagttcgaactttggaatctgagagggcattccagcgtgttgctgctgtccagaagactatagggagtgcagtagctgctgggagcctaatcaatcttgcaacagttttgtatctcaattcaattcgggtgcctgccattgcagcatatatcttctgtgcactctttggttttcaagtgctcttgggcattgtcaaggtcaagaagctagatgaacgggaacgattgataacagggactgcataagcagctacatgatttaggattaggaccgaaaaatagctcatgttaaggtcatggttacaagtcaaccttcagagcatgaaaaggattaaatgacctggggagctgaaagaaagcattacccaacatttcggaagacttcagcaagtataaaaatttcaattagcaaatgatgggggctttctccattcacctgtttcagttaataaaaaaattgtgctctacaatagccaattggctttagagccacatttttgtcattacaccccacctccctcccaaaaaaattatatgttattgccccatagtaacatgtataggtatgatgtagagtttggatatattcacaattcactactacattccacgcccgaacttaaccgaaatctgtcaaaattcagctactatttttctatgtagcatgactcttattgtaattactattacagtattatacagtatgatgcagcttccaacaaaaaattggagaggaagctttgccccgaaattgacttccatagatttgttcaatg

SEQ ID NO: 11915 - DNA, 825 bp, Glycine max
  Clone ID: 701143172_FLI
cggcactgcagccgtagaaggaaaaccgaccatggtgcacgtctccttttacaggaactatggtaagacgtttaagaagccccgccgtccgtacgagaaggagcgtctagacgcggagctgaagctggtgggggagtacgggctgcggtgcaagagggagctgtggagggtgcagtacgcgctcagccgcatccgcaacaacgcgcggaatctccttaccctcgacgagaagaacccgcgccggatcttcgagggcgaggctcttctccgcagaatgttccgctacggactcctcgacgagactcagaacaagctcgattacgtcctcgccctcaccgtcgagaatttcctcgagcgccgccttcagacgctcgtcttcaaatccgggatggccaagtccattcaccacgccagggttctcatcaagcagagacatatcagggttgggaggcaagtggtgaacatcccatctttcttggtgagggttgactcacagaagcacattgacttctcacttacaagtccccttggtggcggacgccctggaagagtgaagagaagaaaccaaagggctgctgctaagaaggccgcaggtggagacggagacgaggaagacgaggattagactgttcattatgtctttctctagtgctattagatcttatgccaccttttactttgcctacctaatcgattttggttgttatacattttcatcctttggttcccttgtttgagaaaatattaagtggtgacatattatgtttttgtgaatttggatattttaaagtatcaagattttccattaaataatttttgatgatc

SEQ ID NO: 11916 - DNA, 1407 bp, Glycine max
  Clone ID: 701143195_FLI
ggtatttgttagtacatggaacgtaggtgggattgcaccggatgaagatttgaatatagatgatttgttggagacatgcaacaactcttgtgacatctatatactagggtttcaagaaatagtgcctctaaaagcatcaaatgtattggggtccgaaaacaatgagatttctatgaaatggaattccataatcagggaagccttgaacaagaaaataacacatcaaagggacaaagatgctaaaaaacaggagctaaagaataattttcccaataagaaagaaaatccagctaagtgctgtgatgccccacatgatttccaatgtatcattagcaagcaaatggttggattattcatatctgtgtggattagaagagatctttgtccattcattcggcatccaagcgtgtcatgtgtaggttgtgggataatgggctgcttaggaaacaagggttctatatcagtgagatttcagttacatgaaaccagcttctgctttgtgtgcagccatctagcttcagggggcagagaaggggatgagaagcacaggaactctaatgttgctgaaattttttctcggacaagttttcctagaggccctttgcttgatttgcctagaaccattcttgatcatgatcatgtaatattgcttggagatctaaattacagaatttctctaccagaagaaaccacacgcttgcttgttgaaaaaagagactgggattctttattagcaaatgatcagctaataatggagctaatgagtggaaacatgttaagaggatggcacgaaggagcaattaaatttgcacctacctacaaatattgtccaaattcagacatttactatggatgctgctatcatggcaaaaaggcagaaaagagaagagcaccagcatggtgtgatcgaatagtatggtgcggtgagggtctaaagcaacttcagtacactacaattgaatcaaaactatcagatcataggcctgttaaggcaatgtttatagcagaagtcagggttttaccagagctgatgaaaaacttgcaaagcttgttcctatcagaaagatacgagcaaattaaaactccctttgaagtttccaccactgaagattttgtaaatagaaaacgatcaagcttccggttgtgaattttttgtgtgattcaagctaggctttaaattgtgattgtgattaatgttgcaattttatcacaatcttttgtggagaaaaatttgcataaaatgtgattgatgtgaccgttattacaatcagggacttcaacaaccgtgacattgtcatcactgttgtggttgcacatggtttttttctataaaaaaaaaactgtgatatatgtacataaatgtttaattttacatttgaaaaaaaaaactagaaattcagaggaagg

SEQ ID NO: 11917 - DNA, 1235 bp, Glycine max
  Clone ID: 701143201_FLI
ggaagacttggcaacaacttaccaacccctcaagaagttgtggccctctacaatcaagccaacattcgcaggatgcgaatctacggtccagcacctttgttcgacccagaggagctcacacagtggtccttctatagagccctcatcgctgagttcatagcaacccctgtggatggagtgcctagcccagatgacattgctggtcctgaaccattcaagtttcagtttgatagacttggtgttagggttcctaccatcattatttctccatggatcgaggcaggaaaagtgttgcacgaaccttcggggccattcccaacatcacagtatgagcattcatcaataccagcaactgttaagaaaatattcaatctacctcagtttttgacaaagcgagacgcatgggctggaacactcgaagatctcttatctctaagcaccccacgtactgattgtccaggtcatatctctatcttttctttcgtttttcctttttacttattaaacagatagattttcacttttttattgaataacctaatacaataaaactcgaaaactcacatcaattggtcacttatgaaaataaaaccagtcttaacattattcaaactacactttcatattagtctttagcaaaaggaataataaaacacgcttaaataatgtaaaaactaatcattagttaaatatattaaaatcaatataaacacagaaaacactatatataggtttatatttgtcactatatagtgcatatatacattacgattggtttattttttatgatttctgttacgaatttccagtgaaattgcctgaccccgtcaaactgcgagaggctgcttccgcggaacaacaaacgcaattgagtgaatttcaagaagatttgatatatatggcagcaactctaaatggggatcataataagagtatataccacaagctaactgagaacttaactgtttcggaggcagtgaaatactgtgaagatgcatttggaacattcttgaatgagtgtgagaaagcaaaacaaagtaatagaattgatggatctgaaattgtttattgtgctagaccgcatacggcaccacaatccaaaaatttctggcacaagatgctgtcatgtatattatgtaattgatagttaaatatattttggctaaatatgtttgagatcatgatatatcttatttttattttaaatttctaatagatttttttctattttgagt

SEQ ID NO: 11918 - DNA, 1232 bp, Glycine max
  Clone ID: 701143241_FLI
atgttttccaatacataaattgtgaagatggaaagatgtctggtcctcctggggatgttgcaaattccctcatggacggctattccaagggtaataatgaagtgagacgaaggtctagattcttacgtagaagaggaagagtccgtcgattgaagtacacctggaaatctgctgcttatcattcaattaggaaaaggattacagagagaaaggatcaaccctgccgacagtataatccatgtggttgccaaacggcttgtggaaagcagtgtccttgtcttcaaaatggaacctgctgtgagaagtactgtggatgccccaagagctgcaagaatcgatttcgtggctgtcattgtgctaagagtcaatgcagaagccgtcaatgtccatgttttgctgcagatagggaatgtgatccagatgtttgtaggaattgttgggtcagttgtggcgatggtacacttgggattcctagccaaagaggggacaattatgaatgtagaaacatgaagcttcttctcaaacaacagcaaagggttcttcttggaaggtctgatgtatccggctggggagccttcttaaagaatagtgttggtaagcatgaataccttggagagtatactggagagttgatttctcatcgggaagcagataagcgaggaaagatatatgaccgtgaaaattcatcttttctctttaatttgaatgatcagtttgttcttgatgcttaccgaaagggtgataaattgaagtttgcgaaccattctcctgacccaaattgttatgcaaaggttattatggttgctggagatcatagggtaggcatttttgccaaggaacggatttgtgccggggaggagctgttctatgattatcgttatgagccagatagggctcctgcgtgggctcggaagccagaggcatctggatcaaaaaaagaggatggggctccttcaagtggtcgtgcaaagaagcttgcttaatgggtgtttgttcttcaaaaatcaattcttttaagttattctttaacacgtaggggaagcaatctcattggtagcggaaagaagtattgttttaagttttttgttcgtagcaaggccgtgcaattgttgctgcataggtaactaactacatttaaacaattcattttaatattaatcgactgtatattcaccattccaaacggaaaatacaagcttaatcaaaattccatgcaattctttcccggaggg

SEQ ID NO: 11919 - DNA, 1295 bp, Glycine max
  Clone ID: 701143257_FLI
tgaattgtcaatgactgtggatccatccaacaccacagcagtgcacactgctgcattacaagggcatactgagatagtaaagcttctattggaagcaggtagtaatctggcaaccattgctagaagtaatgggaaaacagctttgcattctgctgcgagaaatggacatttggaggttgtgaaagcgctattggggaaggagcctgtggttgcaacgcggacagataagaagggacagacagcacttcacatggcagtgaagggacagagtcttgaggtggtggaggagttgataaaagctgatccctcaacaataaacatggttgataataagggtaacacagcattgcatatagcaaccaggaagggcagggctcagattattaagttgcttcttgggcagacagaaaccaatggcttggtagttaataaatctggcgaaactgcactagacacagctgagaaaactgggaattctgaaattaaagacattctccttgaacacggtgttcgaagcgccaaagccataaaggctcaaccaggaacagctacagcccgagagttgaaacaaactgtgagtgacataaagcatgaagtccactaccagttggaacacacacgccaaactcgaagaggtgttcaaggcatagccaagcgcatcaacaaaatgcatgctgaaggactcaacaatgcaataaactccacaactgtggttgcagtcctcattgccacagttgcctttgcagccatcttcacagtccctggccaatttgctgatgatccaaaagtcctccctgcaggaatgaccattggtgaagcaaacatagcaccgcaagctgcatttctcattttcttcgtctttgattccatcgcgctcttcatttctctggccgtcgtggtggtgcaaacctcagtcgtgatcatagaaagcaaagcaaagaagcagatgatggccatcattaacaaactaatgtggttggcttgtgtgcttatctctgtggccttcttggcactgtcatttgtagtggtggggaaggaccagaagtggcttgcaattggagtcacaatcatagggacaactataatggccacaactttgggcaccatgagttactgggtcattaggcatcgcattgaggcctcaaacttaaggagcattcggaaatcttcaatggaaagcaggtcaaggtctttttcagtgtctgttatgtcagattctgagctactaaacaatgagcgtaagatattgtatgcgatatagaatcactaataaagccttgttgccctttcatact

SEQ ID NO: 11920 - DNA, 1097 bp, Glycine max
  Clone ID: 701143402_FLI
cttgatccttcataagtcgtcatcatcatcatcatcatcaccgttgattgaagaagatgccgatcagaaacatcgccatcggaaggcctgaagaggctactcaccccgacacgttgaaggcggggttggctgagttcatctccaccttgatcttcgtgttcgccggttcaggttccggcatcgcctacaacaagctcaccgacaacggcgccgccactcccgccggcctcatctccgcttccatcgcccatgctttcgccctcttcgtcgccgtctccgtcggcgccaacatctccggcggccacgtcaaccccgccgtcaccttcggcgccttcgtgggcggcaacatcaccttactccgcggcatcgtctacgtcatcgcccagctcctcggctccatcgtggcctccctcctcctcgccttcgtcactgcctcccctgttccagcattcgggctttccgctggagtcggagttggcaacgctttggtgttggagatcgtgatgaccttcggtttggtgtacacagtctacgccactgccgttgaccccaagaagggcaatttgggaattattgctcccatcgccattggtttcattgttggcgctaacattttgttgggtggggccttctccggagcagccatgaaccctgctgtgacatttgggcctgctgtcgtgagctggacctggaccaaccactggatctactgggccggccctctcatcggaggtggaattgctgggcttatctacgaggttgtcttcatcagccacacccacgagcagcttcccagcactgactactagaggggaaaaatgaaataataaaaaaaaaaaatgtgtattattgaatttctccggaatcttcttctgtgtatggttttccttcctttgtgttttctttcctgttgaatcggtggccgttgatctttggttggatggttgatgatcctgaagttttcttttaagttaatttaattatcattttgtgcatgctctcgctctcacctggtccacaattgaattgaatgtatgtatcattattcgggtctggttggttgtaccatttcactagtacttcttactttttccggt

SEQ ID NO: 11921 - DNA, 1519 bp, Glycine max
  Clone ID: 701144440_FLI
acgggcgagaagacgacagaagggggaggaaagcgcgatcctcgtgactcgcgacccctcgggtttaaatcccctgcgacgcagcacaggctactacttcaccatcgccggataaaatggtcgacgacggagcaacctcggcggcgacgagccggagaaagccgtcgtggagagaaagagaaaacaacaggagaagagaacggaggagaagagcaatagctgcgaaaatatactctggacttcgagctcaggggaacttcaacttgccaaagcactgcgacaacaacgaagttctgaaagctctctgcgcagaagctggttggtgcgtggaagaagacggaaccacttatcgcaagggttgcaagccacctctggccaatggtgcagggagctccatgagaaacattaccttttcttcttctcaaaatccaagtcctctgtcttcgtcatttcccagcccaattccttcataccaagtgagcccttcctcctcctctttcccgagcccgtttcgtttagatgtggataaggacaatgtatcacacctcattccatacattcgcaatgcgtccttgtctcttcctcctctcaggatatcaaacagtgcccctgtgacaccacctctttcatcaccaacatcaagaaatccaaaaccaattcctacttgggagtctattgccaaagaatccatggcctccttcagttaccctttctttgcagcttctgcccctgctagccccacacaccgtcacctttacactccgcccactattccagaatgcgatgaatctgatacttccaccggcgagtctggccagtgggtgaaattccaagcatttgctccttcttcatctgtgttgccaatttctccaacctttaatcttgttaaacctgtggttccacccgggatgcctgataactcaatccaagagatgaggacgagttcagatgagtttggggtacaggtaaagccttgggttggggaaaaaattcatgaagtggcattggatgacttggagctcacacttggaagtgggaaggtgcggagttaggctgctagcagaattacctcatctgggttatgtaagaatgagaccacgggattgtttttgctggttggttgttcactcaacttggtgttagagcttgagctaatagctacctcatccagctctgttggtgcaagcagtttatctggaagagactagagagttattattgggaaccagatttatcagatattgtggtcattttatgtagaaaatcatctccttccatgccttgggtaaaatgtagaaatgagaattacacttcatcccttcttgattaaatcagctatggttcaaaaaatctcatcaggcataactgcttaagagttatgtgttgtgagtgatttgaattagaaatttgaggttttgtcaagtttattgtctgtcagaaagctcacaagaccaacttatttgttaatgtcatacatttaagttgtattgttcttctttatgttcttgttctttgtacg

SEQ ID NO: 11922 - DNA, 665 bp, Glycine max
  Clone ID: 701144526_FLI
agaggagagagaaaatgaagaagcacaagcattactccaggaagctgaaaagcgtattaaaaagaagggaaagaaaccaatcatagagggggacaaaatcaccaagcagacattgatgaagttgactttgactgaacaactccgggaaagacaggaaatggaaaagaaactgcagaagttagcaaaaaccatggatcatttggaaagagcaaaaagagaagaggctgctcccctgattgaagctgcatatcaacagcgtctagtggaagagagacttcttcatgatcgtgagcagcagcaagaggttgaactgagcaaacagaggcacgagggagatctcaaggagaaggagaggcttgttcgcatgatgggcaataaggagatatatcaagcaagggtggttagtcaccgccaagcagagtttaacagattgagaagagaacgggaagagcgaatctctaggattttacagtccaggagacaggagagggaaaaaatgaggaagttgaagtattatctcaagttagaagaagagagacaacaaaaattgcatgaggaggaggaagctcggaaacgtgaagatgctgaaaggaaaaagaaggaagaagaggaacgcttgcggaaattggaggagatagctgaaaagcagaggcagagagaaaggg

SEQ ID NO: 11923 - DNA, 355 bp, Glycine max
  Clone ID: 701144595_FLI
atatcacattttatttttctgtttttcctttctataatattcatagtttcattaccccctttatgtgcattggtcttgcaggccttacagtatgtgcaggagaacccagatgaagtttgccctgctgggtggaagcctggggagaagtccatgaaaccagaccctaaacttagcaaagactactttgcagcggtgtagctaggatactagatagttaagagtggctatctgcatctgtatcagtcagtgtgaattgcaaaagggtcttgtttcttaatgttttgtaagtccttaaattttgagccgcagggtatgggaatatactaataaatgcatgctggattttgaagtgtac

SEQ ID NO: 11924 - DNA, 572 bp, Glycine max
  Clone ID: 701144605_FLI
tacggctgcgagacgacagaagggggcacacagtttactcactaactcactgtgagagcaaagaagaagaagaatgaaggacgccggaaagagccacaaggcgaacggaaagctgtcgccggagactcggaaggatcggaagtcggcgacggggctgagcggatcgccgaagaagggaggccacggcgggaagttcacgtggaccggccacggctacgagcaagttgagatgccgcacggtgctatggacgccaaggacccgaacttcgaggatcctgtggagatcgccaccgtgtgatcgcggtggtttccggtggccaggtctgtaaatagtagtaattggcgaaacgtgttttttcgtgttcaataatgtgaagcgaatcggagaagaagcgttttctgtgattgattgttgtagatctgatctatctgcggtatttggtagtagcatggcacttgttgtacatatatcgtcttggagttggaagtgcactcgtatccaaaactatttataatttttttagaacttaaatatgttttttttcaaagtaatttagtgttgtttttgattg

SEQ ID NO: 11925 - DNA, 763 bp, Glycine max
  Clone ID: 701144909_FLI
gacggggtgttaattatggtggtcagctaccagtagatgcggtttccagacctggacctgagacaggatctctacctccagatgcttcaagtactttatatgttgaaggtctcccttctgatagcaccagaagggaagtagctcatattttccgcccttttgttggatatagagaagttagacttgtgagcaaagaatcgaaacatcgtggtggagatcctcattacctttgttttgtggactttgcaaatccagcttgtgcagcaaccgctatgagtgccttgcaaggttataaagttgatgaactcaatcccgagtccagtcacttgcggcttcagttttctcggtatcctggtccaagaagtggacctgcttttcgcagtaaaagatgatctggttcacataagccatctaggttttatgctcatcagaatgtctgtggttcttcgttttgggggcgatactccacatgcaattttattcacccctctggacacaatccttattagagcccttgaaatgcataaattattaacaggccgagatcaaagtataatttcaattagcaaaaaaggatttttggttcatgtattcaattactctgccgtaccattatttgctaaactttagtatattcacctggtgtctgatttatgttagcatttactttgtgctgcccaaagaactatcatttttctattactattttttgattatccaatattatcatactaccacacttgggtatgtatatgggatatct

SEQ ID NO: 11926 - DNA, 1180 bp, Glycine max
  Clone ID: 701144971_FLI
ggatgaaaggtggtttttccactttataaatacccaattcttcagccactttgcttttattttctgatatatctccttcctgttctgctaagtggcaaagaaagaaagaaagaaaatttcaagggctgaaacatctatctttaactgtattctccctttgtttcctcaccagttgattcaggttgcaaacatggcttttccagacccatccatgtcagcttctccacagaggaagatgggaagggggaagattgagatcaagaggattgagaacactaccaatcgccaagtcacattctgcaagcgcaggaacggcttgctcaagaaagcatatgaattatctgtgctttgtgatgcagaggttgctctcattgttttctctagccgtggacgcctctatgaatatgctaataacagtgtcaaagcaaccatcgagaggtacaaaaaagcaagttcagattcgtctggcgctggatctgcttctgaggctaatgctcagttttaccagcaagaagcagataaacttcgtcaacaaattagtaacctgcagaataacaacaggcaaatgatgggtgattctttgggctctctgactgccaaggatctcaaaaatctggagactaaattagaaaaaggaattagtaggattcgttcaaaaaagaacgagctgctatttgctgaaattgagtacatgcaaaagagggagatagacttgcacaacaacaaccagcttcttcgagcaaagatagctgaaagtgagaggaaccaccataacatggctgtgttgcctggaggctcaaactatgactctatgcagtcttctcagcaacaatttgactctcgtggctacttccaagtcactggattacaacccaataatcagtatgcacggcaagatcagatgtcccttcaattagtatgatgtgtttagtattgagatttgagatgttctgctacttgtagtttgccttctagtatgatagcagatgaatgctaagggtaatgtaagtagaaccatttgtaggggatttaagcatatatcccctcagtactatatatatgtaatggctttgtagactttcttaagactatcctgtatctattgtgaaacgctctgagatgttagtatttgtgtcctaattaatagtatgaagaagaaacctagcttggcatgttttac

SEQ ID NO: 11927 - DNA, 636 bp, Glycine max
  Clone ID: 701144981_FLI
acggctgcggaagacgacagaggggatcgaacagagagagagagaatggcagcacttggtgggaatcgtgatgtgacaggaagccagaacagcgttgagatcgatgctctagctcgctttgctgttgaagaacacaacaaaaaacagaatgcccttttggagtttgaaaaggtggtaactgcggaacagcaagtggtttctggtaccttgtacaccatcactttggaggcaaaagatggtgggcaaaagaaggtttatgaagccaaagtttgggagaagtcatggttgaacttcaaggaggtgcaagagttcaagcttgttggagatgcacctgcatagtctagtgcttaattaggttgctgaagagtgaagaatgagacagcctggttcgaaggggaaaagcctaaggatatatcaaaggatcctatatgtataaaataaatgttgcttttttaccttcggtattgatatctgaagtctaatttgacatcctatatatgaatatatgatctatgtgtttctttctctccctacctctctctcttttaaagattcaaatttggttttactttttagccattgtaagtgtattaacatcaatacttaaatctatatctatatctacattataatctg

SEQ ID NO: 11928 - DNA, 1141 bp, Glycine max
  Clone ID: 701145388_FLI
ggacaaaaggaaaggaagaaatgcaagaaccaagcttgggattgatgggtgaggtctccggcgatcaccaccgtcagctgaaggcggagataacgactcatccgctgtacgagcagcttctggcagcacacgtggcatgcctccgtgtggccaccccgatcgaccagcttccactcatcgatgctcagttatctcagtctcaccaccttctacgctcttatgtctcacacaacactcattctctctcccctcatcaccgccaagaacttgacaacttcctggcacaatatttgatagttctgtgtactttcaaagaacagcttcagcaacatgtaagagtccacgccgtcgaggctgtcatggcctgccgtgatatcgaaaatgccttacaagctctaactggagtgagtttgggagaaggaactggtgcaacaatgtcagatgatgaagatgatttacaaatggatatttctttagatcaatctagcgcggaagggcatgacatgatgggatttggtccattacttcctacagaatctgaaaggtcattgatggaaagagttcgccaggaactaaagattgagctgagacagggtttcaagtcaagaattgaagatgtcagggaagaaatattaaggaaacgtagagctgggaaattaccaggtgacacaacttctgtgttaaagaactggtggcagcaacatgcaaagtggccttacccaactgaagatgacaaggcaaaacttgtggaggagacagggttgcagctgaagcaaattaataattggttcatcaaccaaaggaaacgcaactggcacagtaactctcaatcggttacctctttgaagtcgaagcgcaagaggtagacatattattttgtccctaactatgtggaacagctagcaagcaacacaactatatataaggacatgcttaatattgctgatagagtgtagtcccactaaggatgcaaaagatggtagatgcatgtgggttactgtaatattgtaagatagctgaaacaaattatagactggctgtaaatttgtggaatttaacgtatgcaaacttttcttttaggtgtggttaagttgcctctctttttaactatctttgtaaattgtttgctacttttctgacc

SEQ ID NO: 11929 - DNA, 1275 bp, Glycine max
  Clone ID: 701145422_FLI
ggatggcctatgagttccatcaggacaaatccatggtggcatgctctttcaattctcaattgaaattcccccaaagccaccttcttttgattcaataaatcaacacccaattttcaaaattccaacttgtaatcaatttttctttccatttgacacaccataccaatcaaccaaccttgttgcttcttgtgatcactcctgaaccacactaatggatattgatgagtgggagtttccctctgatgatggctaccttgatttcaatgaagagggtgggaagcaaaagcaaaagcagaattcctttggaaaattggactccgagggcatctttgacatggactacttttgctcatcaccaccaccaccaagggtgagaactcaactagtccctttgccaattcaattggagccaaaaattgggaaggccccagaagatattttggtgaaagacatcatcaagagtagtcctatggaagtggctattgctaccccatcagagaacacaaaggaatttgagacagtggaagctgatagagtgaaggttttcttcaagatcaaggagaaaagtgagtttgtggacatgaaaaggggaatcttggctccaatggatgctgctggttccttgaaatttgaggacaaaggtgaggccatggagatcatcacctctcccagaaggagggttattgagaaggatgtgtgtgacaaagaagaggagtccacttgggaggaagacaacaacagtggtttcaacttgtggaagtggagtttgacaggtgttggagctatctgttcttttggtgttgctgctgctactatttgtgttctcttctttggaagccagcagaggaacaaactaaagcaggatcagaagattcggttccagatctatactgatgacaagaggattaagcaagtggtgcagcatgcgaccaaattgaatgatgcaatttcagcagcaagaggtgttcctatgagcagagctcacataagcgttggtggttactatgatggtctttgaaagcattgattaggtgccttcgtgaagcaattgtagtctacaatggatcaaccatgctataagatctattaatctggccctatcctatgttgctgtaaataacgtgatgccagatgttaccttattgttgttgtttgttctgtatattttctgtggtcttgtaaattaagtcacagatcagaggcacttttttttattattattatttgattaatattttggaatttatgtatcaagaattcaagatgtttctagcc

SEQ ID NO: 11930 - DNA, 1954 bp, Glycine max
  Clone ID: 701145504_FLI
ggggaacagacctgcccgcaataatgaagtgtttctcggtgtccttagcctctttatgggttctccttgctctcttttctctgagtgtgtcatctcaaaatatatctgagagtgggctacagcaagctagcctcccaccaagaggttggaattcctatgattccttttgctggacaatttctgaagacgaatttttacaaagtgctgaaatggtttctcaacgtctcaaggctcacggatatcagtttgtcgtggtggattacctctggtataggaagaaagtcaagggtgcttaccctgattctcttggatttgacgtgatcgatgaatggggaaggatgatccctgacccaggaaggtggccttcttccataggtgggaagggattcagtgaagtagctaataaagtacatagtttaggtttgaagtttgggattcacgttatgagagggataagcacgcaagctgtcaatgcaaacacccctatcctagatataacaaagggaggtgcttatcaagaatctggtcgagtgtggcatgcaaaagacatagcaatgccagaaagggcttgtgcatggatgcctcacggtttcatgagtgtaaatacgaagttgggagctgggagagcttttttgaaatccctttatgagcagtatgctgcatggggtgttgatctcgtgaaacatgactgtgtgtttggagatgacttggatttaaatgaaataagctatgtgtcggaggttctcagtgtgcttaatcgccctattgtgtattctctgtctcctggaaccagtgtgacaccagccatggccaaggatgtcagtggactagtcaacatgtatcgaataacaggagatgactgggataaatgggaggacgtcaaggctcattttgatgtaacaagggatttttctacagctaatatgataggagggaaaggtttgaagggaaattcctggcctgatttggacatgctaccatttggatggctaactgatccaggatcaaatgaaggtccacacagatttagtaaactcactctagaagaaaaaaggacacagatgactttgtggtctttggcaaagtctccccttatgtatgggggggatgtgcggaggatcgatccaaccacatacgaacttatcacaaatcctaccctgctagagattaattactttagctcaaacaatatggagtttccttacatcacaagctcaattaacttgaagcaccctggagggaaggaaagaagacttaagaaaggaatacattcattgggtttgactagctgcagtgaatcaaaggcgaggggttggtctattgaaagtcttaaccaagatcttgaaagaatctgttggaaaaagggtttagaaaacaagcatcaggcccctttctgcgtacacaaaagagaacttcaattcagattagacggggtgagtatgtatcaagaggactatcgagggaaacatcaattagttgcaactgacagaatgaaattttgcttggacgcttctccaagacgaaaggttacttctaaagagttcaagagaggtacattttctccatgcagatgggattcaaatcagatctgggaactgaactccaatgggaccatggtaaatagttactccggtctttgtgcaactgtagagtatattgaagctaatgttaattctggtgggattcgctcttggatcgcaacaggaagaacaggggaaatctatcttgctttcttcaatctaagcgaacagaagacggagatatatgcaaagacatcatatctggctaaggttcttcctgacaaaagcatcacttcatgcaagggcgaggaagtgtggagtggaacagatgtaataacaacgcaagggacgatatcaatgaacgtggaaattcatggatgtgcactatttgttctaaattgcaactagtttggcatggcttccaattaatattt

SEQ ID NO: 11931 - DNA, 1186 bp, Glycine max
  Clone ID: 701145669_FLI
gaatctttttgtaagaacgtgaaacatgacaccctaactcgcgttgcttgcttgagtgatttgactcgtgtcgagtgtattgtatttagtttaagcgtggctgatcgagtgagtatcagaatcaattcaattttgagctagtcatgaagatccactgcgacgtgtgtaacaagcaccaggcctctttcttctgcaccgccgacgaagctgccctatgcgacggctgcgaccaccgcgtccaccacgccaacaagctcgcctccaaacaccaacgcttctccctcacccacccctctgcgaaacattttcccctctgcgatgtttgccaggagagaagagccttcgtgttttgtcagcaagatagagcgattctgtgcaaagagtgtgacgtgcccattcattctgccaacgacctcaccaagaaccatagcaggtttcttctcactgggattaagttctctgcttctgccacgccttatgattattcatcaccaccaccaccaccaccaccaccacccaagagaaaccctgttctcgattctccttcaacaccgtcaccgcctaagcctgggggaaactcgctaacaaacgaagaagaacctggtttcacaggtagcagcatttcagagtacttgataaactctatcccaggcatgaagttcgaagatttcctcgattcacattctcttccctttgcttgctccaagaatagtgatgacatgttgtcgctgtttggtgagggaaacatggtttctttctcacccggtgggttctgggttcctcaagcaccaccatcttcagtacaaatggatcggcagagtgggtacagagagacaagggaaggtagcattagatcaagttttggagatgataatttcatagttccacagatgagtcctcccagcaatgtgtctaataagagatccaggcttctctggtaaaacagatatagctagttacaactagctaaccaccttatgtggctttgtgtgacttaaatttcactctcccctcttattttgtattttttatgtggtattgttttaatttttgtttgttcgtttgtttttggtccctctcccttcctgaactacactactcttctagctactttctctcttgataagttggtgtatctcttccaaattgtaaatatgaacgttttaagagctctctgggttgagat

SEQ ID NO: 11932 - DNA, 958 bp, Glycine max
  Clone ID: 701145683_FLI
gaggcgcggcgggatcagcacaagattgcaaaatgaagttcaacattgcaaatcccaccactgggtgccagaagaagctggaaatcgatgacgacctgaagcttcgagcattttgggacaagaggatctcccaggaggttcttggtgatgctctgggtgaggagtttaaaggatatgttttcaaaatcaccggtgggtgtgacaaacaaggattccctatgaagcagggagtgctgacccctggtcgtgttcgacttttgctccatagaggaactccttgtttccgtggatatggaaggcgcaatggagagcgtagaaggaagtctgttcgtggttgcattgtcagtccagatctctctgttttgaacctggtaattgtgaagaagggtgagagtgatttgccaggtctcactgatgttgagaagccaaggatgaggggtcctaagagagcatccaaaatccgtaagctgttcaacctgtccaaggaggacgacgtgagaaagtatgttaacacataccgtcgaacctttacaacaaaagctgggaaaaaagtgagcaaagctccaaagattcaacgactagtcactcctttgacactccaaaggaaacgagcaaggattgccgacaagaagaagagaattgctaaggcaaagtcagaagcagcagagtatcaaaaactcctcgcttccagattgaaggagcagagagatcgccggagtgagagcttggcgaagcggagatccaaactctccagtgctgccaaaccaactgttacagcataggttgcttcctggtagagatatggtgaagtttaaacttcaccgtagtttttggtagtcttgtttgagggcgattatgataaacatttatggttttttactttaaatacatttgagttcatttaagtattttgcaatgatttttagagttcaatcgaattgatgtgttgttggtttcc

SEQ ID NO: 11933 - DNA, 1681 bp, Glycine max
  Clone ID: 701146067_FLI
gagagagtcctcgatcagaaaaaccaagaagggttctttcttccctgcgaagattcagagtgctaagtgtgagagaaagaaaatgccaaagtctcaatttcgaaccccatttcttgtttctttttctcttttgttattcatcttcaacctcaccccttcatacgcactctatggagcatccacacccgtgcttcaactcactccctctaacttcaagtccaaggttctgaattcaaatggagttgttcttgttgaatcctttgctccatggtgtggacactgtcaggctctgactcctatatgggagaaggcagctactgtgttgaagggtgttgttactgtggcagcaattgatgctgatgctcacccgtctttggctcaggaatatggaattagaggatttccaactataaaagtgtttgcacctggaaagccgcctgttgattaccaaggagcaagagatgtcaaaccaattgctgaatttgcacttcaacaggtaaaggctcttttgaaggatcggttaagtggaaaagcaacaggaggatctagtgaaaagacagaaaccagttcttcagtagaattaaactctggcaactttgatgaattggtgatcaaaagcaaagaactctggattgtggaatttttcgcaccttggtgtggacattgtaaaaaattagctccagagtggaagaaagcatccaataatttgaaagggaaggttaaactgggccatgttgactgtgatgctgaaaagtctctaatgagcaggttcaaagttcaaggattccctacaatcttggtatttggtgctgataaagatagtcctattccttatgaaggcgcaagaactgcctcggctattgaatcatttgcattagagcagctggaaacaaacattgctcctcccgaagtgacagagctatacagtccagatgttttggaagagaaatgtggttctgctgcaatctgttttgttgccttccttcctgacattttggattccaaggctgagggaagaaacagatatcttcagcagttattatcagttgcagagaagtttaaaaggagtccatacagttacgtctgggtagctgcagggaagcagccagatcttgagaagaatgtgggtgttggagggtatggttatccagctttagtggcccttaaccttaagaaagctgtttatgctcctctcaagagtgcttttgaacttgaccaaattatagaatttgtgaaagaagctggacgtggaggcaaagggaatttgcccattgaaggaactccaacaattgtaaagacagaaccatgggatggaaaagatggagaaataattgaggaggatgagttttctcttgaagaactaatgggggaagatgcttcaagcaaggatgagctatgatcaatttagaagaaatttataccaaattaaagtttcaaccaccgatttttacgttattggcaacttgtttctcatgatgattgtgatcactgttctgtttttccatgttccaatttaaagaccagtctagtgatgagtgatcttatgaggattttgatatgtcatttagtggtactgatatatctcaggaaaatgttagcatgttttggtattttcttttccctctcaatgagcattcagccaacaggttcaaccttcttaacaaaggaattattttttacc

SEQ ID NO: 11934 - DNA, 753 bp, Glycine max
  Clone ID: 701146294_FLI
gattgggaaaggaaataaaaaatgaaagctcttacctttactgggcatacaagaacaacattccagttttctgtccgggcttaactgatggctcattgggggacatgctgtacttccattccttccgcaatcctggtctgattgtggacatagtgcaagatataagggcaatgaacggtgaagcagtacatgcaagtcccaggaagaccggaatgataattttaggaggtggccttccaaaacatcacatttgcaatgccaatatgatgcgcaatggtgcagactatgctgtttttatcaatactgcacaagaatatgatgggagtgattctggagctcgtccagatgaagctgtttcatggggaaagatacgagactctgctcagactgttaaggtacactgtgatgcaacaatagcatttcctctgctggttgctgaaacgtttgcttcaagagtgaaacctccccattgatgaaggttaaagatgaatttactctgaagttcattttaattgtgtgtgtttgaggatcttgatggacaagttcggcattggtgttcaatttgactatcatttgattcctaagctcctcttagcagtggagacctttttgaccattcaaaggtaatccattaatcctgtcagtgaggaagtcaggaattatagatgtgaggatcattgtactaatatctttagggaaaataaggctaagaaaactaactgatcatatatggcatttttaatattttccgcc

SEQ ID NO: 11935 - DNA, 1822 bp, Glycine max
  Clone ID: 701146322_FLI
gaacggagaaggaaaacatgatggatccatcaatggtgtccgatactttcacgcaaagtcagaaagatcagggtcatttgttcgtgctcacaatctgaaccaagggatttcattgctggaatctcttgaaagtagatataaaagtgaatccacaaaagatgaagatgatgatatgtttgtcctttcaacaagcaaccagcgagtatctgttcaacttttgggtaaagataaaattcatgataagctaagtcgacttgaggagttaaccagtgtatcattgtcatatatgggtattagttcccctggaatcgcatctcacattaataatacagtgccaaatataaaagaacttgacctgactgggaaccttctttcggagtggaaggatgttggcacaatttgtgaacagttacctgctctaaggacaatcaacttatctgacaatttaatgtcaccatataaatcgaagcttctgctactgaaaaacatccaagttgttgttctaaataatactggtgtagattgggagcaggttgagctgcttagacaatcattgacaacaattgaagagctacatgtaatgggaaacagtataagcagaatactgccagggtcatcctctatggttcagggatttgattatttgcggctgttgaatttggaagataattgtatagatgaatggaaggaaatcatgaagctttcccagctaagatgtttggagaagctttatttaaacaataattgtttgaagtctgtcttttatcctgataatggtgggcattatgaatcagaagttacgtgctataaaccctttcaaaacttacgccaccttctattggctaataacaacatcagtgatctggcctctattgactcattaaacttgtttcctaacttggtggatatcaggctttctgacaacccaattactgattctggaagaggtggagttccaagatttgttttgattgcccgtttagcaaaaattcagatattaaatggaagtgaggttactcctcgcgaaaggaaggactctgagattaggtatgttcggctagtggtctcaaggttgcatgctagtcctgaagaaatcaaacagcatcccaggttttacgagcttgaaaaaattcatggaattgaggatgaaaggccttcaattggagctactgtcccacaaacaatcagctcaggattattgtgtatggactatggatgttaagtttgtgcattgacttctttttctgaacttgcaatagctttaattttgatatagagattaatgcagctattactctgaattgtgttggagcatccatgggtgagaagccatcattgacgaagaagctaccagcaacaactacaggtcggtaagctgaaatttctctgcgaaagcttttttaagctgaagtccatgaagctaaaattatatcttcgagaagagggttctccatttcccatgctgcttgacaatgacacttcatctcttatggaccttggaatcggcaatgattctattatccttgttgacgaagaaagttcataaatataccagaaaatttgtgaaaagcttctcttgtgttgaagactgtatcctgttctgattagccgcaattactcttgggagtataactctaaatgaatatatttgtaagtggtacaccagtttaattggtcacaactttttgttaggcttcaatcgaagttcttatcaggggttttgatgcactgtttgattggatggtccgttccatcccttgctgcaactgttttctgtaaatcactagttattttgattcaattgcaaacagatttggatctt

SEQ ID NO: 11936 - DNA, 1089 bp, Glycine max
  Clone ID: 701146415_FLI
gatcacaaatctttcgctaacactcattaattgcaagaatggcacttcgttgcttggtgatgtccctttctgttctcttcactcttggtcttgcgagagaaagccatgccagagacgaagatttttggcatgctgtttggccaaacactcccattccaagttcattgcgagatcttctaaagcctggccctgcaagtgttgaaatcgatgatcaccctatgcaaattgaagaaacacagtacccgaaaaccttcttctataaagaagaccttcatccaggcaaaacaatgaaagtacaattcagcaagcctccctttcaacaaccatggggtgttggtacatggttaaaggaaattaaagacactactaaagaaggatatagttttgaagagctatgcatcaagaaagaagccattgagggagaagagaagttttgtgcaaaatccttgggaacagtaattggttttgccatttcaaagctgggaaagaacattcaagtactttcaagttcctttgtcaataagcaagaccaatacactgtggaaggagtgcagaatcttggagacaaagcagtgatgtgtcataggctaaatttcagaactgcagtattttactgccatgaagtccgtgaaacaacagctttcatggttccattggtggctggtgatggaaccaaaactcaggcacttgctatttgccactcaaatacttctggaatgaatcatcaaatgcttcatcaacttacgggagttgatcctggaactaaccctgtttgccatttccttggaagcaaggccattttatgggtacccaatttatccgtggacactgcctatcagaccaacattgttgcttaattagtccatgcatcttgagcaccatgagaatgagattgtgtataaaataaattatcatgtgctgtgtgttgtgcaagtactaccttctctagctagattgctagagctagaatttcaacctacctatgtgtactgataagatctgcttccctacttaaagagagcatcatcctgtgatcagtgtgcttcgtattctctctctctatatatatatggtagaaagtggttatct

SEQ ID NO: 11937 - DNA, 1524 bp, Glycine max
  Clone ID: 701146422_FLI
gggtgcgtgcgggttattatatataggggaagatcaacgggacgtatgtggcaggtgtgggttcttcaattcattctagttctggattccgactagccgcgttgactcggttccgtttttcattctcgcggatctaatattaaggaatagcttaagggcacattacaatgaaggcattgattctggttgggggatttggaacaaggctgaggccactgacactcagtttccctaagcctcttgttgattttgctaacaagcctatgattttgcatcagatagaagcccttaaggccattggagtgactgaggtagtgctagccatcaattaccaaccagaggttatgttgaatttcttgaaggattttgaatcaaagctcggcatcaagatcacatgttctcaggaaactgaaccactgggaacagcaggtcccctggctcttgctagggataagctgatagatgattctggagaacccttttttgttctcaacagtgatgttatcagtgagtatccacttaaagaaatgattgaattccataaaagccatggaggagaggcttccataatggtaacaaaggttgatgagccatcaaagtacggcgtggttgtgatggaagagagcacagggcaggttgataaatttgttgaaaaaccgaagttgtttgttggtaacaaaatcaatgctggaatttacctgctgaacccctctgttttggatcgaattgaactgaggcccacttctattgagaaagaggtgtttccaaagattgctgcagagaaaaagctatttgcaatggtcctgccaggattttggatggacattggacaaccgagggactatatttctggcctgaggctttacctggactcattgaagaagaagtcatcatctaagttggccagtggctctcaatttgtagggaatgtcattgtggatgagacagccaaaattggtgagggatgtctcattggacctgatgttgctattggtcctggctgcattattgagcaaggtgttagactcaaaagctgcacaataatgcgtggagtccgggttaagaagcatgcttgtgtatccagcagtattgttgggtggcattccactgttgggcaatgggctcgagtggataatatgaccatccttggagaagatgtccatgtatgtgatgaaatttacagcaatggtggtgttgttttgccacacaaggagatcaagtcaaatattctgaagccggagattgtcatgtgagtgaggtcaatgatgttcaaaatggtagcatgtggtgaggaggtagaaaaattattgagtctgaaatgtttgtccgtttcattttgtttttctttttacttcatggcgtttcttttctttttataggtcagttttttggattagaatgagtgatgccattgcattgatgaaaaggtcggcatctttgtaaatggcgttaagtttggtctgtgcaaaagttgtgtattttgagtgtgtatagaaataaattattggttagtggtttctctcc

SEQ ID NO: 11938 - DNA, 1651 bp, Glycine max
  Clone ID: 701146604_FLI
gtatttgtattttgaaaaaatttactctgttagatgaccccgtattctagattgtttaggaagctaaagattttcttgtttagtaattactgccaggaaagtgaaatatttgtgaaaagagaatatatttttctgattatatatttatctgagattggctgtgtggagaatatactacaaggacttgagtgtctcaattgtttatttccttgtttcattttatttgcgttctgtgtaaaattaggaatgtattcaggtcaacttacctttggatttccttgtaaggcagattttccttgaccatggggcaaaagcatttagtgacagtcttatgtttatgggctttaacatgttcccttcttccatctttctcctttggaattctgagaatcggtttgaagaagagacctctagatattgatagtattaatgctgctagaaaggcaagagaaggtctaagatctggaagatcaatgatgggtgcacatgatcagtatattggtaagtcaaaaggtgaagatctagtacctttgaagaattatatggacgctcaatattttggtgagattggaattggcacacccccacagcccttcactgttgtgtttgatactggtagttccaacctttgggttccatcatcaaagtgctactttactgtaagttcaacttaacctgtatttttttttttatattttcaacttaacctgtatgtcttcacaaccatgtgcatagaagcatatcatactgaccaattctctcttgcagctcgcctgctatacccataattggtacacggcaaagaaatcaaagacacatgccaaaaatggtaatgcgagcttcttattattcatgttgattatagtggtactgtcataggtgtatacaatatatatgccatgtaatgtaattttaatcatacctatcaacttgttgatcaggaacatcatgtaaaataagctatggaactggttcaatatctggtttcttcagtcaggataatgttaaagttggcagtgctgttgttaagcatcaggtgagtacttaatttatgagcttcctcttcaatatagattgtacaaatttgttgatagaaatacttacaaatgccactattgtaaactgtaggatttcattgaggctacccacgaaggaagtcttacctttctgtcagcaaagtttgatggaatactgggacttggatttcaggagatctcagttgaaaattctgtaccagtatggtgtgttccatctgctcttttgttgtttcatctgtatctgttctccatgttagagtgaagtattgtgaatcgtttttgtgcctctaattggccagttcatcataaaatcacaggtacaaaatggttgagcaaaaacttatcagtgagaaggtgttctctttttggcttaatggggatccaaatgcgaaaaaaggtggcgaattagtttttggtggtgttgacccaaagcacttcaaaggaaaccacacttatgttccaattactgaaaaaggttactggcaggttagcaaaaacacatttagtttgattaggaattccttttaaatatgtaattattcacatcagaaaatactttaacaaggaaattttctttttcagattgaaataggagattttttcattggaggtgt

SEQ ID NO: 11939 - DNA, 888 bp, Glycine max
  Clone ID: 701146770_FLI
ggatgtcatagtattatcattcattctcatctttctctcttctctctccacccaaaccctaactcccgaccctgttcccctctcgtatccgtcatgaaaggaggaaagtccaagaccgaatctaagagagccgatcccaaacttgctgtgaataagaagggagccgccaccaaggctaggaaacccgccggcaaggggaaggcagcgaaagaccctaacaagccaaagaggcctccaagtgctttcttcgttttcatggaggagttcaggaaggtattcaacaaagaacatcctgaaaacaaagcagtgtctgctgtgggcaaagctgctggagcaaaatggaagaccatgtctgatgctgaaaaagcaccttatgtggcaaagtctgagaaaaggaaagtggagtacgagaagaacatgagagcctataacaagaaacaggcggaaggtcctactggtggggatgaagaagaatctgagaagtctgtatctgaggtgaatgatgaagatgatgatgaggaaggcagtggcgaggaagaggatgacgattagagaatggactgataattgcatttatgtaggttctgatgattttgatcatctgttgtaggtggtctggtcatttcctgataaacatatttcttgcttccaaaaaatatttccctgctccctccgtaaattggttgtctttccaaaacgtgaatagtttaaagaagggagttctttatttgtacttctaaatccaactgtttagttaaggggtgtttatctcttgtagagcttttagtttgatttagagttttcttgttgaaatctggttaagtttgtatcaatataattggcttatcattcgctttctgctgtatatatggtatttatgttttgtcc

SEQ ID NO: 11940 - DNA, 1949 bp, Glycine max
  Clone ID: 701146805_FLI
agacgacagaaggggaccggcggtggaagagagatagaccaataatctgaatctgaaacctccgtgttggtgttgcatatccaaaccctaatttggaaattgaattgttgaagggaagaagatcaagatggttctggcggagttaggtgggagcatttcgcgtgctctccagctgatgagcaatgcgacagtaatcgacgagaaggtgctcaacgattgcctcaacgacatcactcgcgctcttcttcaatccgatgttcaattcaagcttgtccgcgacatgcagaccaacatcaagaacattgtcaacctcgacgatctcgctgccggtcacaacaaacgcaggatcatccaacaagctgtgtttaacgaactctgcaaaattctggaccctgggaagccctctttcactcccaaaaagggcaaaacaagtgttgtcatgtttgttggtttgcaaggttctggaaaaaccacaacgtgtacaaagtatgcatattatcatcagaagaaaggctggaagccggctctagtatgtgcagatacattcagagctggtgcatttgatcaattgaagcaaaatgcaactaaagctaagatccctttctatggaagctatatggaatccgatccggtaaaaattgctgtggaaggtgtggagagattcaagaaagaaaactgtgatcttataattgttgatactagtgggaggcacaaacaagaagcttctctttttgaagaaatgcgccaagtttcggaagcaacgaaaccagatcttgttatatttgttatggatagcagtattggtcaggctgcttttgatcaagcccaagcatttaagcagagtgttgcagttggagctgtaattgttaccaaaatggatggccatgcaaaagtgttgcagcaacaaagagtcctgtcatattcattggaactggagaacatatggacgagtttgaagtttttgatgttaagccatttgtcagtcgtctattaggaatgggcgactggtctgggtttatggacaaaattcatgaagtcgttcctatggatcaacaacctgaactgcttcagaagctgtcagaaggaaacttcaccttgaggattatgtatgagcagtttcagaacatacttaaaatgggtcctatcagccaggttttttctatgcttcccggatttagtgctgaattaatgccaaaaggccgtgagaaagaaagccaggcaaaaattaagcgttacatgacaatgatggattcaatgacaaacgaagagttggatagttcaaaccccaagctcatgaatgagtcacgcatgatgcggatagctcgaggtgcaggtcgtcagattagggaagtgatggagatgttggaagagtacaaacgtcttgcaaagatatggagcaaaatgaaagggcttaaaataccaaagaaaggtgatatgagtgccctatcccgaaatatgaatgcccaacacatgagcaaagtccttcctcctcagatgctgaagcaaattggtggcatgggtgggttacaaaacttgatgaagcagatgggatccgccaaagacatgatgggaatgggaggaatgtttggtggtggtggtggtggtgattagttaattggcttgtgagctgaggattgttcctgaccatagccactgtcattgcattgtggtgttttacaactagactcgattgagcaggtcatgcagttcaatcggtgttggagtgccatctgcaatagccgcaatgggtgcaagtgtctctttttgtaaaattaaatccttcttccctttttgtgtatatttacttatttattattcagagcaatcaaagtaatcttattagaaattttcatagtctaggaacattaaaaacaaaagctatattcctcggatcatgcttgtctcgttttggattctgctccagctgaatgtttcatttaattctagcc

SEQ ID NO: 11941 - DNA, 149 bp, Glycine max
  Clone ID: 701146919_FLI
gatataccatgcggagaaagaagcttatttgcaggtgattgcaaaggaaaaacgtgaaactgaggcaatgaggttgttggaagacgagcagaagcagaggactgcgatggaattgcttgaacagtacatgcaattcaaacaagaggcag

SEQ ID NO: 11942 - DNA, 1690 bp, Glycine max
  Clone ID: 701146963_FLI
gacatcaaaccaacattcagttcataatttcttccaacaaattatatttttcttacaaaaaaaatggcaggtgaggtggtgaaggaggaagagtctctcaacctgaaagtcactaacaagagccatgttcaatcagaggagaaaattggaagaaaagagtaccaattggtcacttttgatcttccctacttggccttttactacaaccagaagctcttgttttacaagggtgaagatttcgagggcatggtccaaaaactcaaagttggacttggagtggtgctgaaggagttccaccaacttgctggcaagttagggaaagatgaagagggggtgttcagagtggagtatgatgatgacatgcttggtgtggaggttgttgaagctgttgtagctgatgatgaaattggtgtggatgatctaactgtggctgaaattagtaacactaatttgaaggagctgataccttatagtggtatcttgaatttggaaggcatgcataggcccttgctggctgttcagttaacgaagctcaaagatgggctcgcaatgggcctagcgttcaaccatgctgtcttggacgggactgccacgtggcagttcatgacctcatgggccgagatctgcagcggttcaccttccacgtcagcaccacccttcctggaccggaccaaggcccggaacacacgcgtgaagctggacctttcgctaccagagcccaacggcccaccaacttccaacagtgaagcaaagcccgcgccagcacttagggaaaaaatcttcaaattctctgagtcagccatcgacaagatcaagtcaacggtcaacgagaaccctccatcggacggctcaaaaccattctcaacatttcaggctctttcctcccacgtttggcgccatgtaagccatgcacgtaacttgaagccggaggattataccgtgttcaccgtctttgccgattgccggaagcgggtggacccgccaatgccggagacttatttcggaaacttaattcaggctatttttaccgttacagcggttgggctcttaacggcccatccgccacaattcggggcttcattggtgcagaaagccattgaagcccacaatgctaagactattgaggaacgtaacaaagagtgggaaagtgcacccaaaatttttgaattcaaagatgctggggtgaattgtgtggctgtgggaagttccccaaggtttaaagtttatgacattgattttggatgggggaagccagagaatgtggggagtgggactaataacaagtttgatgggatgatttatttgtatccggggaaaagtggaggaaggagcattgatgtggaactaaccttggagcctgaggctatggggaagttggagcaagacaaggattttcttttggaagcataaaattgctagagcaagtgcaataaaaaaaatggctagaaaaagtacgttgagcaaatttggaagtagtactgctcagattgttgaaggggtcgacttcaatgtccaattatgaattctgatgtgattcatggatgcaatttaatttaaagttgtgctgttttaggattttatatattttgtggttctacgcttgattgattttgaacctactaatgtctgttccatatgtatggtcaatgattgtagttcatgacaagtgaaaggaattattgtgagttcc

SEQ ID NO: 11943 - DNA, 690 bp, Glycine max
  Clone ID: 701146987_FLI
gggttgaagtttggtttcagaacagaagagcaaggaccaagctgaagcaaacagaggtggattgcgagttcctgaagaaatgttgtgagaaactgaccgatgagaatctaaggctgaagaaggagttgcaagagctgcgtgcacaaaagcttggatcaacaccactgtacattcaactctccaaggccacaacttgaccatttgttcatcgtgcgagaaactgttgaagcccaatgaagggaacaaaggagccattaacaaattgcagaacagtatagagttagggggtatctagagggtataaaataaaactatgaggaactcataatttggtgaagggtattggaatgtcagaatgcaattatcaaacatggatagtttagtttaattaatcagcacaaaaaagaaaagtacacaccctcagtccccacatcgaataatttgtatagccatgtaggactgcttgtggtatatatgctaaggctagaatctagatagttaaggtaacttgttgtctctttctagtttctattcattcaaaatacaaattaatcaaaattaacccactctatttgctttattttgtttggcttgatttgcaaatgaagatgtgtgagtgtgtacggacaaaaaaaacgtgtgtttgaatgattgaattaggatgagacaaatatgatgatgattcactcg

SEQ ID NO: 11944 - DNA, 1426 bp, Glycine max
  Clone ID: 701147041_FLI
gcagaaggtgtatgggctgtagttgatgtttccattgagataggtcacgatgctgctaatgcacagccatccattagctgtagaaggcttccttctggctgtattgtgcaggatatgccgaatggttactccaaggttacttggcttgagcattgggagtacgatgagaatgttgtccaccaactttatcgcccgttgctaagttctggtgttggattcggtgctcatagatggattgccaccctccaaaggcagtgtgaatgcttggctatcctaatgtcctcttccatttcaagtgatagtcacacagcattgagccaagctggtaggagaagcatgttgaaattggcacaacgcatgactagcaacttctgttccggggtttgtgcttcgtcagctcgcaagtgggacagccttcacattgggactcttggtgatgacatgaaagtgatgacaaggaaaaacgtggatgaccctggtgagcctcctgggattgtgctcagtgctgcaacttctgtttggatgccggtgtcacggcaaaggctgttcgactttctgcgtgatgaacggctgagaagtgagtgggacatcttgtccaatggtggaccaatgcaggagatggtacatattgccaaaggacaaggacatggaaactgtgtttctcttctccgtgctaatgctgttaacgccaacgatagcagcatgctgattctgcaagagacatggatggacgcgtcatgctcagtggtggtatatgcacctgttgacgtgcaatcactgaacgtggtgatgagtggtggagattctgcatacgttgcactcttgccttcaggctttgcaattcttcccgatggccactgcaacgacaacggctgcaacgggagtctgcagaagggccgcggcagcgacgacggcagtggcggaagccttctcacagtcggtttccaaattctggtgaatagtctcccaacagcaaagctcacagtggagtcagtggacactgtgaataacctcatctcctgcaccattcagaagatcaaagctgcactcagagttgcatgatgccaacaacaacaacaacaacaaccattttgttaatgcagtaataatatgcaaaagttaagttaccttaaaattattattttgtggtcttttttaattttttggtttctaagatgaatattattcggagaggggttatataattcggttgggtgtataggatttataattatatagagtagtggaagaggctgaggcagaaagggtcgcgtaaggaaggtttcgagtcaagaacgaaccgcgatggaggaacttgaattgtgctgtttgcatttgcatgcagcttttctctgctcatagtggttcgggtattgactcgttgacctgcgagttagtctcagtgctcttgtttagataagatgcc

SEQ ID NO: 11945 - DNA, 1041 bp, Glycine max
  Clone ID: 701147057_FLI
tcaagatttggcctcacagttttgaatttcgtcttagggtagctcttggatctggaggagatctgatgatgacatctcggatcaggaacactaacattgatgggaagccattttcattcacatttgctaatcatacatatttctctgtgtcagatataagtgaagtgcgggttgaaggattagagacattggattatcttgacaacttgcagaaaagggaacgctttactgaacagggggatgctttaacatttgaatcggaatttgacaggatatatctaagcactcctacaaagattgcaattcttgatcatgagaagaagagaacaattgtattacgtaaagatggtcttcctgatgctgtggtgtggaatccttgggacaagaaagcaaaggctatgtctgattttggtgatgatgagtataagtacatgctttgtgtagaggctgctgctattgaaaagcctatcactttgaaacctggcgaggaatggaagggaagactagaactttcaactgttccttctagttattgtagtggacagcttgaccccaaaaaagttattcaaggaagctgaaagatctcgttgtgttttgtgtcctgtacaggtagcttgttgccgcaccgatgaactttgaaaggaaagtgtctccaacaatttccccccttcatgttccacttaaaccttcatgtaggacggccggatgaactcatgcatagagttttgttaaataatattttcctgcaactgatgactagttcggtcataatttacgtacaagtagaatagcccacagttgtttatggaaaatcgaaattaaaacctccaattttattgtattttcacgttgggttctcgtactcataaaatgtttgtttttacatatcgtaggcaatgaatgcatgtatttgacaattgacgggatcattttacaacactataagttggcctgtatgtcgttaagttgttgctgttatctacatattcatgtaatgaagcaagataattattaaatatataattgttatttcaatgatct

SEQ ID NO: 11946 - DNA, 720 bp, Glycine max
  Clone ID: 701147070_FLI
gcgagaagacgacagaaggggacagcacagatattttctcaaagggaaatagcaccatttggcattttacaatttccaagctatggccaaatcaactgggtcacttgtctttctctctattttcactttgctcctttcttgcaacttaggagggcacttaaagtttgctaatggaatgctagaccaggaaagttggtgcgtagcaaaaccttcaacaagtgatgttgcactgaatgataacattcaatatggttgcattgccttgggtgattgcaaaatgatccaaccaggtggatcctgcttctacccaaacactctgttaaaccatgcctctgttgtcatgaatcagtactatgcagctaatggtagaaacacttggaactgtttcttctctggctctggtctctttgttgtcagtgacccaagttacgctaactgcacctatgcttagcgggaataaaccggaaaaaagatgtcttgtttagagatatttttactattttactctataggctacgtttgatttccaaagcttattactacattctactaggtgctgtaaggaataggaagtttattattcactgttgtggtctctgtatttcatgaagattagtactttgttatttcattacctaatgaaaatatactaggtttcaattataagattacttttatggctatattgttgtctctttatttcatgtttactttgtctat

SEQ ID NO: 11947 - DNA, 705 bp, Glycine max
  Clone ID: 701147142_FLI
gacaacgcaactattgacaatctctctttattctattcactccctccatttcttcaaactaaatttcctgagaatggcgaaggctgcggagaaaaagcctgcggccgagaaggctccggcggagaaaaagccaaaggcggagaagaaggttccaaaggaaggcagcggcggagagaagaagaagaagaggtcgaagaagagcgtggaaacgtacaagatctacatattcaaggtgctgaagcaggtacatcctgacatcggcatttcgagcaaggccatggggatcatgaacagcttcatcaacgatatattcgagaagcttgcgcaggaagcagcgcgtctcgcgaggtataacaagaagccgaccattacatccagggagatccagaccgctgtcaggttggtgctgcccggggaacttgccaagcacgctgtttcggaaggaaccaaggctgttacaaagttcactagctcttagggttaggggttttttcgtttaggtattttttttgtaaagcttagtcgtagttagtggcttcatttggtattctatatgctaatgaaaatttttatttaaaagtattcgtgcctcctgacttagttgatttgacaagtgaataatgctcgcataacacgaatagcattaggtggcgttcttacgcattaccacgttaacgaatgaattaaaccatcacattctagccc

SEQ ID NO: 11948 - DNA, 814 bp, Glycine max
  Clone ID: 701147143_FLI
gagaaatcagagggtatcacttctcctgaagaagaggtttacaacccctaattgggttaagcataaggaaccaagagaagttcatatgcttgttgatctatttcttcaagagcttgaaattatagttaacgaagtgaagcagattttgcctcaaggtagacgtaagcaccacaggactgatagtaatggaagtagtgcttcatcaaggagcaatcccttgcgggaggagaaactggttaggtcaaatactcaaagggcaaggagccagcttttggaaacgcatcttgcaaaattgtttaagcagaaagttgaaattttcacaaaagtagaatatacacaggagtctgttgttacaactttagttaaattgggccttaaaagttttcaagaatttgtccgactccagacttttaaccgaagtggattccagcaaattcaattggatatccagttcgtaaggatccctttaagagaaatagttgaagatgaagctgcaatcgacttcttgctagatgaggtgattgttgctactgctgaacggtgtctagatccgattccattggagcctcccatattggacaaacttatacgagcaaagttggctaaaaccgaggagcaaaatacaatttcttcataaatattccttcataaacttatacgagcaaaattgtgtttgctgtgtttgccatctcgtacaatttgttagggttttggccgttgaaaagtaacttggttccttttgtaaatctcttgtaagttgtaacatatgtcatattaacatgttatttgtggaaacattgagacatgagaaaac

SEQ ID NO: 11949 - DNA, 717 bp, Glycine max
  Clone ID: 701147176_FLI
atcaagtgaaacaatctttgttggcgatgtgaagtatttctatttaattgagaatgggtacacataaaatgtactaaaattaagcaaattggaactacctagttactgtggcattagatgcgagatctaggaactgcgttgtaatcaatgctgtggttactttctagttctacttgttgtgtttgctttacaaaaggggtgataacatattctcaatatcttccattacgcatccatcataggcataccatacctactaaaactccgcgacagatcatatcatatcatatcatttcatgcgataagctagcttatatatacacacacaaataagagggcagaagggaaaaatttgcttgaaaaaatttctaatctattctattctatatacaattatgtcttttccatctggtattctgaaaaggctagtttaatttatttgcggaaagagatataaagcaagcaattaataaaaacatgggtaggggaaaggtggagctgaagaggattgagaacaagataaaccgtcaagtgacatttgcaaagaggaggaatggtttgctcaaaaaggcttatgaactctctgtcctctgtgatgctgaggttgcccttattatcttctccaaccgtggcaagctgtatgagttctgcagcggccataggtaatacacacacaaaccccatcaagtcttttgtttatgacagattttgtgtgtg

SEQ ID NO: 11950 - DNA, 537 bp, Glycine max
  Clone ID: 701147318_FLI
gaccttaccctttgagagtttcgtggctgtaatttcgttgtaaccgatgctggaaatctcaactttaccggaaaccgcgacggagaacgcggacggcggttccgcggcggtatccgacgggtcgaaagcggagcacagcgaagacggtgaccggaattccgccgcgaaccggtggccgagagaggagacaatggctttgctcaagataaggtctgaaatggacgttgctttcaaagacgcaaaccccaaagcccctctctgggaacaagtctcaaggtcagtttccttcttttgttttcccctcttttcaactgaaaccccttctatcattccttaattagtaatactaatgttacacttaattcataaatgtattgtatatatatagtctttcattttttggtgtaataatatagtagtgattgaactgaatgaattaattataaattcaggaagttagcagagctaggatataatagaagtgctaagaagtgcaaggagaaattcgagaacgtttacaagtaccataggagaacc

SEQ ID NO: 11951 - DNA, 1443 bp, Glycine max
  Clone ID: 701147331_FLI
cgacagaagggggcagcgaaaatttcgcagaagtatcttttttctctctctcatccgcgccccaaatcttagggttttcacccaattcaattcctggaactctcctcgattcgattccacatcccccccccctgatgagatttgtgtgattggatcgtacgatggcggcgccgaggaatgtgacggcgacgagggacgaagagaagggcgaggaagacgattcgccctccgccaagaagcccaaatcggagaggttcccactgaacacgtgggaattcgccgtcgccgtcgccgtcttcttcgtgttctccaccggcctcttctgcgtttacctctccttgccctccgccgcttacaccaacctcaagctcccccgcacgctctccgatcttcgcctcctcaaggaacatctttcggcgtatgcgagtaaccaccctgcgcagttcattcttgggtactgctccacctacatcttcatgcagactttcatgattcctgggacaatcttcatgtccctcttggctggggcgcttttcggagttgtacgaggaatcttattggttgttttcaacgccactgcgggtgcatcttcatgtttctttttgtccaagttgattggaagacctttggtttcttggttgtggcctgaaaaactaaggttcttccaagctgagattgcaaagcgtagggataggttgctgaattacatgctttttctgaggataaccccgacattgccgaatctgttcatcaatttggcgtctcctattgttgatgttccctttcatatattcttttcggcgacattgattgggcttgttccagcctcttatattactgtcagagctggccttgcccttggggatctaaagtcaattaaggatctatatgattttaagacattatcggtacttttcctcattggttttgtttccatagctccaacacttctgaagcggaagcgagtatatgaataaggtttcctggctcagtttgcacaatccattttgtcaaaaggcaagttacgggatctaattagatggtgatgacaatggatcagagaagataatatttaagaaagatatccatgaaaagggatgtattgttattttgttattaacttaaacagtggcatatgccccattttattttctgtggtggagcctaagtctttttgtttccctttttgttttttgattgtgtggagagagtaagggtagacttagctgagtggtgaacaatcaattcagataaggttatgaggctttgttggataaattacacatatactggccttgatgtcatcaggaaggttgtggtgattgtttagccatactgtatgcatacgtgcttctcaccatataggatctgacttttcaccctgtagtattcaatataagatatgatagtagagaatttcaaccattactcttgcggtcaccg

SEQ ID NO: 11952 - DNA, 1176 bp, Glycine max
  Clone ID: 701147365_FLI
gatattttgcaacattttctcctcacttgttgcataacaccaaagaactacaaatagttctcattgcatagccatagatggaatttcccaacgaagcaataccagaagggtgttcacagaagaaaacgggaagggggaaaataggaatcaagcggatcgagaacacaacgaataggcaagttaccttctgcaaacgccgtaacgggttgctcaagaaggcttatgaattgtctgttctgtgtgatgctgaggttgctcttgttgtcttctcaagccgtggacgcctctatgagtatgccaacaacagtgttagaggaacgatcgataggtacaagaaagcatgtgctgcctccacaaatccagaatctgtctctgaagctaatacacagttttatcagcaggaagcgtccaaattaaaacgacaaatcagagacattcagaatctaaacaggcacatccttggtgaagctcttagctctctgagtctgaaggaattaaagaacctggagagtagactggagaaaggtttaagcagagttagatccagaaagcatgaaactttgtttgccgatatcgagttcatgcaaaagcgggaaatagagctgcaaaaccataataattttctgagagctaagatagctgaacacgagaaagcacaacaacggcaacaggatatgataccgggaaatgtgtgcgagtcaaccatacctccacaatcatatgaccgcaatttcttccctgttaatctcatagattccaataatcaatattcaaatcaagaccagactgctcttcaacttgtctgataaacgatttgaaattatgccgcagcctttcaagtggtgtgggatcccttacatcgtcctatgtttcgtgaaggagagtgcccttagaaactcctctgctaaagttcttacaacggagaacaagagaaaaactaatcagcatttgtaccaatacatcatttgatattgtttatgtatctttcaatatatatagtttctattcagtcctggcatattgtatttttatgttataaatgcttatttcaatatgaacactatatctatcgaggagtaaaagttaactgggcgtccgcattattcatcaaagttggacaacaaagaggaggggattaaaatcagtgggttacttttgattctcaagcatttgagc

SEQ ID NO: 11953 - DNA, 1533 bp, Glycine max
  Clone ID: 701147372_FLI
gagaagacgacagaagggggggaatttgttgatacagctataaatagatttgttctcattgcacttggtgctgctgtatctttgggagtcaatatctgcatatatccaatctgggctggtgaggatctgcatgatcttgtcacaaaaaatttcatgggtgttgcaacatctttggaaggtgttgtcaatcactaccttcattgtgttgaatataagaaggtgccatctaaaattcttacttaccaagctgctgatgacccaatttacagtggctacagatcagctgttgaatctacaagtaaagaagattcattgatgggatttgctgtctgggaaccaccacatggtcattacaaaatgcttaagtatccatggaagaattatgtgaaattaagtggggctctaaggcactgtgcgtttatggtcatggctatgcatgggtgcatactttctgaaatacaggccccagctgagaagagacaagttttccgcagtgagcttcagagggtaggttctgaaggagcaaaagtgttgcgtgaacttggaaacaaagttaaaaagatggagaaactaggtcgtggagacttgctgtatgaagtgcacgaggcagcagaggaattgcaacagaagatcgataaaaaatcttaccttcttgtcaattcagagagctgggaaattggaaaccactcaagagaagagagtgatcctcaacaacaaggcctctttaacatggacgaagaaagaaaaattctcgagtataagtctctcagtgaagcagtacttgatctcagaacagttcaagttccaaatacttgggaaggaaatgtaactctaggcaataaccctggtgtgcctgcaaccgatgcctctgaaaacatgttcaggaaaaagatatattggccttctcatatttattacaataaatcgaaatcggaggccgaagagggacaagagtcaaaaacttacgaaagtgctagtgcactatctctaacaacatttacatcgcttttaattgagtttgtagcaaggcttcaaaacctggtggattcatttgaggaattaagtgaagtagcaaactttgttgacccccttgagcaacaagcaccagtagcaatagcatctcatgggttttggacccggttgtttaactgctgcaaatttaaggactgaaatatatggtctactcttccttatgtcaacttgaaatttaaggattgaaacatggacttgctcatgtcaagagcaccatcttgcagtgtccgatcgactaaatgagaatctgcatggttgattctaaattactttggaaggatgctaacttatgtggaatatagattgtttgtattgcgtcctacaaaaattcaagatactctccaccgagatatgatggtgcattagattggaacggttggaggtgatacttataaaaatactgtgatgctcaagtcaagaggtgacctacccagtgtttattgtaatctattaccaacaagttatttgaatttctagataatactaagatcgtgttctccc

SEQ ID NO: 11954 - DNA, 1987 bp, Glycine max
  Clone ID: 701147408_FLI
gaatcatgatttctactctctttactctttagtttttttgttttgtatatattaaggcggcacagcactggcctaagtgggtgtaagtgagtcttgggagtgagtcactcttcctgcagaacccagatctgtagacaatatgggaagcactggtttgctacatttgatatgccttgtcattgctttagtaagtgtgtcgcttgtgcaagcagaagatgcgtataagtatttcacatggacggtgacttatgggactctttatcccttggctagtccccagcaggttattcttatcaatggtcagtttcctgggcctagacttgacttggtaactaatgaaaatgtaattctcaaccttatcaacaagctggacgaaccatttttactcacttggaacggtattaaacaaaggaagaattcatggcaagatggagttttgggaaccaactgccccattcctccaaactcaaattacacatacaagtttcaggccaaggatcagattggcacatatacatactttccatcaactcaactgcataaagcagctggagggtttggagcactcaatgtttatcacagatctgtcatcccaatcccttatccaaaccctgatggagattttactctactcgttggtgattggtacaagaccaaccacaagacactaaggcaaactttagattctggaaaatctcttgcatttcctgatggcctccttattaatggtcaggctcattctaccttcactggtaaccaggggaaaacctatatgtttaggatctcaaatgtaggcttgtcaacctcaattaacttcagaattcagggtcataccctaaaattagttgaggttgaaggatcacacactgttcagaacctatacgattcacttgatgtgcatgttgggcaatcagttgcagtgttagtaaccttgaatcagcctccaaaggactgctacattgttgcctcaacaagatttaccgagacacctctcactacaactgcagtactacactatgcaaactctttttcctctgcattaggacccgtgcctgctccccccgttgataaatatgactttgattggtccatgaagcaagctagaacctacagatggaatctgacagcaaatgctgctaggcctaatccacaagggtcattccattatgggaagattactcctacaaaagtaattaagttggccaattcagcacctttgatcaatggaaagctccgttatgctgttaacagtgtctcatatgttaaccctgacacccctctcaagcttgctgattacttcaacattcccggagtcttcagtgtgaatttactccaaaactctccctcaaacggtccaggatacataggcacctcagtgttgcaaacttctctccatgattttattgaggttattttccagaacaacgaaaacaccatgcaatcttggcatcttgatggttatgatttttgggtcattggtcatggtttcggccagtggacagatgctagcagaaaaacatataatctagtggatgccctgactagacacactgcacaggtgtatccaaaatcctggactactatattggtgtctttggataaccaaggcatgtggaacttgaggtctgcaatatgggaaaggcaatatcttgggcaacagttctatcttagagtgtggaatgcacagaaaagccttgctaatgaatatgacattcccaataatgttctgctttgtggcaaagctgttggacatcacccttagtatatatatcggtgtattttctggtcatgagggcttgactacacaactagaattatttttcctttttcttaagaaagaaaaggacaatgtgggagaagtcaatttctccaaatttcggatagacttgcgtatatttgagaaaaaagtcttgtattaatttttcgttgctcgtttatgtattaacaattgagttcatacttaatttatttatagctgtaagttgcc

SEQ ID NO: 11955 - DNA, 852 bp, Glycine max
  Clone ID: 701147506_FLI
ggaggaagccacatggagacacaatacagagtgagttgttgctccttcgccacaactctctgccaacatgggtatctccagagattctatgcacaagaggcgtgccactggtggcaagaagaaggcctggaggaaaaagagaaagtatgagcttggtcgccagcctgctaacactaagctgtcaagcaacaagacagtcaggaggatccgtgttagaggtggaaatgtgaaatggagggcattgagattggatactggaaattactcctggggaagtgaagctgtaactcgcaagactcgtgtactagatgtggtttacaatgcctcaaacaatgagcttgtgcgtactcagactcttgtcaaaagtgctatcgttcaggttgatgctgctccattcaaacagtggtatcttcagcactatggtgttgagattggtaggaaaaagaagacagctgccaagaaggaaactgcagaggagggtggtgatgctgctgcagctgcagaagaagccaaaaagagtaaccatgtgcagagaaaattggagaagcgccagaaagatcggaagcttgatgctcacattgaggagcagtttggtggtgggcgtttgcttgcttgcatttcctctagacctggtcaatgtggcagagctgatggctacattctggaaggtaaggagttggagttttacatgaaaaaactccagaagaagaagggaaagggtgctgcttgattttagtgttttccaaatttttatatggctttagttgcttttatgtgttgctggtaccatttaaggtgatgttttgagccacaggacatcgattagtgcaaattatcttgttagtccttcgt

SEQ ID NO: 11956 - DNA, 736 bp, Glycine max
  Clone ID: 701147943_FLI
gaagcataagttagttccaaacaaggatttagcagaagcagcattcagagatttgaagaagagggaacagactgcttacaatgttgttgcttacaaggataaaccacgtttgaagagtgctgtagaaatgcttaaaactaccgaagaaatagaacagcgattgaaagaagtatattttgatcttctggcttatctaaactaggtggttggagttggtgaaaattttggtttctctaccaatattcatccttcacggggaagctgacactgtgactgatccatcagtgagcaaagccttgtatgagaatgcaagctgttcagacaagaagcttcagctttacaaggatgcctatcatgcacttcttgagggtgagcctgatgaaataataactcaagtttttggtgacatcatatcttggctagatgagcacagcttgacacacaatcaatcttcctcttaataccgattaattatttttgctctctggattcaaaagatgaatattcattcagcttgttttcagcaatggaaaatagaaagttgctattgtttccataaaagtaactagagtatcaaattttgaacttgtctgttgtttgcaacttaagtcagttactagacataaccttgtttttatgtaaagaacctattttttttttcgataagctatgtaaataacatataatgtttatatctttacttaataaagaaaagaaaatatagtgggaacacagt

SEQ ID NO: 11957 - DNA, 1212 bp, Glycine max
  Clone ID: 701148021_FLI
ggctttccacacactttcaccaatttataaattatttgcagttacactccaagtctactttttctttggcagcttagccttcctattttggaaaccctcttcactgctctcccaccttttttgtgtgtatgtgtatgagcttctcttctactctattcactgcactcttattaataaatatcagtgcttggaaagcagaggagaagatccatagctaagatagatctcgagatgggtcgtggcaagattgagataaagttgattgagaaccccaccaacaggcaagtcacctactccaagcgaaggaatggtatcttcaagaaagctcatgaactcagtgttctctgtgatgccaaggtttcactcatcatgttctctaaaaacaacaagatgcatgaatacattagccctggcctcacgacaaaaaagatcattgatcagtatcagaagactttgggggatattgatctgtggcattctcactatgagaaaatgcttgaaaacttgaagaagctgaaagatattaacaataagctcgggagacagatcaggcataggataggtgagggcttggacatggacgacatgagcttccagcaactgcgcactcttgaagaagatatggtttcatccatagggaaaatacgcgaacgaaagtttcacgtgatcaaaactcggactgatacctgtaggaaaaaggttaaaagcctgaagcagatgaatggaaatctgctgcttgaacttaaggaaaagtgtgtgatccatccacaatttcttttgcacgatgaaggagacgaggaatcagcagcagcagcagcagcagcagcagttgcactggccaacggtgcctccaccctgtatgcattctgtcatcagcaccattctcatctgaaccttttctcccaccattctaatggagaagagcaaccctttaaaactgatcatgaccttcgccttgcttgatccagtgcaacaattaactagcaataatgtaaattaactagctagccagcactaagcacttgttatttatgctttaatttgtattaattggacctgttaaacccaactttgcttgcaacctctctagtttctatccaggtagagaattagctaagcttatatagtgtttggcaagagcgtgctatgaaaaacagaaagactgtactttatttgttattataagtttacattgagtgattatgttatgat

SEQ ID NO: 11958 - DNA, 511 bp, Glycine max
  Clone ID: 701148090_FLI
gacttcagtcagtctttacgttttagctgtgtacctctgctctcacttccttccttccttccttcaattgttctaactcttagcagccatggcgagcaccaaagttcagagggttatgactcagcccattaacttgattttcaggtttcttcagagcaaagcacgcattcagatttggctatttgagcaaaaggatttgaggattgaaggcagaatcattggttttgatgaatacatgaatttggttcttgatgatgctgaagaagtgagcatcaagaagaagagcagaaagacattagggaggatccttcttaaaggagataacataactttaatgatgaacacggggaaatgatgaacactccaggacagttgtaaactatattcccatcaaacaagaaggcataattatctttccctttggtttgtattcatctaacaaactctcaaaccagaagctgatgattttatgattgaggaagtatagtaccaatattacaacatttccctc

SEQ ID NO: 11959 - DNA, 1456 bp, Glycine max
  Clone ID: 701148135_FLI
ggttttgttcttctgtctaccgacctaacccaagacgagagaatagaggaagcttggggtttgaatcgaatcgaatcgaagcgattcatcgatcgatcgatggctcttgtaggagttgaactgaagcatgcggcggagggcgtaccggaggcgaattgctccgccaagcccaccaagcagggcgagggcctccgccactactattctctcaacatccacgagcatcagctccttcttcgccaaaagactcataacctcaaccgtctcgaggctcagagaaacgacctcaattctagggtgaggatgctgcgcgaagaattacagcttctgcaggaacccggctcttatgtcggtgaagttgtcaaagtaatgggcaagaacaaagtccttgtcaaggtccacccagaaggaaaatatgttgttgacattgacaaaaatattgacattacaaagattactccatccactagagttgcactccgcaacgacagttatgttcttcacttagttctgccaagtaaagttgatccattggtcaatctgatgaaagttgagaaagttcccgattctacatatgacatgattggtggtttagaccagcaaattaaagaaataaaagaggtcattgagctaccaatcaaacatcctgagctgtttgaaagtcttggaattgcacaaccaaagggtgtcctgctctatgggccacctggtacaggtaaaacattgttggctagggcagtggctcatcatactgactgtacattcatcagggtgtctggttctgagttagttcagaaatacattggagaaggttctagaatggtcagggaactttttgttatggccagggaacatgctccatcaattatcttcatggatgaaattgacagtattggatctgctcggatggaatctggaagtggcaacggtgatagtgaggtacagcgtactatgctggaacttctcaaccagttggatggatttgaagcttcaaataagatcaaggttttgatggccaccaatcggattgatatcctggatcaagccctccttagaccaggacggatagaccggaaaattgaatttccaaaccctaatgaagagtctcggctggatattttgaaaatccattctagaagaatgaatttaatgcgtggcattgatttgaagaagattgccgagaagatgaatggagcatctggtgctgaacttaaggctgtttgcactgaagctggaatgtttgctttgagggagcggagggtacacgtgactcaggaggattttgagatggccgtggcgaaggtgatgaaaaaggagactgaaaaaaacatgtcattgcggaagttgtggaagtgattctcatttcatgtttgtggtgcacattgtcctgcgaagatgggcagagaacacacattagggttatttcaatttacagtggcattggctttcgttttac

SEQ ID NO: 11960 - DNA, 996 bp, Glycine max
  Clone ID: 701148152_FLI
ggacacaaccatgtcagcgttcatttcccacaaccttaaacccggcggcatcatggtgtccccttctctgcaccaccgttcctcattcccttcgcaactttctttgaaagcacccttctctgcttcccatcctttagtcctcacccgaagactcttccttccttcggtttccggcatctgggacgctctcaccggcggcaacaacaacaatgcccgcgaagccgttctcgcaattcgacgcggaatgcttcttttccgccagggtgatgtttcggggtctcttgcggagtttgacaaggcaattcagttggaccctcgtcaaaaggcgtatccttggcaaggggcttatcactttactaccttaatcgatttgaagaggcagctgagcagtttcggttagatgttgcccaaaatccaaatgacactgaagagtccatatggtgctttctgtgtgaagctcaactgtttggagtggatgaagcaaggaagcgatatcttgaggttggcagagacccaaggccagtcatgcgggaagcatataacatgtttaaagatggtggggatccagaaaagcttgtagctgcattctctggtagcagagaaggtgaatatttttatgcttcattatatgctgggctttattacgaatctcagaacggaacagatgctgctaaagttcatatagttgctgcatgccagtctccttatgggcaaaggtctgatgattatatggcctctcttgccaaggttcactgtcgctgtcgaaattgggtcttcaactaaaacttttttcagtgtgtccattgtgcacgacgaagctcattcataagtttctctatacactactcacagcttcttgtgagttactgtgctactggaacggttaaaagaatttatcatattccttttttccttaaccttttcactttgattttgtggtctatatgaatattagtagactggtagaaagtttttaaacatgagatttcttttagc

SEQ ID NO: 11961 - DNA, 1191 bp, Glycine max
  Clone ID: 701148210_FLI
gacacaaagtgtgaaatacacaagcaacaagcacaagaatgtgacaagaacaagaacgcaaataacaaaacacaagacgcaaacaagaacgaaacaagatgtaaacaagaacacaaataacagaataaggacaaaaacacaaacctgaacagaatacaaagaaaaagatttggataggataaaacctgtatcaagagccgaagctctgatactagatgatgtgaaccttacggggtggatcgttttatacaggctacggagatttggatgacgccacttccggtgaaggaagataagtcagggtagacgccacttcctgtgaaggaagataagtcagggtagacaccacaaggattaccttgataagtctgagattggttcaacaaggaacccagagagaaactctcaccaaattttatcaaatgccaaaagtctcttttattgaaaacaaaaaccaatacttatagtgtatcttaacaaaaagataaaaatagacatgggccttctaaacagtttgggccaaaattacaataaataaaaattattaataaaaatagaacatatttggtatgggccttcaaattaatctgggccttcagcaacaattgtcttggtagtgtctctgcctctgggccttcatccttctccacttgggccttcatctttctccactcgggggctttgtccttctccacttgggcctttagcctgtatttggccagtttcaagattctcatcagttcaagttgatgaagaaaaggttaaaggctatccaagagtggcctacacctaaaagtgtgaccgaggtgagaagttttcatggcctagcaagtttttatagacgatttgtgaaggattttagtaccttggcagcacctttgaatgaggtaattaagaaaaatgttgttttcaaatgggggagaaacaagaagaagctttcaatgctcctaagcaaaatttaacctttgcccccatacttgctttgccaaatttttcaaaatcttttgaaattgaatgtgatgcttcaaatgttgggattggggctgtattgttacaagaaggtcatccaattgcttattttagtgaaaaattaagtggtcctacccttaactattctacttatgataaggagttgtatgccttagttagagcgttgaaaacatggcaacactatctttatcccaaggagtt

SEQ ID NO: 11962 - DNA, 1638 bp, Glycine max
  Clone ID: 701148522_FLI
aggggcagtgaaacatgggggactcaacttgtctcatgcaacaaccattctgttatgcttcagggatttccaatgaagccagtgaggctcaccttgaaaaaaactgtgaaacttgtgcgtttcagaacaacccaattcatgcacttgagcagtcaatttcgtttgggagattcatgtcagagtccctggcatgggagaagtggtccagcttctcccacaaccgctatgtcgaagaggcagagaggtactcaagacctggttcagtggcacagaagaaggctttctttgaagctcactacaagaaacttgctgctcagaaggcagctgcattgcttgaacaagcaaacaatgaggcacaaaacaattccactggacaagaagatgagggagtgattgacaatgacaatgacactcataatttacaaataagtccaaattctgaaatggttgtcaaggaagaacaagatgcaaaggtattgagtgttacctctgatgagcatgatgtcttggtcagactcacagccagtgagcatgattcaaactcaagtgtggaggcaagtgttacacctgaaagtaacaaggtagagggagctgaggcagtaatggaagaagtagcagttgtgggaagttcaatgaaggttgaattgcaaagccaccttgaagatgttggtgcacagaaggaggaaagtgaaaagcttagtgcaattgtaacacctccaattttgacaccaatagtgaaggtctccaaatctgatcaggaagttttggctagtgtgggcaagaagaaaccaccagtttcttcctttaagttgtcaaaggctaatggaacctcctacttaacctctacacctgttaagtccactgctgctatttctttcaaaagagataacattgctacaccaatgagcaataaacctgctaatgaaacctccaagttcactactacacctgttaagtccacagctgctatttctttcaaaagggataatattgttacaccaatgagcaatacccctgctaatggaacctccgtgttcaccactacacctgttaagtccacagctgctattactttcaaaagggataatattgttacaccaatgagcaataaacctgctaatggaacctccaagttcaccactacacctgttaagtccacagctgctatttctttcaaaagggataatattgttacaccaatgagcaataaacctgctaatggaacctccaagttcaccactacacctgttaagtccacagctgctatttctttcaaaagggataatattgttacaccaatgagcaataaacctgctaatggaacctccaagttcaccactacacctgttaagtccacagctgctatttctttcaaaaggaataatattgttacaccaatgagcaataagcctgctacattaagcactgcagataaaaagagatctactcctagatcagttgattttacacccattagagaacttaacagattgactgcttcagtcatgaggaaatttgaaagtacaagagctggtgctggttcttccaaggcttcaaaggataactcgactacactaagaactccaactatggcttccaaggagatgcaaaaccaatcttcattgaccccattaactg

SEQ ID NO: 11963 - DNA, 1842 bp, Glycine max
  Clone ID: 701148747_FLI
gaaggagatgaagaattgacgataggccaaagttgacgacatgtgtcatgtccatggccttatactatgttcaaatgatcctcttgttcccttgccctccatttttaccttcaacaattttctggttatctcccttacactttgcaacctctgattgaaccaaacgttatctttcttcatcatcgtctcatacacacatacataccctttagaaagttcttcatactcttccagaagcagaaaaaagtgcctttttttttttacttctttacttgaagctttctgtgttgtgctgccatggccgtgacacagttcaaccccacttgctcaaaaactcatcttcactcatctcagctcccttttctatcgaggactcttcctagacatcgccactgcactattgcgccacttcatagaactcaacaagctaggatttgttgttctgttgccccaaatgaagtgcaggtgccagctgtgaaaacctcggatcccaagagtaagcctgagtgctatggtgtcttctgccttacctatgatttgagggctgaagaagagacaagatcctggaagaaattaattaacattgcagtctcaggtgctgctggaatgattgcaaatcatctacttttcaagcttgcatctggtgaagtttttggcccagatcaacctattgctctcaaattattgggatcagaaaggtcaatccaagctcttgaaggtgttgcaatggaattggaggactctttgtttcctttgttgagggaggttagtattggtatcgatccttatgaagtgttccaagatgcagaatgggctttgctaataggtgcaaaacctcgaggacctggaatggaacgagcagacttgttagacataaatgggcagatttatgcagcgcagggaagagcattaaatgccgttgcatcccgcaatgtcaaagttatagtagtgggaaacccttgcaatacaaatgcattaatttgcttgaagaatgctcctaacattcctgccaaaaattttcatgctttaactcgtttagatgagaacagagcaaaatgtcagctagccctcaaggcaggtgtgttctatgataaagtgtcaaatgtgacgatatggggcaaccactcaactactcaggtccccgacttcttaaatgctagaattgatggtttgccagtcaaagaggtggttaaggatcagaagtggttggaggaagagttcactgaaaaggttcaaaagagaggtggtgcacttattcaaaaatggggaagatcatcagctgcatcaacttctgtgtcaattgttgatgccataagatctttagtaactcctactcccgagggtgattggttttcttctggtgtatatagcgatggaaatccttatggaatagctgaaggtattgttttcagtatgccatgccgatcaaagggtgatggcgattatgaacttgtcaaggatgtcatatttgatgactacctccagcagcgaatagctaagacggaagctgagttgttggccgagaagagatgtgtggctcacctaacaggcgagggaattgctgtttgtgatctacctggtgataccatgctccctggagaaatgtaacaagcctaaatctcctgaataccaaagcagatattgaaataggtcctgccaacttgtgtcttaaaggtactagttagggaatcaataaataaaatgtttttattcagaatcacggtagggtacgttggtaaatgttgtattttttcctaaaaacttctcacttttgattccttaactagtgtcttaaggtactgttagcattctattattgaaataagatcacacaaatttaag

SEQ ID NO: 11964 - DNA, 870 bp, Glycine max
  Clone ID: 701149088_FLI
acgacagaaggggactgattataatattaaattttgaaagtgaaataatgcgtgacttacactaatattttcataaactgtgcacaaacttttgatgtagacttgaattcttttatgtcaaactcgtatgcaatttcatcattactattatgaaggatgctttctaatagggagtcagccagacgctcaagaaggagaaagcaggctcatttaactgagctggagacacaggtctcccaattacgaagtgaaaattcttcgttgttaaagcgattcacggatgtgagccagaaatacaataatgctgcagttgacaacagagtactgaaagctgatgttgaaacattaagaacaaaggtgaagatggctgaagagacagtgaaaagaattactgggttgaacccaatgcttcatgccataactgagatgtcatcaatggcaatgccatcgtttgatgaaagtccttctgagacatcagctgatgctgctgtttctgtgcaagaagacccaaatcatcaccgttgtcaacccacttctaataatgggttgggaggcatttcttcaattgaaactgtgcagcagaatgttgcagcagtggtaggtggcaacaaaacggggagaacaacttccctgcatagagtggctagcttggaacatcttcagaagaggattcgtggtggtgcagattcacgtggacctccttctaatggagaacaataacatagtagttaaatttacattatgctttttatgaggaaactattctaaaactcttgtttctgctagttgtaagtaagagcaaattcttattgatgtatgtgaatcttattgagcatattctgctggataatcctatttttctttttttag

SEQ ID NO: 11965 - DNA, 437 bp, Glycine max
  Clone ID: 701149103_FLI
acggctgcgagaacgacagaagggggaggtgtaaaagtaaaagagtgagagggcaagggtttgaatcgtaaaaaaaataaggtcaaagagtgatacatcatattattaggatttaggacaagtcttaaatcttaattaccgcgtaattttaaatttgatttatttcactactttttgtaacctgttattatagtatagagttttttttccctactagtggagtctgagttggaattcacttgccaattgctatgatcccatgattgattgctctaggtgggtgttgttcccactttgtggacgacagtgtgttaaaggaggttgattttaacatcaaattttaagattttacttttagttgattcatagtcattggagaactttgattgtattaaattttgatttgattttaatttgaatacagtggttattgactt

SEQ ID NO: 11966 - DNA, 1121 bp, Glycine max
  Clone ID: 701149157_FLI
ggaacaccctgtgcttctcaccgaggcacctcttaatcctaaggctaatcgtgagaaaatgactcagatcatgtttgagaccttcaacacccctgctatgtatgtcgctatccaggccgtgctttccctttatgctagtggccgtacaactggtattgttctggactctggagatggtgtcagtcacacggttcctatctacgaaggttatgccctcccacatgcaatcctgcgtttggaccttgcagggcgtgatctcactgatgccctcatgaaaatcttgactgagcgtggttacactttcaccacatctgcggaacgggaaattgtgagggacatgaaggagaaactggcctacattgctctggattatgagcaggagttggaaactgccaagaccagttcagctgttgaaaagagctatgagctacctgatgggcaggtgatcacgattggcgctgaacgattccgatgccctgaagttctgttccagccatccatgattgggatggaatctcctggtatccatgagacaacatataactctatcatgaagtgtgatgtcgacattaggaaggatctctatggtaacattgtcttgagtggtggttccacaatgttccctggcattgctgataggatgagcaaggagattacagcattggcaccaagtagcatgaaaattaaggttgtagcaccaccagagaggaagtacagtgtctggattggaggctccatcttggcttccctcagcaccttccaacagatgtggattgcgaaggcagagtatgatgaatctggaccatcaatcgtacacaggaaatgcttctaagttataatcatggagtgtgaaagctggaccagggaaattactatttatacaaatactacaaaaataccatctagtggttgaggaactttcatttcctactctttaccatccttttatctatcttgtttttgtgttttcctttctttggtatgttgagataagagcatgaaggctagcaagatatgtaagattcttttttttttctcccgttctgttgtagaagagatgtgaattgttacctatttggtttggttgaattaacaaattcttttcatgaagtattctgatc

SEQ ID NO: 11967 - DNA, 1464 bp, Glycine max
  Clone ID: 701149286_FLI
agggcgaatagctccacgcttctcgttccttaaattcctcttcccaagctctctccctctctctctgcgtgttttcccttcttgtccattcatatatatcacaatttcaactgcaaattttgaacaaaacttaattaagaaatccttctccggagccatggcagatctcaagtccacattcttgaacgtctattctgttctcaaatctgaactcctccacgaccctgcttttgagttctccgatgatgctcgtaattgggtcgaccggatgctggactacaatgtgccgggaggaaagttgaaccggggactgtcagtaattgatagctacagattgttaaaagaaggacaggcattaaatgatgacgaaatttttcatgccagtgctcttggttggtgtattgaatggcttcaggcatattttcttgttcttgatgacattatggataactctcacacacgccgtggtcagccatgctggtttagagtgcccaaggttggaatgattgcagccaatgatggagttctactaagaaactatattccacgtatccttaaaaagcacttcaggggaaagccatattacgttgatcttcttgatttgtttaatgaggttgagttccagactgcttcaggacagatgatagatctgatcaccacactggaaggagaaaaagacctgtctaaatacacattaacactgcatcgacgtattgttcagtacaagactgcatattattccttttaccttccggttgcatgtgcattgctcatggcgggtgaggatcttgacaaccatgttgatgtaaagaacattcttgttgagatgggaacatactttcaagtacaggatgattatttggattgttttggtgatcctcaaacaattggaaagataggtacagatattgaagatttcaagtgctcttggttagttgtgaaagccttggaacttagtaatgaacaacaaaagaaagttctacacgagaactatggtaaggcagatccagaaaatgttgctaaagttaaggccctgtataatgagcttaatcttcaggctgtatttgaggagtatgagaacgggagctatgcaaagcttgtttcctccattgaggctcatcctagcaaagcagttcaagctgtattgaagtcctttttggctaaaatttacaagcggcagaagtagagtcaacttaaggtgaggaccaaaattgttgaacatgcaatagaaactagagttgtgatttctatctagagcagtatcatgttccgtggcttggaatttttcaaaaattgattttcttcttgtcattttttttaatttttgttttttagtgataagatcttgttgtattttatcttctaatctgtcttgggatacttgtttgactatttataatttcttctgaaacttttggttcattattattagagttctgttatttatataatatattttcagtg

SEQ ID NO: 11968 - DNA, 831 bp, Glycine max
  Clone ID: 701149544_FLI
cgagaagacgacagaaaggggaaaccagcaggggctccaattcctactcttagccgcagatctctcagggcttgcatcttctcagttgtgaagatgtacacatcaaggaagaaaatccacaaggataaggatgctgaaccaactgagtttgaagagtcagttggacaggcattgtttgatctggaaaataccaaccaggagcttaaaagtgatctgaaggatttatacataaactcagctgtgcaagttgatgtttctgggaaccgcaaggctgttgttattcatgtcccttacagattaaggaaaggtttccgtaagattcatgtcaggcttgtcagggagcttgagaaaaagtttagtggcaaggatgtaatcttggttgccacccgaaggattttgaggccaccaaagaagggttctgctgctcagcgtcctcgtagtcgcactcttactgctgttcatgaagcaatgctggaggatgttgtattgcctgctgagattgttgggaagcgtgtgaggttccgaattgatggatccaagattatgaaggtttacttggacccaaaggagcgaaacaacactgagtacaagttggagacttttgctgcagtgtacaggaagctatctggaaaagatgttgtgttcgagtatcctgtctcagaggcttagtttcacttttgttagctttttgaatttgttcggagaattgcatatggagtatgctggttaaaattttggtgacaaattgactttcaatctggaattcgttttctgatttttggaagtactatttagtatgagctttatttattataaaattaagtttcttat

SEQ ID NO: 11969 - DNA, 1548 bp, Glycine max
  Clone ID: 701149901_FLI
gtttgatttctgggtattttagttgtggaagaattgaggaagctttgcacttgtttgatcaagtgcctgagagaaacgtggtgttctggacttcagtggttttgggttttgcttgcaatgcattgatggatcatgctcggaggtttttctatctcatgcctgaaaagaatatcatagcttggacagctatggtcaaggcatatcttgacaatggctacttcagtgaggcttataagctcttccgtgaaatgcctgaaagaaatgtacgttcttggaacatcatgatctcgggttgcctaagggtcaatagaatgaatgaggctataggtttgtttgaatcgatgccagatagaaatcatgtttcgtggacggctatggtttcaggtttggcacaaaaaaaacgattgggattgcttggaagtatttttgatctcatgccttgtaaagatatggctgcatggactgcaatgatcactgcatgtgttgatgatgggctcatggatgaagtttgtgagcttttcaacctgatgccacagaagaatgttgggagttggaacacaatgattgatggttatgcaaggaatgatgacgtaggagaagccttaaggctattcgttttgatgctaaggtcttgctttagacccaatcaaaccactatgactagcgtggtaacttcctgtgatggcatggtggagctcatgcacgctcatgcaatggtcatacagcttgggtttgagcacaacacatggctaacaaatgctcttattaaactttattccaaaagtggggatctttgctctgctaggcttgtttttgagctactaaagtcaaaagatgtagtatcatggactgccatgatagtagcctactcaaatcatggacatggtcaccatgccttgcaggtattcacacgcatgctagtatcaggaattaagccagatgagatcaccttcgtgggactcttatcagcttgtagccatgttggtcttgtcaaccaaggtagaagactgtttgtttcaatcaagggtacatataatttaaatcctaaagctgagcactattcctgccttgtagatattctaggtagagcaggacttgtggatgaggcaatggatgtagtatccactatccctccttctgagagggatgaagctgttcttgtggcattgcttggtgtgtgccgtcttcatggggatgtcgcaatagcaaattccattggtgagaatctattagagatggagccatctagttcaggggggtatgtactcctagccaatacatatgctacagagggtcaatgggatgagtttgcaaaaggaaaagaatgagagagagaaatgtgaagagaattcctggatatagtcaaatacagataaaagggaaaaatcatgtttttgttgttggggatagatctcatccccagattgaggaaatttacgtattgttgaaacagaatcttcaacctttgatgagggaaatgggctgcacaccagagaacttgctactcgtagattaatcctcaattaattaaagactaaccggagttac

SEQ ID NO: 11970 - DNA, 580 bp, Glycine max
  Clone ID: 701149904_FLI
agatggtgcagcgtctcacctaccgcaagaggcacagctatgccaccaaatccaaccaacacagggtcgtcaaaacccctggtgggaagctcgtttatcagaccaccaagaagagggccagcgggcccaagtgccccgtcactggcaagaggattcaggggattccacacttgaggcctgcagagtacaagagatcaaggttacccagaaaccgtaggactgtcaaccgtgcatatggcggagttttgtctggaagtgctgtcagggagaggattatccgagctttcttagttgaagagcaaaagattgtgaagaaggtcttgaagatccagaaggcaaaggaaaagcaagcctcaaaggcttgaatttgaacaacacaatgagacatctttttggaggacttttaggtttgagtggttatagttaatcacaaattttattagagttgtcgtgttaattgtcttttattattttgcctgtttgaactctttctagagcaagtgttaactttgtcgacaatgtcattatgatacagttttgtttctcattttcttttgatggtttattggtatcttgtttc

SEQ ID NO: 11971 - DNA, 1652 bp, Glycine max
  Clone ID: 701150011_FLI
gggaggaaggaacgagaaatgaaagaaacatttgttgtgtctgtgtgtgtgggtgggtggtacttagccaattgtgagcaaataacaaacgagtggctttcccttcttctcatcctatatataccattcccatcactccccatgccctctcaattcacttcctatccccttctctgattctctccatatattatctcaaacccctctcacagaatgggaagtgctggaggaactgactatggtgcatacacttatgagaatcttgagagagagccttactggccatcagagaagcttaagatttccatcactggtgctgggggttttatcgcgtcacacatagctcggcgcctcaagacagaggggcattacattattgcttctgattggaagaaaaatgagcacatgactgaggacatgttctgtgatgaattccatcttgttgatctcagggtcatgaataactgcctcaaggttacagagggggttgatcatgttttcaatcttgccgcagacatgggtgggatgggttttattcagtctaaccactctgtcattatgtacaacaacacaatgattagcttcaacatgattgaggctgccaggattaacggcattaagaggtttttttatgcctctagtgcttgtatctaccctgaattcaaacagttggaaactaatgttagcttgaaggagtctgatgcatggccagctgagccacaagatgcatgtgggctagagaagcttgcaacagaggagttatgcaagcactataacaaggattttggaattgagtgccgcattgggaggttccacaacatatacggtccttttgggacatggaaaggtggaagggagaaggctcctgctgctttttgtcgtaaagttatcacttcctctgatagatttgagatgtggggggatggattgcaaacacgatcatttaccttcattgatgaatgtgttgaaggggtgctcagattgactaaatctgatttccgagagccagtaaatattggaagcgatgagatggtcagcatgaatgagatggctgagatcattcttggctttgagaacaagaatattcctattcaccacattcctggccccgagggtgtccgaggtcgtaattcagacaatacacttataaaagaaaaacttggttgggctccaactatgaggtcgaaggatggactgaggatcacatacttctggattaaggagcagatcgagaaggagaaggctcaaggtattgatatatcagtgtatgggtcttccaaagtggtgcagactcaagccccagttcaactaggctcacttcgagcagcagatggcaaagaatgaggtggtcaacatatggctgtagtagtattcacctaaatgtttcaagtgaagagttggattatatacagcaactaaatagcggtatctggttatttttaattagctgctaaggatttcttatgtatctgctggttgttcatgtttgaatcggaagccctgatgttcctaatgtattttatatagttttttaaggcacttcgtggtgcttaaggtggtttactgcactagaagctctaaattatttgttttgaattttgatgtctaaataattgattagtaagcaaataatcttttcttccttgtgaaag

SEQ ID NO: 11972 - DNA, 1717 bp, Glycine max
  Clone ID: 701150045_FLI
agaagacgacagaagggggactgtcaccagcgcattatagcacaccacacaaaaaagcaaagcagaaaacaactgttacttacacacgccatgggtatgggtatgggtatgggtatgggtaaatgagtggtaaatgagtggtttttgagcagaagcagttaaaagagaaagggattcagcgaagatgacatcggttggtgtggcaccaacttcgggtttgagagaagccagtgggcatggagcagcaggtgttgatagattgccagaggagatgaacgatatgaaaattagggatgatagagaaatggaagccacagttgttgatggcaatggaacggagacaggacatatcattgtgactaccattgggggtagaaatggtcagcccaagcagactataagctacatggcagagcgtgttgtagggcatggatcatttggagttgtcttccaggctaagtgcttggaaactggtgaaactgtggctatcaaaaaggttcttcaagacaagaggtacaagaaccgggagctgcaaacaatgcgccttcttgaccacccaaatgtcgttgctttgaagcactgtttcttttcaaccactgaaaaggatgaactataccttaatttggttctcgagtatgttcctgaaacagttaatcgggtgataaaacattacaacaagttgaaccaaaggatgccactgatatatgtgaaactctatacataccagatctttagggcattatcttatattcatcgttgtattggagtctgccatcgggatatcaagcctcaaaatctattggtcaatccacacactcaccaggttaaattatgtgactttggaagtgcaaaggttttggtaaaaggtgaaccaaatatatcatacatatgttctagatactatagagcacctgagctcatatttggcgcaactgaatatactacagccattgacgtccggtctgttggatgtgttttagctgagctgcttcttggacagcctttgttccctggtgagagtggagttgatcaacttgttgagattatcaaggttctgggcactccaacaagggaagagattaagtgcatgaaccctaattatacagaatttaaattcccacagattaaagcacatccatggcacaagatcttccataagcgcatgcctccagaggctgttgatttggtatcaagactactacaatactcccctaacttgcggtgcacagctttagatgccttgacgcatcctttctttgacgaacttcgtgatccaaattctcgcttgccaaatggccgattccttccaccactatttaatttcaaatcccatgaactgaaaggtgtcccagctgagattttggtgaaattggttccagagcatgcaaggaagcaatgcccgtttcttggcttgtgaagtgtaacagaactgcaagtgttgtttccatatgagaatgccgcgctttccttctatttaaaatgatatttgttggtatctttattgtattcggttgccctgtaaaatcagatttagagatacatgctactcattatcatcctaccccccgatgggtatgtagtagaataccctgtttcctgtatcacagcagattgtaacatacaatagaagacaaaatgtctgcaattatctgaatgttgcatcaatatttgtatttgttgagacactgatgggttgttatttaatttagttatgctc

SEQ ID NO: 11973 - DNA, 1275 bp, Glycine max
  Clone ID: 701150047_FLI
gtccccgcgccacctcaaacgcctccagcgcctcctctccatgacgggggagtattccccgaggaacatcctcggcggccgctggagagaatatcacggcagcaacgactggaaagggatgttagaccctctagacgagaatctccggcgagaggtcgttcgctacggcgaattcgtccaagccgcgtatcaagccttccattcagaccccgccatgtcaacggaggagccgccacatccacaacacgtggcacttccagatagatcataccgaatgaccaaaagcctctatgcaacatcatcaattggtttacccaaatgggttgatgaagtggcaccggatctgggatggatgacccagagatcaagctgggtcggatacgtggctgtttgcgaggatagaagagaaatagcacggatgggaagaagggacattataatctctcttcgtggaacttccacgtgtatggaatgggcggagaatctcagggcccatatggtggaaatgggagacgaagaaggaaaagccaaagtagagtgcgggttcatgagcttgtacaaaacaaaaggagcacaggtggcgagtctggcagaatccgttgtagaagaagtgaggagactgattgatctttacagaggagaagagttgagcatcagtgtgatagggcacagccttggtgcgacgctagccttattggtggctgacgagataagcacgtgctgccccaaagttccacccgtggctgttttctccttcggagggcctcgtgttggtaacaaggcctttggggatcgcttaaccgctaaaaacgtcacagttctaagaatagtgaactcgcaagacgtgattaccagagttccagggatctttgtgagtgaagagctagaacaaaaaatacggaacgttggtggtggtgtgctggaggagaacacgccgctggcttactcgcacgtggggacggagttgcgtgtgcagaccaagatgtcgccgtaccttaagcccgatgctgacatggcctgttgtcatgacttggaggcttacttgcacttggtggatgggttcttggcctcaaattgtcccttcagatcaaatgctaaaagaagcttagctaggttaatgcaagaccaaagtgctaatgtcaaaaaattgtatactagcaaagctaaatccttgactgtcaatcttagtaggcagggatccatgtctatgtctagttgtttgtcaagtccctcttaatcaaaactcaaatgttacatatgcaccattttcatgct

SEQ ID NO: 11974 - DNA, 1117 bp, Glycine max
  Clone ID: 701150049_FLI
ataaaaaaataaaatcgagatgctgctacgacgtggcgtccaaactaagccacacggctaataaatacggccggcacactttcactgcatcaagaaaggaagaaacataccgaatgagagcatcaaactcttcttcttcgatttccattgcgaagcgttactttttcttcttccttctcttcattttcttcgctcttcgatcttcgtccggggactgctccgaataccaccaccaccactcgccgatggccacgatcggaggcttacacgactcccaaggctctcaaaacagcgtcgaaaccgaagccctcgctcgattcgccgtagacgaacacaacaagaagcagaattcgcttctggagtttgctagggtggttagggcacaggaacaggttgttgctggtaccctgcatcaccttactcttgaggctattgaggctggtgagaagaagctctatgaagccaaggtgtgggtgaaaccatggctgaatttcaaagaactccaagagttcaagcctgctggtgatgcaccatcgtttacctctgctgatcttggtgtcaaaaaggatggtcaccaaccaggatggcaatctgtgccaacacatgaccctcaagttcaggatgcagcaaatcatgcgatcaagaccatccagcaaaggtctaattcactagtaccctatgagcttcatgaggttgctgatgcaaaggctgaggtcattgatgattttgctaagtttaatctgcttctcaaagtcaagaggggacagaaggaagagaagtttaaggtagaggtacacaagaataaccaaggggggttccatctaaatcagatggaacaagatcattcctaattctgatctgaagtttggtcaccctagcaatattgttcttatctatgtctagtgcttacccctttctctgtgccttggcaaataagtagttttacaatgtgtgtatccctttattaactgggaagctaccggtgatgttacattagtaactttgtaacgtaaatattactttagtatcataaaaaatgcggatgttgaccatttgtatttaacgtagcctaaagaatgcgaattattttttttacgtttataaagttgttattgtt

SEQ ID NO: 11975 - DNA, 1510 bp, Glycine max
  Clone ID: 701150068_FLI
tggaaatagaagagaaaattaacaaaatcaaatggtgccaaacagccaatggtgctttgttccttctatccacaaatgataaaaccatcaaattttggaaggtaaccagccatgagaccagtttgatggctcgatgccgtagagtatatgcccatgctcatgattatcatattaattctatttcaaataacagcgatggcgaaactttcatatcagctgatgatttacgaataaatctttggaacctggaaattagcaatcaaagttttaatattgttgatgtaaagcctgcaaatatggaggatctgaccgaggttataacatcagcagaatttcaccctacacattgtaatacattggcatatagcagttcaaagggttcaattcgtcttgttgacttgcggcagtcagcattatgtgattctcatgccaaactatttgaggaacaagaagcccctgggtccagatcatttttcacagagattatcgcttcaatctcagacataaaatttgggaaggatggaagatatatacttagtcgtgattacatgaccttaaagttatgggacatcaatatggattctggtccagttgcaacgttccaggttcatgagtatttaaggccaaagctttgtgatttatatgaaaatgattcaatttttgataagtttgagtgttgtctaagtggtgatggattgcgtgtttcaactggctcttacagcaatctattccgtgtgtttggttgtgttcctggaagtactgaggctacaactttggaagccagtaaaaatccaatgagacgccaagttccaaccccttcaagaccatctagatcattgggaaacagtataacaagagttgtaagacgtggagcagagagcgccggtgttgacgcaaatgggaattcttttgatttcacaacaaagttgctgcacttagcatggcacccaactgagaattcaattgcttgtgctgctgcaaatagcttatacatgtactatgcttgaggaagaaagatgattgaagaacatgtatttgcttttggttgacctgtttttggggttgctgtggagaaggcttctttccccttcctaccaaccaatgagttggatgctacatttaactcacactacaagtgcccttcaaaatctttagcaggagcttttagaaaaaaagatccagaagtggctgtttcaaaattcctggggtgggcagaccttattttgtttctggatgatgatgggcagcatctcttttttttgttcaatttttccaccttcttccaaccctaatattctttctccccttttttctgtatcttcttataaaaagagaaggtgcagtcaatgcttcatattgtgttttggcttgcaaatgaagaagaaaatgtgattgtagctctcctacaacaaatactaaaggatgttcaatatctgccactaggataaaaagataaaatgtagttcttttctttttacccagatagatgtcttgtgggatggagcagtgc

SEQ ID NO: 11976 - DNA, 1194 bp, Glycine max
  Clone ID: 701150112_FLI
ggggtcattactcattacaagctagtgttggtaagacttttgcatttagtttggggaattgcaatattggtcagctagctaggaagtggtgttgtttttgtgttagtgctatgggaaggcaaccctgctgtgacaaacttggggtgaagaagggtccatggactgctgaggaagacaagaagctcatcaacttcattctcaccaatggccaatgctgttggcgcgccgtgccaaagctcgctggcctcaagcgctgtggcaagagttgtcgccttcgttggacgaattatcttcgtccagacttgaagagagggctactcacagaggcagaggagcaacttgttattgatctccatgcccgtcttggcaacaggtggtccaagattgctgccaggttacccggaagaacagacaatgagattaaaaatcattggaacgcccatatcaagaaaaaactccttaagataggtattgatcccgttactcatgagcctctcaaaaaacaagctgcagcatcttctcaggatagttcatcctcccctgcagagcatttgccgcaacctggcaataaccttgatgatcaggtcaaagaaactgaagggattcttctcaactcagaggagattcaagttcatcacaagctgaaaattcttctggggatgattcacttttgctagatagcatttgcagcgacgattctctattaaacagcatgtggctggatgaaactcctctggtggaagcattatgggacacaacacctaaccttgagaatactagtaataacatgggtttgttaccatcttgggaggataattgtgcttggttattggactgtcaagactttggtattcatgattttgggtttacctgtttcaacgagatagagtcacatgcactgcaaacgataggaatgaaggaagaggggcattagcacgggaatttaattgtctatgaaagaaaattaagggtaagatatcaaatctataaatgtgacaaaataccacgggctcaaatttaggttcttggtgttgaattttatctacctagtattttacaaaaatgtttctctcggaaggtggaaggtgaacgtttcctcttgtgaggttcctcgccaaccaaaacacaaaattgatagcaaagcaaaaccaaatcatcatcaaaatggcacagtacgtacgtactttctcttcg

SEQ ID NO: 11977 - DNA, 1255 bp, Glycine max
  Clone ID: 701150123_FLI
acgacagaagggggaaaaagggagtgcctgataacccataaccgaccgcaccaccgttttcctttgctttgcgttctacaatgtcgaaaacctcagagattattacatgcaaaggaaaacctgtgactgtggaagagatacaagtagaccctcccaaagccaccgaagttcgagttaagatgctttgtgccagtatatgctccacagacatctctagcacaaaaggattcccacataccaattttcctatagcacttggacacgaaggagttggtattatagagagtgtcggtgatcaagtaacgaatctgaaagaaggggatgtggtaattccaacatacataggcgagtgccaagaatgtgagaattgtgtttcagaaaaaaccaatttgtgtatgacatacccagtaagatggactggtctaatgccagataacacttcaaggatgtccatccgaggagagaggatataccatattttcagttgtgctacatggtcagaatacatggttagtgatgccaactacgttctcaaagttgatccaaccattgatcgagctcatgccagtttcatctcatgtggcttttcaactggatttggagctgcttggaaggaagccaaggttgaaagtggatccactgtagctgtttttggtcttggggctgttggattaggggctgtaattggatccaaaatgcagggagcaagtaggataattggaattgacacaaacgagaacaagagagcaaaaggagaagcttttggaataactgactttataaatccgggtgattctaataaatctgcttcagaattggtcaaggaactaagtggtggaatgggtgccgactattcttttgagtgtactggagtttccactttactctctgaatccttggaagccacaaaaattggaacaggtaaagcaatagtaataggtgtaggaattgaaattactttgccattgggtctttttgccattctgcttggtagaactttgaaaggttctgtttttggaggactcagggccatttcagacctttccattttagctgacaaaggccacaaaaaggaattccctcttcaagaactcttcacccatgaggtcacattagcagacataaacaaagcatttgagctactaaaacaacccaattgtgtcaaagttgtcatcaacatgccatagtcatattagcgcaattgtaggtaatcttcggcaaagtttgaaaaagattcacgtttcactctttacct

SEQ ID NO: 11978 - DNA, 1173 bp, Glycine max
  Clone ID: 701150149_FLI
actcatgcggttgttgagccattcgtcatagcaacaaacaggcatctgagcgtggttcaccctatttacgaacttttgtttcctcactatcgtgacaccatgaacattaattcacttgcccgcaaatccttggtcaatgcagacggtattatagagaaaacattcttgtggggtaggtactctttggaaatgtctgctgttatttacaaggactgggttttcactgatcaagcattgcctaatgatcttgtcaagagaggagttgcggttaaggatccatctgctccccatggagttcggcttttgattgaggactatccttatgcttctgatgggctagagatatgggatgccatcaagtcctgggtgcatgaatatgtctcattctaccacaagtcagatgcagcaattcaacaagatcccgagctccaagcttggtggaaagaacttgtccaagtgggtcatggtgatttgaaagataagccatggtggcaaaagatgcaaactcgtgaagagttgattgaagcctcggctaccctcgtatggatcgcttcagcccttcatgcagctgttaactttggacagtatccatatggaggtttaatcctaaacaggccaaccattagcaggagattcatgcctgagaaagggtctgctgagtatgcagctttggctaagaaccctgagaaggagtttttgaagactattactggcaagaaggagaccctcattgaccttacaattatagaaatcttgtcaaggcacacatctgatgagttctaccttggggagagagatggtggtgactattggacttctgatgctggtccactagaggccttcaagaggtttggaaagaagcttcaagagattgaacaaaagcttatacagaagaacaaggacgagacgttgagaaaccgcagtgggccggctaaaatgccttacactttgctctatccttctagtgaggagggattgactttcagaggaattcccaacagtatctccatctaggggctctatggttgttgcagtactttccctggttttcaataaaagtgaatagaaggaatatgattccttcatctacctatgtatggtcaagttatgtatttggggtgattgaatgttctcgtgtttgctgttaagtgttaatgaagaaattctgtttgg

SEQ ID NO: 11979 - DNA, 1198 bp, Glycine max
  Clone ID: 701150368_FLI
ggtggtaatgagtggtgaagatgggcaaagcaccttgttgtgagaaacatggggtcagaaggggagcttggacacccgaagaagaccaagctttggttgactacatccagaaacatggccatggaagttggcgttcactccccaaacatgcaggtctcctaagatgtggaaaaagttgtcggcttcggtggataaactatcttcgcccaggcatcaagcgtggcccatttactagtgaagaagaaagtacaatcgttcaacttcatggcatgcttggcaacaggtgggcttctatagcatctcaactacctggaagaacagacaatgagattaagaacttctggaacacccatctaaagaagcgtctccttcgatcatgtcattcccaaagagcaaaacagctatgtgtgattcctgatcaatccattgtcaagtccgaatctccttcgacgcggcacatggtacagtgggagagtgtgagagttgagacagaggcaaggttgtcattggaatccacaatgctcaattcatggccaacgagtaaaacatgccctgatcactttcttacaactttggcattcagaggttggaaaatctttcgcatgattcaagggaaaggaagaaggagtagtgagtcaaagccttatctcacaaccttcatcttcatcaaaattggagtcttgttcagatgtgtcattgcaggtgaaaaccaacactggaactagtagctgcattccaaagcttgaggatgtgagcatggttcatgaacaaacaagtagctacaaaccaaagcttgatgatgacacagctggttctgactccggcaattatgaatttcttgatacttctgattctgcactgaagcaccttctacatatgcctgatagtgatatgggattcttgggacacaatgatcatttccaaaatctccttgatggtacatgtgactaagatagtctccttcatatttcttcatagaaagacaatactttgaactgatagggaaaattttatttgccctttcttcttttttgtaaatgcgctcaccatgtagctggttttcaatagttggtgtagagggggaaaaaggtagatagaagaatagtggaaagagatcaagtttaccctccacttgatggctgtagctaaaagttaaacattaatgaattcagagttaatgatattgttcttgtcctac

SEQ ID NO: 11980 - DNA, 1422 bp, Glycine max
  Clone ID: 701150411_FLI
gggattgatggctattgttgcagaggataatgcagatcccaacggaacaaatcttgagcttacattcctctgcctgacgtcactgacgatatgtgatttgccagagttaaagtgttttttgcagtgtgacatgttgaagacattttcacatgtagaaccaaatactaaaaatcaaatctgtattgaaaagcttacacccaatttgcagcacctgacactcggtgaaaatgaactgaagatgattccgcatggagaatttccaggaaacgtcttgcacaatttaaaagctcttattttgctgaacttcagcgttgagtcctatgaatttgcatatggatttctacaacaggtgcccaatattgagaagcttgaggtgtattgtagttccttcaaggagattttctgctttcaaagtcctaatgtggatgatactggactcctatcacagctgaaagtattaagcttggagtccctttcagagcttcaaaccataggttttgagaacactttgattgagccttttctcagaaatctagaaaccttggatgtaagcagttgttcagttttaagaaacttggcaccatcccccatatgtttccccaatctgatgtgtttgtttgtatttgagtgccatgggttggaaaacttgttcacatcctcaacagccaaaagtttgtctcggctcaaaataatggaaataagaagctgtgaatcaattaaagagctagtgtctaaggagggggatggatcaaatgaagacgagataatatttcggcagcttctttatttgaatcttgaatctttaccaaatctcacaagcttttatacagggagattgagtttcccatccttgctgcaattgtcagtaatcaattgccactgtttggaaactttatctgctggtaccatagatgcagataagttgtatggagttaagtttcagaagaaatcagaagctatcacattggatattgatctcaattctaccattcggaatgcatttcaggcaacggttccagatgcttcaagtgccccctgaccatttgggttcgacaggaaatatgatgaagattaggaggttaaagtgttcttcattacctgttgattaagtctaatgttttatctaggttgagtccgtgtccgaactctaatattgcagtaagaagagattgacggaaggactgatgcagatgaataaagtagccttggtttcactaagtttgttaatttgtgtgttgaaaaaaacaataagagttatgcatgcgtgtggttctacatattcgatggtgaaatacattgttctattctttatattatgtaatgtgtgattttaagtgataaacggagttgaagaacaaagatgaagtattgactgtactgtttgtattttgtaagttatatttgttttgtttgtttatcccg

SEQ ID NO: 11981 - DNA, 1361 bp, Glycine max
  Clone ID: 701150419_FLI
gggaggaagaaagaaagaaagaaagaaatggaacatggcttccccaaaggcaagttcaagagcctctgtgtcttttgcggcagcaactctggcaaccgtcaagttttcagtgacgccaccattgaattggccaatgaactggttaagaggaacattgacttggtgtatggtgggggaagtgttgggctgatgggcctaatatcccagagaatgtatgatggaggctgccatgttctaggggttattccaaaagctctcatgcctcttgagatatctggtgaaccagttggtgaagtaagaattgtttcagatatgcatgagcgtaaagctgcaatggctcaagaagctgatgcatttatcgccctccctggaggatatggaactatggaagagctgttggagatgataacttgggctcaacttggaattcataaaaaaccggttggtctactcaatgttgatggttactataactctttgctcgcattatttgacaatggtgttggagaaggcttcattaagcatggtgctcggaatatacttgttgcggcttcatcagccaaagaacttatgatgaagatggagcaatattctccttcccatgaacatgtagctcctcatgatagctggcagacaaggcaattgggtaattatgcagaacaggaaaatgcagaatgaaacattgattggttgaaggattatccaaattttttatttttgtgatgtaactcttcatcacttgaaatgtatacaagagtccctgtgtatggggccatatgttgtttgttacttactgtgcattgatttttttgaagttctggttttgcatcatttcatttcatggtcaatcgagtcactgtgagaaagtcatatttggttgttatttaacactgtttaaagggtaaaaaagtgcattgaaattgtaaatagacagaggctagtatttttatggcaaattaaatctcagttgtgcatcatggggtggcagctggctccactatgcagtgccaaaattagacaatataggtgaatcatggtaccatagaagaaagtagagtgattaatctccataatttggcaactattgtagtcttttttcttttctattaaaaaagcagccctacctcaaacattctaaatggatgctgctaggataactgtcgtataattttggtttaaataaacttgtatctttggaacaaagatgttcaaattataagtatagttggtaaaatataaatcttgtctctgtatattgaattactgaacctatcccatagagtgttgatttttgtatttaattagttgattgtaaaaaatttgtagagtttatcataattagactcttattaaaaaaacct

SEQ ID NO: 11982 - DNA, 1030 bp, Glycine max
  Clone ID: 701150508_FLI
ggatgcaaaagttagtagtagtgaagaaaatgaaagtccttgttttctttgttgctatagttctagcagcatggcattgccatggctcagaccatgaccatgaccatggccacacctaccaaattttccctctgagaatgaaaactggccatggtggccactacattccggaggtatcatgccaaagttggaggcttggtgtggaagcacacaacgtcattgactggaaaaccgttcctcaagattgcgagggatatattgggaactacatgcttggcgaacaatatagatcagactccaaaatagttaaccaacaagcttatttctatgctaaaaccctcaatatcactgccaaaaccgcatgggtgttcgacatagatgagactacactctctaatctcccttactatgctgaccatggatttggggtggagttatataatgaaacatcgtttaataaatgggttgaccttggcgaggcaccggcactgccagagagtctcaaattgtacaagaaactgttgtctcttggcatcaagattgtattcataacaggaagaccactggatcaaaaggctgtaactgctaccaacttaaagcttgctggatatcacacatgggaaaagttgattaccaagaatacatctgaataccatggtaagacagcagttacatacaaatctactgagagaaagaagctggaggaaaaaggatacaaaatcattggaaacattggagaccaatggagcgatctattaggaaccaacacaggcgataggacctttaagttgcctgatcccatgtactacattagttgaggtctctagggctcttactagcatgttcctatgaataaaataagatgcatgttgtaataatggagagatcgacttaaaccaaggagcactcgttaattaattgctatgtatgtgactttgtgtgagacaaaaggtcacgtggtaagagactgtacaagcacaacggtgttttatctttcgtggttttaataaatcatgtgtgctataattcc

SEQ ID NO: 11983 - DNA, 1496 bp, Glycine max
  Clone ID: 701150545_FLI
ggcagcgcttgagaccaagccccactcaaccaccacaccactctctctgctcttcttctacctttcaagtttttaaagtattaagatggcagagacattcctatttacctcagagtcagtgaacgagggacaccctgacaagctctgcgaccaaatctccgatgctgtcctcgacgcttgccttgaacaggacccagacagcaaggttgcctgcgaaacatgcactaagaccaacttggtcatggtcttcggagagatcaccaccaaggccaacgttgactacgagaagatcgtgcgtgacacctgcaggaacatcggcttcgtctcaaacgatgtgggacttgatgctgacaactgcaaggtccttgtaaacattgagcagcagagccctgatattgcccagggtgtgcacggccaccttaccaaaagacccgaggaaatcggtgctggagaccagggtcacatgtttggctatgccacggacgagaccccagaattgatgccattgagtcatgttcttgcaactaaactcggtgctcgtctcaccgaggttcgcaagaacggaacctgcccatggttgaggcctgatgggaagacccaagtgactgttgagtattacaatgacaacggtgccatggttccagttcgtgtccacactgtgcttatctccacccaacatgatgagactgtgaccaacgacgaaattgcagctgacctcaaggagcatgtgatcaagccggtgatcccggagaagtaccttgatgagaagaccattttccacttgaacccctctggccgttttgtcattggaggtcctcacggtgatgctggtctcaccggccgcaagatcatcatcgatacttacggaggatggggtgctcatggtggtggtgccttctccgggaaggatcccaccaaggttgataggagtggtgcttacattgtgagacaggctgctaagagcattgtggcaagtggactagccagaaggtgcattgtgcaagtgtcttatgccattggtgtgcccgagcctttgtctgtctttgttgacacctatggcaccgggaagatccatgataaggagattctcaacattgtgaaggagaactttgatttcaggcccggtatgatctccatcaaccttgatctcaagaggggtgggaataacaggttcttgaagactgctgcatatggacacttcggcagagaggaccctgacttcacatgggaagtggtcaagcccctcaagtgggagaaggcctaaggccattcattccactgcaatgtgctgggagttttttagcgttgcccttataatgtctattatccataactttccacgtcccttgctctgtgtttttctctcgtcgtcctcctcctattttgtttctcctgcctttcatttgtaattttttacatgatcaactaaaaaatgtactctctgttttccgaccattgtgtctcttaatatcagtatcaaaaagaatgttccaagc

SEQ ID NO: 11984 - DNA, 1030 bp, Glycine max
  Clone ID: 701150581_FLI
gacacaaaaaaagtgaaaccccccacaccacacccaaccctcaccttagggttcctctgttcttcttctaacccaacaagaaaaaaaaatcacattccccaaaacacccttctcgctccgcatggcgaaaacgaggccaggcagaaaggacgtggactcatacaccataagaggaaccaacaagatcgtccgagctggagactgtgttctgatgcggccctcggacacgtcgaagcccccttacgtggcgcgcgtggagatgatcgagcaggataataggaacaacgtgaaggtgcgtgtggggtggtactacaggccggaagagtcgattggtggtcggagacagttccatggtgcgaaagaactgttcctctccgaccactacgatgtgcagagcgcgcacaccattgagggcaagtgcgtggtgcactctttcaagaactacactaagcttgagaatgtgggtgctgaggattactattgtagattcgagtacaaggccgcttctggggcttttacccctgaccgtgttgctgtgtattgcaaatgtgagatgccttataacccggatgatctcatggtacaatgtgaagggtgcaaggattggtaccatcctgcttgcatgggcatgactattgaagaagctaagaaactagatcattttgtatgttccgaatgttcatctgatgatgatatgaagaaaccccaagctacattttctgcatcaccgggagctgatggcaaggtggagccgaagcggcggaagagatgaccatgtgaggtgtgtgtggttcttgcttaatttggctggctctatggtagcttttgtgtgttgtacggcttcttctagaggctataaacattgatttcatgtatttgattcaggttattatgtatctatccgttttacattttgttatgacagttcatctgtttttccttttgtccattgatgagaactccgatccaagtgttaattcttgagatggcatcaaaccttaaaaaccaagtacagcgcaattgttagtcc

SEQ ID NO: 11985 - DNA, 1589 bp, Glycine max
  Clone ID: 701150795_FLI
ggatgcaggagaggatgaatggtatagggttttccccggcgggatacagtcccgtaatcccttcttcatcctgttttcctaaaaaattgagagtccagccgcaacgggccttgagctctgacccctacgttctggaactcgccgaaaccctagaagactccttcccctcctctccctccaccccactccctctccagaacctccgcctctcctcctcccaatccctcctctccactccatggccctcccgccgcgacgagcccttccgcttcaccgacctctccttcatccgccaatcccgcatcctccccgtctcccccaccatctccctcctcactcccacctcccacctccccaacgacgtctacgtcggctccctctcctcctcctccccctctctcctccagcgagtctcccatttcatctgccctttccccatcggcgacctcttcttctccatcaacggtatcgccgctcccgatttaactctcgtctatgtccccgagggctgccacgtcgacatccccatccacttggactacatgctccctcccactccctccaccgatgattccggcgccgccatgcatctctccaatcctagggttctggtcgtcgtcgagaaaggagcacacgtcaatataatcgaggactttcccgcttctccagagaatcagaatgactcttactggagtaatgccgcatttgaggcagtgattggtcaaggtgcaaagcttacgtattcttatattcaaactcagtctttccgtgctgctcacatcaaatggacctccattcgccaggaagcttctagtacatatgagcttacagaggtaagcacgggaggaaaactggggaggcacaatcttcatatccagcaattgggcccagacaccgtcactgagttatcaactttgcacttgtctgttgctgatcaaacgcaggatctccacagtactcttgtgttggatcatccacgcggctattctcggcaactccataaatgcattgttacacattcacagggacaagcagtttttgatggaaacattaaggttaacaggtatgctcagcagacagatgcaggacagttaacaagaacccttctgcttgaacctcgtgcgactgtaaatgttaaaccgaatcttcagattgtggctgatgatgttaagtgctcccatggagctgctataggcgacctgggagaaagtcaactcttatatttccaagctcgcggcattgacatagagactgctagaagagttctggtttttgcttttgggagtgaggtgatagataagtttccttattcttccattagagacagagtgcgtagtcagattaagaatttgttggatccatcatcgaattgatcatcattttaggggtgtcctgaatgtaaacattttaagctacctgatacaatgataaactgaaatcacaatgaaaatcgtttccccaaaaattgttgccttctgcttcatgtatttcttttaatgtggaaaatcatttccttactgggtttgtataagttaaacatgcaccatactcattgaaacatgcatgggaagccatcacactactttcac

SEQ ID NO: 11986 - DNA, 505 bp, Glycine max
  Clone ID: 701151040_FLI
gagatccaaacgaaacgcaggagagacagacagagaagagaatggacgctattgattctgtgttcgatccgctcagggaattcgccaaggacagcgtcaggctcgtcaagcgatgccacaagcccgatcgcaaagaattctccaaggttgctgtgcgtaccgcgatcggtttcgttgtgatgggattcgtgggttttttcgttaagctcatcttcattccaattaacaacatcatcgtcggatctggttaggatgaggggaatcgcaatcgcctcaggaattcaagttatcaaacaaaatgagaggcagaaagagttccaacttcaaatagatagctcaatgaaattaattgtagttctgctgtatttcatttttggtttacctttgtatcttcggaagcattacaattttatttgaaatgtaaaattttgtttttccatgtgctggacctttagacacattgttttgattcaggaaaagaatgaaaaatatctatagttagccg

SEQ ID NO: 11987 - DNA, 842 bp, Glycine max
  Clone ID: 701151074_FLI
gatgccaaatccttttcattcaagatgaagatgattcgcattcttttcatctttgctcttctatccttcacttcccatgcttctaatgtcaatgacttctgtgtggcagacctgaagggtccagatagccctactggctatcactgcaagccacctaaaacagtaacatcacatgactttgtgttccatttaggccctggaaacacttcaaacgtgttcaagtccgcaataacctctgcatttgtcaaagattttcctgctgtcaacggtcttagcctttctgtagcacgcattgacatagctcaaggtggagtggttccaatgcacacacatcctggtgccaatgaaatagtgatgatggtggcaggtgaaatcaacgctggctttataacaaccgatgcagtttatcagaacacactgaaaccaggagatgttatggttatcccacaagcacagatacattttcttgtaaattctggtaagggaaatgccatttttttacgctgcttatagtagcgcaaaccctcgagtgcaaccaattagtattctgttatttggcaacaacttgtcttctaacacggttgcacaaactaccatcattgatgattccgaagtgaggaaattgaaggccatttttggtggcagtggttaggattttctatgaatccactcctactacctagtatatataattattccaataaacttgatcctcagcataaatatgtttgtgtgtttcattgtcccatttatatgtccaatcccaaatattattgaaggtttgttgtttaacggtttgatcatcaatgcaagaagaggattatatatgattcttatcttac

SEQ ID NO: 11988 - DNA, 1468 bp, Glycine max
  Clone ID: 701151255_FLI
agggaatctttcttcttatgggaatctcgtgggggattcatttggcaaattcggaaaagctctggtgcaaatatgcgttataatcaacaacattggaatgctgattatttacatgattattattggtgatgtgatttctggaacatcttcttctagtgaatttcatcattctggtgtacttgaaggatggtttggagttcactggtggacaggtcgtacatttgttcttctttttacaacatttgctgtgtttgcacctttgtcatgcttcaagcgaattgattcgttgagatacacttctgcattatcatttggcttagcagttgcttttcttgttattgctgtgggaatctcaattttcaagatttcaattggaggcattgggatgcccagactcttcccaatcattactgacgtagcctcagtttttgaactgttcactgtaactcctgtggttgtgacagcctatttatgccacttcaatgttcacagcatagataatgaactggaggactcctcgcagataaatgggattgtgcgtacttcccttgctctatgtgcttcagtgtacttgctaacaagcttctttgggttcctcctatttggtgaaggaactcttgatgatgtgcttgccaattttgacattgatcttggaattccttttggttctgtgctcaacgatgctgttcgttttagctatgccgcacatcttgtgcttgtatttccagttgtcttctatgcagtgcggatcaaccttgatggtctcatatttccatcatctaggcctttggttctagataacttcagatttgcatcaattactatggtccttattgttgcttcctttttgggagcaaatttcatacccagcatttgggatatattccagttcaccggagcaacagctgctgcatgtttatcattcatatttccatctgccatcaccctaagggatcgatacaacattgcaactaaaaaagacaagattctatcagtgtttatgatagtcctcgcagtcttggcgaatgttgtggctgtatacagtgatgcctttgccctgatcaagaatagtataactaaacgtgagtgatttcttgaaattttctatacaagtccacagttcagatatgttcgtactttcagatgctagagtggcagggttattggccaactagaaaatcgatgtttcttgagaggatctgatgggttgattgtaaaataaagaaagaagcaacccagtccctgtgtacagttgttcttcaaaattgtgtaaaggcttgcaacatgttcggtctcccgtgtaatgtgctctttgctattatagttctagagttgtttttctttcttcccaatcctatttaaaagagattgactcatgtattttaaagcgtttgttaataccttgtgttataaatttccctagaaatagaacattttcggcacttaatggcattgcaatagtctgagt

SEQ ID NO: 11989 - DNA, 1199 bp, Glycine max
  Clone ID: 701151270_FLI
ggggtgtgatctggaagtgaaggtgaagaaatgcttcttcaaacgaggcaatttggcacagcgtgtccatgggtcagactcacacccgcaagcaaaagaaatagctcagtctcattgagaaggagcaattgtggcccaaaatgttcggtgtcccaattggaattgaagagtgagagtgagagcaaaacgaagccgtatccagcagaggcatcgaggaccataatggagttggctaaggtgggcacgctgtgtacgttgacccaagagggtttgccccttggtactggggttcgattcgcggttgaccctgaacatggcactcccttgttctgcttcaattccactgacaacactaacatcccctcttctcttcatgttcagtttgaacaatttggattgcgcactcctcagtgcactattcaaggaacccttaccaaaccacaggatccaaagcgtcttgtttctgtgtggaggaaaaggtttggagaagaagttgatcgagattttatttacattattgccgtggatcgggtactccaattggaagacattcaggaggatggcatatgggtcacctcttcagattacaaaaatgctcaacccgatcctcttcgagactctgcacacaacttagtcactgaaatcaacaccaacaatatggaagacattactcgcttttgcaatgtctacgttgatttggatttcctggtctccgaggcaaagatgctatgggttgatcgcttgggctttgacatgcgtttgtcttcccctcacaaaggcgtgtttgacgtccgcattcctttccccagagaagtcaccgatgagaaaggtgccaagtcgacgtttaattgtatgtcacaactcgcttgggaggtagaaagaaacttccaacatccagacttttcaaaggttaaagagttgaagccagtcaagtccccttttctgtaaccaacatgccaattcttcagttgttatcaaacatccatccttggttgtttttcaaagaatatgaccatgtctatcgtggctttgtttagttttgactcatctagtgttgatgcaatgtttgatgtacttctaaggtgttttgtagccacatcaggaaaaatccaatacacgtttgtgtttcaaaactctggtattaggcaatgcattttgatatcaaatccgggttgaatggatgaacaggtgtttgcatt

SEQ ID NO: 11990 - DNA, 1720 bp, Glycine max
  Clone ID: 701151295_FLI
gagagaacgagagaaagaacaatgggggcgaagaagcagagccagggagtgaaaaataagggtaatggcgccaacaatgatgttttcgcgtcatgctccttctccagccttggacttgattccaatttatgtgaacaacttcgtgataggttggggtttgaagttccaacgctggtgcaagctcaagcaattcccgttattctctcggggcggcatgcattggtgaatgctgcaacgggcacggggaagactgttgcgtatttggctccgattattcatcacttgcagggttatgaaaatcggattcagcgctctgatggaacatttgcgttggttcttgtaccgacgcgggagctatgcttgcaggtttatgaaattcttcaaaagttattgcatcggtttcattggattgttccaggatacatcatgggtggtgaaaagagatcaaaagagaaatcaaggctgcgcaaaggcatatcaattcttatagcaactcctgggcgccttttagatcacttgaagaacacaacagcattcttgtactcaaatttacgctggataatttttgatgaagctgaccggattttggaattgggatttggaaaagatatagaggaaatactagatcttttaggctcaaggaaaaaagggcatggtgatcaagagaatacagttctaacacactctaaaattcaaagacagaatttgcttttatctgccaccttaaatgagaaagtgaaccaccttgctaaaatgagtctagacaatccagttatgattggtcttgatggtaagaaaatggaaccaatttcaacaattaaaaggcttgattcttcagaatctgatgaagacagtgaagataaatattccagtaaagtaccaacagttggagattacaaagtccccatacagttgattcagagatacatgaaagtgccatgtggttcacggcttcctgtacttctttcaattctaaagcatctctttgaaagagaaccttcacaaaaggtcgttttattcttttcaacatgtgatgcagtagattttcactattcactgttaagtgaatttcaattttcatcctatccacaaacagaaggggtccgacaggtgtttcttggatgcaaaactttccggttacatggtaatatgcaacaagaggaccggagaaccagttttcaggcctttaaaactgagaaatctgctctgcttttgtccactgatgtttctgctagaggattggattttccaaaggttaggtgcatcatacaatatgattctcctggggaagctacggaatatgttcatagagttggtagaactgctcgactgggtgaaagaggagagtcattattatttctgcaaccagttgaaatagactatttacaggacttggagaaacatggtgtctcactcacggagtatcctgtcctcaaagtgttggatagttttccactacaaaagaaccacacaaagaagtctgttttcttagagtcacatccctgggtcctttgtctccagaaggcacttgaagccttcatcatgtccaagcccgaaatggatgaacatgccaggaaggcattttgctcttgggttcgtgcgtacacagcccatcgcggtgagctgaaaagaatatttatgatcaagaaactccacttggggcacgtagcaaaaagctttgcattgaaacaacaaccctccttagttgggcagtcattcc

SEQ ID NO: 11991 - DNA, 764 bp, Glycine max
  Clone ID: 701151347_FLI
gctgagaagacgacagaaggggaagggagaattaggtttttagggtttacaccgagcagcgacacctccctcccgcagtagccatggttctcaaaactgaactatgccgattcagtggtgccaagatctaccccggaaagggcatcagatttgttcgtggtgattctcaggttttcctgtttgccaactcaaaatgtaagcggtatttccacaaccgcctgaagccctcaaagctcacctggactgctatgtacagaaagcaacacaaaaaggacattgctcaagaagctgtgaagaagaggagacgcgctgccaaaaagccttactctaggtccattgttggtgccactctggaagttatccagaaaaagagagctgagaagccagaagttcgagatgcagctagggaagctgctcttcgtgaaattaaggagaggatcaagaaaacaaaggatgagaagaaggctaagaaagcagaagttacagccaagtcacaaaaagcaggagggaaaggcatttctaagggtgctatgcccaaaggtcccaaactcggtggtggaggcgggaaacgctgagcttttagttttgttcctattttttgttacagtttaaatagagttgttttgacactgatgtaccgatatttcatttgcaagattaatcttttattgtactgttttattcagcctgtgtttggatcttcagaaggttggttattgattggattttgccatccttggaagttttatatttttacgccaatc

SEQ ID NO: 11992 - DNA, 1527 bp, Glycine max
  Clone ID: 701151545_FLI
tacgagaagacgacagaagggggatgaacacaactgtgttgcagttgttgttgttgatgtttgctttgttctctttctctctctctctagggtttcaagagtgttttgaactactccagaaccctctcttgtttttcacaaatttgggttcagtagagtactgacccagaaaagaagattcaacaggtacctaagagaaggaaagagggggatagaaagaaagaaaaagaaatagaaactgcacgtataaaagaagaaagaaagaatcaaagaaaataggaaaaaagggcaaatattttgtttgaataagatataaggcaatagtaatattagtattgttgataataattaggtagaaaaaatattatggggaggggaagagtggaactgaaaaggatagagaacaagataaacaggcaggtaacgtttgcaaagaggagaaatgggcttctcaagaaagcctatgagctttctgttctctgtgatgctgaggttgccctcatcatcttctccacccgtggcaagctttatgaattctgcagcaccaacagcatgctcaaaacacttgaaaggtaccaaaagtgcagctatggtgcagtggaagtcagcaaacctggcaaagagcttgagagcagctaccgtgagtacttgaagctgaaagcaagatttgaatctcttcaaaggacccaaaggaaccttcttggtgaagacttgggcccattaaataccaaagatcttgagcagcttgagcgccaactggattcatctcttaagcaagtgaggtcaacaaagactcagttcatgctggaccagttagctgatcttcagaataaggagcatatgttggtggaagcaaacagatctttgaccatgaagctggaagaaatcaattcaagaaaccagtataggcaaacatgggaagctggtgagcaaagtatgccatatggaacccaaaatgctcactctcaaggcttcttccagcctttggagtgcacccccacattgcagataggttctgactacaggtacatccctgaagcctcagagcagcagctagctgccacaactcaagctcaacaagtcaatggatttattcctggatggatgctttgacctaagatctcagtattttagatggctacataaataaaattagcaaacacctaaggccaaagtcaaaatgcctcttgctgttggaaatgtgtaaatgctgcttgttcttctgttaatttgttttggcataaaaacagcagtgactgacttaaaactattaaaactttagccatagacataggatgtggcatgaaggttatagtatttaatttgaatattttggaaggacaagttttatctgactgaatgaccagttagtgtcattttttatttgcaatctctttctaatctggctgcattaagagttgtttttaaacttcttgcattcattagtggagcattgtacaatgatatatatgacaatattgtaaagtatactgaggctatggaaatgccacttgaatttattttcag

SEQ ID NO: 11993 - DNA, 1025 bp, Glycine max
  Clone ID: 701151606_FLI
gggctgagcatcggaagatactggactgctctggctgctggtaattgcaatggttgcagctatgccgggacattcagacctccaaagtgccaggttggttgtggccaaccaacccagagatggtaccatgtacctcgatcttggttgaagccagatcataacctgttagttgtttttgaggaacttgggggagatccttcaaaaatttcacttgtaaagagatcagtgagcagtgtctgtgctgatgtgtctgagtaccacccaaacattaggaattggcacattgatagctacggaaaatcagaagagttccatcctccaaaagttcacttgcattgtagtcctggccagaccatttcttccattaaatttgcaagctttggaacacctttgggaacatgtgggaattatgagaagggagtttgtcattcttccacttcccatgccaccctagagaagaaatgtataggaaagccaagatgcacggtcactgtatcaaacagtaactttgggcaagacccttgtcctaatgtgttgaagcggttatcagttgaagctgtttgcgctcccaactaattggagaggctgaatgattaaggaagcacccttttacgtgtagtgtgaagtgacttaacaagcacacgaaagaacaataatagtataggtaaagtaaagtgccatagttgtttttagggagagaaagtaactatgttctgacatgttggtgccgaaggcacgaggttttatagtttcatttggtgatgtttttacgggagtgtataaattagtgattgttggataggtgaatctttaatcagggagtccaaaatttggacccctggtgtagtagttcccggccttttaagttttaactataggcacggggaagagagggagtttggttggtgtgatgttttttcgttttactttgtggggtaaaattaatctccaaatcaggttcaagttgggagcggatcctactgtaaccattctacgtttatttaaagtctccattgttatgtgcc

SEQ ID NO: 11994 - DNA, 833 bp, Glycine max
  Clone ID: 701151737_FLI
gggagagagagatgggaaggtccccttgctgtgagaaagcacacacaaacaaaggtgcatggaccaaagaagaagatcatcgcctcatttcttacattagagctcacggtgaaggctgctggcgctctctccccaaagccgccggccttctccgttgcggcaagagctgtcgtctccgctggatcaactatctccgccctgacctcaagcgcggcaatttcaccctcgaagaagaccaactcatcatcaaactccacagcctccttggcaacaagtggtctctaattgctagaagattgccgggtagaacggacaatgagataaagaattactggaatactcacataagaaggaagcttctgagcagaggaattgaccctgccactcacaggcctctcaacgatgacaaggtattggaacgctgccctgacttgaaccttgagctaaccattagtcctccccgtcaacctcaatctgatcagcatcacttgaagcccgttgggagaaactcaaacctttgctttgcctgcagtttgggtttgcaaaatagcaaagatcattgtagctgtgcgctcaacactgccaacgctgcttctggccatgatttcttggccttgaaaaccagcgttttggaaatgaaatgagtcaaattcattttggaatctttcttccctaattaattagttgttaatggatgcaaatgattgcctgcccaatttcctcgtggagccctttctattattcctatgttcatgtacatgtgcgtaagactacaaactttcttgtttatacgattggttctttccaaatagaatacaactatatatttttgc

SEQ ID NO: 11995 - DNA, 2395 bp, Glycine max
  Clone ID: 701151793_FLI
gcgagaagacgacagaaggggagagaacacaaagacaagtttgacctggtaatcagtgatgtacacatgccagacatggatggatttaagctgcttgagctagtgggacttgagatggatcttcctgtcataatgttatctgcaaatggtgatacgaagatggtgatgaaggggatttctcatggggcctgtgattatctgctgaaacctgtgagaatggaggagctcaagaacatttggcagcatgtaatcaggaggaagaagtttgactcaaaggagaagaacaaaaccagcaacctagacaaacctacttctaatagtggaaatggactagggtcatcaggaacaggaaattctgatcaaaatgagaagctgactaagaaaaggaaggatcaagatgaagatgaagatgaggatcaggagaatgatcttgacaatgaggacccatcagcccagaagaagcctcgggttgtttggtctgtggacctgcaccgcaagtttgttgctgctgttaatcagctaggcattgacaaggctgtacctaaaaaaattcttgatttgatgaatgttgaaaagcttacaagggagaatgtggcaagccatcttcagaagtataggctttatctgaaaagaattagctgtgtggctaaccaacaagccaatatggtggcggccttaggggttgcagatccatcctatttgagaatgagttcggtgagcggggttggacatgtacaaacattaagtggttccggacagcttcataacaataatttcagatcctttccacctagtgggataattaatagattgaacactcctgctggtttgaatgtgcatggatttccttctggagtacttcaattgagtcaatcacaaaatttaaacaatgccaatgatcatcataaattccagtcagtcattgttcctgttaatcagaatggtgttcagggaatgacagtgtctgtagggcttgatcaactgcaaaacaataaggttgttatgtctgttcagaacctgaccactgtttttgatgccaaaacaacttttcctatcccaaataaactcccagatccaagaccaaaaataaccaactctgtctctcatacttcagatgtgcatttctcaaacaatgccttgatgttggaaccacgccctcaaggctcacaagggagtgtaagaattggaacattatcttcttcagtagcctctcaacattcggaattttctttgtctttgctggatcaaggtagatatagtgataattggacaagtgctgtgcagccatctgtgatccagacaaactttttccctccaagtgaatgttttaggcagactaatatacctcctgcagataacatggcttctgtacccttgcaaggtgggaatctaagtggtccatccatcacttcattgtccaggcaatcccatgattcaatgacagaaatgcactctgaaggaatgacttttactaacagacctgggcatacaagcagtaatgtgccatttcaagggtgggatgaccataatcaggatgctactcaccattcaaatattatgtcaataaactcactgactccagtcaatggggctgctgttcaagctggccatgcagcaacgaactcggtcttacacagaaacttggattttaattattgtgatcccttacaaatgaagcatgaagggtttgtggagttaactgatgagaccttattgaaacaacatcaggggaataccatggaccagcaaaaatctcaagaaaatcatttctctaataatcttggttcactggaagacttggtcagttcaatgatgaaataggagaaagataagatgaaacacttgatggaaacctcatttgcaataattactctggtgggttatctatgtggtagcaggtttggcagcacataccagcatatcatgcacatcctcgttgatgaattttgtagctttcattgtgtttaaccacttttttcttctcatagttactataggctttagcttctccagattactttttcctgggtaaagttttctaggtttgttccattaagggctttctaattttatacaaatgctttgttgtccttgccttcaggtccagcaatgcattatgaagtatcaatcactttgtttaatctacatagatatgctggcctgcaaattggacctagatcttctctcacagcctcacttgtagtgaggagagagagacaaaaggtccaggtggaacccacttgaacctgtgtctttctcactcctcgctgcactctgtgtagcagatggggagagatctggggttgcaaatttgtaaaatgttagggatccataaacaaagattgtagtgattatgatgaatgacaataaacatggatgcccccttttatgcttg

SEQ ID NO: 11996 - DNA, 890 bp, Glycine max
  Clone ID: 701151863_FLI
cgagaagacgacagaagggggagagagagagagatggaggagaagacggagaaggtgaagtctgaggcagttcagataattgaagcgtttgaggttctgccaaagctcgtggttttcgatctcgattacactctctggcctttctactgtgagtgtcgatcgaagcgcgagattccttctctatatccccacgccaaaggcatattgttagctctcaaagagaaaggcatcgacattgccatcgcttctcgctcgccaacggcagacatcgcaaccgctttcctcaacaaattgaacctcaccccaatgttcgtctcacaggaaatatattccagttggacacataaaaccgatcattttcagaggattcattcgaggaccggtgtccccttcaactccatgctctttttcgatgatgagaataggaacatccaagcggtgtctaaaatgggagtaactagcattttggttggagatggggtaaaccttgggtcgttaagggaaggccttacacaattctctcgaaactgggatgcctcgcagaagaacaagcagaaatggctttccaagtactccaacaagtcagatacttccaaccccactgcatgaaatttaacatcccattgaattttctctatctggattctattcagaaccacagtattttgtatcagtcgtttcccttaatgaagcaaactgggagaacttgaatagaaacctggtatttccaacagctatatacttgaatattcaattggaattttctatggatttgattcagaaactatttaatgaacttaaatagaagtcacagctttcgtcctgttccctatttgtgagtgttgttatgcagcattaatgttattggatagtaaaattcactttaccac

SEQ ID NO: 11997 - DNA, 592 bp, Glycine max
  Clone ID: 701151908_FLI
gttaatgcaagtgattcgagaggtcaaacaccactacatcgctgtattctcaaaggaagatctacatttgctagattattgctttctaggggagccgatcctcgggctgtggatgagcagggaagaacccctattgagcttgctgcagagtcaaatgctggtggtgacagggaagtccatgctccattgactgattctagtggatgagagtgataggcaaaaatctcggagtataatacatatataaaatatggaagattggattatgtaaacttgtatttcataaattgaaaagctggtttttttgaaatgtcactagtgtgaaggattaagggagagaggtaggttgaaatgcctgccccttagtcattttgtgcaaaatagtgctaagatctgtaatgaaaaatggccacattggtcttagtaaaagagttatgcctctgctgcactggtagcacccggccagcactttgtaatatgatgtttgtgtaattttgtttacttttgaggtgaagctgcgatgcattaggctagggatttgtgtatgttgtgtacattggtttttgtgaaggtgttgtggctgtaattttcc

SEQ ID NO: 11998 - DNA, 992 bp, Glycine max
  Clone ID: 701151939_FLI
gatcactgattagacaactctcttccaaccaccatggccaatttcaaaactttcttcatttcccaaaccctaaccctaaccctccttttctccaccctagtgactgccacttaccaccacaacatctctccaagtcttgtacgttctcgtgagaagctgacccaccttcacttctacttgcatgaaatttttactagcgaaaaaccctcgaacatcgtaatcgacccccccaaggtggtagccagctctccacttccatttgggtcgcaagtggtgatcgaggacccattaacaattgggcctgatgtgaagtccaaagaaataggcaaggcccaagggttttacctatccgcaacccaaaggcccggtttggagttagagatagtcatggggatggctttgaccttcttagaaggcgaattcaacggtagcagtttaagtgtattggggagaaacaaaatcttcaatgaggtaagggagttgccaattattggtggcacgggtgagtttcgcttcgcacgtggctatatccttgctaggactgtcaaggtcgattaccataaaggggatgctaccgtcgaatacaatgcatatgtctaccattattcttccaccagctcttcttcctctccccacctttttaatcagggacttcatttatgtcatggagactactaagcttataataaactcagaaaagaaattagactacagaaggtgggggcataaatccaaagaccaagttgctaatttactcctctgaatctgtccagtactataaataaatttgctcttttcgtacacggaattaagtctttgttgtagtgcaagttgcgtcagctaaataatgtgccactcaaatattttttcttttggaaatgttgcccgttgattattatttgtattgtgcaattgaaaagatagagagaaagtggcccggagttgaaaacttgatatcattacaatgtgtaccaaaaatgtgaaagttgtac

SEQ ID NO: 11999 - DNA, 869 bp, Glycine max
  Clone ID: 701152088_FLI
ggaggcaaagagagagagagagaagaccaaaggagggtaagggaaaaacttcagcagaggaattccttgcagaagggtgcaactttactccctctctttctctcttgctctttcttgtcagggtttggtcatataagaagccatggccagttttggaggaaccacacaaaagtgcatggcttgtgccaaaactgtgtatcttgttgataagttaactgcagatagccgtgtctatcataaggcttgcttccgatgccaccattgccgtaatacccttaagcttagcaactactgttcttttgagggggtgctctactgcagacctcactatgatcaactctacaagcgaactggtagcctggacaaaagttttgaaggaatacccaaaattcagaaaccagagaaaccggtcactggtaatgagaatactaaggtcctcgcaaacgtgttcttgggcaccagagacaaatgtgtgtgttgcaacaagacagtgtatcccactgagagggttacggttaatgggacaccctaccacaagggctgcttcaagtgtacctatggaggttgtactgtaagctcatcaaactttatcacacacgagggaaagccctactgcaaacaccatcacattcaacttttcaaagagaaagggaattacagtcagctcgagaatgaatgctagctagcaatgtcgtatactactaccatggataatgcaccattgtcagcaacgcataatatatagtgttgtccttgtaaaatgcatgcattgatgagatagaaagtttgctgtgtgtgtgtgtgcgcattttgattcttgagaatgctttcagcagtttcattttaacaaagaatttttttaagttcat

SEQ ID NO: 12000 - DNA, 2047 bp, Glycine max
  Clone ID: 701152196_FLI
actgatgcactttctgatgtaatgtttatttctttcaatgaactttaccaaaaattggaaattctgagcagaaatgtctcatgaaacttttatatgataaaacggttgtttatgctacccatcaactggaattcttggaagctgcagacctcattttggtaagctattgtattgaacactaatctttagctgaagaaatttctttacaagtgttttgggccttcactattaaaatactttttggcaggtaatgaaagatggaaaaatagtggagtcaggaagctataaagatcttatagcatgtcccaactctgaacttgttcaacaaatggctgcttatcaagaaacattacaccaaataaatccatgccaagaagatgattctgctagctgcagaccctgccaaaaaaatcaaattgaagttgctgaagaaaatattcaagagatcatggaggattggggaagaagtaaagaagaggaagcagagacgggtagagtgaaatggagtgtttactcaacttttgtcatatctgcttataaaggagtgcttgttcccgttattcttctctgccaaattctctttcaagttatgcagatgggaagcaattattggatttcatgggctacagagcagaaaggcagggtcaacaacaaacagcttatgggaacatttgctcttctatcttttggtggcaccatcttcatactgggaaggactgttttaatggcagctgttgctgtggaaactgctcaacgcctttttcttggaatgatcacatcagttttcagggcacctgtttcattttttgacaccacaccttcaagccgaattatgagtagggtcagtttcactattatttctttatttgatatattattgctatcttttgattattatcagctttaatcagatttcaaccattctcttcttgatgattacagtcatcaacggatcaaagtactgtagacacagacataccatacagattagctggactagtgtttgcacttatccagttattgagtatcattgtgctaatgtctcaagttgcatggcaagtcattctcctcttttttgtggtgtttgcaatttccatttggtatcaggtaagaactatatcaatctttgacaatgtacacaaactaaatcatatcattttcccgtcaaagtcttatcagcatgaactaaaaagataatagcattagctcgtgtcatgatgaatcctcctcttgtcataaacatttgcatgtgctaactcttgcatggctcgatctagttttctagtgatgaagttatttgttttttataggcttattacatcacaacagccagggaattagccaggatggttgggattcgaaaggcaccaatcttgcatcacttctcagaatcaattgccagggctgctacaatccgctgtttcaatcaagagaaactattcatgaccaagattaaggctctaattgacgattattctcgggtagcctttcacaattttggcaccatggaatggctgtctgtccgaatcaatttcctcttcaatttggtcttctattttgtacttgtcatcttggttactcttccaaggtctaccattgatccaagtaagctccttcttcccctattcatcttatcagcagtggtagcagttacatgcatgtgtgtgagaaccacttttctactgcattattttaaaaagctctaaagaaggacttacacattattgattaagcttgggttacaactttaaaaccaaaaaagaaaactaattttgcagaaaagtagcttgtttgtattagatccttctggttgtaactgtaatgccatgatactcacatactagtggtactttaagattgatgcatgtggcagtactcagtaattgacatatgcttctctttcctctctcaccagtctccgtaattcccactaacaagatccactaacgagtatatggaaatgctaagttgcttcttctgattttcaggcttggcgggtttggtagctacttatggtttgaacttgaatgtccttcaggcttgggtg

SEQ ID NO: 12001 - DNA, 1377 bp, Glycine max
  Clone ID: 701152205_FLI
ggggatagagaagcgaaagaaaccaaaccacaatgaaataaaaagccccttttgtagaacagtgatacattcgctttctatttcttcctcatctcgtacgtttcgtggatccttactcaacgcaacacaacacaacacagaaaaattatgagttccaaaggtgttggtgaagattgcccgggatgggcagcaagagatgcatccggagttctatcaccttacaaattcagtcgcaggactcctgggaatgaagatgttcttattaaaattacacactgtggtgtttgcttcgccgatgtagtttggacaaggaataaacatggtgactcaaagtatcctgttgtgcctggtcacgagattgctgggattgtgacaaaggttggctccaatgtccaccgttttaaggttggtgaccatgttggagtggggacttatgtcaactcatgtagggattgtgaacattgtaatgacagagaagaagttcattgtaccaagggatctgttttcacttttaatggtgttgattttgatggtacaattacaaaaggaggatactccagttacatagtagtccatgagaggtactgcttcacgataccaaaatcctatgcattggcttcagcagctcctttgctttgtgctggaattacagtttattcaccgatggtgcgccacaagatgaatcaacctggtgaatctcttggagtgattggtcttggtggcctcggtcatatggcagtgaaatttggaaaggcatttggtttgagtgtgacagttttcagcactagcatatccaagaaagaggaggcactgagcctgcttggtgcagacaaatttgttgtttcatctaatcaagaggaaatgacggcattggctaaatcgttggactttataatcgacacagcatctggtgatcacccgtttgatccttacatgtcactgttgaagacatatggtgtttttgtcctagttggtttcccaagtcaagtcaaattcaaccctgcaagccttaatataggatcaaagactgtagccggaagtgttacaggtggtacaaaagatatacaggagatgattgacttctgtgctgcaaacgagattcacccaaatatagaggtaattccaatcgagtatgccaatgaagctcttgagaggctcatcaatagggacgtcaagtaccggtttgtgatagatattgagaactccctgaaagaaaaataagttgtacttgttgcctcctaaattgggcatgattggacttcaccttgttcgataaacaagatgttcatagttcataattacttacatagaggtgatttcaatggagtatgcgatgtaaatgttgaattttccttaattattttgggaactaataat

SEQ ID NO: 12002 - DNA, 1912 bp, Glycine max
  Clone ID: 701152225_FLI
ctcgagaagacgacagaagggggcagtacagtggtgattggtgaagtgaatagcggggagatgcagaagggcaactatcaaaccgatgcgttcattggtgccgaagggaagcagcagaagcatgacatgtctatgccttacccattcactcactcaaacccatagccataacctactggctactaccttctcttcttctctctataatagtaacaaccgtaaccccctctttcaattattctccggtattctccggcctcgaattcgagcattttccaccgacttcaggagcgcccccacaccaactgcttcttcttctgcctttgcccaaagcatggcgaatttcgacgctgattccgtcacttaccttaagcagcgagatgccgcggagatcgacgagacactcatgggtccacttggcttcagcgttgaccagctcatggagttggctggtttgagtgtcgccacttccatttctgaggtttacaaaccgagtgagtatagtcgtgttcttactatatgtggtcccggtaacaatggtggtgacggtctcgtagctgctcggcacctgcatcacttcggttataagccatttgtctgttacccaaagcgtacccccaagcctctatatgctgggttagttactcagcttgaagcactgtcaatcccattcttctcagtggaagaactaccatcagatctttcaaatggttttgacgttgtcatagatgcaatgtttggattctcatttcatggttctccaaggcctccttttgatgatttgatccagagacttgtctctttacataataataataataatcaaattggccaaaaaagatcagttatagtctctgtagatattccctctgggtggcatgttgaagagggagatgttgatggtacaggcattaaacctgatatgttggtttctttgacagccccaaaattaggtgcaaagaagtttggtggtcctcaccactttctaggaggtagatttgtcccacctgctattgcagaaaaatataagcttatacttccaccatatcctggaacttccatgtgtgttcgaattggaaagcctccacgtattggtatctcagctctaagagagaactatatctctccagaatttcttgaagagcaggtggaggctgacccttttaatcagtttcataaatggtttaatgatgcattggctgctggtttgaaggaaccaaatgctatgtccttgtcaactgtagggaaggacggaaaaccctcatcaagaatggtattgctaaaaggcttggataaggaaggatttgtgtggtacacaaactatgaaagtcgaaaggcacgtgaattatctgaaaatccacgtgcatcacttcttttttactgggatggtttaaaccggcaggtacgggtggaagggcctgttcagaaagtctctgatgaggaatcagaacagtatttccatagccgccctagaggtagtcagattggagcaatagtcagcaagcagagtactgtagtgccgggtaggcatgttctttatcagaagtacaaagagctggaagaaaaatactctgatggaagtttaatccctaaacctaagaactggggtggatataggctaacaccacaacttttcgagttttggcaagggcagaaatctcgcttgcatgacaggtggttgctaccccgtttatgataggtttcttgttttcttttttttaatggatgaagccaaacagtatgtacataatattttttaatgacatatatttggttttcaagccatggtttaggttcaagatccatgatgtatgcccatcaatttgagttgatctatatcctaggctggctgcttggttatgatagttataaagtagtctgccatgtctacaataataataacatttttact

SEQ ID NO: 12003 - DNA, 818 bp, Glycine max
  Clone ID: 701152429_FLI
ggttgcagagagacatctattgacactgtaatggtgccaaattaagtgctcatttcttcttgtagtgattattagaggatttgatcgttaacaatttctcttcttatttgtttaatgtttttggtttcttaggtgaattattcaagaggacccgacaatcccacaaagcagaaagagaggttgttatgttatggcgggcaaaggtgttggttcagtggctaaggcagtagcagaatatcagtatccttggcgtgagaagttggcgaaatataaggatgagtttgctaagggtgtgtggggatactgggagctgggggcatggaagccgctgagcatcggtgctcggcatcgcgctagaattcgcaaggaagtcctccttgctggggaagattggccgtatgatcctgaaaggaaggagatgaagaccaggaggaaaggacacaaatgtgataggatatccgctgagaagcgcgcaaacactgccaagttgatggagaagatgccccagatgttgctggattacaagaagagaaggtggcagaagaagatgaaggaggaagacaagggaaaactttgattttgctcctcctctagttttggccaggtttagcattaaactgtgcctttgagaaatgtagtatttaatcatgacatgttacacctgttttgggggcctaatggattattaactttggttacgtttttcaatccctaataacccctttcaagagtatggccttgtgagtatcggggaaaagggctttactacaatggaaatgatatgtactttttgtttatgtatatgcttggttgagtgc

SEQ ID NO: 12004 - DNA, 1325 bp, Glycine max
  Clone ID: 701152566_FLI
gagagaaacaacaagaaagagatgagaacaaacaagaatcaagagagagaggtgttaccacgttagtctatgaacagtcaccccgagagactgaaatttccagaccctcaaatcaaactcttctattctctcatcaatcaatcaatccagttccctctcggataggaatgggaatatatctcagcactccaaaaactgaaaagttttctgaagatggtgaaaatgactgtcttagatatggtttatcatccatgcaagggtggcgtgcaacaatggaagatgctcatgctgcatatactgatctggatgagtccacttcattttttggtgtctatgatggccatggaggtaaggtggttgcaaagttttgtgccaagtttcttcatcaacagttgttcaaaagtgagacatacttaactggagatataggagcctcccttcagaaagcctttttgagaatggatgaaatgatgcgtggtcaaaggggatggagggaattatcaatattgggggataagataaacaagtttactgggatgatagaagggttgatttggtctccacgaagcagtgatgggaattgccatgttgatgattgggcttttgaggaggggcctcattctgattttgctggaccaacttcaggaggcactgcctgtgttgcagttattagaaacaaccaacttgttgttgcaaatgctggtgattcgcgctgtgtgatatccaggaagggccaggcatacaatttgtctagagaccacaaacctgatcttgagattgagaaggaaagaatcttaaaagctggtggtttcattcacgtaggacgagtcaatggaagtttaaatcttgcaagagctattggtgacatggaatttaaacagaataagtttctttctgctgaaaaacaaattgtaactgccaatccagacatcaacactgttgagctttgtgacgaagatgagtttgtggtgttagcttgtgatggcatatgggattgcatgtcaagtcaacaactggttgattttgttcatgaacaattgcactcggaaacaaaactttctgccgtgtgtgaaagagtacttgatcggtgtttggcaccatcaactgccagtggtgaaggatgtgacaacatgaccatgattgtggtgcagttcaaaagacctgctcagtccagtgtaccagcagaagagtcctcttcaaactgacaagctgaacctgaaacaaaactagagagaagtgagagttagcattattcctcagtgacagttcaaatattgtatcatatatatatatatataatatatatgtgtgtgtttagtgtgcag

SEQ ID NO: 12005 - DNA, 1470 bp, Glycine max
  Clone ID: 701152744_FLI
ggcgcacacagttatacagctctagagaattatcataccctttaagatgaaaccgtacctacgtccaatattcctattattccttatccttctcgaccaatccacttcggcgagtgcttctaatagtaggtttatagaattcttttcaaaattaaagaattcttttaatcctaagtctgaagaactaaaatcagaagatataaagaagctcccgagcgtcgaatttttgaagaagaaacatgacggagttaaggacttctctcaagaagctatcctgaaactaccaattatacactggccgttcccgataccaaaaataccaaaaaacttctggaaaccaaagtcccagaaaccaaagcaccctcccccaccgccagactaccgtgtacaactaaagtccgatcccccagcgccaaacgcaccaccgaagcaaatcaatattaagggcctgtccgtcgtcaaaaattacttatctgactacggctacattgaatcctctgggccatttaacgattctttcgaccaggaaataatatcagccattaagacctaccagaatttttccaatcttaatgttaccggcgacctgaacaaacagcttattcagcaaatgttgtccatacgatgcggtgtccccgacgttaacttcgactacaacttcaccgacgacaacatttcctatcccaaagccggacaccgctggttcccaaacagaaacctcacatacggttttcttcccgaaaaccaaatcccagacaacatgactaaggtgttcagagattcctttgcgaggtgggcccaagcctcggggactttgagtctcacggagacaacctacgacaacgccgacatccaggtagggttctacaacttcactaactcgaggattgaagtgtatggtggcagccttatatttttgcaaccggattctagtaagaaaggggtggtacttctgaacggtaacatgggctggttacttccaagtgaaaacgccacactgtctaaagatgatggagttttggacttggagactgcggcgatgcaccagatagggcatctacttggacttgatcactctcacaaagaggactctgttatgtatccttacatattgtcctcacagcaacgaaaggtgcagctttccaattctgacaaggccaacattcaccatcagtttgctaagcatgcttaggatgttctctgctgccaaactcgcatgactcagcaagccacggtgggggtttggatgtgcttttagttaccactttctctcttggatttgcttacgtattgctccttttgtattagtcgttcctgtcccacattatgagctttttatatttctgattgttcaatgtttattgtatgtgctccccaacctgtggtgacttttcggtttattctcacgtggctgtttcttataggcctttcgacctccaatattaaataaaggatcattttgagctttcc

SEQ ID NO: 12006 - DNA, 1306 bp, Glycine max
  Clone ID: 701153005_FLI
cgagaagacgacagaagggggaagaaaaataaagttattattaaaactgaaatatccaaaagtcagaagatggcattgcgaggattgagtgcggtggcggtgacggcgtcaatacgccctcccggtcctcgattcagagtagacagcggcacatcaaggattccctcttccggatgcagaatctcggtgcggtgtaaagctgtcggagaaagccgacaaggttccttggaggaaaccgttgtttatgagggtatttatggcccctggaccattgacgactccgatgttcgagaggtaattttgtacagatcaggattggtaacagctgctgcatcatttgtggtcgctggttctgctgccttttttcccgatactctgaagcagaatgttgatttattgtatgtccttgggtctggtgggttgggtttatcgttgctcttgattcacatatatgtgtctgagatcaagcgcgccctacaagcactatgggggcttggtgttgttggatcggccacaacctacttttgccttgctcaaccagctaataagaatctaatacaatatgttgttgacaacccatcagctgtctggcttgtcggtcctctttttgctgccttgacaggacttgtcttcaaggaaggactctgctatgccaagcttgaagctggacttctcacctttgttattcccatacttcttcttggccatctgactggtttgatggatgatggagttaagcttactttacttgcttcgtggatgactctttttgtgatatttgctggaaggaaattcacccagcccatcaaggatgacatcggtgacaagtctgttttcatgttcaattctcttcctggtgacgagaggaaagccttgcttgagaaattagaacagcaaaaaattcagaattaagatggattgctttaactggatgtgggaaaattttgaaaggaccatctcacgctctgtgagcaattatcccatgtaaaaggaaatattttcagcccctcccctagaaattaaagatgataccacagttactaaaccactttcccatgtcttccttgatctctgcaaaagttacactacatggtctatactatacacatatatttagggtcgttgtcctgtgcaaatgataatgcatgcttgactcagaacctgcagaatgacaatttagtgaaggttggtttgtgtagaagtgtttcatttagttcgtttattaattaaacaagtattatattatcagtacatgaactaaacaaaaagtctctatgataattaataattatgcatgcttgcagtc

SEQ ID NO: 12007 - DNA, 1233 bp, Glycine max
  Clone ID: 701153034_FLI
ggaagagaagaggatgaataagagtgggggaggagagatgagtaagtggccgttcacaatgtctcagtggcaggaactggaacatcaagctttgatttacaaatacatggtggctggtcttcctgtccctcctgatctagtccttcccattcagaacagcttccactccatttcccaaaccttcttgcaccatccctctaccaccatgagttattgttccttctatgggaagaaggtggacccggagccaggacgatgcaggaggactgatgggaaaaagtggaggtgctccaaggaagcctacccagactccaagtactgtgagcgacacatgcaccgtggccgcaaccgttcaagaaagcctgtggaatcacaaactatgactcagtcatcatctaatgtgtcatcattgactgtaactgctggcagcagcagcagtgcaactggaaatttccataaccttaccaccacaaatgcatatggtaatccccaagggactggttctggatcagaccaaacccactatcacatggattccattccctatgggatcccaagtaaagaatacaggtattttcaaggacctaaatctgagggaggtgaacatagtttcttgtccaaaactttaggaagcaacaaggttcttcacatggagtcacagatggataacactttgatgccaaccagtggagttgcctcattctctacattgagatcaaataataattccatgttgcagggtgattatctgcagccttctttcttatctagtgagtatgcctcagcagaaactgtgaagcaagagggtcagttccttcgacctttctttgatgaatggcctaaaaggagggactcatggtctggtctggaagatgagggatccaaccacactcaactctcaatatccattcctatgtcagcatcaaatttctctacaactagctctcattccccacatggtgagatttaaattaggccatgttgaatgaaaccacctgaatcctgtaattatattgctgcagacaactaagaaccgcccctttgggttctgaaaggaccaaagagcccctttagtttcgactctagctcccgtgttttgtgcactttctgttgagcaagttgtctaccactgtggaacttcatctggtgggtggattttaatagaatccatcaactttcttgttttccgtctaatgaacaaactacagtattttgtcctgatttaatggatgc

SEQ ID NO: 12008 - DNA, 627 bp, Glycine max
  Clone ID: 701153117_FLI
gcgagaagacgacagaagggtgggtcactcattattttggtcattggaagcctggtaaattttggcaatgtcgcccatgcagcaatctcaacagtatgcgttgtggtttatttctgctgctttgcgatgggttatgaaccaattccaaacatcctttgctcagagattttccccactagggtgcgtggcctctgcattgctatctgtgcattagtgttctggattggagacatcatcatcacatactcgctgcctgtgatgctgggctctttaggacttggtggtgtattcgccatttacgcagttgtttgtttcatctcgtggatatttgtgtttttgaaggttccagaaacaaagggcatgccccttgaagtcatctctgaattcttttctgttggagcaaagcaggctgcttctgccaagaatgagtgacacaacacaagtccgttatatactccgtaactttagttgttaaagccatcatctctcgtctttacagattttgcttgtcataagtttatttggaggaagatatgttgaaacatatggatgtattattctttcataaatataaaattttgcatttttagagtgaaaatagccttttggattttccactttagaagc

SEQ ID NO: 12009 - DNA, 1253 bp, Glycine max
  Clone ID: 701153369_FLI
gcaacccatgaatgacacctttgtattggatctcaattctagtaatcctgagtggcaacacgtccaggtaagctctcctcctcctggtcgttggggccacacgctttcttgtgttaatggttctcatttggttgtatttggaggctgtggaaggcagggcttgctcaatgatgtgtttgtcctggacctggatgcaaagcctccaacttggcgtgaaatttctggattggcacctccacttcccagatcatggcacagctcctgtactcttgatggtactaagttgatagtttctgggggatgtgcagactctggagttctcttgagtgacactttcctccttgatttgtcaatggagaagcctgtctggagagagataccagtggcatggaccccaccatctcgtctgggccacacattgtctgtttatggtggtaggaaaatactgatgtttgggggtctggccaagagtgggcccttgcgttttcgttccagtgatgtattcacaatggatttaagtgaggaagaaccttgttggagatgtgtgacagggagtggcatgcctggtgctggaaatcctgggggcatagctcctcctcctagacttgatcatgttgctgttagtcttccaggtgggagaattctaatatttggtgggtctgttgctggtcttcactctgcctctcagctttacattcttgatccaactgatgagaagcctacatggagaatcctaaatgtacctgggtgccctccaggatttgcttggggacacagtacatgtgttgttggaggaacaagagctatcgtactgggtggtcaaaccggggaggaatggatgctaagcgagctccatgaactttccttggctagctctgccatctaaatccagtgaataaacactgttgtattgaagggaatactacacggctctgcttgatgtcgtgaatttgaacataagttagcgggaaaggttgcattagcgggaatggatgctaagcattgctctggtcagaatgtgtatatcaagttgttacgacaatgcatttgcttgaatggttggttctggctcgagaataacttctcgttgagtgacatgagacgaagttttttttgaggtttgtgagactttgcccttcagtacgcataatgaattattcttcctgaacagaatattagtggtaatatattagggtagtttctcacttgattttccatgtgttgtcttgttcaaattctgtaatttgaatcac

SEQ ID NO: 12010 - DNA, 1574 bp, Glycine max
  Clone ID: 701153389_FLI
gggggaggagaagtttctctttcgaggaatggggtggtggagaaggtggcaaatgacaattcaagtgaataatggagaacaacaacaacaaccacaacctcatcgtccctaatcctcaagattcactgtggatgatgaatttgaggactggggaaacaatggattctggatcttatccggagcgtccaggggagccggattgttcatattacatgagaacaggcctttgtagatttggtgcaacgtgtcgatttaatcatcctcctaacaggaagctggctattgccactgcaaggatgataggcgagttcccagaaagaatagggcaaccagaatgccagtactatctgaagacaggaacatgcaaatttggagccacatgcaaatttcatcatcctaaagatcaggctggaattgctggaagagttgccttaaatattttaggctatcctctccgccctaatgagcctgaatgcacttattatttgagaaccggacaatgcaaatttgggaacacttgcaaattccaccatcctcaaccaagtaatatgatgctctcattacggggttctcctgtttaccctaccgtccattctccaactacgcctggtcagcagtcatatgctggaggaacatacattcctagtcctcgatggcaaggtccttcaagttatgcgcccttaattctacctcagggagtggtttcagtgcctgggtggagtgcatacagtggtcaaatggggtcaatctctacttcagacagtccacagcaagcaatgagaaacggtcaaacatatggaacttctcgtcaaggtgagcttgcaggatcacaaggggcatattctcaattccgttctggcaccgttcctgtagggttttatacattgcagagggagaacatatttcctgagagacctggtcagcccgaatgccaattctacatgaagacaggagattgtaagtttggcgcagtctgtcggttccaccacccacaagagaggctagttcctgctcctaactgtgtcttgagtcccataggccttcctttacgtcctggagaacctttgtgtgtcttctattctcgttatggcatatgcaaatttggcccaagttgcaagtttgaccacccaatggaaattttctctcataatatctctgcatctccttcagctgatgccccaagcaggcatctgttaggatcttcatctggaactgctgcgttaaatttatcttccgaaggacttgttgagtcaagctcagcaaagcccagacggctttcattatcagagacaagacagattccttctggtgatgatgacatcgatgatgatggatgatgatgtctcttgaaaatgggtcatttggcttttacaatttttttctgaggggggaaatgattaatctgtaaattgattttcccattgctggagatgtacagaggtcatgtcaggttgattctgtcattctgaaattaaatgcagttgacagattcaattattctggatttcatgttacctggctgatttgataaatttaagcaaatgttgtcacgtttggtcaatcccaacgtgaac

SEQ ID NO: 12011 - DNA, 375 bp, Glycine max
  Clone ID: 701153390_FLI
gtcaggcaggaaacatggaagtggagactcagagggagaattctgatactgataagagcgacaatccagattataagcccagtggcagaaggaaccaacgcatgtagcaccagttatctcaaagaatttccagaatgaagaacacaagtgaactgggaaattttgcattcttttgagcttctgtaagttctgatgcgcctgccactttttacatgaaaaacatggagcaggaaccagttactttagggtggtttatatataactgtctgttatattgtagatgttagaatgtagattattgtgtatgaatatgggattgaacagctcccttgcactaattgtgctgtgtacagtcctttactattcttgccttct

SEQ ID NO: 12012 - DNA, 983 bp, Glycine max
  Clone ID: 701153467_FLI
ggaagctggaaaagttagaagtagtgaagaaaatgaaagtcattgttttcttcgttgctataataattttaggtgcagaatggcaatgcaatgggtcagagcatgagcatgagcatggccacagctaccaaattttccctttgcgaatgaaaaccggccccggtggccactacattccggaggtatcgtgcaaaagttggaggcttggtgtggaagcacacaacgtcattgactggagaaccattcctcaagattgcgagggatatataggaaactacatgcttggccaccaatatagatcagactccaaaacagtttgccgtgaagcttatttttatgctaaaaccatcaacatcactgccaaaaccacatgggtgtttgatgtagatgagactacactctctaatctcccttactttgctgatcatggatttggggtggagctatataatgcaacagcgtttaatgaatgggttgaccttggcgaggcaccggcactgccagagagtctcaaactgtacaataaactgttgtctcttggcatcaaaattgtattcataacaggaagaccactgtatcaacaggctgtaactgctaccaacttaaagcttgctggatactacaaatgggaaaagttaattaccaaggatacagataaatacaatggtaagacagcagttacatacaaatcaactgagaggcagaagctggaggaaaatggatacaacatcattggaaacattggagaccaatggagcgatatattaggaaccaacacaggccttaggacctttaagttgcctgatcccatgtactacattagttgaggtctctaggctcttatgaatgaaatgagatatgtagtaattaataatggagagacttaacctaggggcactcgttattgctatgtttcatatgtatgtgactttgtgtgagacagtagttacgtgagactgcacaagcacaacttaacgttgttc

SEQ ID NO: 12013 - DNA, 494 bp, Glycine max
  Clone ID: 701153540_FLI
gataagaaagaagatcaaaagaaaaaagagaaacaaatggcagcactgggtggctttaccgacatcaccggagcacagaacagcatcgatatcgaaaatctcgctcgctttgctgttgatgaacacaacaaaaaagagaatgcagttctggagtttgtgagggtgattagtgcaaagaaacaagtggtttctggcaccttgtactatatcactttggaggcaaatgatggtgtgacgaaaaaggtttatgaaactagggtgttggagaaaccatggttgaacatcaaggaggttcaggaattcaagcccatcactgttgctgttaatcctctttcggtgacggtctagcacatagctaggttatggaagtgactagcttggccgcaagagtaataatatgtatgaactgaataaatgtacctattaactctacaaacggtgtggggttgtgcatgtttgccatcctatatatttcagtataaatattgccatcg

SEQ ID NO: 12014 - DNA, 1122 bp, Glycine max
  Clone ID: 701153567_FLI
gagattaagattgggaatgggagtgggagaaagataaatgtggcatattcatgtcttcccctcaccattctttctttggagtcaaggactggggggttaggtttgtacttaattacgcttcttaatttcttctttatcgatcacccatgatctacctggctagctagctagggttgcttctgctgcattctcgaccgccaatcaaggattcttctgcgcttccatcttaacaagaaaatggtgagaaggaagataccgatcaagaagatcgacaacgtaactgcgaggcaggtgacattctcaaagaggaagagtggtcttttcaagaaggcacgcgagctctctcttctctgtgattctgagatagcactcatagtcttttcacctggtggcaagctcttcgactatgctagttcaagtatgcagaaggtaattgaaaggcatattttatggtcagagctgaaccttgaaaaattagaccaatcatgtcctacggagcagcttagatgtaattatgctgatttaaacaaggaatttggagacaggattcgtgaaatgagacaactgaatggagaagaactgcaaggattggccctaagggagcttcagaaattagaagaacgactggtctcatccttgaaccgagtttataaagcgaaggttgaaaattttacaagagagatcgatattcttaagcaaaagggaaacaaactcatggaagataacaggctgatgaagcagaggataaaaccgaggaatgaaatatgttcggtccagagacacgagcatgaacaaggccggtcctttgacacctccctcacgttggggctatcttttcctgctggctcaaagtacagagtttctgagcaatgaggggaccatgatactgcgttttagttagtgtgaaaaggaagagtgaatcaccaaggataaaatggttcacgtatatatatggtgggtcatctctaagtttagaacaatgacattctacgattgccccaactgaatatttattttctagtaattcgtgtttgttaattagtagaaccttcttaatggatatggtttaggtatgatattatctccatatttgtgaggaaaatgattttagttttccttcgg

SEQ ID NO: 12015 - DNA, 1051 bp, Glycine max
  Clone ID: 701154244_FLI
tacggctgcggacgacagaaagggaccacactcatcacaaccactcttaatttctctctgccttgctcatttacacacctctccaacctttcactttcagctttatttgaatccctctctctcctttccaaatggccagcgttgaggttgcacatcaaacaccaacaacagttccagaaaatgaaacaaccgaggtaatcaagacccaggaaacaaccccggaaccagtaccagccactgaggctcctgcaacagaacaagcagcagctgaggttcctgctcaagaagaacaacaagcaactgaggttcctgccccagaatcaaccaccgaagcaccaaaggaagaaaccaccgaagcaccaacaacagaaacagtagaaacaacaactacagaagaagccaagccagaggagcctaaagaagttgcagttgagaccgaggaggtggtgacaaaggagacagaggaagagaagccagcagcagaagagaaatcagaggagaaaactgaagaagtgaaagaagaagcagaagagcctaaagaaactactgaaacagaaacagaatcagcaccagcagcaaccacagaggaagagaacaaaccagctgagacagtggaagccccagtagaggttcctgttgagaaaactgaagcttagacttatggacagtgtgagtgagaaaaacaagtttaaaaatggtcctagttgtggggatcattaggtctaccattttgcatgtcatgttgaaaagcttttttttttatttatttctttagtttactttattattaatatattattattatatgatggttaagtctttggttgtattatggagggtatacctacgtgtgagcacaacacttggctccacatcagcgtgcttaccacgtggtgacatgagaaattctaggagttgtgtattgaagtgagcaagctgctgctggtgctggagtttagggatgagggtttattttattggcagggttacatgagtttgtgatgatgtgttattgtgtttctttaggtttgaataaatgatatttactttc

SEQ ID NO: 12016 - DNA, 1508 bp, Glycine max
  Clone ID: 701154338_FLI
ggggataagattgttgttgttgttgtatcagtgtgagcaaccttattccttacaagtaaaaaagtaaataatataaacctgaagctgagaaaaagagttctaagctttgtctgtgactggtgagagccaaaagccgaagaaagggaagatggcgctatggatggaaaagggttcagagccattaaccgaaaccgagaaggcagaccttgaagccattgctgcactcaaagagtctgcagcctttgaattcaaggaaaagggtaatcaatatgtgaagatgggcaagaagcattactctgatgccattgattactacacgagggcaattgatcagaaagccttgagtgactctgagacctctattctctttgcaaatagagcccatgtgaatttgcttctagggaatcttagacgtgctctaacagattctaatgaggccctcaagttgtgcccttcaaatataaaggcaatttatagagctgcgaaagcttctctttcactaaacatgttggctgaagcaagagagtattgcttgaagggtcttcagtttgaccccaataatgaggacttgaagaagcttgaccggcagatcggtctcaagatatcagagaaggaaaagcatgaggctgaagcctccaaggctgtcgcggagacaaagaaacttgtgtctgcgattgaaaatagaggcttgaagattggaaaggcaatgtatctagaacttactggactacggaaacctgtgttggataaaagtaatatccttcattggcctgttcttcttctgtatgcagaggttatgtccagtgacttcattgaggatttctgtgagactgacatgttttcggttcaccttgatatgatattttcagaagatcagccgttgtcatgggatgttgaaaacaactacaaacgtgaatttattgaattatactatgagactggttctggactttgtctatcaaaggaaaaacttcttcattgtctattagagggaactgcagctgctcacagggaaggtgttggtgatgaagagaaagacacagttgaggattataagcaacacatgggttcccctaaatggatcaaagtgaatgaaaggagaacactccacgatgttctcaaagagcctaatttcatcattcctgggatcccagtcttctatgttgtttctaagcgatccagcttttatggcaagttcaaagctgggaagtgggtacctccaagtatatgaaggaagcaacatgtagctgatgtccaaacagacatgttttgcacaaactagattcaagagttaatgtctcaactcaacttggaagtcttgaagattgctcatagttcttccaactttttggacttccttttaaactagagttacctgctaattgcaattgtgtgtgccagtgatagtgttagaatacaaggaacctagtcaacaaagtataatttgatatagcttgtgattttttggtacatgtataatttgataagttttgttctagacttttaac

SEQ ID NO: 12017 - DNA, 650 bp, Glycine max
  Clone ID: 701154561_FLI
agaagacgacagaaggggaccaacacaaacaatagtgcatagcgtttttcattgtgcattattcaatggccaccacagcagctctatccggaaccatggtgagcacctccttcatgaggaagcaacctatgacgaccaagagcctaaagacattccccaacgctctttttggtctgaaaggtggacgaggtggtcgtgtaacttgcatggcctcgtacaaggtgaagctcataaccccagaaggagaagtggagtttgaatgcccagatgatgttttcattgttgacaaggctgaggaagaaggcattgaacttccctactcgtgcagggctggttcttgcgtttcatgtgttgggaaaattgtgaaaggtgacgtggaccagtcagatggtagcttccttgatgatgaacaaatagaaagtggatgggttctcacctgtgttgctctacctaggtcagacgctgtcattgagacacacaaggatggagagatcgaatgatcgatatatatcataatgtaatcttgtccattgctcttctaatgccatctatctatgtcgtgttttgattttgttagagtgatttggcattggctagttagctagctgaaatcatcgcgagtttattaattacttttgtcatgtttgtgg

SEQ ID NO: 12018 - DNA, 627 bp, Glycine max
  Clone ID: 701154606_FLI
acttgagagcaatagagacgtcgttgagctccgggcacgggttgaagcttttgcaactcagtttgccatgccgggttttgacatttgaacatgaagtggccggtgaattgccattattgattatttacatatgcgacaatggtgtgtcgttgtgcccgctttttacaaaagcacatcttgttcttatattttgtggagcttctctcttctctgcattgtatgcagttgtcagattttcacatcttgcagtgagttgcaatctggtacaagacagtatgtaagtaggtacttccgtactgctgttgaggttttgtctggtgatcaagtatcttgttcctaccttggaggctgcaccatcccagcggaatgcatcaagttaagccattataggggttggaacagggattcttgatcaaccaacctgagtacagaattcttctggtgaatctgcagaaaataattactctgataaaaaggttaggcactttgaattcttttagctgatgtttgatgctgaaagctatgttattaatcctattttttgctatattttccccctttttgggatcatattcgataccttaccgtgttaattgttaaatatatagtttgatgtggtaaataaac

SEQ ID NO: 12019 - DNA, 1047 bp, Glycine max
  Clone ID: 701154685_FLI
ggtgagtggaaaagacgccataagaaagagcaagtcgaaaagttcatctctccctctctctcacacatcccagccatgagcctcttcggtataggcagaaaccagagaacattccgcccgaaaaaaagtactccttctggaagtaagggagctcaacttagaaaacatattgatgccacgttgggtagtggaaatctgagggaagcagtaaagctacctcctggggaggatttaaatgagtggctagctgtcaacactgttgatttcttcaaccaggtgaatctgctttatggtacccttacagagttctgtactcctgagaattgtcggacgatgtctgcaggacccaagtatgaatatagatgggcagatggtgtacaaattaagaaacctattgaggtttctgctccaaaatatgtagaatacctaatggactggattgaagcacagcttgatgatgaatccatattcccacagaagcttggttcaccatttcctcccaactttaaggaagttgtgaagacaatattcaagcggttgttccgtgtatatgctcacatataccattctcactttcagaaaattgtgagcctcaaagaagaggcgcacttaaacacttgcttcaagcattttatactcttcacctgtgagttcgggctgattgacaaaaaggagcttgcgccccttcaagagcttatagaaaccattatcccatattaaatgaattgggacctaccttctgtgaaaaatctcatcctaggaagcagcataactaatgtattactactctaaatagaaactgctttttagtactatttgacttcagaaagccgccttgtatttattgtgtggatgtgcttgggaacaacaggatctaagttatccttctaaatagcttacacaaagcatcatatatatgcaatggggcatcataggttaaaaaaaagttaatttgtaatggttcatatatgccaaatgttatccttctacgctggaaggttgttgctgaaacaatgttcattattaataattaacgtgtgttgtatt

SEQ ID NO: 12020 - DNA, 1017 bp, Glycine max
  Clone ID: 701155231_FLI
aatgctctggcctccaaatccatatttcaaatccaaattcagacaagaacaagaataccccaatcattttttcaagagtcacaggaccaaaaataaacaaatgagtatggtaatagcatgcaagcaattttggagccttcagcttttctaatgcacatccacaaccgagtttaagtatcttggattttttatcataatattatgtattttataaagattcatgatatatttttttgaaaaaaatattataaattatttattactcacgttaagaaaaattcttgaatacgctgctgctaattgctatcacatgatgaggccataatattaatataattatgatgaacattcagaaagttgatcggagcaagaatttttctcaaaagtcgggaggcgggaggtgggaaggttgatcaaacgctacgcagcggacgtgacttggtagggcatggcacccacacactgtcaacagctggtggtaattttgttcctggtgcaaatgttgaaggtaacggcaatggtactgctaagggaggatcccctagggctcgcgttgttgcctacaaagcatgctggaataaactggatgaaggagggtgctatgatgcagatattctagaagcatttgatcatgccatttatgatggtgttgatgtcacctctgcctcgttgggtgggtctaatccctatcccgaagccttgttcacggatgggatttccataggggcattccatgcagttgccagaaacatagtcgtagtttgctctgctggaaatgatggaccagcacctttaagtgtcacaaatgttgcaccctggtccttcaccgttgctgctagtacaatggacagagattttcgcagcagaatttctctcagcaacaatcaatccattatcgtaagagatatcatctaattatctagagattaatttatttcatatagattaatttaattggatcatacgtacgtgtatcatatcagggtgccagtctcaatcgaggcttaccgtcttcgt

SEQ ID NO: 12021 - DNA, 630 bp, Glycine max
  Clone ID: 701155250_FLI
gggagaaggctgatttgatcaaggtcagtgatgcggagcttgagttcctcacaggaagtgacaagattgatgatgaatctgctttgtcattgtggcaccccaatttgaagttgctccttgtcactcttggggaacatggttccagatactacaccaagagtttcaaaggatcggtagatgctttccatgtcaatacagttgatacaactggtgccggtgattcctttgttggtgctttattggccaagattgtcgatgatcagtccatacttgaagatgaaccaaggttaagagaagtactaaagtttgcaaatgcatgtggagctattacaactacccaaaagggagcaattccggcccttcccaaagaggaggctgcactgaaactgatcaaaggggggtcatagaatcttttggcaaaatgcaaaagtgctagcatgatttcgttttcttcccctaatgtttaaattttccgttggatttgcttgctataagtttaggagggaacttttgttttttctcctatgcactgttttcaggttttgccaaataacgctttctttcaaattttgagattagcgattgaatgaaaatttgaatcataagctcggcccatagttgcaacttaag

SEQ ID NO: 12022 - DNA, 1304 bp, Glycine max
  Clone ID: 701155302_FLI
gaaacagataaggtgacaattgatgtttcaagtcctgagtcaggcgtgattctaaagcttctagccaacgaaggtgatactgttgagccaggtaacaagatagcaatcatttcaaggtctgctgatgcaactcacgttgccccatctgagactatatctgagaaagctgctcctcagccaacccaaaaggttagcgaggagaagaaagccccgaaagttgaaactgctcctgctaaagagaagcccaaaacacctcctgccactctgaagtctcccactgagccccagcttcctcctaaagaaagagaaagacgagttcctatgacaaggcttcggaaacgagttgctacacggctgaaagattcccaaaacacatttgctatgctgactaccttcaatgaagttgatatgactaatttgatgaagctccgttctgattataaggatgcttttgttgaaaagcatggagtcaaattggggcttatgtctggctttgtcaaagctgctgtcaatgcactccaacatcagccgattgtcaatgcagtcattgatggtgatgatattatatacagagattatatagatatcagcatagctgttggtactccaaagggccttgttgtaccggttatccgcaatgctgataccatgaactttgctgatatagaaaagcagattaatacttttgcaaagaaggcaaatgatggatctttatcaattgatgagatggctggaggcactcttacaatatccaatggtggtgtttatggaagccttttgagtacccctattatcaaccctcctcagtctgcaatcttgggtatgcattccatagtgagccgtccaacggttgttggaggaaatattgtcccaagaccaatgatgtacgtggctctaacatatgaccacagaattattgatggaagagaggccgtgttctttctgcgacgcatcaaagatattgtggaggatcctcgcaggcttctgcttgacatatgaagtgaacctctaattttaaatggagtaaattaaacctcaaaattcaaataccataatgggtaccctttggtttggattttgaattgcggctgtccgtaatttataatctgtaatgagcaaactctttaggatcatatcccaatttccgttcgatattaattcagcatgtttgtgttttttctacccgctattcctctcatttaatatgaagagggtcacagtttttggctacaaaattgttgtatgaaacgactatgaactatactgtagggattgcccccgaagtaataatgcgatctctttcc

SEQ ID NO: 12023 - DNA, 1529 bp, Glycine max
  Clone ID: 701155323_FLI
ctcttgggttctgatggttgttcttggatatgggttttggcagtgacggtggtggagagtggaagcagggctctgcagtatctggggttggatggagaaaaaagttccattggtcttgatgtgagcaaaatgcaaacttggcttttgaattgttaaaggcacttctttttagtgttttaaacaataggtcttacttggaagtgatgcttatgttgttattttgatgactgtttcggcagagtgtgaaggttaatttgataatgacggattattccatgcccgggatgacaggatatgaattgctcaagaagataaaggtgagaaatgagacatggtcgttcttgttttaatttcttgtcgaagatgaatgtattagaagagagaattgttaatgttttcctgatttcatagtggtggtttccccccttttctccttgatttttaattcttctatctgttaatatctgcaggagtcatctgtttttagagaggttccagtggtggttatgtcgtctgagaatatcttgaccagaattgataggtaagctcttgattaagataagatgctgtttggttcttctttggttttaggagatagaagcctttatttttctggctgatttctttgataaaattgcttgatttatgtgatgatatttactagattgtgatgatgtttgttgatttgcctatgctaatggtttggtgagctaaaatatcagaaagttgatgagttacacattgctgcatccgtatcttgttttcccggacttgattcacatctagacttgaattgcattgatgaaagacatgaatatgtttttggatatgattagatcacgtagggtttggacaaaataggtgtattttgggattaaagttgagagatcttaaaagtacttttaattcaaaagcaacaaatttttccttcatatgtttatacattggaattcacaaaagtacttttgtaactttaatccaaacatatatgagatcactgagggcttgaagtttggacacatcgatagatcacatggtgtttagtcatgcgaaaaagggagggagagtggagacaaggatatctgaggaaattatttaaagagtccaagggaatattatggtgaataattttgattttattagaggtcaatgatattgtgtatcctgtgtagttgatctcacctaatgggataaggttattgatgtcgtgttagatccccatgctttctcattataggttggttctagtaaaattcatctgttaagacttgattcatcaataatctcatcatgttagtcacatgcagcgttttggaaacatgttacttccaacttgcaattgtggctacaaggattgaaacatgatgaaatccagatttcctcttgcctaatggtcaactgttgtaaaggatcctgttggcatggcagcaattattgtcactataattgccacataattatacatctaatcaatacttctattcatctacacatgaaattattggccaacaccgttaggttgtgttcag

SEQ ID NO: 12024 - DNA, 960 bp, Glycine max
  Clone ID: 701155547_FLI
catacagggatgcaggagattatgcctgtaggtgctaactttcccagaataggcaagatggttacagtgctcataggtgatccgatcaattttgatgatataattgaatttgacaaagacaaaggctcaaatgtgcccagaagacgactatatgatgcagtagcatctagaattggtgatcggttgcatgagatgaaggtccgggttgacactatcgcaattgatcaagaaatgcagctacaagataagtcctcacacagcactgaacgaacatctaaaatactgcagcaggttgattgggaattatttggaatggatagcttcatgtctgtagaagatgattccaagcagagacaagaaacagttgccctctcaaatgttagtgtttctcagcatcatcaacaatctcatagtgatcagagttggagagctgggttctcatacaggatgcgtggttatattgatcagatggagcttgtgtctttcgctgcgagaggtatatttctgaataatgatacaaagaactctgctcgccctagcagagagatgggccccttaaaggcatggaagcagtttttggaagctaatctattaaggcagtggaattacgtccattactgaaaaaaacatagttctatagagggtgtaaattcaaatcttcggttttcaattaaaataattgagtttttgttaaataaaacagttaaatgcagtagaattgttgagaatttgtgactcaaatagctaacattttcgtttagtttgattaagtttcagggttgaaattatattgttgcacgcggtcctgaagatagaactgtataagccctttcatgtaatatatgcatagttatttactaatgtatacagtatactcttattttttagagaatatattttagtaagttgtaattttcattttctaaaaacataattaagttgaaaaagtgactatgttag

SEQ ID NO: 12025 - DNA, 852 bp, Glycine max
  Clone ID: 701155680_FLI
gatcactttcttttcttcaccgttcgctcttcctctcccagacaaacacatggctttgcccaatcagcaaaccgtcgattaccccagcttcaagctcgtcatcgtcggtgacggtggcacaggaaagacaaccttcgtgaaaaggcatctcactggtgaattcgagaagaaatatgaaccgaccattggtgtggaggttcatccgttggattttttcactaactgcggaaagattcgattctattgttgggatactgctgggcaagagaagtttggcggcctcagagatggatattatatccatgggcaatgtgcgattatcatgtttgatgttactgcccgtctaacatacaagaatgtccctacctggcaccgtgatctttgcagggtctgtgaaaacatcccaattgttctttgcggtaacaaggttgatgtcaagaacaggcaagtgaaggcaaagcaggttactttccacaggaagaagaatttgcagtactacgagatatctgctaagagcaactacaattttgaaaagccatttttgtacttggccaggaaacttgcaggcgatactaacttgcactttgtagaatctcctgcattggctccaccagaagttcaaattgatttagctgcgcaacaacagcacgaggctgagcttcttgcagctgctagtcagccccttcctgacgacgatgatgatcaatttgagtaggaattgtgcgtctgtggaccatgttacttagttaatggtttttgtgtatgctacaaaatatgtttttggggttgtattattgacattttttgacgtggatttgaggatttaaatttaatcattgaggtgttttgccc

SEQ ID NO: 12026 - DNA, 1160 bp, Glycine max
  Clone ID: 701155981_FLI
aacctcactttttttctctataaaatccaacctaaacactctaagagaaccttctcccgataaaccttttttcaccttcccctttgtttctcaacatcattccccaatttccccttctgtattgtttttcttcatttctctttttcaatccccgatttcccccttcttcgttttgtgtcttcataattcagatcctctcttcaatctagggttcctggcttaacgaaatcaaatgtttaaggaagaatttctatgacgattcgcaaccccatgcgacgaatccgtctcctccactccttttccgtcgtcttcctctactggttctacgtcttctcatgaactaaccccctctcaatcccctaatttctccaacatttccccctttttctaattaatcagatctgcaaaaccctaatttccctaaccctaacgaaacccccaaatccaatggcttcgattcaacgcccggcgagttcgggatcgtcggagggaggagatccggtgatgtacgagaggaagaggaagcgtatggagtcgaaccgcgagtccgcccggcgatcgcggatgaagaagcagaagcagctcgaagacctaaccgacgaagtgagccgattggaaggcgagaacgcgcgtttggcgccgagcataaaagtgaaggaggaagcgtacgttgagatggaggccgccaacgacatcctcagagcacagaccatggaactcgccgaccggttaaggtttctgaactccattattgagatcgccgatgaggtcggcggcgaatccttcgagattccgcagattccggaccctctcttcatgccctggcagatcccccaccctatgatggcaacgccgcctgacatgttcttccatggaaatgaaggcctgtttgcttgatagtacttctaattaggtttattgttgatgttcgttccctagcgttgttggtgaataaagaaagggaatggtggtgtatggtgttaattaatgagtcatatcgcgtgttggtgtgctttttgtgtgtgtgtgttttagatccgcgactatgttttgtgtatgcagtatcgttacatggttgaacgtatctgctttgttacagtgactggtattgtggtgttgcaagttgcggttgtttgtatgaaagtctaaaattgattttg

SEQ ID NO: 12027 - DNA, 2059 bp, Glycine max
  Clone ID: 701156037_FLI
gaggagcaagaagaagaaacaacctcaaaatccctttcttgtgttcgattagatattgccttcacaccagagtctgagtcctctgagactttccttcagtccttcaccttctttctctctaggcgcaaaacctcgtactgtttgtggcggctaaggatgtcagggaaaggggcgaaggggttgatcacaggcaaaacctccgccaccaacaacaaagacaaggacaagaagaaacccatctcgcgttcttcacgtgccggccttcaggttctcagatctctctctctttctccttcgtttaccaatatcgattcccttgtaacggttaaaatactctacacaggcattctgtaaattcttgtttttttaaccctccttgttgtgcttgcacaatgtgaactgtttttttgaggtctcttagagttagagatttaatgttccttcccttttcggtaggatatttgaagtagcgggagaaaaatcaaattttggtattattttcgtatttttataatcatctggaaggtttgataggagcctaccactgagttagtagttttgattaactggttgtagattttaccctctctttaaagtagggttttgccatatactgcccctgatattgttcaacaggaataaaatgttataattttttttatctatattgttgattattagattaatttctttatcgtgtattaattgacaaactttttgaaatgacagataaaaaaggaacaaaacttatttgaaattttggctgtgattgaatcttgaatggacctcttgttcctgttgttttgacttatttgatagtcattattgaatattgagtctttgtgaatttgactgaagcatgtcaaacttttgtgattatatgacatgattttgcttataatatatctgcatgtgtatagttttggattattgtgttgaaattatttgaactgcatagacatgtaaacacgtttattggaccctagtaagacgacttaagcccagttagacctgaaaatttctacagctgatgttaggcataggccattatattgtttaagcaaacttgtccagattcaggtaatttacttacacatgagtttgtctgttgtttattttttcatcctctattaattggtagtagttgttttaaaaagcattgctggtataattttgatatgcaacagttagcatattgtatttggttcttttgccttctgtgtgattgaagacactgttttaggtgatccttggggtttggaaattgaaatcagtctcttactgctagctcattagattgaagctagtcaccctgactattgataatgaaatcttatttatgatgtttttactgtatgacacagaagcagaaccacatatgtctagaggccatgcctccaaaattttcaaaatcaacctttgtaatttgttttaatgaaatataagtatataactttaatcccaccaaacctttgtattctggcccaatcattttattctgatttcacactatatgctagcatgtagtttgtgtgaactattgataccttaggcaagggacgagcaaccagtgtattcttctcttacataaactgctatatataatttgcagttcccagttggccgtatccaccggcttttgaagtcaaggacaaccgccaacggtagagttggggccacagctgctgtctactctgctgctatcttggagtatctcactgctgaagtattggagctggcggggaatgctagcaaggatctcaaggtcaagcgtattactccccggcatctacagctagcaatccgtggggacgaagagctggataccctgataaaaggaacaattgctggaggaggagtgattcctcacatccacaagtctcttatcaacaagtcttccaaggagtagattactggtgaatgatagcagcttgatggaaaatttctctactaattgtgtatttgttgcatgacacttgaaaaacacagtagggccttcttctatttatgactgagttgctgctgttgatcatggatataatatttagtgtttctctcc

SEQ ID NO: 12028 - DNA, 772 bp, Glycine max
  Clone ID: 701156322_FLI
ggacgaatgaacaagattgaaatggcagctactattaacttgtccctgccccttttgtccctctgcaaaccccctaagtttctgaaacctccaacaacaagatttctgcaacatgaatacgtaaacagcctcagcctcagcctcagaagaagaatcactgaatcaaacacttgcagaaaaagaagagggatcgtgtgcgggttgccattgccagttgatccatgggcacctaccattgactcccagagcatcgcatcccagctcttcgcgttttccttgtttccatacatcggattcttgtacttcattaccaagtccaagaccgctcccaacctcaccctcttcggcttttacttcttgcttgcctttgttggagccacaataccagctggaatttatgcgaaggtgcattatgggacttctttgtccaatgtagactggttacacggtggggctgagtcgctcctcactctcactaacttgttcattgtcttgggtctcagagagggtctcagaaaagctgaaaattcacaacgtgatcaaaatgcttccactcccaattcaggcttggacgagtagaacaagaagaaacgtagaatgcagatttgatattacaagtcattctattgtcagtttctcactatcattatatacttatataatttcatgatcatgggctgtgttgtaaataaagtggatataagtgctggatatttgtgtaattaaatcatcaattcgaatgaaatgttacagagttttggccagcgtatcc

SEQ ID NO: 12029 - DNA, 1372 bp, Glycine max
  Clone ID: 701156522_FLI
ggggacatccaaaaaacatgaaacgaaaccataatttccccttccaccaccggccacgcaagtgggcgatggtgatccccaccgtcacaatatgcttcctcctcctcttcctcccgctccttcccctcaccaaaccctcatcttcatcttcttctttttctgcgacatggtcttcttcttcgctgaatttaacggaagaactagaagtgggtgttccgagattggcgtacatgttgacggcgacgaaaggggagggggcgcagctgaagagggtccttcaggcagtgtaccatcccaggaactactacctgctccatctcgatctagaggcttctgatgcggagaggctggagctggccaaatacgtcaagtccgagactgtgcttgcggcgtttgggaacgtcttggtggtgggtaagcctgatttggtcacctacaagggccccaccatgattgcttctactcttcacggtattgcccttttgctcaagagggccccacactgggactggttaatcaatctcagcgcctctgattatcctctcctctcccaggacgatatcttgcacatcttttcattcttgcccagggatctaaatttcattgagcatacaagtaatattggttggaaagagcatcaaagagctaggcctatcattatagatccaggcttatatcattcaaagaaatctggtgtttactgggctaaagagaagagatctgttccatcttcgttcaagttattcacagggtctgcatgggttgtcctgacaaaatcatttcttgagttttgtgtttggggttgggataatcttcctcgaactctccttatgtattacacaaattttctttcatcccctgggggttacttccatacggtcatttgcaatcataaggactatcaaaacacaaccattaatcatgatttacgttacataaggtgggacaacccgccaaagcagcatccagtcttcttgaaattggagcattttgatgacatggtccatagtggtgcaccttttgctcgaaagtttaccaaggatgatccagttctcaacaaaattgataaggaacttttgagaagatcagatggtcactttacaccgggaggttggtgtattggcaatcctcttttgggaaaagatccttgtgctgtttatggaaatccaattgtagttaaacctaccttacaatcaaagaagctagaaaaactaatagtgaaactattagattctgaaaattttaggccgaaacaatgtaaatagtagtcactctgcaacgtgaaatttttatacacaattctattggcatttttaatgcgtcgtctgttcaaatttaacattatgaattgttatgaaacatctttctagtt

SEQ ID NO: 12030 - DNA, 2093 bp, Glycine max
  Clone ID: 701156582_FLI
agaagacgacagaagggggcggaaacgacgtcattcgtagttgggaagaagatgagttcgcagcaaatgcagatgcaaatgcaaaacagcggtggcagcagcagtatcagcagcaacatcccagtgagcgaggttttctggactctcgtcgacaaagccgacaagaagttctccaaaatcagagaccttcccttctaccaacgcagcaggcatgatacttacttttataaggtgttcaaggtctacacacaattatggaagtttcagcaggagaatcggcagaagctgattgaggctgggctcaggagatgggagattggtgagattgcatctcgcattgggcaactgtattttgggcagtacatgcgcacaagtgatgcaaattatctatcagagtcgtatatattctacgaggccatattgactcgggagtattttaagggggggttgtttcaagatgttaatattgcaaacaaacaattgaggttcctagctagattcataatggtgtgtttggtgttgaaccgaagggaaatggtgcagcaattggttaatcagcttaaagtattagttgatgaatgcaagagaacattccaggaaagtgactttaaagaatggaagctggtggttcaggaaattgtcagatttttaaaagcggacactgcttttataaatatcaggcccttgagatatagtctagttttggactctcatcctgatactttaccccatgtagctgcagccatcacaaagagacatttgaaactacaagatgctgtattaagtagcttccatccaaatgaggtaaagtattcagagctcaccattgacacttttaggatgcttcaatgtctggagtgggaacctagtggctcatttttccagtctagtagttcaaaacttagtcaaaatggggctactggaactagtcgtatcagttacatccaagacattgctgatcctaccttacctgcaaacccacggaaagctgtgctatatcgtccttcactgacacattttatagctgttcttgccacaatatgtgaggagcttccttccgatggtattctccttgtgtatttgtcggcttcaggatattgtggttctgcccagaatgaatctggttgcatacactttggtcctcgtggagatagaggatcaaactgcatatatccatctgactttctaccgtttactagaagaccacttcttttagtcattgataacgacaacagcaaagcttttaaggacatagcagaagcggaaaagggagaatcagttgctatgctcctttctccaagctgttcgcctgctttgtctgattgctcacataattcaaatgggagcctattcaccatgtttcttacagctccgctgcaagctttctgtatgctgttaggactttcaggcactgatattgatttggacccattcaacaaagcggaaatgctgctctcatcttcattaaataactggggactagcattggcaacatcagacacacttaatcctgtttggggacagattttcggtgatcccttcataaggaggcttcttttgagattcatattttgccaggctgtgttgaccctatatgcaccagtttacaatgacaacaaattccttccaacatgtgtcccttctcttccaacgcctgtcctgtccccaagttactcgtatcagagtgtcattctgaatctagccagcatgtttggtgcaactaagcattttatcttctcagaggatgttcttcctgaaaatatacaaaccaacatcatgaatcagttaactctatgaagataaccaaaagcttcacttcagtagaatgataatgtatacagcttgtttgtatagcaagaaaacatgaattctatcaacatttctgtttgttcctggtggatttcctagaatttaagttcagcctttagtgtgaacatggttttttgttatcgaactttttttttggatcttaggttttgtgcctttgacaagagaacttctaacgtggatcgaatttcaatatgttcgttacataacaagtttcatggtcgagaagaatggaatagagcaaggggaaggaagttttgcatagg

SEQ ID NO: 12031 - DNA, 1013 bp, Glycine max
  Clone ID: 701156606_FLI
gggaaaagttagaagtagtgaagaaaatgaaagtcattgttttcttcgttgctataataattttaggtgcagaatggcaatgcaatgggtcagagcatgagcatgagcatggccacagctaccaaattttccctttgcgaatgaaaaccggccccggtggccactacattccagaggtatcgtgcaaaagttggaggcttggtgtggaagcacacaacgtcattgactggagaaccattcctcaagattgcgagggatatgtaggaaactacatgcttggccaccaatatagatcagactccaaaacagtttgccgtgaagcttatttttatgctaaaaccatcaacatcactgccaaaaccacatgggtgtttgatgtagatgagactacactctctaatctcccttactttgctgatcatggatttggggtggagctatataatgcaacagcgtttaatgaatgggttgaccttggcgaggcaccggcactgccagagagtctcaaactgtacaataaactgttgtctcttggcatcaaaattgtattcataacaggaagaccactgtatcaacaggctgtaactgctaccaacttaaagcttgctggatactacaaatgggaaaagttaattaccaaggatacagataaatacaatggtaagacagcagttacatacaaatcaactgagaggcagaagctggaggaaaatggatacaacatcattggaaacattggagaccaatggagcgatatattaggaaccaacacaggccttaggacctttaagttgcctgatcccatgtactacattagttgaggtctctaggctcttatgaatgaaatgagatatgtagtaattaataatggagagacttaacctaggggcactcgttattgctatgtttcatatgtatgtgactttgtgtgagacagtagttacgtgagactgcacaagcacaacttaacgttgttttatctttcgtggttttagtatgatttttattttcat

SEQ ID NO: 12032 - DNA, 1370 bp, Glycine max
  Clone ID: 701156625_FLI
ggcggcgaaatgggaaaacgagagaagcagaagcagaggcacgagaagggacaccgtggaagagggtctttcaactatcttcaagaggaccgtgattttgatgacactccaagaccctcaccctctgaagaagaatgtgctgatgacagcaatgaggaaaaagaagaagaagaagaagaagaaggtcatgaaaaccaatctcatgatatgccttccaagttcctcctttaccaacaatctgtgcagtcacccaaaggagatataagttatttgcaaaagttctttctcatgtacgtgggtggaaggatgcccctccatcttcaagaagatttctgtggcacggcgcttcttagtacagaatggctccgcagtgattcaagaagaacagtagtaggattagatttggatcttgaggcactcaattggtgcatggaaagcaacatacctaaagttggggctgatggattttcaagaatgtctctctttcatgggaatgtcctacaacctcttcagtctaaacttgtaaaaatagatcctcagcagctggtaagtgacatttcactgtcacagaatgaagaaaatcttcagactgatgtgccagaatctgatgctccaacaggctctgttgctcaagatgacaagtatactaagagaaacataatactgcctggaagagatatcgtgtgtgcttttaactacagctgctgttgtctacataaacgagcagaactggttctgtatttcaagcatgctcgtgaggccttgtcaactaaaggtggaatttttgtgatggatttatatgggggtacgtcatcagagcacaagttgaggcttcagagaagatttcccaattttacgtatgtatgggagcaagctgaatttgatattattcaacggaagacaaggattagcctccattttcatatgaagaaggaacaaagaaaacttcgccatgcattttcatacagctggcggttgtggacattgcctgaaattagggattgcctagaagaggctggatttcggtctgttcacttttgggttcgagagatgccagacaccacagaaattatgagaacagaggggtttggtgcgggaaagaatgtaaaatatgaagaggctacaagttttcagcaacaagattcttggaatgcttacatagttggtgttgcgtaacttcatcttagaaagtgtatttctgttgcattaattttgtcataagactcataactggacaagcatcactgttaatcagctccattgcttggaacttgcctttcttttatatgaaaattgaattggatttggcttgagattatcaagtgtaacaaacaaaattttaaaggtacattctgctcaagtttggtgtg

SEQ ID NO: 12033 - DNA, 981 bp, Glycine max
  Clone ID: 701156649_FLI
ggacaataataacacacaaaatcaattccacacctacatatccaccacaccatggccaccaccaccatgttctcatcaccatcagccattttatcctcaaccactacaaccaccacaccaaaaccatcatcttcagcaccaccctccccatcatgcaaacctcttctacccttcaaacaacccttaacaaccttaactgccgccgccgccatcgccaccattttaaccaccgcaccagcaccctccttagcacaagagtctccctaccaagtctactacggcaccgccgccagcgccgcaaactacggcgggtatggtggcaactccagcaagaaggactctgctgagtatgtctacgacgtgcctgctggctggaaggaacggttggtgtctaaagtcgagaagggtaccaatggaacagacagtgagttctacaacccaaagaagaaggcagagaaagagtacctcacttttctcgcaggatttcgccaacttgcaccaaaggatgtgattttgaacaacttggcactatctgatgtggacctgcaggacctgattgctaatgctgacagcgtgacctctgatgaggtgagggatgataaggggcagctgtactatgtgtatgagattgatggagttggtactcatagcttgatctcagttacttgtgctaagaacaagctctatgcacattttgtcaatgcccccactcctgagtggaatagagacaaggacatgttgaggcatgttcatgagtcttttaagactgtggggtctttttagttggcttctggtgttttatattttgtagaggtaatggttgattatctattatgaggatgaggatggtttcttttgttatattttaaatttttactacttgtctgcttgatttaagttttggtatagttggcttcaatttggaactgtcaggtttctgatgtggtttaaatagagtgtagctgttgcagcttgcatacc

SEQ ID NO: 12034 - DNA, 1839 bp, Glycine max
  Clone ID: 701156669_FLI
gaagacgacagaaggggacacgcaactatttctgactacgttttgctctacgcctctccctctctctcaaaaatcgttctcttcgattttagggttttgttttgctgctgcctccgttccccccttctcataaacaacgcgttttctcttctgcttcgtatctattctttgcttttggttttggttgattcaaggccttcacagcattcgttgcggcattttaatcgatttatccaagcaggactgaatgaactaatggagtctaaaggtgggaaaaagaagtctagtagtagtagtagtaaatcattgttctacgaagctcccctcggatacagcattgaagacgttagaccaaacggtggaatcaagaaattcagatctgctgcttactccaactgcgctcgcaaaccttcctgatatccatccagattgatagttcattgcatgcaaccatagttttattaggttttttcttctttgttttcaattaggtttttgctgctctccttcaaactccgtctttccgaatcctctctttgtgattgtgttctgttctgcttcctaccgcgatagtttctcttctgaagcatggccatggcggtttctgcaattggttttgaaggtttcgagaagaggctggaaatatcctttttccagccgggactttttgctgaccctgagggaatgggtttaagagctcttgcaaagtcccagttggatgagatacttacaccggctgcttgcaccattgtttcatctctcagaaatgatcatgtcgactcctatgttctgtctgagtccagtctctttgtttatgcctacaagatcatcatcaaaacctgtggtactacaaagctactgcttgcaatcccacccatattgaaatttgctgaaatgctttccctcaatgttagatctgtgaattacaccaggggaagtttcatctttcccggtgctcagccctatccccatcgcaacttttctgaggaagttgctattcttgatggctactttggcaagcttagtgcaggaagcaatgcttatattttgggtggccaagacaaatcacagaactggcatgtctactctgcttctgcagattctgtaactccatgcgacaatgtttacactctagagatgtgcatgactggcctggatagagagaaagcacaggttttctacaaagaacaatctgcttcagctgccattatgactgttaattctggcattagaaaaattcttccagattctgagatttgtgactttgactttgagccatgtggttattcaatgaactctgttgaaggtgctgctgtttctaccattcatgttaccccagaagatggtttcagttatgcaagctttgagactgttgggtatgacttcaaagtggtgaatctgaacgaaatggttaagagggtattggcatgttttctcccaactgagttctctgttgcagttcatgtggatggtgcaagcaagttgtttgatcagacgtgttttctggatgttaagggatactgtcgcgaagagaggagccacgaagggcttggaatgggtggttctcttgtctaccaaaaatttgccaagacttgtgactgtggttcacctagatcaactctgaagtgctggaaagaggaagatgaagaagagtagttttcttaagtgtctttattatgtccttgcgaaaataagtccggttttccagacagtgattgtttttctttggtgttttttcccttttatgttagaccattgttagggcgtttggaccttttattgttctactattaccatttgaacatcgaatggattttaataaatcactttgtatgcgtg

SEQ ID NO: 12035 - DNA, 1608 bp, Glycine max
  Clone ID: 701156670_FLI
gggattatatattatatagacacacagagatagaaagagagagaaagagtctaactagaatttttttttctctctttcataacctagtgagactctgtgtcagagtttgtgaagtgaatcccataatcatgaagaaaggaaacttgggacttggtctcaaactctcagttcctgtgtctgatcaatctaattttgccaggttcctgactgaaagtgggacttttaaggatggggatctgcttgtcaacagggatggagttcgaattgtctctcagaatgatgtcgaagctccacctccaatcaagcctacagacaaccagttaactttggcagacatagatgtaatcaaagttgttggaaagggaaatggaggggtagttcaattggtgcaacacaaatggactagtcagttttttgcgttgaaggtaattcagatgaatattgaggagtctatgcgcaagcagattgcacaagagctgaaaattaatcaacaagcacaatgtccttatgttgttgtctgctaccaatcattctatgaaaacggtgtcatatcaatcatcttagagtacatggatggaggttccttagctgatctgctgaagaaagttaaaacaattccagaggattatcttgctgccatctgtaagcaggtgctgaagggtttagtttatctccaccacgaaaagcatattatccacagagacttaaaaccttctaatttgttaataaatcatattggtgaagtaaagattactgactttggtgtgagtgcaattatggaaagtacatctggtcaagcaaatactttcattggaacctacaactatatgtctccagagagaatcaatggaagccagcgaggctacaactacaaaagtgatatatggagtttgggactaatattacttgagtgtgctttgggtcggtttccatatgcaccgcctgatcaaagtgaaacatgggaaagcatttttgagcttattgaaaccattgtcgataaacctcctcctatccctccttctgaacaattttctacagaattttgctcatttatctcagcatgtctacagaaagacccaaaggatcgactgtcagctcaggaattaatggcacatccttttgtcaacatgtatgatgacttggaggtggatctttcagcttacttctcaaatgcaggatctcctcttgcaaccttataaaagtctccctgcttgcaaatgaggagcgtttgcagatgagttgaagaaccagctcctagagtcacttcaaggattctgtatttagttgttgagtgattgagttcaatttgttgagaaattcagatgcaagggtcaagaaattgcaataattgacatttgaagaactttaatgctgaagttaagtatcaggggctacttgcaacaaaatgtttgaaatttatgattgcaacaaaacgtatcactaggatttgcctgagttgctgataatatgatctgatgtacaaattttcatgagatgaaagttttgtcaagctgtcccaaatgaacgttttgagtcacactaggtgaacagttcctcaagttatatttgagactttttatttggttaaagcttgtcaaatttcctgac

SEQ ID NO: 12036 - DNA, 1068 bp, Glycine max
  Clone ID: 701156672_FLI
ggagctagttaggtgttaaatatttgattgcaatattaatatgaaggcacagtgtgagtagtgagaaggggcattagtaaagaggatgggtagacgaccctgctgccccaaagagatcaacaaaggtgcttggtctcgagaagaagatgaaaccctctccaaatatgtttccatccatggagaaggaaaatggcagaaggttgcccaaaatgcagggttaaagcgatgtggaaagagttgcagacaaagatggttgaattatctcaagcccggtataaaaagaggccacatctctgtggatgaagaggatatgattataagacttcatcgtcttcttggtaacagatgggcattgattgcaaagaggctacctggacgaacagacaatgaaatcaagaactattggaacacaaatctgtcaaagaagttacaaaaacatccaacatcatcagtttcttcacttcaacacaaacgtcatgaaaaagaaaaaaccatacaaatgcatgtatcacccgaagcaccacggcctaggagagttaatgcagttgaatacagtaaaaatttggagaatggtgggtgtggaaatagacctagtacaactcccagtccctcaaataaagtagagggtagtagtgaagaagcttcttttagtgatttcctcatccacgacattgatcaaaaccaatttttgattgctgatgattcaaactcaaaggtgccacaaatggaagaagatcaccaccacaacaacaaggtggaattaataaccaacaacagtcctagctcttcatcaccttctgatcattgtcaccatctcttgccagagaaatttgacccttttgagacccttttggatgtggagctggcttcctttcttggatttgaaaatgattgatcaagagattttatttattattattgcatgcagtgagatgaatgaaaaaaggtcaagtacttagggagtgttatagataatatcccatctatatatggaatgcctaactaattatgcatctagctatagctagatgtaatatacaaatccagggtttctttttctttttcccg

SEQ ID NO: 12037 - DNA, 1589 bp, Glycine max
  Clone ID: 701156939_FLI
tggttatctttcccaggctctccttatatggaaaattgatgctagatcagtctgaaagtatgctgttgtgttgacatgtgtaaaatcttgatctctttttgtgctttcatagggggtacaagcggtttttcagacggtctttgcttgaaacctctgaattcctcaagaatgattgtttgaaaatcaactgtacagttggagttgtggtttcagcaattgattgtccacaacttcactctattaacatcccggaatctgacattggatcacactttggtgcactattggataatatggaaggttcagatattacttttgatgtagctggggataagttccctgctcataagttggtgttggctgccagatccccagaatttcgatctaaattttttaatggtttagatgaagaaaagaatgagattattgtaacagatttagaaccaaaggtttttaaggtaaaaactatatgtttcccctttccatattttctttccctggtagcatcaagcttgtttaggatttattctgttattctgtatttttctgttagattttcttgttaggtttctttttcttgatagaaaaaggatcttacaggagttcaagtcttcaagaggtaaagtacaactagggaggatgaatatcctgatttttcctctttttacaggccatgctgcactttatctacaaagatactcttacagaagaggtggacacggtttcatcaaccacaactagtgactttccggtttctgagatattgacagcaaaattgttagcagcagcagacaagtatgacttgggtaggcttagattgatgtgtgaatctcgtctttgtaaggacatttgtgtgaattctgtagccaatattttaaccttggctgatcattgccatgccacggagttgaaagctgtttgcctaaaatttgctgctcaaaatctagcagctgtcatgagatcagatggatttgagcatatgaaagaaaaaggcccatggctacaatcagagatcctgaagacaattgctgggtgtgagggtgatggttgcagcgcagtggaaaagtctcagagtgtatggggccaactttcagatggcggtgacatgaatggtagaagggtcaggcagagaatctgatactttggtaaaatgcaggtgataatgccgaaaaattggggggtaaaaaagaaaaaggcaaagaagacgaaaaacccttttctcttctgtccaacttttccatgttccaatggaaagtttagaaaaagcgggtagactagatgtcattagtgtgtgtacgttgttagtgcagagtggtcattgaaaatgaacttatctgcagtagactattgatattgactatactttggaagtggatatttggttgctggactttatctcttccatttgctttccccttttctgtactcgattccaacagaatgttagtagaagtaggttcattaggatggctattgttataccatgtacaaaatattcattttgtaacaattgttttttcatgcacacctgccatacaaagagccagtgattctggtttggtggtctgttttgattgacgttgatgact

SEQ ID NO: 12038 - DNA, 689 bp, Glycine max
  Clone ID: 701157007_FLI
gagattaaaagcaagggtagaagttttgcaacgttctcaaaggaacctactcggggaagatcttgcccaaatgaatacaaatgagctagagcagcttgagaatcaactggaggcagcactgaggaatattaggtcaacaaagactcaattcatgcttgaccagctttctgatcttcaccaccgggaaacattgcttattgaaactaataacgtgttaaggagtaagttggaagaaactgatcactcacaagttcaagtaagtctagctttggaagctggagggcctagcatccaatacaccaactttccacctcaatcagaggggttcttcgagccagtgggagtgaaccccaccttgcaaattgggtacaaccagactggtcctgatgatacaaacgtaggagcttcatccttaagtatgcatggattcgcctctgggtggatgctttgatgatattgaatttacatatgttccataaagaacagaaaagaaaactagtcatggatgtgttgaacacttccataatatatatgttttcgtttccttttgttgtgcatcatttatcaatgtttgaataaataaaaattgcgagtagtattatcataaaaatttatgaacctaaaacgttgtatatttgtattgaagttaaaactttaagccatccaatgagtcactgaacttggtttat

SEQ ID NO: 12039 - DNA, 716 bp, Glycine max
  Clone ID: 701157093_FLI
ggatcctttgtattctattcttcaagattcaggtactgcgtttcggaagcagacacagatggctcgtacgaagcaaaccgctcgtaagtccacaggaggaaaggctcctaggaagcagcttgcaaccaaggctgcgcgtaagtctgcaccaactactggtggtgtgaagaagccccaccgttatcgtcctggtaccgttgctcttcgtgagattaggaaataccagaagagtaccgagcttttgatccggaagctccccttccagaggctggttcgtgaaattgctcaggacttcgagactgatctgcgtttccagagccacgccgtgcttgcattgcaagaagctgctgaggcataccttgttgggctctttgaggacactaacctgtgtgccattcacgccaagcgtgtaaccattatgcccaaggatattcagctggcaagaaggattcgtggtgagcgtgcttgagttggtggttggaaagatgaagatgattggtggctgcggttggtgtttttgtttttcagattcctttttttattcaatagatggggttgttagggagggtaggttttctgctggtagtagcattaattgggatataggcaaatactgctaagtgtccgtgactgtgttttcttcctttaagaaaattggcttgtaattgatttttggacatatgtatgtgttagaatgcttctgttttagtttttat

SEQ ID NO: 12040 - DNA, 1564 bp, Glycine max
  Clone ID: 701157142_FLI
acgacagaaggggatagcataacaataacatacataaaccttgttatgttctgccgccaccagcaggatcgcgtattcgtgattgtttccgaaaacccttgtctctgaaatcaacaccaaaatcgtgaagtgtactaagcgaagccattgcaggcgtgagaatggggaagaaagcaaaagggtcaaggaagggtaagaaggcatggagggctaacatcagcaccgaagagatcgaagatttcttcgagaaatcaacaaaggacgctctttctggtggctctctccaagccgtttctagcgattccctcttttatgaagacaagtccaaagatcttgcggtgaagaagaagattgaggagcatagggagagagtgctccgatgtgatagcctgctacagaaaaaccagtttgttaagcctgtgccatcttctattctgaagaagtgttctaaaaaccgtaatgtggcctctaaatctaacatgaaagaggtcaatcaagatggtgataaggatgattctgtcgtgtttggtctatggggtgataaaggtgaggataacaagaaggtgaaaaaggtatcaaaacctgctcttattccagcagtagaggttgatccaccaggctgctctttcaatccctcacatgaaagtcaccaggatacattagcttctgctgttgcggaagaaatgcaaaaaatctacaaaaatgaattgggccctgaaccagtgccattaactgttcctggagaagctattgctgaagaagatatgtattttcttgatgtggacaatgggagtgacaatgatgaaagtactcttgaaaatgagggtgaaaatgaagatggcacattggagaaaaagcccattaaaacaaagagagtaactagagttgagttgaataagagagctaggcggaaagaacagcagagaaaagaaggagaagctaaaaagatgaaggaattgtcaaaggaaattgatagcataccggaaattattcagggaattgaggaagaagatgaggaaaagaagaaaagacatcttaggcgacaagttgctaaacaggagatgttaaagacacgcccaccccgcttaggaaagcacaagtttgagcctgcacctgttcaagttttattaagtgaagagataactggatccattcggaagctcaagggttgctgcacccttataaaggatagatataaaagcatagaaaaaagaggattgattgctccagcaaaaagaagaaggaattagagttgttgttggctaccaaacttatgtcgctccaaaaattctggaggcgttgatgtatggtaagaagagaaggtgatggatgaaatgaatacctataaagtttttctaaaggaagatcatgtttctcaattgtttggcctaatatatgtgtattatttttaatgtcaatttatttagtaagtggaaatgtccacatgtattagaactcctttttgcatcgttatattgctaaagaatttgttcagtgttatttaataattttagacatcaaatatccaattgaatttttttatgcctccaagatgaggaagtgg

SEQ ID NO: 12041 - DNA, 1181 bp, Glycine max
  Clone ID: 701157256_FLI
attcggctcgggcgctgcgagagccgacagagggggcccgcagataaaccaaattgcaagtcacacatacacgatatgataccccgtcctccctctcttcacttttgactattgacttcctcaaccgatccactcttctctctatctgcagatggcaagtgggtttggggaatcaacagggagatcacccccaagcccttcctacttcaacaacaataataacaatgatgctgccaattttgaatgcaacatttgctttgaattagcgcaagacccgataattactttgtgtggtcatcttttctgctggccctgtctttacaaatggcttcactttcactcacaatcacgagaatgcccggtgtgcaaggccctcgtggaggaggagaagctggttcccttgtatgggagaggaaagtcgtcgactgatccaagatcaaaatctattccgggcgataacatcccgcatcgtccggctggtcagaggcctgaaactgctcctccacctgaaacaaatcattttcatcaacatgggtttggatttatgggtggcttggggggatttgcgccaccgccgatggcaacaacaagatttgggaattttgcattgtccgcagcttttggtggttttataccatccttattcaactttcagttgcatgggtttcatgatgctgccatgtatgggggaggggctggttttcctcatggatttgccaatacatttcatggtgtccatgcccatggattccctctgcgcacccatcaagggcaacaagattattatttgaagaagcttcttctatttgttgttttgtgtgttgttcttgcttttatatggcaataggttggatacaatctctagcagtatctgacttctgctctgataggtcttctgatgtgctctttgttttgtaactaaggagtaaggatgttgttcatatgataatactgtcttattaatcttgtagttcttttctttgtgatagctttgtggttcccatggtatccatgtgcaaaagatataaagcatgaaagcaatgcacccattgttaggaataaggatctgggtaccggtccgtagatattaatttcttagttattatactgagtttgaaactacaagatagctgaaatagtgaagttatgcccttggtttccttttgtgttctcatatttcc

SEQ ID NO: 12042 - DNA, 718 bp, Glycine max
  Clone ID: 701157302_FLI
gatcacaaccacatttgcaaaacaaaagccatagtttgttacttctcttcgccttttgctttgcaattgtcaccaaacaattcttgcttagctctcacaagcaagcattatcaacaatgaagaaaattgtgttaaaggtggacttacatgatgacaggatcaagcgaaaagctatgaagacagcatctggcctttcgggggttcaatcagtttctgttgacattaatgacaagaaaatgaccttattgggggatgttgatccagtgagtgcagtgtcaaagctacgaaagtggtgtcacactgaaatagtctcagttggaccagcaaaagaggaaaaggagaaagagaaagtggagccagcaaaagaacctgttcctctcaagctctatgatgcctatcccttttattatcatatgacaccaccactgtatctgtatagttaaaattaataggttagatgttttgaagagaatcttatatagtggctgtgtcatctactaaattttagaatattattaggattattattcgcagagggtggtgtaacttttttgataaattcagacaagtttctagctacttgggtttttgatatatagtataatgtatacctttgtgatttcattggcttttccagcaacacacatcttgttagtatagtttgttggaagtaagagcatattaaggaatgtgaatgagtatgacacaagtttaatcc

SEQ ID NO: 12043 - DNA, 2412 bp, Glycine max
  Clone ID: 701157358_FLI
tgggggaagcaaaacaacattaccaggtacagtttcagctaactctgcatcacttggtagttgagtggttctagtaattcagtgctgctagaagatggaaactagtgaatggcatatcgagcgaagatctagcttcggctctgaatcccccttagcaagagaggcaggaaatgtgcctgaaactgggtcactctctattgtggtgcttggtgcttctggtgatcttgctaagaagaagacatttcctgcacttttccacctatacctgcagggattcttaccaccagatgaagttcatatttttggctatgcaaggacaaaaatctctgatgatgaattgagaaaccggttgcgcggctatcttgttccaaagagaggtgcttccccccaacagttggaggatgtagagaagtttttacagctgatcaaatatgtaagcggctcttatgattctgaggatggcttccgcctgttggataaagagatttcagagcatgaatatttgaaaaacagtgttgagggtttatcccggaggcttttctatcttgctcttccaccttcagtatatccatcagtttgcaagatgatcaagacttgttgcatgaataaacgtaagatgctataatatatggttttgattgcaaatgtttcaaaaggacaaatagctttttgttgagggagggtgggagatatgaacagcgacacagtgaaccatagctcaacaattgttgagaatgatgctttgtcagacattagtctacacatcatgacagagtccactttaagctcttctttttaacttttatttaaatgttggttacttgtttactttttgcaagatctttttcctgataatactggtgctagacatatagctgctgcttccagttgttgggattttggcttcacaagatatttacaggtgtctgtgttatatctatggtgtttaaaataaaaagttaaataattatgaaataaacttgaactttgtgttcagctagcatttgcaaaacagatctctggctttaagtctctccaccatctcatttcttttgtgagaagaacagttgtctttactttttcttttacattttgtggttcctttttattatccagaaatctaatactgattgtactgatatggctgcatctgcttccttttcttagctgatcttggtggatggacacgtgttgttgttgagaaaccttttggtaaggatctagaatctgcagaggaactcagtactgagattggaaagttgtttgaggaaccacagatttatcgtattgatcactacttgggaaaggaactagtgcagaacttgttggtacttcgctttgcaaatcggtttttcttgccactttggaaccgcgacaacattgacaacgtacagatagttttcagagaggattttggaactgatggccgtggtggatattttgaccagtatggaattattcgagatattattcaaaaccatctgctgcaggttctttgcttggttgctatggaaaaaccagtttctctcaggcctgagcacattcgggatgagaaagtgaaggttcttgaatcagtgctccctattaatgatgatgaggttgttcttggacaatatgaaggctataaagatgacccaaccgtacctgatgagtctaacaccccaacatttgcaactgttgctctgcgaatacacaatgaaagatgggaaggtgttcctttcatactaaaagcagggaaggcactaaattctagaaaggcagagataagggttcaattcaaggatgtccctggtgatattttcaagtgtaaaaagcaggggagaaatgagtgtgttatccgcctacagccttcagaagctatttacatgaagcttacggtcaagcaacctggactggagatgtctacggttcaaagtgagcttgacttgtcatatggacaacggtatcaaggagtaaccattcctgaggcttatgaacgcctaattcttgacacaattagaggtgatcagcaacattttgttcgcagagatgagttgaaggcatcctggcagatcttcaccccacttctgcacagaattgatgaaggggaattcaagccactcccctgcaaaccaggaagcagaggtcctgcagaagcagatcagttacttgaaaaagctggctatgttcaaacacacggctacatatggatccctcctaccttgtagagtgatctaatgtaataagatgaggaatttttagctgctaatgaatacacaataagcttgtgaggcttcttccctttgaagcactcccacggatgtgtatcaagcatttggaacaatataagagactaagagtgtttggcacggtttgtgtaactgatttgcctttaaatgcaaaataaatggaaaatgaagtccatttactaac

SEQ ID NO: 12044 - DNA, 1100 bp, Glycine max
  Clone ID: 701157767_FLI
ggagcgagagagagagagaaacaaagcagcacccatttggatcctctcttctcttctttgatctccgttaccctttttgttttctcaacagagagagagagagagaatctttcgaagttcgtttgcgtgtgttgtgtggtcagtcaccgatggcagcaccacctgcgagggcacgtgccgattacgattacctcatcaagcttcttcttattggcgatagcggtgtgggaaagagttgtctgcttttgcgattttctgatggttccttcacaaccagttttatcaccaccattggcattgattttaagataagaaccattgaacttgatggcaaacgcattaagttacaaatctgggatacagctggtcaggagcgatttcgaactattaccacagcttattaccgtggagccatgggtatcttgctcgtttatgatgttactgatgaagcatctttcaacaatattagaaattggattcgcaacattgaacaacatgcttctgacaatgtaaacaagatacttgtgggtaacaaggctgatatggatgaaagtaaaagggctgtgcctacctccaaaggtcaagcccttgctgatgagtatggtatcaagtttttcgaaaccagtgcaaagacaaacatgaatgtggaggaggttttcttttcaatagcaagagatatcaagcaaaggcttgctgacacagattctaaggctgaacctcagactatcaagattaaccaacccgaccagacagctacagggggtcttgcggctcaaaaatcggcttgctgtggttcatgaaataaataacaagtcagaatctgcagctagagggtgcagattcaacactcgccctcatatgggtgctatagttattttgatgacatttaaaagtgggagcatgtatttgtccttgtatttcccaactgcaaagattatgttttgaagatagtgttttaaatttttcgtttacttagctgtcggatttgttgtgattagttcgtttgctccactctctcctctttcatttgtacaccgactcttgaaagaaaatctttcgattggattcagattgattattagaaaagcttttatctgttg

SEQ ID NO: 12045 - DNA, 413 bp, Glycine max
  Clone ID: 701157781_FLI
gacagctattcctcttaagcttgctactgagtttccacactgcataccttaggtcttccgaattcgaagttaatttgcaagatggctaaggaaaaggctcagatcaacattgtggtggttggtcatgtggaccctgaggaggcaaccaccattaacgagctgaagaagcctgttgtggagaaagaagctccagggcatgccatatgagggcatgcacgtacggcctcggaggggaaccagaaaattatgttaacaaaataatctggaaccctaatgtatcagtgtcatcatcagtgtgtagtttaagctagctttgctatggttacgttctttgagatgagagtcttgatgaacagtaccattctgatgtattgctttccttgaaagttaatgcatgcttcttatcttctgtc

SEQ ID NO: 12046 - DNA, 1223 bp, Glycine max
  Clone ID: 701157804_FLI
tacggagaagacgacagaaggggaacacactcatcaaaaaacccttctttctttcaggttcattacttgatcagtgtcaaaagggtagttgcaaattgcaatggctaagcatgatgttgagggtggttccttctcagcaaaggactaccatgatcctcctccagcacctttgattgatgctgaggaactcacacagtggtccttctacagggctttgattgctgaattcattgccacattacttttcctttacatcacagtgctcactgtgattggttacaagagccagagtgatgtcaaggccgggggtgatgtgtgtggtggagttggcattcttggcattgcttgggcctttggtggcatgatcttcatccttgtttactgcactgctggaatctccgggggtcacataaacccagcagtgacatttgggctcttcttggctcgcaaggtatctttgattagagccataatgtacatggtggctcaatgcttgggagccatatgtggagttgggttggttaaggcattccaaaaggcatactacaacaggtatggtggtggagccaatgaactcagtgaagggtacagcacaggtgttggattgggtgctgagattattggaaccttcgttttggtctacactgtcttctctgcaactgaccccaagaggaatgctagagattctcatgtgccggttttggcaccacttccaattggctttgctgtgttcatggttcacttggcaaccatcccagtaacaggcactggcattaaccctgctaggagcctaggagctgctgtcatgtacaaccaacagaaggcctgggatgaccattggatcttttgggttggaccatttattggagcagccattgcagccttctaccaccaatttatcttgagagcaggtgctgctaaggctcttggatcattcaggagcaaccccactattcgagtcaatttcctcttcataatcacgggtttcaaaaaggagataattggaagcaaaatgacttgatattgtaagaataataatgttattaataatggcaattgcttgtgcttttattgcaagcttttctttgatcctatgtagattaaaggttctttcaagacaagagcctttggtaaataccctttagtattttcaagcactttcctttcttcagtgtgtgttcttttcttttaggtaattaatctcttctactcaatgtattcat

SEQ ID NO: 12047 - DNA, 2010 bp, Glycine max
  Clone ID: 701157842_FLI
gacgcaaatgattaaccatggcttcttctacatcacatccatccttttggtccctcctgaacctgtctgcatccattcccatttcttcttccgtatgcatgttcccaccgtctaaaaaacctagcaaagcaacaaaacggcgtcatgcttgggaagtagcatgcaatggtaaccctagaaataggagggacattctgatcggccttggaggactctatggtgctacaacaagtctcacaagtaacaacactggttctgcatttggtgcttcattgtcgcctccagatccaactaactgcgttcaaccggacccagaaaaagaccctttttgcccaccaccccccttcaaagactacgagctccctccacacgatgacaagacattaccccttcgaattagaccagctgctcatttggtcactgatgattacatagccaagtacgaggaagccgtgaggtgcatgcaagaccttccacctgatgatcctcgcagtttcatgcaacaggccaatgtccaccgtgcctactgcgatggtcgcggctataatcaaaagggcttcgctgactacaagcttgacgttcacggctcctggatattctttccttggcaccgctggtatctctatttctatgagaaaatcttggggaagatgatcgatgaccccactttcgctcttccgttttggaactgggacaatcccgccggcatgagaatccctcccattttcacagacaaaagttcacctctctacgacgaacacaggaatagcgatcatgtaaatgctttcatcgacctagactacaagaaggaccattctcctgtgaaacctcctcaaacaattatatggccgccagtggtgaaaaagaataactcgatcgtcgacaacttgatcgtcaacaacttgataaaagtttatacggcagttgcaagcaaaaccaactctagcccagactccttcctcgggccagcattcgaagttggttctgatcctaagaaacactttggatctctggaatctttgcacaatactgtccacagctggaccggtgaattagaaaaacctaaccacgacatggggttgttggctacggctgcaagagatcccattttctttgctcaccattcaaacgtcgataggatgtggaacatatggaagacagaattgctggatggaagaagatttgatcacaaaagtgacgaatggttggaatccagtttcttcttctacgacgagaacagtaactatgtgcgtgtgaaggtcaaagactgcctcgactccaagaagatggggtatgattaccaacgtgttgaccttccatggctgttggctggggaactcatcaaaccaaagaaggagattattccccttcgttcaaaaccagaagcttcaacattcaagacattacagctccctctccttctggaatccattgagcgtacaaacgtgaagaggccgaagccgcgatccaggaacgagaatgaagaagaagaaggcgtagaagaggtgttagtgatagatgttgagtacgatagcactgatggtgtgaggtttgatgtgttcatcaacgaccaaggcgataatgagattggaccccaggattcagagtttgcgggaagctttgtgactttgcctcactcgccgcatgtcaaccataacaacatcaccagagcttctttcaaattgccattaacgtatcagttgaaagacttgggagtaacaaaagacgatgatagtatttctgtcacactggctcccatatatggagacaagcctgttacaattaaggacgtaaggataaagcgtgtttatcctgaggtagacgatgaataaatctaaattatgtgtgtgctactgctagggtttgtttctccggggatactctatttgtcatttgttgtttcttaattagtgtgttgtagttatttgccttggaacttaatagatccctttcatctttgagggatactatgatattgttataataaatgtttgttaaattgtttgtttc

SEQ ID NO: 12048 - DNA, 901 bp, Zea mays
  Clone ID: 701158331_FLI
cttccctttcccccggtccagtggcggacgccctagccaggcaccacaggccacagcctgggctgccccactgccccggtcgccgtcgggcaagcgccgtccaacctgtgcgtcaccgcctccgccttcagtttcgcctccagcaggggcgccgcgtggggtattcggttcgtcgtcgaggagagagagtcacttctgccgagggagcagggatggagccggtcgtggggatcgtggtgtcaaacaagatgcagaagtcggtggtggttgcggtggaccgcctcttccactataagatgtacaaccgctatgtcaagcgcacctctaagttcatggcacacgacgaggctgactcctgcaacattggcgaccgggtcggttgtagggtggggattgggctcgagaagggcggcggcgctggggcgctgtcgtgaccctggctgggtcgcgcgcagggagaagattccaggagactctggcttcatctgggaagccagaataaattggttaggctggacccttctaggcccttgagcagatataagcactgggttgttgctgaaattcttcgcagagctaaggtatatgttccaccagctgcaacagcgtccagtcagtccagtgaacataatagcaaatctcaaaaggctggtgttgctaccaaatgatccatatgcagttactcaagcaagatgcagctatggctttttttcttcttctgtatgtttgtttggaatgtggatgccatgtttagccatggaagaaaaaatagcacgcagccaccatcttcgcttaatttagtttgttctcctgtggtgtcctccctttaatggtagccatcgaggatataattaccatattcaacaagaccaatggatactatatcggcagttgtctttgt

SEQ ID NO: 12049 - DNA, 614 bp, Zea mays
  Clone ID: 701158340_FLI
gcgatctagaacctggaaaattcaaggatgagatcgtcccggtgccaacaaagatcgttgatcctaaaactggagaggagaaggaagttgtgatatcagttgatgatgggattaggccagggaccacagcatctggattggcgaaactgaaaccagtttttaaaaaggatggaactacaactgcaggcaattccagtcaagtgagtgatggtgctggagctgttcttctcatgaaaagatctgtggctctgaagaaagggctgcccattcttggtgttttcaggagctttgcggctgttggagtggatccagctgttatgggtgttggtcctgctgtggccattcctgctgctgtgaagtctgcaggccttgagattggcgacattgatctgtttgaactgaatgaggccttcgcctctcagtttgtctattgctgcccccattccagatccgatacacatggtgacaacaccaaatctgcagtctctgccccggcgcttcatttcatttagaagagtagccacacaccgggcacctgttgcacccagagggtgtccaagggcaatcgcgcctccatttacatttactttagaacggtccagccccaacttgtt

SEQ ID NO: 12050 - DNA, 249 bp, Zea mays
  Clone ID: 701158362_FLI
atgtctaagtttagttcttcaattcgaacgactaaacttaggcaacttcattgtgtctagtggaaatagtagaagtttttttttttgcttcttccctgtggtgccctcgttgagcttttcttatgggctatacgagcatcatcgcccccagctcttctgtccacgctgtttacctgtgaggaatggtcgcccaaagtgttggtttttatccttgtgtttgatatggcagaagtatctgctctgctgttt

SEQ ID NO: 12051 - DNA, 1239 bp, Zea mays
  Clone ID: 701158370_FLI
attgagccaaaccctaggccgtggggggctgacggagggcgcggtgagcggggtctccactatcgatagcatgcgtggcgggtactctggccgctgtggcttcgctggcggccggcatagcagcagccgcagcaacgatggcaggggataccacgggaacccttgcttgacgatgcaccaaccgtgggcgtccctgctggtgcacggcatcaagcgtgtcgagggccgctcatggccatccccaatcacaggccgcctgtggattcacgcagcatccaaggttcctgaccccgacactatcaaagccatggaggatttctacagggagatttatgccgtcgatggcatcactggcatcaagttccctgatcattaccctgtctcacgcctccttggctgtgttgaggtggtaggctgcctcaggtctgaagagcttgtttgctgggaacatgtgcctgagtctgtcaggcttgaagggctgactgacttttgttggctctgtgaaaatccacagaagttggtggttccattcgagatgcgtggttaccagggtgtctacaatttagaaagaaggatctatgatggggctgtgaggggccttttacctgttcaaggtccactgcctgtcaagttccctcttccagatcccagagaccccttctccttgaagccaggatctcttacatttgctgcttccaaacccactctgcaaaaatctgaaagtgttgctgcagcaatagccggggctcgagctgcagccactcaattctcaaagaaggatcgcaaagctgctgctagtagtgaaattggtacagaagagcaatcctggggaagccatggcggtagcagttcagttgattgcaatggtctgtcaattgtccatggcagctatgcgcatctacagaaccagaatcggccttcaattttcccgagcactcaagcgaattcccaaaatccaaattctgagcctcggagaagccctagactagaatttggagcttccaataggcttgttgcagtggcactgagtgaactgaagcagttaagcttgagcaagaaaggaacaggacaagcagttcccagaagctgaccaatgcaagctaacaagtagtaatgcttgtcatagcccatagggcgagagagtgtgtttgtagaaagatgggtgatgtttgcagaattcatggtagcttgtaattaagtatatgctccagtgctggaagtgttgccattgtgtgaatt

SEQ ID NO: 12052 - DNA, 584 bp, Zea mays
  Clone ID: 701158380_FLI
ggcttctctcccagctgtagccgcagccgccgccgcctctatctctcccttccctcttctctctcccctcaactctcctcattctccacaggctgagcagcagccgccccaatctgcggttcaagaaccgcccacgcagaacccctccgccctccgctccttctagctcgctctctacctgcaccagcctcgcccacccttcgctcgccgccgccatggggaggggaaagttcaagggaaagcccaccggccgccgcagcttctccacaccagaggagatcgctgctggtacttcaggtcgccctcgcacctttatgaagacatgcaattgaaaaagagaattgatctcttttatgggcgaagtgttgaagatggctttggtgaaggaaatgtcttgttagcatcaagtaagtggcgacatcacaacccctacaagcttgtgccttaaaacaagaggatacaagaagttggagtgcttttgtgaaggcttttgcgaatcacttgaagcgttagtacttttgtgaatgattttgtaaagtgtttgtaaatatgtgcaaaacataataacatgtgtaggttttgcg

SEQ ID NO: 12053 - DNA, 206 bp, Zea mays
  Clone ID: 701158434_FLI
gccgcgcgcctgtgtagaaatgtacagtgtatttggctagcttttcgattttgtgcatatgtatgtagctgactggctgatactataaaacagagtggcctctgtgtacattggctccgatttggtacttagatgaccattctttaggccgcgtttggttacctgggcaatctcatgatgagataaattttatctactaaaaatcc

SEQ ID NO: 12054 - DNA, 911 bp, Zea mays
  Clone ID: 701158505_FLI
gaaggagccgggggccaggcccaggcccagctgcaccgcgacgagaagcagcacaagccggccgtgctgaagaaggtgaaggagaaggtgaagaagatcaagaacaccctcgccggccacggccacggccacgacggtgagcacggcggcggcgagcgcatgggagacgcggacgccggcagcgacagcagcgaggaggcggaggaggacgcggcggagagggaggccgcgctggagaagggcggctacatggaagatgtcgaggacaagcccctcgtcacggagccggagccggagcccaaccccgagctgcacggcgcgccaatgtacgagtcggcgagggcacccgccgtgcaggacctcgtcgccgagtacgatcagccggcgtggacaccggcggtgcaggaggtggagggcgacggctccgcacctagggtgcggctcggtgatatcggcggccccgtcgtcgaggatccagccgcgccgcgctccacgacgcccaccgcgcgagagggtgaggacataggtacgacgcccgtggtgcggcagtttgagaccatgagcttatccgacgacccgacgcacgtgggcgcgggcaagaaaggcgccaaagcagaggagtggaaagacaaggccgcggacacggtgcgcggtgcggacggtggcggtggcgctagctacacggacactctcaagaacgcggctgccggcaccacggagtacggcaagaagctagcgagcacggtgtatgagaaggttgccggcgtcaccacggctgtgggcgtggggaagcgcggcgacgaacgcacggaggcaacgccggcgtcgaacacccgcacggaggagcgcggagcggcccccgaggccacggatgcgacgagaggcgcagggtacaccgacaagatcaagtc

SEQ ID NO: 12055 - DNA, 600 bp, Zea mays
  Clone ID: 701158507_FLI
tcgcagtcgcagcacacactgaattctctttagctagctaagagagggtagccacaccaagacaggatgcagacagcgaaggtgaaggcgaaggacatggtgagctcggcgaaggagaaggtgaaggaggggtcggcaaagatgcagggcaagacgggcgaggcgacggcggccacgcacggcgagaaggagatggccaaggaggcggcccgcgccaagaaggaccaggccaacgccgacaagcaccaggagaaggccgaccaccgagcggacgccgccactggccaccacggcacgcgcgtgcccctcaccggcccgcacggccaccacggcgctggcgcggccgtcgaccccgcgtacccgtcctccggcaacacgtacccggcgtcgggcaagtacatctaggtgactgcgtcggatgagcgaggccagggtcgtggtcgcacttgcgtttttgtgtacgtagcgaccgagaagatcgatcctggctgtacgcctgcagtaccggtaccgactggttagttgtagagggtatgcggtgcgcacgtgcacgtgcgcgcaagtcgtctggaataaaaatgctctagttgctgttaggtc

SEQ ID NO: 12056 - DNA, 858 bp, Zea mays
  Clone ID: 701158519_FLI
cgcccgagccgcccgctagatccatggcgcggctgctaccgacggccgcggcagcggccatcgtggccgccgtcctggtggcgggcctgccgggcgcccgggcggcgtctgcctcgccggcggcggacgacgcgccgccgtacaggaaccacaccgttggcggcggcgatgggtggttcttcgacgccaacaccaacgcctcgtccgggaactactccgactgggccgccggcgagaccttctacctcggtgactacctcattttcaagacgaacgacaactcgtcggtggtgcagaccaccaacgccacgacattcgggctctgcgacgccagcgacgacctggcggagacgacgtccatctacggcggcggcggcggcgggggcggcggcctcgagcagaacagcaccatcgcggtggcgctcaccgccgagggcgccaactacttcttctccgaggccgacgggggcgcgcagtgccagcaggggatgcggttcgagatcaaggtcgagcacggccggggcctgccgccgtcgctcctgcaccagccgccggcgcccaagggccgcgtcctcgcgccgccgccggcgggcacggcgttctcgggcaccggcggggtcgagcccggcgacggcgccggggacaacggcggcgctggcaggagcggcgcgtgcagggcggcggcggcggccagcgcccggttattgggggtggtggctgctgctgctgcggctctggccgttttggttctttgagtagcgatggtttaaaggcattcgtcatttggaaccactgttctgcttatgtatgtgtctgtatttaaattcatcatttaatggagatttgtgttcgatgctt

SEQ ID NO: 12057 - DNA, 1060 bp, Zea mays
  Clone ID: 701158527_FLI
gcgacgacgagacgatatgaagagcgaggagtaagagaaaccaaccaaaaccacgggaaggagacgagacggggggaaaaacactgcgcaggcacaggcagggagagacgtaaagccgccgcttcgtgcgcgtcgacgtcacctcgccgccggggcccgtctcgccgcggggtcccttagagctcccttccgtcgccggactgggcggtcgccggacggatcgggaagcgacgacctgaggggactggctgggatggccgggaagaagcgcaaggcggaggcggcacgcctggaggagacggaccgggcgctctacggggccttccggggcgccgccaactcgctctcgcagctctacacgctcggcatgggcgcgcagaaggcctccttccacgccggcgaacgtcacgccatggaaaaactttatgaatggatcctgaggcagcacgaaaatggtttgaggctaacagttgctgatgtagcctcccatatccagcatgagattcagtatggaggtgacaatgcatcagcctctccaaggtcacaataccctagccaaagcactgcaccgacaatgcacattcccaacacaagcaaccagcaaccatcgccaagcttatttgcttcaggaaaccctgggttgacacagtccaagaattccatggtcttttcaagcgcattatccagccccatccggcggagcctgcaaccttaccacctagagcaggacggggatgcagggtacttcgcgaacggtgcaagccgcgatgtgaaccccacggcttcgaatgattcgtccatggacatgcactcggacagcccagctcatgactcctactgagcagctcccaccatggaaccagcctcaagaacagcacttcaagtggaagaagtctgctgtcacagccttcccaggcctagtagtaatattcaatttaacaccttccatagcctctcttacactaagcgtgtgatgtcttgtgttgttactactacttaccacttgttgctttgcgagaattatgtaatttgcatgtactatactatactgtaccatttg

SEQ ID NO: 12058 - DNA, 501 bp, Zea mays
  Clone ID: 701158536_FLI
gttccgttctgacacggcgccgactgggactgagaagaaacctccaaacacctacctctctacgaactacctgccgccggaaaaccctagagcgctcgaccatggatccgcagcagccggagcctgtcagttacctctgcggagattgcggagctgagaacaccctgaagcccggagatgtcatccagtgccgtgaatgtggctaccgcatcctctacaagaagcggacccgccggattgtccaatatgaagcgcgctgaagagtgaagacaagggaaaacactgaagatggttgatctattactcgccacattacctatgtaaacagtcttctgggggaaatgaaaatgtcagacttaacgtttgtatgtcgtgtgcctcctttgaacctgagctgtataatttgtaacgcttgaactggggactgatttgagaactgagacactgcagcaatatgttgatgggtcctaagtggcgaatctaatgcatgcgtgttatgcc

SEQ ID NO: 12059 - DNA, 228 bp, Zea mays
  Clone ID: 701158572_FLI
gttcagttcagttcatccgtgttcttgtttgcgaggtcgagagagactgagagaggatgtcgtgctgcggaggcaactgcgggtgcggctccggctgcaagtgcggcaacggctgcggagggtgcagcaagatgtacccggacatggccgagcaggtgaccaccaccaccacccaggctctcatcatgggtgtcgcaccatccaaggggcacgccgagggcgggttcg

SEQ ID NO: 12060 - DNA, 392 bp, Zea mays
  Clone ID: 701158577_FLI
ctcctcggttcctcacagtcacagagcctcacgtcacgtgtacctcccccaacccaacccagcccaacccagcccaaaacctagcgggcgaggggccggggaaccgaccgccggacgcggagatggaccacgcggcggaggcgcagcggacggacctgatgacgatcacgcggcacgtgctcaacgagcagagccgccacccggagtcccgcggcgacttcaccatcctcctctcccacatcgtcctcggctgcaagttcgtcgccgccgcggtcaacaaggccggcctcgccaagctcatcggcctcgccggagagaccaacgtccagggcgaggagcaaaagaagctggatgtactgtccaacgaggtcttcgtgaaggcgctcgtcagc

SEQ ID NO: 12061 - DNA, 1411 bp, Zea mays
  Clone ID: 701158593_FLI
aggctctgctgcaaccagcgcctttcgaccagctccacctcggaggactcctgatgcagagaagtcactttcagcttcttcacataaaacaagcaacatattatttgatttaaatgtagctgacaacggcagtgctacttctggtgaaccactttcgacagcaatcctgccagcttcttctgaactaccttccgaggttgcttccaaagcagttgatgtgagcggaggactgaaacttgaccttaatttctcatgtggtgatgaggaagatgctatcactgcaagcaatgtgccgtcattgtggaatcaccaacaatttaatggcaactggagtcagccttctttctcatcttcaaagcaacctgcagccagaaactttgacttgaatgacaacatgtcgatcgctgatgtttctgtgcgaggaatggacgggtcttctgtcaagactccttcaaggccaagggatatgtcggaccattctgccgtcacaattatgggtaagaggatagttgtaggacagagagatgatggacagcaataccagcataactttctgggaccaagtgctgaatcaagagtttttgcaagacccactcaatcttttgcacatactcctgattatagtgttctcagttatccatctcaacctgccatgccttttaccccagcgttctttgccccagggggcagtccatacttggtggatgcaaaaggtgcaccagtcataccaccgctgtcaggtctaagcctcggcatttctcatccatctttcaacaccagagcaacacagccctcatctaatgaactgagttacttccatcctagcgtggatttcagttatggagtgtcatctgaaggcgcacgtagggaagcagggagctactggcccatgtcctaccagggtcagacaatgtttgtggatgaacgcatgaggaatgtatcacaggatggtacttctgggttggtgctgaagcgaaaagagccagagtcaggttgggatttgtacccacgtcgttgagcgtgagcctgaaggtttgttgcagtcgcaatcgattttgtcccactctcttaaaaaggatatgttcaatgctccgtttatggcggcaccttggacattgtattttagggtatttctttggcacgggcccagttctactaggtctgaagacatacacggagaactgaataagagatcagctacaggtagatttgacagatgttgacatggcaaggacattgttagctgctggaaaccacctcgtgtagatctggttctttgtgaatgtattagctttgttttagttgacataatatagccaaattgctctctagggagctaaattatgtaaatcatcatcgtataactcatagatgaaatgcatccctttttatctatctttatttttccagt

SEQ ID NO: 12062 - DNA, 1080 bp, Zea mays
  Clone ID: 701158611_FLI
actcaacactgcagaaatcagattcggagcttcggggggaaaaggcaggcacagtatcgtcgaccatgctgccaggtcgccacccggcgcgccgggccgacgccaccgggacggggccgctcctgccggacgccactcgcgcggtggtggcggagttcgtcgccacagccatgttcgtgttcgccgccgaaggctccgtctacggcctctggaagctgtacaaggacacggcaacgccgggcggcctgctcgcggtggccatcgcgcacacgctggcgctggtggccgcggtggcggtagcgagcaacgcgtcgggtgggcacgtcaaccctgcggtcacgttcggcctgctcgtgggccgtcgcatctctttcggccgtgccgcggtatactggctcgcgcagatgctcggcgccgtggtcgcgtcgttgctgctaacgctcgtctccggcggcacggcagatcgagaagttggagaaagaaatattggtattgctatgtaagctagaaaaaatatttccaccgggattcttcaatccaatgtggcatctacttattcacattcaatgtggcaaaggttggtggacctgtacaatataggtggatgtatcacattgaatgtgcactcaaaacctatgacccatggttcgaaataaggctagagtaaaaggatgcatcgccgaaacttttttgctaaaggaggtttcatactttatgaatgtgtatttcgcaaaagaacacaatgtctatgcttctacgatgcgatacaatgtcgatgaggaacctcctatcagtgatctcaacattttccaagggagaggcacaactactagtaaatgcatgttctaccaccttagcatggatgaatgaatggccgcattactatacatattctcgaatatggaagcgatagagctatatttcatgtgagtctttcttttgccccataatttctttggcattgctagataaggactttaattacttatttgtcgtacagtaatttcgactaggataattgaacacattcccatcagcctacaagcaaacaattaaatacgatgtgatggcatgggagac

SEQ ID NO: 12063 - DNA, 565 bp, Zea mays
  Clone ID: 701158624_FLI
ggcggccgtgatgacgagggacgagacgtcggtggcgatgccgacgtcgttcatgaccgggtctgtggtcggtaagcgcttctaccgcgacgccaccgtacggcgcgccgacgatggcaatgggtggaccgtgatgctggactaccgcacgctcaagtcgccggccaagcgggtcctcaagctgccctcgcgcgccctcgccatggccatcgccgccgagtgggagtaccaggaatcagatggaattcgacctttcacaatgcctcttatgaagcttgcttgcactgcattggagagagttcctttgacacgcagaaaagtgattgacaatttgatgaagaaatttcatcaagatttggtattttgccgctcacctgctgatagtgaactgaccattggagttcatcaaaagcagaaggagaaaatcgatccgattctggagtgggtagacactgaatttgggttcaaacccgttgtctacacaagcttctttggggggaagcaagacgagggccttgctaaagctgtagaaactgttctgaagaaagcaactgactgtgagttg

SEQ ID NO: 12064 - DNA, 372 bp, Zea mays
  Clone ID: 701158657_FLI
ttccaatcccaccccgcccccttccaagaactctagtatcaaccaaccgtccaacaaaagcaggagtcgcatcccagatcccccgcgcatcagagacaggcagggagggaaccgagatccgtccgtccgtccgtgtcgatggagtcaacggtggagcggataagctcgtcggtgcagtcctgggtgaaggaccacgagctcgcagccatcggaggcgtgtgggctgcggcggtgggcgcttcggtggcgtacagccggaggaaggcgccgcagcggggcacgggcctgcgcctcatccacgccaggatgcacgcgcaggcgctcacgctcgccgtcctcggcggcgccgccctcttccactgctacggcgac

SEQ ID NO: 12065 - DNA, 108 bp, Zea mays
  Clone ID: 701158693_FLI
aagtgatgtgaaggttaagtttcagctttgctattgctattgtggcttgtgcatcagcggtttgctcgttgactgttatggaaataagcattggtgaaggtattgtcc

SEQ ID NO: 12066 - DNA, 513 bp, Zea mays
  Clone ID: 701158755_FLI
gttgtacagatcagctgatactactaatcaaagaatacattttgatattgagccctgcggtagacatctagccactggtgggcaggatggcatggtccatgtatatgaccttcaaggtggtcaatgggtaaccggctaccaagcagcagctgatactgtaaacgggttctcgttccatccataccttccatttgctgtaacatcatccgggcacagaagatttggcatgcaagatgagtttgaagacgagttaaacttggcaggtgatgagaacagctgctctgtctggatgttttcttcctcacaagaagcttgaagcatttagtgaaaatattggatcaggctgaagctaagcgaagcattggatgcacattcaaatctattgtcactttgatgttcgtgtgcagagagcatcgcggcattgaccacttcctgttgtgttggctgtaattggtgtctgcaaaatgcaaatgtattcactgagatctatagaattaatgacttatttttttg

SEQ ID NO: 12067 - DNA, 527 bp, Zea mays
  Clone ID: 701158775_FLI
gcttgttcgctgcggcttgctgcggctgcaatccggctgcggcttctacagtatttttctctctatggattgcagctgcagcaatccaaacagctgcaacagtgtcggcttgcagccagccgaacacgcccataagcgatagcgtgcatcccggctggtacatgtaaagtctgtaactgtcagtttggcaatctcttcttgatctactcccctgagttttacaaccttttgccgattctttactgggagttgcaattccaccatgtgccacatcctttgtccactcttcacccatttagtgctgtgaaaaaaaaggttcaagtagctgtagcatggtataacaggtgtgtgtgtgtgggaattccatattagctcttagatttagtgtttccttcgtcattgacatgctgtggaacggagagccagaattacaggactggctgccagctgggtgcccgtcacttgttgcttgcttcagttatctttgggaaaagatactctgaaagaattaggagttgtccctcgcc

SEQ ID NO: 12068 - DNA, 621 bp, Zea mays
  Clone ID: 701158805_FLI
cggctcagtcgtcttcaccgccgcatctgatgagcacaggctgctcaccggagtctactacatccccgcgtcgaggaactctatcattagcttgggacagctgaatgagaacggttcgcgcgtggaggtcgagcacggagtcatgaggatctgggacccctctcgtcgccttcttgccaaggtacgcaggggtccaaatcggctatacatcctcaatgtgaaggtggcacaaccttgctgctcgtcgagacgacgtggcatggcagtggcacgagcgcttcgggcaccttaacttcgaggccctgaagcggctcagtgccaaggagatggtacgaggcctgccgtgccttgaccatgtggagcaattctgcgatgtctgcatgttgacaaagcagagacgactcccctttccccagcagtcaagcttccgagccaaggagaggctcgagctcgtgcatgggaacttgtgtggcccggtgacaccagccacaccaggaggacgacgctacttcttgctgctcgtcgacgatctctcccgctacatgtgggtgatgatccttggcagcaagggagaggctgcgaacgccatcaggcgtgtgcaggtcgctgcggaggcggagt

SEQ ID NO: 12069 - DNA, 961 bp, Zea mays
  Clone ID: 701158817_FLI
tatagctgcaaaaaaagctgttgttaactacagtactgagaacttagatgctccaattttatccatagaggaggctgttaaaaggtgcagttatttcgaaaccccgccgtttcttcttcccctgaaaattggtgatttctcaaaaggaatggcagaagcagatcagaaaatctattctgaggttaaactcaattctcagtactacttttacatggaaacacaagctgctctggcaatacccgatgaggataactgcatggtagtgtatagctcaagccaatgccctgagacagcacagaatgtcattgcaaagtgccttggtttaccttgtcacaacgttcgtgttattaccagaagagttggtggtggatttggaggaaaggctgttagatcattacctgtggcaactgcttgtgcacttgcagcatttaagttgcaccgtcctgtccgtatgtatcttgaccgcaagactgacatgatagtgactggaggtcggcatcccatgaaaatatgctattcagtgggattcaaaccagatgggaaaatcactgctttgcatataggtttgttcataaatgcaggaatgacaaaagatattagcctcataatccctcataatttcattgaggcactgaagaaatataattggggtgccttttcttatgaagcaaaggtctgcagaacaaaccttgctacaaagtctgcgatgcgggggcctggagaagtacaaggttcttatgttgccgaagctataattgagcatgttgcttccacgctctccgctgatgctaatttggttagacgtaaaaatcttcacacggttgagagccttgctttgtttcacagtgagtgcactgaagatgccatgggttatacacttcactctatatgtgatcaagtgactgcatcagaaaactatcagcatcggcttgaaataatccagtctttcaacaaaaacaac

SEQ ID NO: 12070 - DNA, 805 bp, Zea mays
  Clone ID: 701158843_FLI
gcgaaatggcaagagcggcggctcctcctctgcaccggctgcccggtctggccttgctgtgtcttgccgtggcagtttgcttctcaggcggcgaaaacgccgcggcggcggcctggacgaggaagatagtcggcgttcacgagctcagggtgggggatttctccgtcaaggtcaccaactggggggcgactctcatgtccgtcatcctccccgactccaaagggaacttgggcgacgttgtgctcggctacgacaccgtcgctgaatacgtcaacggcaccgcctacttcggcggtctgatcggccgcgtggccaacagggtcgccggcgcgcggttcacgctggacgggaaagcctaccgcctctaccgcaacgacggcaacaactcgctccacggtggccaccgggggttcagcaaggtcgtatggacggtgaaggagcacgtcggcggcggtgactccccgtacatcacgctctactaccatagcttcgacggggagcaagggttccccggcgacctggacgtgtacgtgacgtaccgtctgtcgcgcccgtacgtgctgagcgtgcgcatgaacgccacggcgcggagcagggccaccccggtgaacctcgcgcaccacgcgtactggaacctcggcggccacggcagcgggcccgtcctcggcgaaacggtgcagctcttcgcgtcgcggtacacgccggtggacgccgcgctcgtgccgacgggcgcgctggcgcccgtggccggcacgccctacgacttccgcgcgccggcgcccgtgggggcgcgcctggcggacct

SEQ ID NO: 12071 - DNA, 855 bp, Zea mays
  Clone ID: 701158857_FLI
ggcgcagctgggcacggcggaggcggagctgtcggcggggaacttcaccgcggcggaggcggaggtggagtccgagtccttggcggcggtccagaccgtgctgtcggccgccctgaccaaccagtacacgtgcctggacggcttcgcggggccgtcggcatcggaggacggccgcgtccgtccctacatccagggccgcatgtaccacgtggcccacctcgtgtccaactccctggcgatgctgcggcgtctcccgcagcgccggcggcggcgccagggcagaggggcactggagctggaggggtacgggcgcgtgcggcgcgggttcccgtcgtgggtgtcgggggcggaccggaggcggctgcagcagcagcaggtggtcccggggccggacctgtggtggccaaggacgggagcggcaacttcacgacggtgggggaggcggtggcggcggcccccaacaacagcgagacgcggttcgtgatctacatcaaggcgggcggctacttcgagaacgtggaggtcgggagcgagaagacgaacctgatgttcgtcggcgacggcatgtggaggacggtgatcaaggccagccggaacgtggtcgacaactccaccaccttccgctccgccacgctagctgtggtcggcacggggttcctggcgcgcgacctgacggtggagaacgcggcggggccgagcaagcaccaggcggtggcgctgcgcgtgaacgccgacctgtccgccttctaccgctgcgcgttcgcggggtaccaggacacgctgtacgcgcactcgctgcgccaattctaccgcgactgcgacgtgtacggcaccgtcgacttcgtgttcggcgac

SEQ ID NO: 12072 - DNA, 985 bp, Zea mays
  Clone ID: 701158929_FLI
tcctcggctgctgcctcgaggtggaagtccccattctcgtctacgagttcgtcccgaacggcacgctgttcgacctcatccacggcgaccacggccagcgcgtctcgctggacacccgcctcaggatcgcctacgagtccgccgaggcgctggcctacctccactcctgcgcgtccccgccgatcctccacggcgacgtcaagtccaccaacatcctcctagacggcgactacgcggccaaggtctccgacttcggcgcgtccattctggcgccgaacgacaagtcgcagttcgtcaccgttgtgcaaggcacgtgcgggtaccttgacccggagtacatgcagacgtacgagttgacggacaagagcgatgtgtacagctttggggtcgttctcctggagctgctcacgggcaagaaggcgttcgacctccaagggtctgagcaggacaggagtctctccatgaggttcttgtacgcgatgaaggagaacaggcttgaggacatcctagacgatcagatcaagaacagtgagagcatcgagtaccttgaggagatcgcagagctggcgagacagtgcttagagatgagtggtgtgaataggccgacgatgaaggaggttgcagataagcttggtaggttgaggaagatcatgaagcatccatgggcacatgaggatcctgaagaattggacaggttgcttggagagccgtctactacaactaactcgaccgctactactgggaatttcatcattgcaattggagagccgtctacagccaactccaccgctaacactgggaatttcagcattacaaagagagctgccatgggcttggaatcaggacgttagctactgtaaatgaaattatatttacctcattccatatgtatataacagatagagactgtacattttcttggcggtacaattccagttttacattaccaacatgaataaaacaaagacgcaaagctttctctgag

SEQ ID NO: 12073 - DNA, 691 bp, Zea mays
  Clone ID: 701158984_FLI
gtttcgtcatatatataggggtcagcctcgtaggcatctcttgactactggatggagttcatttgtcaataaaaagaaactggtttcaggggatgctgtgttatttctccgaggtgatgacggtgaactaaggctgggtgtgcggagggctattcagcttaaaaatgaggccctttttgaagatttcaatagtgacagcacaaagcggcattctttgacggctgtagctgattccttgaagaacagaagtgtttttcacatttcttacaatccaagagctactgcttcagaatatattattccatacgctaagttcctgaagagcctcaatcatccagtctgtattggagcaaggatcaactttcagtgccataatgaagatgttagtgaaaggcgatctggagtggttgttcgcattagtgaaatagatcccatgaaatggcctggctcgaagtggagaagcctgctggtaagatgggaggacggtgctgaatgtaatggccaagatagagtatctccatgggaaatcgagatagctggtggttctgtctctgtttctcattccctttctgcatctagttctaaaagaaccaagttgtgtcctcagggaaatttggacgttccagcaatgtgtaagctctcatagcacaagactaatgcctgtatatgtatgctgctatccttttacctc

SEQ ID NO: 12074 - DNA, 129 bp, Zea mays
  Clone ID: 701158985_FLI
gaaataagagcagcatcctagtgcttcactttgcagctgtaactggtgtttgcctcaggatttttgctcctccctgctatggattgagcttaaaattctctataataaccttacagataaagctttatc

SEQ ID NO: 12075 - DNA, 589 bp, Zea mays
  Clone ID: 701158987_FLI
gcaaaaccctccctgctcagactcgtctgctgcagctcctcctccgccgccgtatcaaacgcactctccttcgccgccgtatcaaacgcactctcctccgccgccgcccgaggcaagatggttctccagaacgacatcgaccttctcaacccgccggcagagctcgagaagctcaagcacaagaagaagcgcctcgtccagtcccccaactcattcttcatggatgtcaagtgccagggatgcttcagcataaccacggttttcagccactcccagactgttgttgtgtgcccaggctgccaaactgttctctgccagcccacgggaggaaaggcgaggctcacggagggctgctctttccgccggaagggagactagagcgagtctgttattagtactggatcggttgtcaatctccagtatgtggtcttcaagtttttgctctgtgcccagacgttaaggtcatgaactaccttagctaaggctttccgcatgttgttctattgctgctatgtatctcacgttggttattgctgaacttatagcttgtttggttcggattatgataaaccaaatggatatttgaatt

SEQ ID NO: 12076 - DNA, 813 bp, Zea mays
  Clone ID: 701158990_FLI
cttgtatggttcagttggatttgtctgtggcataattggtcaaggaattgctaatatgataatgactgccaaaaggtaatagtgtgccattattcgtgcttctgcacatcaaaatctctatctgctattaattaaatgactaagttcatagttgattacttcccattttggtgttttgttgatccgatcacactattgtattctttggcacatagatttataggtttcctattaatattgtgtctgcttcacccatgctcagtaatgctgattaatctttattttttccctgctatcttgacttgtatactgatgtttgttccttgttcaggagtgtcaaaaaatcagatgaagatattcctgttccaccacttgttaaaagtgcagctctatggggtgtgttcctcgctgtatcatctaacacacgctaccagatcatcaatggcctggagcgggtagtggaggcatcgcctgtcgcaagacgtgttccccctgttgctatggcttttacggttggggttcgttttgccaacaatatctacggtggaatgcagttcgtggattgggctcggtggagcggcgttcagtaatgggctcttggttgcagttaccaaaacatcaatacattgtacgttcaaatcttagttgcagtaatcgttcaggtggatccgtgttgttttctcgttacatttcctggtaagtagcggaggctggggcagagctctatgaagttttaactcatttactatgagaaacaaggaagtacttcgcatcatatggcatttatattgctgctcctaattgatcatgtgc

SEQ ID NO: 12077 - DNA, 856 bp, Zea mays
  Clone ID: 701158994_FLI
gtagggttggctcgggtgagtggtgtggctcgccctccaggggcggaggcagcccttattttggggtcagctgaccccgcttcgctactgtcgccctctcatgaggcttgtcaccatgagccgcatgccgatcctgcagcagctgcacctggaggagcagctcctgcgacgcacatcagacaactggtgtattatcaacgatggcacggcccctgctaccatcgttatgggcgtgtctgggagagtctcggagcttgtcaatatacagctggtcctccgggacaaggtgccgattgtgaggaggttcagtggaggtggcaccgtcattgttgatcagggaacggtgtttgtgactttcatttgcaacaagaatgttgttgctgggctgcagccctttccacgggacatcatgtcatggagtggtcagttatatggcaaagtttttgacagatttggtgaatttcatctacgtgagaatggcaagaaaccacacagatttcttgtgccgcatgaaggagtacataccttcgcgatcagttttcaccgatggggtcattgctgccctgggagaacacttctcagttcagcccatggatctacaagcaattctttccggtgatgaagaatttgtgccttctacaaagctgctgtcacaacaatacctagaagaaattgtttcctccaaagaatcccttgaaattatagaaagctgaagcatgacctgatgaccatggttgtcgtttttgttgtgaaatgtgagcaattttattgtgaaatccgagcaattatcggcgagctgtgaattcattcaactttgagtccgacattatttcactgaaccacttacattgttttt

SEQ ID NO: 12078 - DNA, 628 bp, Zea mays
  Clone ID: 701159017_FLI
ctcggaggtccgggatgagctccggcggctgctcgacgtgcctcgaggtcatcttcgccgccatcctcccgccgctcggcgtcttcttccgctacggctgctgcagctccgagttcttcgtctccctcctcctgacgctgctgtgctacgtccccggcgtcgcgtactccctctacgtcatcctccggacgccgcccgagccgccgggcatcgacggggagcggccctacgacatgctcgcctgacggctttgcttgtacttgtacagctccacccaacaacaacaacgcgtaggcctgtgcaatgcaacacacactcgctgtatgtagtagctgtaggtagcaggtagcggctcaggacattcctgactgtgttctccagcgtcacgtacgtccctgttcctcgtcgcgtgtgatgactgtgcaattgttggtcattggtttgctgattctttcgatcagtttatcacgaacagtagggtgctgccgtgctggactgctgctcgtctgtttgccgatcacgcagcagttggtggtaattggcaactgatataaaatttatgcgtgtactcatgtataaatcccaaccagtaatgcggttggaattaaaagaaaggtattgtttggat

SEQ ID NO: 12079 - DNA, 625 bp, Zea mays
  Clone ID: 701159048_FLI
gcgatctagaacgagcaactcgaatagcagctccaacaaaagctcaacgcaccagcagcaatggcgtctcgccgtttcttctacgacgacccctacgactactactacacctccccgtaccactacgcctacccctattaccggtaccagcaccccgatccgtcccgcggcgtcggcgggttcttcccggccgccgcagaagccgcgccggaggcggtgaaggtggacccgcggcccagggtcgagtcttcgaggtcggtctccgttcccgtccgcttcgtcggttccgacccggagccggtgcgcggggcggccaggatgccaccggcggcggtgccgaggaagcgggcgccgtcggcggaagcggcggcggtgctgctgcaggccgcggtgcgcgggttcatggcgaggaagtcggtgcgtgctgttcgcgaggtggagcgtgaggcggcggaggtcggcgagaaggttgcgcgcgaggcggaggcgctgcgcggagacgcgagggcgcggatcgccgtcggggaggcgctgatgaagatgctgctgcggctcgatgcggtgcgcggcgcgcgggaataccggaagagggtcaccaagcgggtcctcgcgctgcaggatgctg

SEQ ID NO: 12080 - DNA, 1005 bp, Zea mays
  Clone ID: 701159078_FLI
gtgcaaaaaaaacccaaaaagggctaaaatccaaaaaagttgggtgcagcgatgggctactcgtcatcagattctctcgagcatcactcaaaccgctactgtactggcctcctgcaccagcatggacaccaatgctgtgattcaatgggcctggcatcaacaccgaagttgtcaagtatcagtggggccaagacagaaacctcatccatggacgcatcgatgaggacaagctcgtcacctgaagaggtcgacaggtctggtgagctcacggtgtccatcagcaatgcaagcgaccaggagagggagtgggtcgaggaagacgagcctggtgtatatatcacaatccgggctttacctggcgggaccagagagcttcgccgtgttcggttcagccgggagaagttcagcgagaggcatgccagactatggtgggaagagaaccgagcgaggatacacgaacaatacctctgagaagaaacgcccgagaccatcagcatcagaagcacagaaagctttccttcggttgagctgatggtacatctggcactaacacttctacatgcatttccagcttcattcaatgttttgatgaccgaagaggcgaaggggtcccgtttccggcattttacattctttcagtccttttgccgttttctcgtcagttttgaactggaaatgcgtgagcgactcatttagctcaaaaaggtctctcgttttgggggtggggtaatgtacgtctttcactgctgagcctgtagtttccactttccggcaaccaaaaggtctctcgtttttcatcaataatactacatatctacctgttgtttcccataggacaaaatagcatgtttgtgtcgttgggcactattttgctgttgtcactgtcttattgtactactcttccagacagcacaattatcaacacacaagttggtactgagtgcgccccaactcaaaaccactttgtgacgggttgattgtatcattaacgatagttggacgcac

SEQ ID NO: 12081 - DNA, 884 bp, Zea mays
  Clone ID: 701159095_FLI
attttgttggatgagaactggaatgctaaactgtcagactttggtttggctaggcatggaccagcagaaggtctgacccatgtctccacagcggtggtcgggactctaggctacgcagctccagagtacatgcagactgggcgcctgaccgcgaagagcgacatatggagctacggcgtcctcctgtacgagctgatcaccggccgccgccccatcgaccggaaccgcccaaagagcgagcagaagctcctggactgggtgaagccgtacatctcggacgtgaaacggttccccatcatcgtcgacccgcggctggaggggcactacaacctcaagtccatgacgaagctgtccagtgtggcgaaccggtgcctggtccggatgcccaagtcccgccccaagatgagcgaggtgtacgacatggtgcagaagatcgtggactgcgtggggaccggcccgccgcagcccccgctgctgcactaccacggctcggcctctgagcctggccctggcgacaagcgcgccaggaaagggtcggtgaagaggaggaggctctgggagctcaggttcggctgccggcacatcgtgtggcgcggctggaagcctgcgatcgtgaaggacctctgaggagggcggggtggctccggtgctgtaagtacagtagctagctagctgttcatagagacggtggtaacagtttgttccaccgtgtagtgcttggttggtatatagggtgagttcatgcttgcataataccagtcgagaagaagaagaagaaaggtgcacagttgagtggggtggcgttggagtggagtacatagagtagtgctgtgtgtaatttccagtgcaacttctgctgctggctttcttcgtctttgggacag

SEQ ID NO: 12082 - DNA, 817 bp, Zea mays
  Clone ID: 701159547_FLI
agcaaccgtactggacaccaaaaggaaaaccatagcaagggaccccaatggggaggctgcaacgccgtttgactttggctcgggttttatggatcccatcaaagctctcagcccagggatcatcttcgatacacatcctgaagactacaagtcattcttatgtgccataagccgcgatgaccactccgtgcatctaattaccggagacaatagtagctgcacccacagagcgtcctcttctgccactgctctgaactacccatcgatcaccattccgtatctgaagcagagctattcggtgatgcgaacaatgactaatgtgggcaatccaaggagtacttaccatgctgtggtgtcagctccgccaggaatcagcgtgagagtgacacctgaagttataaatttcaagaactatggtgaaaagaggacgttcacagttagcttacacgtggatgtgcctcctcgaggttacgtttttggctctttatcttggcatggaaatggaagtgatgctcgcgtgacgatgccgctggtagtgaaactacagacttctggcaaggcctgaccgagttgatcccctggaaagatgcttggaagaggttgctagaatgctagatcaggctacaaatctaggtggtagaactgaaatactgaacatatcagaagctaaccgcgatcaatctgtgaaaatatcatattaactatggtatttcatttgtaaatgtcttggctagaaggcaagcactcccagaacaagatttttttttctcctgatgattgttgtaaaattatttcgtgcctaaatgcaaatcttaag

SEQ ID NO: 12083 - DNA, 390 bp, Zea mays
  Clone ID: 701159568_FLI
ttgggtcggaaaaggccaaaaactcatcggcaacctccatctgaaaattctctcgcctgaacgtccaagcacaatcccgaaccctaaccagcgccccagctcgccgtcggcatgtccgccaggttgctccggcgagtcctccaggagcgtgaggccaccccgcaggacaccgacgtcgccgacgacgaccagtcggtggaggaggaggcttctcctccgcggtcctccgcgcggaacctcttcgatctcctcgacgacggaaacggcgacggcggcgaagaagatgaaaaggaagatgaaacagaaataattcaagctgtgagctatacagaacagagacattctgtgcaaaagaaagcgaacgctgttcccgaaacaaacaaaaaatcc

SEQ ID NO: 12084 - DNA, 572 bp, Zea mays
  Clone ID: 701159590_FLI
gtgatgggatgacatacgatgaaataaagaaaagtaaacctgaagaatatgaatcacgaagaaaagacaagctgaggtatcgttatccgagaggagaatcctatcttgacgtcattcaaagactagaacctgtgataattgaacttgaacgacagcgtgctccagttgtagtcatagctcaccaggctgtgttgagagcactttatgcatactttgcggacaaaccgcttgaggaagtcccaaatattgagatacctctacatacaataattgagatacaaatgggtgttgctggtgttcaagagaaacggtacaaactcatggatgcaatccatcccacagcggggttgtaagaaataataaatggagctcgccttctaaaagcaatggtagcacaaataaattttgtgatgatatacgtatcacaacattaatcaattagaagctatagttcgaggtggaatgtcacaccactaggtttagctcatagatgatttgccatttgacttacaagttttggctggttgtgtagtgtgtactcttaattcatgagttctgagcatgtttaattc

SEQ ID NO: 12085 - DNA, 1559 bp, Zea mays
  Clone ID: 701159674_FLI
tgctcattccgttgagcttccagataacatttcaggtgtgcttctgaagagagatttcgttgaacaggatgaatgcattggcagcaaccagcaggaacttcaagcaggcagctaagctgctgggcctcgactccaagctggagaagagcttgctcattccattcagggagatcaaggttgaatgcacaatcccaaaagatgatggaactttggcatcctatgttggatttagggttcaacatgataatgctaggggacctatgaagggtggaatcagataccaccatgaggttgatcctgatgaagttaatgccttggcacaattgatgacttggaaaacagcagtagctaacataccatatggaggagccaaaggtggtattggatgtagccctggagacctgagcatctctgagcttgagaggcttacccgagtttttactcagaaaatccatgacttgattggcatccatactgacgttccagctccagatatgggcaccaactcacagacaatggcatggatacttgacgaatactcaaagttccatggttactcacctgctgttgtgacaggaaagcctgtggacctcggaggatcattgggaagagacgccgctactggaaggggagttctgtttgctactgaagctttgcttgcagagcatggcaaaggcattgcaggccagcgtttcgtcatacagggattcggtaacgttggttcctgggcagctcagctgataagtgaagccggtggcaaggtgattgctatcagtgacgtcacaggcgccgtcaaaaacgtcgatggcctcgacatcgcgcagctagtgaagcactcggcggagaacaaggggatcaagggcttcaaggggggagacgccatcgctccagactcgttgctcactgaagagtgcgacgtcctcatcccagcagcgcttgggggagtcataaacaaggataatgctaacgacataaaggcaaagtacatcatcgaggctgccaatcaccccacagatccagaggcagacgagatcctgtcaaagaaaggcgtcctcatcctccccgacatactggccaactctggtggcgtcacagtgagctacttcgagtgggtacaaaacatccaggggttcatgtgggacgaagagaaggtaaacgcggagctgcggacgtacatgacgcgcgccttcggggacgtgaagcagatgtgccggagccacagctgcgacctccgcatgggcgccttcacgcttggcgtcaaccgcgtcgcgcgcgccaccgtcctcaggggatgggaagcatgacctccctccgtgtcgtccgtgtgcccctccctgttgtatcctcttggtcttgggcccttgtttttctttggttaattattgtcgagatcaacggagatccgagaaaaacgggctcagttaataattccaagaagtgcgtcttcttggagataaaatagcggaaggagagttataataagtctgtaactgtaacccatagctgagatgctgtctgcaagcagcaatgccaatgccaatgccatctggttttcgtgc

SEQ ID NO: 12086 - DNA, 711 bp, Zea mays
  Clone ID: 701159740_FLI
ctgctctgcacccaggaccttcggccacaggagctcagccctatccctcgacggtgctcgcggccggcgcgcggcggctcgacccttccccatctccagctccacgccgtctccaccgcctggaatccagggcctccgacgccaccccacctccaccgcctggaatcgaggaccgtcggcgccgccgacctccgtcccctgcctgctgcctcgactcaactgtgtcagggtatttgcaaacagtgacaaaggttctgccttgcttgctgtggagccatggctgcaaagatacgcgtggtgatgaagtcttttatgagccaaagcaaccaggtcgcagggcttctgccattcacaaagaaggtcggactacctgaatcgcgagccttgtacaccgtgctgcggtcgccgcatatcgataagaagtccagggaacagttctcgatgcatgtcaagaaacagtttgtggaactgacagccaaaccgcacgagctccacaagaagttcttctggctaaaacgcctgcgcatacctggggcccagtacgaggtacagatttctttcaagacacgcctggatatggcgagcctaaggtcccaggctccttgatggctcacgatgatcgttcttatcgtcccgcgaaagtttgaagtgctgagactggtactcagaacttgtatccatcaacatttcatatgaagacatgcttatttc

SEQ ID NO: 12087 - DNA, 739 bp, Zea mays
  Clone ID: 701159801_FLI
gcgcctccccaacgtcgcgccgctctccaagtgccgactccgcctcctcaagctcgagcgggtcaaggactacctcctcatggaggaggagttcgtcgccgcgcaggaacgcctccgtccccaggaagacaaggccgaggaggaccgatccaaggtcgacgacctccgcggcacccccatgagcgtcggatccctcgaggagattatcgacgagagccacgccatcgtctcctcctctgtcggacccgagtactatgtcagcatcctctcctttgtcgacaaggaccagctcgagccgggatgctccatcctcatgcacaataaggttctttctgtagttggtatattgcaagatgaagttgatcctatggtatctgtgatgaaagttgagaaagcacctttggaatcttatgctgacattggtggactagattcccagattcaagaaattaaagaggctgttgagcttcccttgactcatcctgagttgtatgaagacattgggatcaggccacccaagggagtcatattatatggcgaacctggaactggaaaaactctactcgccaaggctgttgccaattcaacatctgcgactttcttgcgtgttgtcggtagtgaacttattcaaaagtaccttggggatggtcccaagctagtcagagaattgtttagggtggctgatgaactttctccctcaatagtcttcattgatgagattgacgcagttggaacgaag

SEQ ID NO: 12088 - DNA, 791 bp, Zea mays
  Clone ID: 701159828_FLI
tggacgtcagcctagcaattagctcatcgactccagattggagaactcgacaccatgaaggtgctgatcgttgcccttgctctcctggcgctcgctgcgagcgccgcctccagtacaagcggcggctgtggctgccagacaccaccgtttcatctaccgcctccgttctatatgccgcctccgttctatctgccgccgcagcagcagccgcagccatggcaataccccactcaaccaccgcagctaagcccgtgccagcagttcggatcctgcggcgtcggcagcgtcggcagcccgttcctgggccagtgcgtcgagttcctgaggcaccagtgcagcccggcggcgacgccctacggctcgccacagtgccaggcgctgcagcagcagtgctgccaccagatcaggcaggtggagccgctgcaccggtaccaggcgacatacggtgtggtcctgcagtccttcctgcagcagcagccgcagggcgagctcgcggcgctgatggcggcccaggtagcgcagcagctgacggcgatgtgcggcctgcagctgcagcagccaggtccctgcccttgcaacgcagctgccggcggtgtctactactgaggaaactatgtactgtagtaataatgtaatggagccgctgactagctacctagctcgctagtttactcatttagcggcgatgagtaacgtagtgtcacccatcaccatgggtggcagtgtgagcaatgacctgaatgaaccattgaaatggaaaggaataatatataaggaaaaaagatgattgg

SEQ ID NO: 12089 - DNA, 1385 bp, Zea mays
  Clone ID: 701159841_FLI
caaatttattgagaagtgcaatagtggagcttcgaaaatgttggcaaagatcaaggtagcgaagaagattagagccacactagctgtgcaaaatgagctgtctgaccctgacaatacaacgcaagatgtgccttttcgaataaatgaggactatggggaaactgtccctacaagttctcagcaacacatgaaacatggcacatataatgattgtcaggtgattttggtactatgattgttcatactgaagatggggacgaagtgacagaatcacccattttcccaagaacagaattcatacccggccttggtagcatcaattctttcacacatgatccaaagagagcagaacttatttcaagtttttgggcggagaacataggtgatagtgatgccaataaagaccgagatacagattatggtcctgacatgcaggaatcaaaagtgatctcacctttaactggaacagtgaagaagaatattggtgcagaagggactataaggtgccatgataatcaaattaacttgtcaccaggacttgcaaacacaacaactaaattgaacaacagcccaagccgtaaagcgttttcagttcaggataagctctggtcaatttatgctgccggcaacactgtaccaataccatttcttaaggcaattgacatttcaccactagctctagtatcagaaaatgaatcaggaaatggcctggctgggtcaagtacaaatgatgctttggaggcagttagggagctgttcagtggtgatgggcaggcaaagaaaggacggaaagggcaaaacgaagtccctcttcctccgggtgtgcatcacaggctgacgacaagccccacattgatgaacctggcccaagctctagcttatcataaaacgtgctatgaggacatgccgctacaagattcacaagcgacgcaagagcagcaaacgatacaaaatctttgtgacacacttcgcacaatactgaggttgtagatctgcaagagtgaaggctgcaacctttggagttccgaagcctgcatggagccaagggtgaacgtggcactgatcctgctcgtggtggagaactgaggatcgaaggaacgcatgacatgtgcctaccgtggagcaggcctaatggcttctgcgttttagcctgtggacgctttggtcactggaagctgggttgacacaggaatctctacggaagtggaaatttctgtccctgttaatagcctcttggagtttcactatgtagagacggcatcaaattttgctaatcagattttgtggcactaacgcatattgtagcctggttttgtatcgttgtcaatgcatttgttctccaaataaagagaaatagttaagcagaaataaacgaaaagttattt

SEQ ID NO: 12090 - DNA, 1398 bp, Zea mays
  Clone ID: 701160303_FLI
gtcgggcgccgacctcgccgacgtcctccgctaccacgtcctcctcgagtacctctcccacgccgacctacgccgtctgcccgcctccgggaagctggtgaccacgctgttccagacgaccggccgcgccaccgcggacctaggcgccgtcaacgtcaccacagcgggcgcctcccgcctcaccgtcatccggtcgccggcaccgttcccgggctcgaacgccaccgtcctcggcgccatcaccgcggtgccgtacaacctgagcgtgctggcggtgagcggcctcatcgcgccctccgggttcgacctcgcggcgtccgagtcccagccgcccgcggccgtgaacatcacccgcgtcctcgccgacgcgcgcgccttcaacgtggcggcgtccatgctggaggcgtcgggcgtggcggccgagttcgaggacgacgagcgcggggccgggatcacggtgttcgcgccgaccgacgacgccttcgcgggcctcccggcgggggaccggctccagtcgctccccgccgaccgcaaggccgtggtgctccgcttccacgtgctccactcctactacccgctggggtcgctggagtcgatcgtgaaccccgtccagcccacgctggccaccgagttcagcaacgccggccgcttcaccctcaacatcacccgcgccaacggctccgtggccatcgacaccggcgtcgtgcaggccaccatcacgcggaccgtgttcgaccagaaccctgtcgccgtcttcgccgtatccaaggttctcctccccaaggagatgttcacccgcacagccgccgcctccatcgtggccaccaccgcctccgcgtcctcccccccaccagccgcgacagccccggaggcctccgagagcgcgcggacgccgccgacaaagctgtcctccccacccgcgctccgcggcggcgggcaggactacgccacggcgccggcgccggcgcgagggatcgagtggtggtgtatagcattggtgtatctactcccacatctggtatgagatccgggactccgtcagtccaccgctgttctcaatttttgccttctgttttctcttctctcttctttttcttatgtgggttttgcaagaatctgtacaatgttgactctgtgaggtgaggtgaggcctgagggaggtgaagaaggagaagaagaagattcagctgcgaaaacaaagaaaatgcagcgaccttttaagcaagaagaaacagaattggttattgttggccatcatcaaaggggaaataacagtaccgccctgtaaaaatccaatcaaatccattgcatccgacaattgctttaccatactcgtgtctcgtgtgtgctacattgcagttgcttcagccagctccatttttgccctgtcgatttgct

SEQ ID NO: 12091 - DNA, 737 bp, Zea mays
  Clone ID: 701160310_FLI
ccgagcctcagttcgcatccacgcgcgccgccgccgcctcgccggtcgacgctcaccgcgcagccatggcggaacagactgagaaggctttcctcaagcagccaaaggttttcctcagctcaaagaaatctggcaagggtaagaagcctggcaagggcggcaaccgattctggaagagcattggccttggcttcaagactcccagggaagcaatcgaagggacctacattgacaagaaatgcccattcactggaactgtttctatcagaggcagaattattgctgggacatgccacagtgctaagatgaacagaactatcattgttcgcaggaactacctccactttgtaaagaaataccagaggtatgagaagaggcactccaacattcctgctcacatctctccatgcttccgtgtgaaggaaggtgaccatgtcatcattggccagtgcaggcccctgtcaaaaactgtgaggttcaatgtcgttaaagtcattccagctggatccgcagctgctggaaagaaggccttcacagcagcctgagtttatagactatgttccatgagtagtctatagaatgatgtctttttaattcaaaagaaatctctcttctaggctggtgcttttcgactataatttggagattgttccaatgtccgtgcaatcatctgaacatgttactacttattgtaccttgtcgtgcaaagttttgctaagatctctattgtttcatgt

SEQ ID NO: 12092 - DNA, 565 bp, Zea mays
  Clone ID: 701160317_FLI
cagaaactgctcgtacgatctcaagaacgccgcctccccggttcccgcaccccgtcgccgcgccggtagtctgcccgtcgccgtctcctcctccaggtgaagccgaaggtgaagcagcaggatgggtcggaaggccggtgctttgtacataaacccaaagaagtttggtgctatggcgaagccctgcatgccagaaatggtggccttcctcaactgtctggccttaaacaaacagaacgatgacaagtgtatcaagcagaaagatcttttggttgcatgctctcaggctcagaatgggaggccaaagaacgcagccaagaccatcaattaccatctccagcgacttgggcgaggcaagttcctctagtcgctgtgtgagatcatttcctcatccagctttatgccttgtaccgaagtagaattgctgaaatggggcattaatgtgtttgcttagattggacaatggtcagcaaataattttatgtcaaacagtaatgtatgagcagtatattgatactgttttcttctcatcctatgaaggcacattacagttacgttttccatc

SEQ ID NO: 12093 - DNA, 456 bp, Zea mays
  Clone ID: 701160320_FLI
tcccttcccgtcccctacccgcgccgcgcgttctaatttggaccagacggctccagaagcttccgccattgacctaacctaacaaccgtgtcgctttatttatcgaaccaagcccagcggcccagcccctcgtctccgcccagatccacgcgtttcggagttctagctgcgtttattgaccgctcattctctccaaggcatttttcccctcgtcctccctgcgatttcgcgacctccatccaatccctctgcacggagaatcgtctaatggcggaggagggctacaaggtgacgctgaacgtgtacgacctcagcaacggcctcgcgcggcagctgtccacctccttcctcggcaagcccattgaggccatctggcacacgggagtggtggtgtacgggaacgagtactacttcggcggcgggatccagtcgtcccccgcggggacgacgccgtac

SEQ ID NO: 12094 - DNA, 411 bp, Zea mays
  Clone ID: 701160329_FLI
gatgagttcgctcgggcttcggctccggcttcggcgacctggagcgaggagttcggagatgcagtcttccagcgctcaagcagttttcgacttcgtctcaccgcttcccgcaggattcatcaatgcgagtaccggcagaacagtttcttacacttaggccacttggtgctccaccgatcatagtgccgcttgcggcttagggtgcatttcgtggattccgggatacaatgacaccattgtatgctgtgtgtatgtctttgccacttcattttgacaaaatattgtaacacataacactattttttcccatctagaattgcttacaccttgctatttaaacggatattattttgttgtaaataacttttgtttttttattcaagctactcaatgtaattgattcgaaatgtg

SEQ ID NO: 12095 - DNA, 470 bp, Zea mays
  Clone ID: 701160334_FLI
gtcaggtcagcctccctctccggatcccccatctgctccgccgccggccaacgcatcgctccccttggcagccaggatgacagaagcaccatttctgccacgtgagaggctcttcaagctgcaacatcatttccagaacatgaccaagcacacctacctgaaagggcgctacgatgtgatcacctccgttgccatccctcttgcacttgctgcctccagcatgttcatgattgggcgtggagtttacaacatgtctcatggaattgggaaaaaggagtgatctaccacgggttaactagtttttctacttggcatggaagtaccatccagactatgaagtcttctttgcttgctaaataatactgtcaaagaacaagtcgactacatttttgcatcatatttctgtttgtatttgtggatatgaaatgccatcaacttgaagatcagcattgttactattttggttaatt

SEQ ID NO: 12096 - DNA, 405 bp, Zea mays
  Clone ID: 701160335_FLI
gctaagatcaagtgtagtatctgttcttatcagtttaatatctgatatgtgggtcatgtgcctacttcgatattaaatttattttttgtgggagagggtccattactaatggcttgccattaggggccctcacgcgtcgtccagctgttgcactgctggccggacgtggcgcaccccaaccaagacaaattgcaatttctctgtttgggaactcttcggtgccatgaggctggtctcggcgaattaaagcaactggagtggttctggttctgttagatatattatgtgggttatgagctattgtcatgtgtagtagatgagcatgtgggcttgaggagatataaatataggctgagtcatctgtaaaagtcatcaaacaacagaatacaaaatatcaattcactg

SEQ ID NO: 12097 - DNA, 822 bp, Zea mays
  Clone ID: 701160336_FLI
gttacacgcgcctatatcgccggttcggccgcacgtccgcctcctcctctcctcccctcttctcactcagctcaccagtgctcgctcacctttcccctccctttcctttcctttgctttcctatccttgtgccctcgaatcggaaacccagccagccatgtcgtactacggcgaccggcgcgcggagtcgtcgatcgtggaggcgttcacgctgtcgccgctgccgtacccggtgatcctggtgctgctgatggtgacgctgctgctgggcgcctcgtggttcttcacgtacgacgacttcatcgaggaggcgtcgcagcagctgagctgggcgctgctgggcgtgcccatcgcgctcgtcctcctcatccgctggatctcctccgtcgactccttcgagggctacctgggcttctacccgagggagagccgctggaagggccgctacgagcggggccccgccgagggcagctcgccctggggcgtcgccttgctcgtcctcctactcctcgtgctcgccagcttccactccaccatccacgacatgtgggggccgtgaacggccggatgtgggtcctgctcctgttcggttccacggatgtgcgcttgtgctactggttgctgcttgatcgatcgatgattccatgtacatatttgttagggggatgctgctgctagagtttgagggtgatatacttatcagtttgctgcctgtaagactggttttggttttgctataatcgtgatatattcagatgtacagtaccctctttgctttggttcccctgtattggaatttggaatttactggtggaaccgtcc

SEQ ID NO: 12098 - DNA, 416 bp, Zea mays
  Clone ID: 701160349_FLI
ccgctcgtctgtttgaaacgaaggaggaggtacgcacgccgctactgcaagctagctagcaagaagaggccgctagcaggggtttggcttggtttttggcggacgacatgagcacggccacgggcgtgcgggcggggcggcggttcacggtgggacggagcgaggacgccacgcacccggacaccatccgcgccgccatctccgagttcatcgccaccgccatcttcgtcttcgccgccgagggatccgtcctctcgctcgggaagatgtaccacgaccacagcacgatcagcacggcgggcgggctggtggcagtggcgctggcgcacgcgctgggtctggccgtggcggtggcggtggccgtcaacgtctcgggcgggcacgtgaacccggccgtcaccttcggcgcgctcgtc

SEQ ID NO: 12099 - DNA, 1286 bp, Zea mays
  Clone ID: 701160361_FLI
ggacctgaaaagggccacagtagaactacggaattgaattctcaggacttgctggagcaattgccagcactgcagcaattgttatatcgacttattggctgtcgagcagaaggagctgcaaaaaacaattatctggtgcaatatgctctagcccaggttcttaaagaaagcttcaaaatttattgtgcaataaatgatggaattatcaaccttattgacaagttctttgagatgccaaagcatgaagcactaaaagcccttgacgtttacaagagggctgtccaccaggctgggaacctatctgacttctatgaaagttgtcagggtttagagcttgcaagaaatttccagtttcccactttgagggagccaccacaaacattcctttcaaccatggaggagtatgtgaaggaggctccgcgtatgatgccagttgtagagccactggagcttcctgagcggcttcttctgacatacaaaccagaagaagaagttcatgataccgttccaattgtagcggagaaactgcaagttgttgaagaaattgctccagttccttcttcccaaatagctttgcctcccaagcctgagattgcagatactggtgatttactggggttaggtgattcaacccctactgtgttggcgatagaggagagcagtgctttggccttggccattcttccgacaggtattgataactcaacaacaactacacagcaagatagtggatttgatccaacaggatgggaacttgctcttgttactacaagcagcaatgcgactccactgtctatggagagtaatttgggtggtggatttgacaagctcacattggacagcctatacgatgatggaacctacaggcagatgcagcaacaacagctatacggatcagcccctcccaatccattcatggcaagcgatcccttcgccgtatcaaatcaagtagctcccccaccatcagttcaaatggcggccatggctccacagccccagcatttgcccatgatgattgaaccaaatcccttcggaccaccacagcagcatcacgcgggcgtcgctcctgcagcaaaccccttcctcgacgccgggttcggtgcgttcccggcagtaaatggaatgcatccacagaccaaccccttcggaggcgccgcacaacttctctagtcatatatactttgcaaagtttgcattacaattacatagaagatgtgcaatctgtagatacccacgcaacgatgcaagacaagcaattgacgtctgtggaatcgcttttctccgtc

SEQ ID NO: 12100 - DNA, 557 bp, Zea mays
  Clone ID: 701160381_FLI
gaaatatgctcattgtaattggtgcaatgagtgctggtggtagcggggtgattgaaatttgttcctgggtacccaataatggactgccagattggaagatcattggcacccgccgttccggaagctttgtgtacaattgtgctgtgatgagttgttgacataccagggctattacattatcaactgtacatcttgaccaaaaggaaggataaagaaggcaaattctgctgagtctgtttactccttgatgggtaacttctgcccacgggcattttaggctaagctgaaggtccgatagaacttctcatgtagcttcttacatgcctatgtctaatctcttcattttaattccatttggagggcctgcaattgatttctggaacgtggggcatgcagtgcagtattttagattaataatttggtgcaacctcaaaaattttgatcttccctgtgtatcttgatcaaagtttttttagctccagagaatagccttacattggcaaatcatttgcccatagattgtaagaaataaagaaaaaagaaatatctttgttgac

SEQ ID NO: 12101 - DNA, 1418 bp, Zea mays
  Clone ID: 701160382_FLI
gccgccacctatctcaacgaagctttttcttccctccggtgtggatccacactcttcatgcgcgggattgggttttggatctgctcctgtgttttcattatttgctggtttctctttttgatcggggatttgagatacgtatttggttgtggacgatgaagattgtatctattggtctcgttcgtcgtaactggcatctgattggattgccttgccgaccatcctgatatatcaccacccatattccgagtccgctgcctacagtcctcagtccccatcgagattttcttatctatttagcctttgttccatgatttactactattgttttctggccgatgattaaatcaaaaaaatagacaagcatatgtccgaatccatctatgtggataagcctaatcttctctatgaggtcggccacatcttctaggtttactgtttttttttcatttgatcttattttgattcatctaggggccgaagacgaaatatatggatgttatttttgtatgatacattttgattacaaaaccatttctgccttccttctgaggcccctcttcatttggatcttgttattttgtacgttgtgagtttattttgtgatctatataagtggttcatggcttctcctaaggtcgggtgatgagtaaatgtgcatagttcagatgatcaaccctagtggttttgattaccttgaataaatagtctttcgctcctaactgacgaccttatcaacgcccagtctttcttggattagataagtttcactttgctgtaagattttggtcgtcagaaaatgataaaaatttgcttgttttgaagtcttgcgagattttttttatttttccgcacatgcggaggaagtattgaaatgcacatgtaaagaggccccgagtttgatcctgaatactcgggctcctaaccttggtgtgcgagagtttaatctggcgattcactcttctttgagagcgcagatgcttcccatcgtgccctcactgtgaattgtcgcacaattacttaaaagcagccatattttcgtgtaaagaattgttttcgcttcgtttgattgtcagaatttggcagcaaagaattgaatcgatgttgaataccaaatcagtttggatattgaaatgggcttcaaatcaaattcttgtttggatggacaagaatttggtatgtaaaatcatagggaattttccaattccaaaggatgggctagacaacctttgaattccaagccctgaggagtacagaactgtgaactgcacgattggaaaaaggtcagccgattccacccaaaaggagtgcacggcctctgaattgtgcgcggccatggttactaaaatgaacagtagtgtggaattggattccaatgtattgctattcagaataaaacatcagcatttgcttcagcc

SEQ ID NO: 12102 - DNA, 733 bp, Zea mays
  Clone ID: 701160405_FLI
gctcgtctgcgcgcaggcggccaacgcgaacccgctctacggctactacaagtcaggctggaccgagttccagccgcaggtggccaggccgacgttcgcgtcagcgatccagatcggcgacccggtgtccgtcgaccgggccgtggtcgcgctcaaggcgacggacggcattgtcgaggaggccacggaggaagagctcatgaacgcgatgtcgctcgccgaccgcaccgggatgttcgcctgcccgcacaccggggtcgcgctcgccgccctgttcaagctcagggagcagcgcgtcatcgggacgaacgaccgcaccgtggtcgtcagcacggctcacggcctcaagttctcgcagtcgaagatcgactaccatgacagcaagatcgaggacatggcttgcaagtactccaacccgcctgtgagcgtgaaggccgactttggcgccgtcatggatgtgctgaagaagaggctcaagggcaagctctgagcgcctgtgcctggctaatgcaatcaactgattggaatgcagtggtttcgtcggtatcggggggtcttttaggcttcagaaattctgtctgggttaggctatctgtttgtggagtttagcaggagaatggatctctctcctgcaagactggcgctctctcttgtgctgctacgatgtgttaccatggataataagtgacctagttgctgttggattgaataatcatcactcgctcctttgtcc

SEQ ID NO: 12103 - DNA, 666 bp, Zea mays
  Clone ID: 701160431_FLI
gaacaaacatatgtcactggaatgccctgatgctactaccacctgtgttggcttcaatcattctatgtcagctacagtgtgctcacacttgctgttagtcatgacatgcttaaaaaaagtttgtcattgttgtaacccacctctcttatcttggtcctggtaagaggggtgcttgtatggaccatttcccctataatacctatgtgttcagaaaaaaagtcatgacaatactatttctgctttgtttgtggcaatgcattccacactgatttaggctactctactatgctcaagttcagtatagatgataaacaccttgcagatgttacatgtatttatttgttttcttttattgaactgggaggtaatgagaaacaaagagatggaagaaagccaaatagtgatgaataagaaaaagagaaggaagactgaaaacgggaaagctatatttagttggatggcaacatcatcaagggatgggctaagttttcaagttttaatacttctaggttggtgaattactgtaaaagaatattgttagtaacttcaagtcatcttgaatgtgatggtgattaattttgattcagtaaaaaaaattcctctggtcagttttgttatgaacttatgatgcatgtttgaaaagaaaataatggcctgtgcttatct

SEQ ID NO: 12104 - DNA, 270 bp, Zea mays
  Clone ID: 701160435_FLI
tcgagctacctagctagctgatccatatctcgatcatgtcagtggcttagcctaccgccggagacgaagctgctacatacggccggagaagaagacgtctctggtggctcatatcacagtcacaccgatgtgcatttcccttttacctctttgccgcatcttgttcccttcttttttttttctttatttattctgggtgtataaggggaatttgttttttgtcatttgtttcttgatagtagtaattcgttggccgagtgttattagtag

SEQ ID NO: 12105 - DNA, 787 bp, Zea mays
  Clone ID: 701160461_FLI
cgactccgagcctcgttccagctgaagcgagcgtccttcgccggatcgcggccaggcttggtgtgtccagctgggacttcaccgccggcgccggtccctgcgaccacggagactccggggtgcactgtgactgctccttctccaacggcaccgtctgccatgtcacagagatattcctcaaggggcagaacttctccggtgagctcccgcctgacttcgctgacctcccctacctcctccagctagatctaagcaggagcttgttccatggcggagtgcctcaccagtgggccaggatgaagttacaaggactgtcactgatggcgaatagattgtcagggccttttcccatggttctcacaaagatcacaaccctgactaacctgagcattgaaggcaatgagttctatgggccaatccctcctgaaattgggtatttaattagaatggaaaagctaatattatcaaccaatgagttcactggaccccttccagctgctctttcgctattcagtaatttaactgatttgaggatttctagcaccaatttttccggaaggatacctgatttttggggaaacttgaaaaggcttgacaaattgcaaatagaaggatctttcttagaagggccaattccctcgagcctatctgaattgaaaaacctttctgatctgaggattagtgacctgagaggtagtggttcatctttccctgatttaagtggaatgacatacatgaacaaattggtactaaggaactgttccatcagtggaagcatacccccata

SEQ ID NO: 12106 - DNA, 461 bp, Zea mays
  Clone ID: 701160493_FLI
cgagtggtggtgcgccgcgtggtgcgacgccgcgtgcgcctgcgacggcgtgaagtgcgtcgccataccggcggtggccgcagcagactcccagcaaagcacgcaaccacgcgagaatcacctcctcccgaacggcgcgctctttgcccaaacccggtcaaaatcctcccacgaaattcttcctccacgagacaccagctgcacaaccctgcccactaaatcctaacccaaaccaagcagcctagagatacaccggaccggaatcgaatctccgggtcctcgcgcggcggcacgacactagccaaacagagcaccagaaaggcgggatcttgaggactaaactaaaccagggccattttgctgtggtgcagcagcagaggctatgatgagggagccatcagatcatgcccgttggcgatcgatttgatgataagataaggggatttggcgtctgatttcgc

SEQ ID NO: 12107 - DNA, 598 bp, Zea mays
  Clone ID: 701160504_FLI
ggggcagggagatggagagagcggcccccgtgaggagctcccacacctcgacggctggcctgctcgcgtggcctcaccccgatggcgccgggtcgctgccagcacgccggcctaaccagccgacggaggaattcaggaatgtggtgtttggggggcagctcacggagggggccgacggcctcaacaagacgaagaggaagacgggctcctcgcccaaggggaaggagacaacagggaccgggatatccaaggccgagagcgccgtcgcaactgcctcccgtgatcgtcaggctagccagatcaccttttcccaggacgggaccgttcctaccaggaaggcaacctcagtggctggggtggcaaggcagcgtgagcttagccataccgtcgagagtgagggggacagtaagatgaagaggcaggtgtccagtacgaaatccaaggagctcagtggtcacgacatctttgccgatcacgaagatcccaagcccaacaggtcaaggagatcagactatggcagctctgctgctcagtcaccagtgaaaaatgcaaatgtgagctccttctcgtttggagaggccgacattgacagcacagt

SEQ ID NO: 12108 - DNA, 604 bp, Zea mays
  Clone ID: 701160511_FLI
gaacgacgcagcccaacccgttcccaccaaaccagcggcaccacccatggcttcggcggcggcgagatccggtctccggtcgctggcggtgcgcgccgccccgttgaggcgccgcatgtcctcctccgtccacgacgacgcctatgagacggccaagtgggagaagatcacctacgccgggatcgtgacctgcaccctcctggcggcgtacaacctgtccaagggccacccccacttcgatgagccgccggcgtacccatatctgcacatccgcaacaaggagttcccatggggccctgatggcttgtttgagacgaaggaccaccactgagccctgattagcacaccttcaggagctggtgcatgcttaaaagagttatatggttgtttcagtgattttgcttttcccttgagacctatttgctgcaacaagaaataagaatgaccaaactcttgtattgacagtgaagttttaactgtgttagctgttaccggcttgtctatttttctttgccgtccacgccatatatggtcacctgtaagttggtcttgcccggtgtcaggaaacggcatcacaattatcaaaagctgttattgtattctg

SEQ ID NO: 12109 - DNA, 577 bp, Zea mays
  Clone ID: 701160513_FLI
tggacgtgccggcggggacccagtccggcagggtgtgggggcgcacggggtgctccttcaacggcggcagcgggagctgccagacgggcgactgcggcggcgcactctcctgcacgctctcggggcagcctcccatgacgctggccgagttcaccatcggcggcggcggcagccaggacttctacgacatctcggtgatcgacggctacaacctggccatgctcttctcgtgcagcaccggcgtgaccctcaactgcggcgggcccagctgcccagacgcctacctgtttcccagcgacaacaccaagacccatgcctgcagcggcaacagcaactaccaggtcaccttctgcccgtgagatcgcgcgtgcgaggcaggcggcagtgtggccggacgacgatgcaatatgcaatgcatgctccagccaacttctttctttgcaaataataagtatgttgtttgtcctagtttgttattagtggagaaattaaaaaagtagacaatcgaataagacgatgatgttcaccccatagattatgtaacttcgatgagtttgatctatatatatgtgcttgc

SEQ ID NO: 12110 - DNA, 536 bp, Zea mays
  Clone ID: 701160522_FLI
gggacacacgcagatccgagctaaccaccgcagatccgagattatccagccggagcgaccttttcttttttcttttacacagcgggacagagaaaggagtcaggcagccaaagccacccaccgcttttaccgatcggcgttgccgccaccgctagcattgtcggcttcagctccatccaaatccaccgccagcaagcaagccggcgccatgggtctgccgatgaggagggagagggacgcggaggcggagctgaacctgccgccggggttccggttccaccccaccgacgacgagctggtggagcactacctgtgccgcaaggcggcggggcagcgcctccccgtgcccatcatcgccgaggtggacctgtacaggttcgacccctgggacctgccggagcgcgcgctcttcggggcccgcgagtggtacttcttcacgcccagggaccgcaagtaccccaacggctcccgccccaaccgcgccgccggcaacgggtactggaaggccaccggcgccgacaagcccgtcgcgccgc

SEQ ID NO: 12111 - DNA, 974 bp, Zea mays
  Clone ID: 701160529_FLI
gtggggtggccgccggtgagagtgtaccggaagaacgcgttccacgcggcggcggaggcgaggaggaccaggcggggcgagcagcagggaggaggaggcctgtacgtgaaggtgagcatggacggggcgccatacctccggaaggtggacctgcggacctacggcggctaccgtgagctgagggacgcgctggacgcgctcttcggctgcttctcctcctcggccgacggcggatgccagttcgccgtcgcctacgaggacaaggacggcgacctcatgctcgccggcgacgtgccatgggagtaagtagtaccgccgggcagcagcagcatctatatctatccatggataaaggaggaacaacaacacctgacctcacttgcgcactgctgtggaatctgcaggatgttcatctgttcttgcaagaagctcaggatcatgagggggtccgaagcaagataaccaagcaacgaggatgcaaggacctgttgtatgcatatgcatggaggccggccggactcatgctgtcatgcatgagagtttgagagaggagaagaagacgacctactggaactgaaggcggttgggtatacctgcatggggagggagcccacgcatgcacgcgcgcgtcgtcgtgttctacggccagctagccaccagaccggctgccggcccatatgcacaccacggagatggaggtgatggttcaaggatcacggcggcgtacgcgcgcgtcatcagtcacgccgtcctgtcatcagatgagatggaggggtgatgcatgagggcagtgctagctgtggacggctggctggacgtgcagatcggagcgagattgtactgtgcacgcacataagctttgtacagtggcatgtgctggtcatctgtaattttgatttttttccccctccttttgtaagtgagcaagtttgaggaaaaaatgtatgaatgaagaaaaggagaggggggatttc

SEQ ID NO: 12112 - DNA, 504 bp, Zea mays
  Clone ID: 701160564_FLI
gcagaattcctcgtttctttcaaaccgcaagaaaactaagcagcacataattaccatttctgccctccgtcccctctcaactccgtcgtcgcgacctgccgcgccgtcatcgccggcggcgaccagcacgtgcagtggaccagtcgcgaagcaaccgcgcagaagagaagggtaaaaacaggactgttggaagtcgagtcgagaagcaacagcaagcagcagcttggggggtaggtggggcaacgcagcagagatagtccaattcgccgccttgccggccactgacctcgccggcggcggggtcccctctgttggagccgacggatccgttgccccctcctatccgaacctgatccacccatggtactgttccggatcctttgcttgtctagccctttgctttcccaactactgctactagcttgtgtgctgggcgtgcttcgcttcgcctggctgctgattgaatcatatttcgctgggattcgcgactctgtattggttcag

SEQ ID NO: 12113 - DNA, 438 bp, Zea mays
  Clone ID: 701160566_FLI
gtcgtgggatcccagccaccgccgctagaagaagagctcggcgattcccaggtcccgcgagaagatgccgaagcagatccatgagattaaggacttcctcctcaccgcgaggaggaaggatgcccgctcagtgaagatcaagaggagcaaggatgttgtcaagttcaaggtgcgctgctccaagtacttgtacacgctctgcgtcttcgatgctgagaaggcaaacaagttgaagcaatctcttcccccaggtttgaccgtcgaggaggtctgattggatacatggcaacgccgggttgaactacccaagcttctttatcagtagcagagcatgctactcatgtacttttggaacctaagctattagacctgtcagtgttggatgtgtggatcttgcatttttgtggagaaataccaatttacctcgttcaaggatgc

SEQ ID NO: 12114 - DNA, 993 bp, Zea mays
  Clone ID: 701160612_FLI
tgctggacggcggcatcccgttcaacaaggcgtacgggatgacggcgttcgagtaccacggcacggactcgcgcttcaaccgcgtgttcaacgagggcatgaagaaccactcggtgatcatcaccaagaagctgctggacttctacacgggcttcgagggcgtgtcgacgctggtggacgtgggcggcggcgtgggcgccacgctgcacgccatcacgtcccgccacccgcacatctccggggtcaacttcgacctgccgcacgtcatctccgaggcgccgccgttccccggcgtgcgccacgtgggcggggacatgttcgcgtccgtgcccgccggcgacgccatcctcatgaagtggatcctccacgactggagcgacgcgcactgcgccacgctgctcaagaactgctacgacgcgctgccggaaaatggcaaggtcatcgtcgtcgagtgcgtgctgccggtcaacacggaggccacccccaaggcgcagggcgtcttccacgtcgacatgatcatgctcgcgcacaaccccggcggcaaggagcggtacgagcgcgagttccgcgagctcgcaaagggcgccggcttctccgggttcaaggccacctacatctacgccaacgcctgggccatcgagttcatcaagtgaaccaccgtcgccgcgatgagatggcatggctgccacatgctttgcttgcttggtcctcgtatcgtacgtcgccgtcgtcgtcttcttctggttattgcgctgctacctcgctgctctcgcgtatgcatgtacttttgcttaattttctttcttcatatcatgcactctggctggcctagactgcccccgatccatggtggccggtacgtcttgtcgagctcttgcatgtcgtggattctaaattcttcttctgcgtcgaattgtctctgccatgtgcgagtaataacaatcaaggttatacttacgatacaattacatggcggtttaattgctctctatt

SEQ ID NO: 12115 - DNA, 949 bp, Zea mays
  Clone ID: 701160683_FLI
caggtaatggagaaccctgctccgagtatcgtagtgccccccatcgccgcacctgtatcagcgaacttcagcagactcgccttccgcaacctgtacatccgacggacgggtccagacagcagggagatggtgactgtggagggaagaagaggctctagtgatcagacaggcgacatgaggctaaagggctccacgctccttaccgaaggagtggtgacggatggatccgatgaatgggcaatctacggcgggaccggagagtttgctatggcgagaggtgtcgtcaaaagaaggtaccttgccgatagggacggcgccgggaacactgacgagctcagcatgcaggttttctgcccggtgtttggctcatcacagcaaccaaacaagcaggactccaccatctctgtcaccaagattgggttatggggtggcgaaggagggtcggcgcaggacatcacgacgacggagccaccgcagcgcctgcacagcctcaccgttcgtgccagtgccgccgtcgactccatcgagttcacgtatactgacagaggtggccagaggcgcgccgctgggcgatggggtggacttggcggcaaccttcgaacgatcgatcttggcgacgccgaggatgtcagggaggtctcaggaacgtacggcacatttgaaggagccaccacgctgacctcgttcagaattctcaccagcagcaggacatgggggccatggggcgtcgagaacgggacgcgtttctgcatcaccgcgccggtcggcagcagcatcgtggggttctatggacgcgcgaccagcaggctcgtcgctgcgcttggtgtttacctgcgccgactttgatttgatctgaacagagcaggctacctactagcaattgcctgctcgatcaattatctttcgcaccctttattattaatataatctcgatcggtcatcgtactcc

SEQ ID NO: 12116 - DNA, 1453 bp, Zea mays
  Clone ID: 701160696_FLI
ccagtttagatatttggttaaatcccaagagagcgcttacagggacttctcatccaaagcaagtctgacttcaagcttgcgagaatgtcgacagtctccgaataaaatcttcgatcaactcgctgacgagtatagaacggagcttcactttctcttcatattaagtagaactccgcataaacagcgatgattcttgtcctagcctttcgctgagcacttgggacatcgactaggggattgcttctccacatcttttgggatgcttttgtcggcgcgaacaccagtcggagacagcacatggggactggcatcaagatgagacgacgaaacaacgacgaactagcaagctgagctacggcgagcgatgtcgacaacaaggccgaggcgatacaaatctggggctgctgcacgcacgacgcgacgacgaacgacgacaaccggtgaggtcagcgacgcgatgggaattaaagttgagcgagccgagagggcgcgctggtgagcaggaaacaagacacgcgacgaggctcgacgaggaaactcgacgcggaagtttgacgcgcacgcaaagccatcaccagcgacaacacgacgatggcgatataagcgaatgcgaatcggcgtgggccaaacaccggacaaccatggcagcgacttgggcgagatccgaactaaagcagcagcacacaggcaagcagggacggctggcgaacttcggtttaagcgaatggaacacgacacagggagctgttgcgcgcgtagggactcgacgacggacaacggacatggacgacgtgccgcgcggacgggcgagcagtacatgaactggacagaaccgagcgcgcaggctccacggcgaaccgagaaaccggctgcgcgcagggggcagaggaccgcgcgcgcagagcgagcagcaaggcgacggcgcgcaggaacgcggtaagcagggattaggggcgagctcggcacggcgcgtgaggagctccacggcgagcagaggggaggcatagtccgagctccggccaacagagagcgagagggagaagcttgcgcgcggcagagagagaacggagggacgcgactcaggaagatgctccatggcgagggcgagcagagaccaagcgccggccataggaaaaatcaggaggactgccgacgatcctggtggcggtctgcaagaccagcaacagcacccacagcagaaaggtgccgatcttgccgaccaccgccaagaagccgctcatgccgatgaggagaaagaggatcacggtgagctcgacaggaaccaggcagggaaggcgatagagagaggaacgcctgcgtgctgcaggaaggggaggaccccgccgtccatggaagaagctggaaccagggcgagctccacatcttagccagggagaacgagcagggcggctggttgtaggagatcggaagggaggaagacgccagggaagga

SEQ ID NO: 12117 - DNA, 940 bp, Zea mays
  Clone ID: 701160707_FLI
gccagcaggaggagtagcttcaggacattggaggagggacacatgcttggcccggtgggtgtcaaactgaagccggccaacttgctgatgcagcttatcacgtgtgggttcgtgtctgtgaaagaacaccgaggcttcgggttcatcccgacgtacaggcctcggtttacgcaggtcgagttcccttctccggtgttctccactcccgtggcgttgcggcaccttgacagaatcccttgcaatacaaaagcaactgggtcgacgagagctccggagccggaatgtttcagcgggagcttggttgttgagacgaagcagcaggacgagcccgggagagggatcgcctcactcaaacgctcgtcatcttacgacgaggatagagtgtacagagcagcacatcccaaaagcgacacggaaagctcctgtgagccaggtagtttcaggtgcctcccacagaccatcaggatcatatcgtgtaagcagtcgaggagtggaacagtactctccccccctgcctctgacgtgagaaacggctctagccaacaagaacacagtaccatgtcctcaccgctgggctcatcgaagagcgcgagcaacaggatggccgatccgtcgccgccgggcaaactgtcttgtgcgagagccgagtcgttgttccgcgaggagaaggacatgatcaagatcgaagaaaggcttccttctggagctcgggtcataatccagtccgcgccgttgtgtgaagaaagtgacgacagcagcgaatgaatcacactgtaagggtccgtgttgcatatgttttttttttttcttcttttgttctttttttcatttcgttttgctgagggatgatggcatctgcgtgcgtagcttttggagtagagggttcaaaggtattgattctgtaaaaccgtgtgaatgtgatagtccgggcgattttctc

SEQ ID NO: 12118 - DNA, 683 bp, Zea mays
  Clone ID: 701160722_FLI
agagagcataggtgatcgttttgaagaaaagaaagctgcccgaggactaggcgcatcgctgcagaggctcgggaagtaccgagaagcaatgagacagtacagcaaggttctggagctgtccaaggagacaggtgaagattccggctgcaccgaggcctacggtgccatagcggactgctacaccgagctgggcgacctggagcgagcggcgaaggtgtatgacaagtacatatcgaggctgcagcccggcgagtaagatgaaaacaacgagaagatggtggcgaggagcaaggacgccgccgccggcgtgatgaagcagcaggaacggcgcggcggcggatcagacgagtacggccacgcctgcgagtacggctgctgccaccacgtattccatggaggatgccagaagtgctgcccgccgccacccggcgctgcaggtggccgaccgcaggaggttaagaactagtagacgtctacacccgccggccggccgctgccatgcatgcatgacgccgggagtggaccggagctgtaccgtacgtaccactgcgccgcgctcgcgcgcgtgccaacaacgtacgtggcgagaataatcatcatctcctttaattttgttaaataacacgtacggctcggctgtagctaggtacgtaacagcttcccttaatatataccgtcggccg

SEQ ID NO: 12119 - DNA, 491 bp, Zea mays
  Clone ID: 701160724_FLI
gcggaattcacatcagccagggagaagcccgctgacagctgcaactgcaagccgccacgggctgagctgaggctgtgtcgatccatccgtattcaggaaaacaacgccaatcaatccagtccagaggaagggcgatggccgccgctaggatcgccgcctgcaccacctccgcccgcaccgccctcgccttggcagacgaccccgcgccgccggacacgctggacgtggtgcgccggcagcgccagctcctacgccgcgccgcggccctctgcctcgaccccatcgccgaggagtccgacggtggcatcgactctgcctccgacgtccactccttgggccggagccggagccggggccagaccgccgccacctccgcactgccggcgcgtccctgaggatctgaaccgtcaaagacgagaccttttccttcttgccataggagttgttggggacttgttcttaaatgctaagagttaagaacaaggcaacat

SEQ ID NO: 12120 - DNA, 779 bp, Zea mays
  Clone ID: 701160751_FLI
ctgcaatcctgcaccggcgcgaaagccccctcacggcctcacctccactccggtgatggccgcatctcctttacttctcagtgctcacgccgtccacggtccactagttgcatcggctagctcccgcataaagatccacaccacttgagcagcagctagctcaagggaaggagaaggctggaagtggaaagaagtgggttcttgcttgagctgagctcttgctgcccttggatctgtttgggagtggagaacgcagtatggggcgcggcaagatcaagatcaagaggatcgagaactctaccaaccggcaggtgaccttctccaagcgccggaccggactggtcaagaaggcacgggagatcggcgtgctctgcgacaccgaggtcggcgtcgtcatcttctccagcggcggcaagctctacgactactgctcgcccaggacctcgctgtccaggatcttggagaagtaccagaccaactccgggaagatactgtggggtgagaaacacaagaacctgagtgcagagatcgacagagtcaagaaggagaacgacaacatgcagattcagctcaggcatctgaaaggcgaggacctgaactccctacagcacagggagctgatcgctattgaagagggcctccagaatgggcagaccaacatgcgcgagaagcagatggactactggaggatgcacaagacgaatggaaagatgctggaggacgaacacaagatactgacttttaggatgcaccaacaggctgttgatctgagcggccgc

SEQ ID NO: 12121 - DNA, 1306 bp, Zea mays
  Clone ID: 701160780_FLI
cacaagcacaagcacaagcacaagcactctagcaatggcttctgaggttgtccgccctagcgacgccgagctactgcaggcacaagccgacatatggcggctcagcctctcctacctcacgcccctgtcactgaagtgcgccgtggtgcttggcatccctagggcgatctaccgccatggcggggctgcctcagccgctgagctgatcacggcgctgtctctcccctccgctaagctaccgttcctccgccgcctgctgcggctcctagccgcgtcgggcgtgttcaccgtcgacaggcagagcacggaggaggagaggtaccgcatcagccccgtctcctacctcctggtggaaggcatccctcacgaggaccacatgaaccacacctctttcgtgctcacctgcacctcgtcgcgctacatcgagccggcaatagggctggccgagtggttcaggaaggacacggccacgtcaccgttcgaggagctgcacggggcgactctgttccacgagagcatgggcagcctcgacgcagatttccacgacatggcgagcgacgccttggacacccacgacaacttcggcgtcgagatggcgctgcgggagttcagggacttgttcgaggggatccagtccatgacctactgctgcggtaactttggtgatgacaagggtgccagggccattgccaaggccttcccacacataaaatgcactgtgctggcccctcccaagatcattgccgccaaaccggctgatggagtgaagataaactatgtcgaaggtgacatgttcagtttcattccacctgctcaaactgtcgtgctaaagcttgtgctgcaccacctgaccgatgaggagtgcgtcaagctcctggctcaatgccggaaggcgattcctccacggaaggatggcgggaaagttataatcggtgacattatgattgaccactctgggcctatgctggaaactcagctcctgatggacatcggcatgatgaccatgacaaaaggacgacagcacgacgaaaaagaatggcgtcagctcttcaccaaagcagggttcagcgaatacaagattctcaaggaatttggaactcgtgttgccttcgaagtctatccgtgagatatatatttacatacatatgtatgcatatgggttgcgggctttggcatgacgatgtcataaataaatgaagagggtgggtgtgcttacagagtattcatggatggccatgcatctgagcgcatgcataatgtaattggatgctttcttaatattatcgttgggttgtatgtactttgt

SEQ ID NO: 12122 - DNA, 516 bp, Zea mays
  Clone ID: 701160796_FLI
cgtggacacagctgcccaatacggagtagagaaagaggtcggtagaggacttaaagctgcgatggagggcgggatcaacaggaaagatttgtttgtgacgtcgaagctatggtgcaccgagctggctcctgatagggttcggccagcactcgagaaaacactcaaggacttgcagctggattacctggatctctaccttatccactggcccttcaggctgaaagacggggcgcacatgcccccggaagccggggaggtgctggagttcgatatggaaggggtgtggagggagatggaaggcctcgtgaaagacgggctcgtcaaggatataggtgtctgcaattacacggtcgccaagctcaaccgcctgatgcggtcagcgaatgttccaccggcagtgtgccagatggaaatgcaccctgggtggaagaacgacaggatctttgaggcatgcaagaagcatgggatccatgttactgcttactctccgctaggttcttctctgacggacccagc

SEQ ID NO: 12123 - DNA, 371 bp, Zea mays
  Clone ID: 701160833_FLI
ccttgctaaccaaccacggcgccgcgcgcgcgcatcgccgtcgcaatggccgccgccgactcgtccaagcccgcgcgcgcggccacgctccccgcccgcacgctcctcctggcgctccccttcctctccctcctcctcctcttcctctacgtctactccaccacctcgtggcgccctgcatcaggcctccccgcaaccgccgcaacaacaacaacaacaaccgtcgccaccaccaccaccaccaccgtgccgctgaccccctcccctccgtccccgcacatccggatgcggcggtcccggtaccgttcctacgacgactacctccgccaccagctgaacaagacgctggacccgcggctccggcgggtgtg

SEQ ID NO: 12124 - DNA, 653 bp, Zea mays
  Clone ID: 701160857_FLI
gtttttccttttagattgtgattactgctagtataagtggctacttggaaatgatagctactcaaattgctaggttctgcggagcacacttttacccagtcattggtgcagtgggttttatgaaccaaaggttggatatcccaagtgaagtagatcctcagtggaaatcaattatcctgagctgctgggaaagcgacccgcagcaacggccgtcgttccaggagcttcttgagaggctccgggagctgcagaggcactacgccatccagcaccggaacacaaagaacagcatcgaggagtgaagaacacaatgcgactctcagagcgctgtggcttgcttcgaagcattttgcgagcgaacgaacgaagaaccaggtctctagaagggcctggaccctcctgtactgtatggttttgctttggcggaacagccaaggctggaagaagtttgttgtacagacgggggtacgttcttctttgtttgacagggcaattgtgactgtaatctctgggtcctaacacccaagggtagggtagagactatagagtgagtagtgactgagctccggattgctggcgcatttgggttcttctgattcgtggcaatgcaaatgcgtggttaacaataacatccaatccggggcttgtgtttc

SEQ ID NO: 12125 - DNA, 765 bp, Zea mays
  Clone ID: 701160861_FLI
attgtttaccatggaccagattttgttaggaagatctgatgttgcaggttggggtgcattcattaaggtcagataaccgaacaaaatacctctgagtgcgatacttcctttcttgttctggctaattttccttgcaatatgtagaatcctgtaaataaaaatgattatcttggagaatatactggtgaattgatctctcacaaggaagcagacaaacgcggcaaaatttatgaccgggcaaactcatcttttctgttcgatttaaatgaccagtatgtgttggatgcttatcgcaagggggacaaattgaagttcgcaaatcactcatctaaccccaactgctatgcaaaggcaagaatcgcaattactgaataacatttagttcttgattaccttgcccatcttaaattcattctaccttccaggtgatgctggtggctggcgaccatcgggttggtatatatgcgaaggagcatattgaggctagcgaggaactcttttatgattatcgttatggacctgaccaggctccagcttgggctaggagacccgaaggatcaaagaaggacgaggcatccgtctctcaccgtcgagcacacaaagtggctcgatagctgaagagtcgctccggatgatacaatatgcagtaaacttaatacttaagacatgattcagtcctagttcattggtagataaacatgctatatactatccattagtaaataaactctcattcatcgagttggagaataaatgcgtataaac

SEQ ID NO: 12126 - DNA, 1184 bp, Zea mays
  Clone ID: 701160865_FLI
cgttttaccccgtccggccgtccccctcgttctttctctcccccttctctctcgctgcgacgactgggtaggctgccgccgccgccctacgccaggtcccgaggaccaaggcattcgtattcgtcagtctcttcgccgggcgacgccagtttggttggaacttggagtgtagagggaagatttggtgatgagcagccgcagcccgccgccgaaggaccgcaggatgcgtactgaacgcacctcataccgtggcgcaccatatcggagggacagccgccatggtccaagcaggtttcggaatgatttgtgcaacaattgtaagcgtcctgggcattttgctagagagtgtcctagcgtggctgtctgtcatacctgcgggcttcctgggcacattgcagctgaatgttcttccaaaggtacctgctggaactgcaaagagcctggccacatggctaacagctgcccaaatgaagggatatgccgtaactgtggcaagtccggacatattgcaagagactgcactgctccaccagtgccgccaggagaagtgatcctttgcagcaactgctacaagccagggcattttcgtgaggaatgcaccaatgagaaggcctgcaacaattgccggcagagtggccatattgcccgtaactgcaccaatgatcctgtttgcaacctgtgcaatgttgctggccacctggcccgtcagtgccccaagtctgatacattgggcgagaggggtgggcctcctcccttccatggtgttggcgctcccttccgtggtgttggcgttcccttccgtggtggcctcagtgacgtgatctgccgggcctgcaaccagattggccatgcgagtcgtgactgcatggctggtgctttcatgatctgccacaactgtggcggccgtggccacacggcatatgagtgtccctctgtgagtctcattgagaggttcccacctcgccgtttctgaaggacgtccaagggctatccagatgactgttgttttcagcccattgtgtcaagaacactcatttccgttttcttttttttttccaaaccctaatggattctagatctttcagattcttaacttgtcagcactatttgtgattccctaatggattctagatatttcagattaataactcgtcagcaccatttataattctggattttctacc

SEQ ID NO: 12127 - DNA, 547 bp, Zea mays
  Clone ID: 701160868_FLI
gaaagagtaagaggaagcatcgatcgccgagtgattcagatagcagcaatagtgctgcttcggtgttcgactctgactctgagtcatcgggctctgaatactcttccggaaccagttcaagttatagttcctcagactctgaagacaagaagcggcaacacagaaggaagcagaagaagagaaggcacaggagggacagcacatcatcatcatcttctgaatctgagtctgcgtcagacagtgattcggatgacaagaacagccggaggaagagtaaaagaaggggtggtaggcgctgaatctagtgagctgcacaaagcagtgtggatgttgaatatcatcattatatacttgtgttcaattcatgaataacttttcgtcatcatcagacccatgtgctgggctttgccaatccaagaaacaaatgtagcatttgctttcctgaatgctaggactgatgtttttccctgtacgaagaagcagttgggagcttttaggtgttcctattctatgatctttgtgtaacgatattcatatatggatttct

SEQ ID NO: 12128 - DNA, 915 bp, Zea mays
  Clone ID: 701160925_FLI
gtacattgaaaataaatacttgggtctcgaaaatggcattctagatccatctgccattttgctttcacggtatggctatctcaccttcatggactgcaagactgcttcaccttcctacgtctgcttctcggagctgaataaaagccaacagcctcagggacagctaccattcaagattttgttggcattttcaggactccaacataatctgccaaagaagcgtggatataatacacgagtttctgagtgcaaagaggctgcccgtgctcttttgcatgcttcaggctgtgaagatacaccaaatatactttgcaatgttgacccagttgtatatgagacccagaagtgtgtattggaagaaaatctttccaggagagctgaacactacttttttgaaatgaagcgggttacaaaggggatgcatgggctcatgggaacctacaagaacttggacagctgatctctgaatctggtcgcagctccatactcaactacgaatgtgggagcaaagagatgatccagctgtacgagatcctgctgaaggcccccggcgccctcggcgcccggttcagcggcgccggcttcaggggctgctgcctggccatcgtggagagcgaccgcgcggaggatgcggctgcatacgtccgtgccgagtacgaaaaggcccagcccgagctggtctccaggatccccgcggatcgccgtgttctggtctgcgagcccggggactccgcgcgcgtcatattgcctgatcctcacctgagctcctgatgccatttcgtggcccggacagacggaatgatgactctactagtccattcgctgcgtttggattcgtttttagttaagccccttttgagcatcggatattttcctttcctttattgtttctaataaaaataaattaatttctgt

SEQ ID NO: 12129 - DNA, 966 bp, Zea mays
  Clone ID: 701160937_FLI
gctcccccttccagggtctcaaacgcaaaccccaatctcggcgtcaccgccccaaatctagcaaacggaaatcccatctcgccgccgccgcgatgtctcgccgctatgacagtcgcacgacgatcttctcgccggaggggcgtctctaccaggtggagtacgcgatggaggcgatcggcaacgccgggtcagccctcgggatcctggcggccgacggcgtagtcctggtcggcgagaagaaggtgacctccaagctcctccagacctcccgctccgccgagaagatgtacaagatcgactcccacctggcgtgcgctgtggcagggatcatgtccgacgccaacatcctcatcaacaccgcccgcctccacgcccagcgctacgcgctctcctaccaggagcccatccccgtcgagcagctcgtccagtccctctgcgacaccaagcagggttacacccagttcggtggcctccgcccctttggggtctccttcctattcgccggttgggacaagcaccacggtttccagctctacatgagcgacccatctggcaactatggcgggtggaaggccgccgctgttggggccaacagccaggccgcgcagtccatgctcaagcaggactacaaggacgccttgacccgcgaggaggccgtcggtctcgcgctcaaggtcctcagcaagaccatggactccaccagcttgactgccgagaagctggagctggccgaggtatttctgcagcccgacaccggcgaggtacagtaccaggtgtgctctcctgaggcgctggggaagctgcttgcaaagtccggcctgacacagccaacacccgaggcataatgtactggtttgctgtggcatgtgatgccttctactgctcttagacatggtttaagcagttatgcttctgttgtgtgaacttaaatattcgacaattatgtgttctatttttgtgttgagc

SEQ ID NO: 12130 - DNA, 987 bp, Zea mays
  Clone ID: 701160939_FLI
attttctccatctattgctaacagctctggccaatcatataaaaaaacgttggttacaagccaaatggcacttcctggtagctgctgattttctatcgacaagatcagagctcagacctcaggcaagggaggtacaatgccaagagcaaatgagatgttgagggcagattcaagaatgatggtggtctttggtgccttgtcatcgaaaccagagcaactgacatttgaagaatccctcatatttgtcaagaaagttaaagtccgtgactacatgctgtacctgtcattattcgacgttctcggcagaacggaattaccccagctcgacgcctaccgagagttacagcagatgtttcaaaaccacccagatctgcgcgaagagctcgagaggttcagaccgccgccaccggtgcctaccacaaagcaggcagcaaacaacatctggccctgggtcatcgtctgcgctgctgtcccgttggtcgcagccagcctgctcccgtcactttgaaacccagtgctgtggcctgctcaacaccctgttggcgaaaaaatggccgtctgatcgaagaaccgctgcatgcagtacatacattacatgtgcagtggaccgaaccggcctcctgttgctattcgtcccatcacaactgaatcacagtattgtctgtgtatatatattagagtagtgttctggaagggaacctgcgttcttggtcatcaggtaccactcggcaagaaatgtagtcggtacatgctggcggtgctgcgcaacggtttggccatttggatcaatggtctgatcaacatgatgttagatttttgttgcgctctggaaggcagatgcacccgatcgggtatgaagaaacatgattagtttaggttatcattatgcctgtggatttagtgctagtttggttgcaaggttgggcaaaattgcaatctactactacttgtagccacaatgtttacttagaagaaaatattttcacc

SEQ ID NO: 12131 - DNA, 535 bp, Zea mays
  Clone ID: 701160947_FLI
gtccacccacgtacggcgacgtacgtcctctggacatgaatgcacgctgtacgtactcatatggggttctgatgttgcagtcaaaatgcccttctgcgctggcctccttcaagcagatagtagccaacgcacagggcaggaggatcgctgtgttcttggattacgacggcaccctgtcgccgatcgtcgacgatcccgacaaagcgttcatgtcccctgtggtaaaccagaaccgcctgtttgtttcaagtacttagcgttatctgaccaatgaagcaaccgcttatgctttgtctgaaaaaccttctgctcagatgagagctgctgttagaaatgtcgcgaagtacttccctaccgcgattgtcagcggaaggtcccgtaagaaggtactgatgaaacgtttgcactgctgttttttttttttgttgcccacttatatgtttacatgtattgctgtatgaatgaacctcgacatcctaattgtatgtaagttgtctgatgtgacatctgttagttaaatttctcatcttcgttc

SEQ ID NO: 12132 - DNA, 940 bp, Zea mays
  Clone ID: 701160956_FLI
accgcggccaccgacagtatcttatgacccagtgacatccaattctttcggtttatccctattctcaatcttgaatgccctcgggataatagcgtttgccttcagagggcacaatcttgctctggaaatacaggcaacaatgccatcgactttcaaacatccagcacatgtgccaatgtggcgtggggccaaagtagcgtatctcctgattgcaatgtgcctcttccccgttgcagttggaggctactgggcctacggaaacatggtgccaccaggagggatgctggcggcactctacgccttccacagccatgacatctcgcagggcgttctcgcgacgacatgcctcctcgtcgtgctcaactgcctcagcagcttccaaatttactccatgccggtgtttgacagctttgaggcctactacaccggccgcaccaaccgcccgtgctcggcatgggtacggtcagggttcagggtcttctacgggttcctctcgctgttcatcagtgtggccctgccatttctctccagccttgccgggctgctgggcgggctcaccctgcctgtgaccttcgcctacccgtgctttatgtggatctgcgtcaagaagcccgagaggttcagcttcagctggtacctcaactggggccttggtctgctcggcacagcgttcagtctggcgttctcgctgggtggcgtctggagcatagttaacaatgggatgaagctcaagttcttcaagcctaactaggtacatagattgctcgcttgctccaatctgcatgcaagttattagaagaaattagtcgtggaactgaatgttacatattactactacataattatgctgtatgacgactcctacattggcttggtaagaacaatggcgtgtatgtaagttaatgtctgagaaattcgaaatctgaggggctttgcgtat

SEQ ID NO: 12133 - DNA, 381 bp, Zea mays
  Clone ID: 701160966_FLI
gtggcttgctctcggcgaaggcccagggcccttcaactgcaaccagagagatggtgcaggacattgttgtcagttcaccccttggggccagaagccgctgatgtccacaagatcaccaatgctgtgctaacagactgcgccctgttgattctttagtacatgtgtaaattataattctaaacatgggaagttttgatccaaatattcaatcgtggcagttgtattgggagtcggtggaagggacatatcgaagataaaattctgtattggatttgcaggacatgcattgcaatggtgtagtatgactggcaatccttatcatgtaataccacctagacagggataatgttgtttaatgtcagaaaatgatagatatttccc

SEQ ID NO: 12134 - DNA, 623 bp, Zea mays
  Clone ID: 701160978_FLI
ctgcgccccgccattaaagccggcgcatttgggtttctctctccacctctctctatccgccccccaccgcgctctcgccctccctctccctctctagcggtagattggtgctgttcccccctaatcggtcggcggttgggggccgggttccgacgtctgcccgggagctcgaccgggcctccgatccgggctcccaagccgccgcctcccggggcgcccctccggaattcttgctttctcgggctccgaatctcgccgcctgtcgtcgccagcggctggcgcgggggcttggttcccggcgtttcattgcgaattcgggggcgatctggggcccctggtctggatggcgaggatttgagtggattcgagacgaacaagtggaggtggagccctgatctgggtggcgcccccgccgtgatatgtgccatgaggaagctcttcttctccgagtcggcctgcaaagagaccaagcttcactccgcgccccactcatggctgcccctcgagagggggaagctctccaagttctccggccatgccgccgccggctcctccatgtaagctccatcctggtcgcttgtttccagtctccaagttcgtttatgcttgaattgtgtggcgcg

SEQ ID NO: 12135 - DNA, 588 bp, Zea mays
  Clone ID: 701160992_FLI
gggacggccacgtcgggctcggcgtcaagtgcgccaaggaggtcgccaccgccatccgtggcgccatcatcctggccaagctctcggtcgtgcccgtcaggaggggctactggggaaacaagatcggccagccgcacactgtgccctgcaaggtcaccggcaagtgcgggtccgtcaccgtgcgcatggtgccggcgcccagggggtccgggattgtcgctgcccgcgtgcccaagaaggtcctccagttcgccggcattgaagatgtctttacctcgtcccgtggctccaccaagacactcggtaacttcgtcaaggcaacctttgattgtctgatgaagacctacggcttcctcactcctgagttctgggccgagaccaagtatgccaagaccccgttccaggagttcaccgacctcttggctaagccgacaaagggtcttctgatcgaggctcccaccgagacagtggaagcttgaacgtcttagtttactgttccaagtgtcgcgaaaagagttttctgtactagctacatattttaaatgttattttgaattatgatgagaaaccaaggtatgcacccaagat

SEQ ID NO: 12136 - DNA, 746 bp, Zea mays
  Clone ID: 701161012_FLI
atcgccaaacatttattcagctagctagttgagtaaaattcgtcttctggagagggaaaattggagctgggcctacggcaagcccgagcccttctccctggcctccctcatgttccgctcccgctctaccctgtccacatcccgcgcgatccggtcccgctccttcacggcggcgtccacgtcctccgcgtcggggaccacgcgctccttgacgccgtgcgcggtgtccttggccgcgtcccaggtgctccgcgccgcctgcttcgccatgtccccgatggcctgcgccgtctcggccaccttccccgcgccctccttggtcatctccaccaccttctccccgtacgacgcggtcccctccacggcccggtccttggcctccccggccctgtccatggcgcgccccgccgcctccccggtccggtccttggccgccttcgccgccccctgcgcccggtccgcggcctcgtgtcccgcctccttggcccgctccttcacgtgccccgccctgtccgcggcctcccgcgccgcgtcacgcgtctcgttcttcgctcgctccgtcgcccgggacgccgtgtccgcggcgtcctccgccacgcccttcgcctggtccttggcccgctcggccatgcccgacgcctggtccgccacgcggccggccttgtcctgcgccctgctcttcgtctccccggccatcctcttggcgtgctccttggcgtccccggtggcgtccttcgcctcctccg

SEQ ID NO: 12137 - DNA, 676 bp, Zea mays
  Clone ID: 701161033_FLI
tctaaatctgagttgatgtacagaaaagaaaagcattgttctatgtgtctttggttttcaggtctcttcatctggaacatttcttggctgctttctgactggactatcattctattttaaggcacaaggactgtgcacacagctggttcctactttggctctttgtggcatactggtatactatgcggcgtactcagttggaatgggcccagttccttgggttatcatgtcagaggtaagaaagtatcctgtgaagttacttttaagtgatgatcatttgtttcaggatatctcgtgacttattgccacagatattctcaatcgacatgaaagcaatcgccggagggtttgtaaccctggccagttggattggttcctttgcgatttcatactcattcaacttcctcatggattggaaccccgcaggcacattctttctgttctctgcagcgagcctggtcactgtgctgttcgtggcaaagctcgtgcctgaaactaaaggaagaacactagaagagatccaaacattgctcaaagccacatgagtggctaccattcgctcagtaggtaaagatccagttaaaaaaatgctgtaaatattcgcctcttgtaaattcttgtgcacggcaggtgaatgatttcgcctcttgtcgattctcctatattttagtctctc

SEQ ID NO: 12138 - DNA, 563 bp, Zea mays
  Clone ID: 701161040_FLI
gttgtgttgcatgatggagtgattagagaaaaacctagcacaccagaagaggcacggaaattcatcaaagggtactctgaaagccatgctgcgacgattggatctgtgcttgttacaaatgtgaagactggagctagaagggaaggatgggataaagcagaagtttatttccacaaaattcctgacgaagttgtggagagtttgatcgaggagggcgatgtgttctatgtcgctggtggtctccttgtggagcaccccttaacttcacctctcgtggaagccattgttggtacaattgatagtgtaatggggctccctaaggcgctcacggagaagctcatcaaggaatccctttcagagacatagctacaatcctatggactgaactgacctgtaatgcagaaatcatattggtggcggactggcggtggctaaatcagtttggcagcaatgtagtgtgagaatcatgtaaccattcctattttccaacaaaaaaggccgtcatgtgatcagcccactatgaacggaattcatccttggcttccatgaccataggtctgctg

SEQ ID NO: 12139 - DNA, 1861 bp, Zea mays
  Clone ID: 701161061_FLI
gtatcatactactcctgcttgtcatccccctcgtcgtgagaattgaagggagtgtcatgggggagagatccaactcgttctcacaggactccaataattctagccctgctgaaaacaaactcgaaccaggcgaaaagtccttcgcatcggaggcatacgcggtgaactggaacgaaccaccagacctgcaaatgcaagactccttcgagcgacctgagctatatcggaagcaatcagtgcaaggtgaaaagtccttcgcatcggaggcatatccggtgaaatggagcatatcaccatcactaggtcagcaatcgcaagagtctttcgagccagaggcatatccgatgaaatggaaagaaccaccaccatcaggccaacaatcgcaagactccttcgagccagaggcatatcgggtgaaatggaacaaatcaccaccaccacaccaacaatcgcaagactccttcgagccagaggcatatcgggtgaaatggaacaaatcaccaccaccactccaacaatcccaagactccttcgagccagaggcatatcgggtgaaatggaacaaatcaccaccaccacaccaacaatcgcaagactccttcgagccagaggcatatcgggtgaaatggaacaaatcaccaccaccactccaacaatcccaagactccttcgagccagaggcatatcgggtgaaatggaacaaatcaccaccaccacaccaacaatcgcaagactccttcgagccagaggcatatcgggtgaaatggaacaaatcaccaccaccactccagcaatcccaagactccttcgagccagaggcatatcgggtgaaatggaacaaatcaccaccaccacaacaacaatcgcaagcaggctccttcgagccggaggcatatcgggtgaaatggaacaaatcaccaccaccactccaacaatcgcaagactccttcgagccggaggcatattgggtgggatggaagcaacatgcgcaaggagaaacagacgttgctgatgggacgacgccagcacgcggccatggcctgcatgtcgcgaccgggatgcttttcacgaggaagagcttgcttccagggacagccctaccggaaggcaccaggttcagcggccacggcttccccgatccgcagaggttcgcgctacgggcagacgcggacgccatccccttcagctacagccagctcgacacgatcctaaggatgttccggatccctcgagggtccaagaaggcggagcaagtcgctgacacactccgggcatgcgaggccgagtcctcggacgctcatgcctgcgccacctccgagcaggcggcggcggactttgctgcctcctcgctcggggtcagggctagcgacctggtatcggtcgtcaccgccgtccacggggggaaggacgccactaggtacgtggtggcgcccgacggcgtcacacgcatcggcaaggcggcgggggccgcgaccgcggtgccgtgccacccgatgccgtacccgtacatggtccattactgccaccggccgacggacgtggaggcgctccgcgttgagctgactgggctcggagacgacggcgcgaccatcgcgatcgccatgtgccacgccaacactatgagctgggacgaccgctacttccagatgttgaacgcgacgcgcggcgaggagatctgccacttcatgccgtggaactatgtgctatggctgccggctgccgaccttctagcgaataactaggatcaccttctaggcgggtgatacaccgtccattctaaaatgtaaaaaataaaaataaaaactatatacatagttttttattatgcacttagatatgcgttataattagatatataatt

SEQ ID NO: 12140 - DNA, 828 bp, Zea mays
  Clone ID: 701161090_FLI
gtgctcgagctggcggcgaggagcaaccttaagccggtgacgctggagctcggtggcaagtcccctttcatcgtcatggacgacgccgacgtcgaccaggccgtcgagctcgcgcaccaggcggtcttcttcaaccagggccaatgctgctgcgccgggtcgcggacgttcgtgcacgagcgcgtgtacgacgagttcgtggagaagtccaaggcgcgcgccctgaagcgcgtcgtcggcgaccccttcagggacggggtcgaacaggggcctcagatcgacggcgagcaattcaacaagatcttgcggtacgttcagtccggcgtcgacagcggtgccaccctcgtcgccggcggcgacagggtaggcgacaggggcttctacatacagccgacggtgtttgccgacgccaaggacgaaatgaagatcgctcgggaggagatattcgggccggtgcaaaccattctcaagttcagcggcgtggaggaggtgatccggcgcgcgaacgcgacgccctacgggctggcggcgggggtgttcacgcggagcctggacgcggccaacaccctgtcgcgggcgctgcgggcgggcaccgtgtgggtgaactgctacgacgtgttcgacgccaccatcccgttcggcggctacaagatgagcggcgtcgggcgggagaagggcatctacgccctccgcaactacctccagacaaaggccgtcgtcacacccatcaagaaccccgcatggctgtaaatcacatcctccgtccttgcccgcacggcgctgcgccggttctcggagaacgtgacgaataaaacaaacggtttggtt

SEQ ID NO: 12141 - DNA, 771 bp, Zea mays
  Clone ID: 701161116_FLI
aaagagcagctttttgatatgacatgcatgacattaggtggccgtgctgcagaggaggttttgattggcaaaatctcaactggtgctcagaatgacctggagaaagttaccaaaatgacatatgcacaggtcgccgtgtatggttttagtgaaaaggttgggcttctgtccttcccccagaaagatggtggtttcgaaatgagcaagccttacagtaatcagacagcatccatcatcgacgatgaggtccgggaatgggttggcaaggcctacaagaaaacagttgaattgataacagagcacaaggagcaagttgcacagatcgcagaattgctgctcgagaaggaagtcctacaccaggacgatctaaccagggtactaggagaacgtccattcaaggcactggagccaaccaactacgacctctttaagaaaggtttcgaggatggtggtgacaacagccaagcaccagcagagaacgccgagctgcctgatgattcatctcccccagttggtgacgttgtacccacgtagtgtttctctcctcaacgtcagagctgtacattgagcgctcattctcgatagattcttgtttgttggttgcatcataaaaaagatctgtataaattcgcgcccaagctgattatgccactgtggaaatgcatttggatttccgtagtgtcagtccggtcgatagggtgccttgggttcttcatggcacgagcaaatgttctgattcttgtattcgaatgttttgaaatattctgtctg

SEQ ID NO: 12142 - DNA, 659 bp, Zea mays
  Clone ID: 701161118_FLI
aggtgatcgggccggagctcttcttctcgccgctgctctacgtgcaggtcactagcttcaagtgtggggggatggccctcggcttcacgtgggcgcacctcatcggcgacatcccctccgccgttgccagcttcagaaagtgggcgcaggtcctcggcggcaacaaggccccggcgccaaccctgcgagacccactcgcggtgccgccgtcggccccacctaccagcgtgacggtcccgccgtcggtcaaggccaccgcggcccccgtcggcgatcactgggtggtcccgaccacccatgacatggtgtccttctccttccacgtcaccgagcagcagctgcagggactccagctcagcgcgatcaagggttaccatcggcgcgaggttgtgggcccgtttgagctggtctccgcgctgatgtggcgggcgctggccgcgatccgaggccccgaggaggaggaggcgacgcgcacggtgaccgtcgtgaagactggagcggcgccgacgtcggggggcagcccccgcccggcgctgaccaacgagcaccgcatcggccacgtcgtcttcgcgaccggcggctcctcgccagcgacggccgacgtcgccaagctggcagcgctgctggccggcgcacacctggaggaggccagcgcggtc

SEQ ID NO: 12143 - DNA, 214 bp, Zea mays
  Clone ID: 701161183_FLI
gtggggggagagggcatggtctctctcgtcccggcagtcccgtctcaagcaaaagctctctcctcttcttccgctcagtgcaccaatcactgcaacatactggcctgaggtcattgagttggtgaaagggaaggagggggtatcatgggcatctcatccaagtggattaaatccttggttggcataaggaagcaagaaaaagcgcagaatgcag

SEQ ID NO: 12144 - DNA, 1430 bp, Zea mays
  Clone ID: 701161192_FLI
gtagtaactggttttccaataggggatattcttcacaacaaggaagccattggccgaatagccaagtgggcttgcgagctgggatctcatgacatcgagttccgacctcgcactgccatcaaaactcaagcattggttgatttcgtatcagagtggactgaacagcaagtaccagataacccagtgaagcgccccaatcctctgggactcaaatgtgatacaattactagtcccaggaggctagtaaacacatttatacaacagatgatttcagatctgcttaaacaagacaaacctataaaggtggcgatcaactttaagagttggtccacaactcgggacatatcatcagagtggggctgaagcagcccgatatacgcagcgaagcaaatcagcggtccaacagccacaggcaaggttgggaacagtcgtaactcttactcgatctcctttttcgtgcttatccggcgaaggggaaagagagctcgcggaactggcttctggctcctggcgtagacttgtagatctggcctccacgagacggtacgaacgctccgataacaggagggtggactagaggcgaagcgacactatgcgtgtagccggcagagcagagtaactgagtgggtgggatgtttgccttggctgagggtgttgcgtgtgtgtggagagggagagggtagctgggtgtatttatagctgggtgtatgtggtgtagcatagagaagttcactgttggtgagaatagtgacgaatgaatcgtctgacttaatatgaacaggagagttataggcagaatatgggacgagagtattttgggatttttctggaacatgaaccatgcttaagggatgacatggttggatagggaataattcgataagaatttagaaacaagaattattggaatctcaagtcaagcgtgctcaacttggagaaacctaggatgggtgaccagctaggaagttccctactggaatgaaaatcacagtcaccggagtttgtataactggaatatgggtctggctggtcttaggtggactggacagcatgatggatgagtagttgaaatttggggtaatcggatgattgatgaatagtaacggtgaatagtaatggtaaaaagtaacggtaaatagtaacggtaaaaagtaacggtaaaaagtaacggtaaatagtaacggtaaaaagtaacggtaaacggtaaaaagtaacggtaaaaagtaacggtaaaaagtaatggtaaacggtaaaaagtaacggtaaacggtaaaaagtaacggtaaaaagtaacgataaaaagtaacagtaaaaagtaacggtaaacggtaaaaagtaacgataaaaagtaatggtaaacggtaaaaagtaacagtaaatagtgacggtaaatagtgatggtaaatagtgacgatgaacgaatgatgaac

SEQ ID NO: 12145 - DNA, 737 bp, Zea mays
  Clone ID: 701161209_FLI
atttggtatcgggtcttttactcacctctatatacaagcaatatagccaactaacagagatagctttgtacaactaatcatgcaggtttagcaaaacaacaaacatatatgagttgttgagtggctattttatttggtatacatgggacaataatggtaggctccgattctccctccgaacggcgacagcgcctgctccgccagaacgcaacgtggcgcgcagcagctaagcgccccgcgcacccgtttcctgctgcacccatgtcggccagctgtgtttcctactactctcgaaagcaagaaaaaaccccataaacactgtacgagatcactgaccataatcattagcaatttagcattagcctcagctggcgtaccgtcgagtccattcccacctttctaccccttccagaaacctccaggatccgactccaatcgaatcgccaaagcagacaggggcgctcgcgggggcgccgagctcgacggggcgagatggccgggaacgactggatcaacagctacctggaggctattctggacgctggcggggccgcgggagatctctcggcagccgcaggcagcggggacggccgcgacgggacggccgtggagaagcgggataagtcgtcgctgatgctccgagagcgcggccggttcagccccgcgcgatacttcgtcgaggaggtcatctccggcttcgacgagaccgacctctacaagacctgggtccgcgtaag

SEQ ID NO: 12146 - DNA, 1040 bp, Zea mays
  Clone ID: 701161229_FLI
cacggcgcccatggcttcgccgccgccgccgcctcctcctcctgcccggcaccccacctccgcagcaactgccgctgcggcgggcaatggccacgacacctccgcagcaaccgccgctgcggcgggcaatggccacgacacctccgcttcgccggtggacgccctcttcctccagaacctcatgacccgcgtccagctccgcccgcccttcctcgacaccaactcattcctcactcaggaccttgacgacttcctcctcaacgagttcgccgcgctatccgccgctgcaggggcgtcggatgatgacgaagacgtggaggatgaggatggtgggctcgctggcggggagggctccggggaggctaggcggcggaggatgctggcgagggaggaggcgaagctggagaaggagattgttcggatggtgctggccggggaggccgaggacaagctcaagcccaattcgggccagtccgtggctgtcggcgaccaccacctctgcgtcggtttccacgacgatgccagcggggagtatcgcatctgggaatggcatggccacgtcatgctgttcgacgacgaggaaggatactccgcagagtacatttatggcaaccacttcgagccgctcgctgctgccacagccagggccaagaagaaggagaaggagatgagagagaaggaattgagcatgggtcttcgggatttggtcgtggacactgacgacggtggcaatgccaatcgctccaaggagaacggtagcagcggagggcccagggtagtgcgcaggaatgtcgtcaatggcccaaccacgcctgctaggtaatggctttctagagcttgcagtgtgcttggtggaagaagcagtgccgcagtgcatcaatctgtgtgacaaaagcaaataaagatctgttgtccttttctcgcttatagctgtttaagctgtctattgtattctgttgagaaatcaatcacatctatactttgtttctgttaccacaagtacactttacctcttggggttttaaatatattcgttattc

SEQ ID NO: 12147 - DNA, 1275 bp, Zea mays
  Clone ID: 701161251_FLI
gcagttatttctgatccaagcctggtgtatggaggctgtcgaagctcatggagcatatgtacagttactgaagttgaggaactgaaaatacttatccgcttgctcccaatatgggtgactggaatattctttgctgctgcgatctcgcaaatgcacaccacttttattcagcagggaactgtgatggacaccaagatcggttccctgtccattccaccagcatccttatactcatttgaagtgatatgtgtcacgctttgggtacttgctgtcaacaaagtgcttgtgccggcaatccgaacgtattttgcaaatggggtagagctcacacagttacagaggattgggatcggtcgtttcctgatgatctttgccatagcaatggcagcacttctagaaaccaagaggctgcatattgttcaggagggggaactgctaagcattgtatggcagcttccacagtacttcgtcattgctggggctgagtgcttcggtatcatcactcagctggagttctttcatggccaggcgccagactccatgaagagcattttaacggcatttgcattgctcaccactgcccttgggaattacttgagctcagctatcatcaccctcattgcaggggtgaccagggtatggcatagccctggttggataccagatgatctgaacaaaggacaccttgactactactactggtgtcttactaccctctcattggtgaattttgttgtgtatctgtattttgctagtaaatacaaattgaagaaagttgtttgttaatactaccaaacactaatgaaatatctttacgtgtaacatatgaaatataacgtttcaaatgtttatgtttattaatataaggtttcaaatgtttatgtttattctctatatgtatagcagtataggaacatggaagccttaggctatctcagcagatcctctatctcatcttttattttaaacttcactctgcaaacaatatcatctacagtttcgtgttccctattttatacgatccgctcaagacagttttatgtcccagaactgccccttctcatagcgatgtgtaaatgttaggagaaagatattgtatgtagtaactattcattgattcattctctatgcttatgctggagggatgtgttgattatttcagttatatggaatgtaatactgatttgctggtggttgagttcgaaaaattaaatactgattttctggtgaaacaagcttggtgtaaacataattttgttaaagcatccatgattt

SEQ ID NO: 12148 - DNA, 429 bp, Zea mays
  Clone ID: 701161256_FLI
gtccaggcgagcctcctgcagctcgctggccacggccgcctacctgcccccgctcctgggccccgaccacgccgtcgccgagggggacgagggcgaggaggacgactccgactccgacgacgtggagtgcagccagctgccgccgccgcaccgcggaaagaacgtccgggacgcgcgggcactgccaccccttagactcggcggtgctgggatgcggcggaggaacgggccgaatggcggcctcgggagcttcagatccccgaggtccttctcgctgtccgatctccacagcagcgctgagggggagtagtgattagcagccgcagatctgcttccagctctggcctcctctcttagccaccagtagagatgtagtagtagccacttactatatggttccggtgtataagatccaagtctgttgtgttc

SEQ ID NO: 12149 - DNA, 414 bp, Zea mays
  Clone ID: 701161261_FLI
cccgctcgtctgtttgaaacgaaggaggaggtacgcacgccgctactgcaagctagcaagaagaggccgctagcagggggttttgcttgatttctggcggacgacatgagcacggccacgggcgtgcggccggggcggcggttcacggtggggcggagcgaggacgccacgcacccggacaccatccgcgccgccatctctgagttcatcgccaccgccatcttcgtcttcgccgccgagggatccgtcctctcgctcgggaagatgtaccacgaccacagcacgatcagcacggcgggcgggctggtggcagtggcgctggcgcacgcgctgggtctggccgtggcggtggcggtggccgtcaacgtctcgggcgggcacgtgaacccggccgtcaccttcggcgcgctcgtc

SEQ ID NO: 12150 - DNA, 310 bp, Zea mays
  Clone ID: 701161314_FLI
caagcagagaacacacggtgacacggaggcagtccgcttgaaagctaagctaaactgctctagcacgcatataaacccttgacaaatcaagagtggagaaaaaaaaacacgaacccactagccctctctgcttcctctccgtttctcctccactcaccagtcaccactcctgattgctgtcgagtctcgatctgccagcgcgcggcgcgatggccgacaaggcggcgtccccggagaagaagtcatgggccgacgtcgaagaggaggaggaggccaaggctaaggcgaccgcggcagccgaagcggcggc

SEQ ID NO: 12151 - DNA, 1188 bp, Zea mays
  Clone ID: 701161321_FLI
aaaaaaagctttagaatgactctggttggcggttgctagacccgtgcagcgcgtagatttgcccccgcgtgaattctttgtccttcagctgagattgtcgcttcggtcgtgcagaacggcgtgaggggtctgatgctggacatgtacgacttccgcaacgacgtctggctctgccactcctacggcggcatctgccagaacttcaccgcgtttcaaccggcggtgaacgtgctccgcgaggtggagcgcttcctgtcgcggaaccccgccgaggtggtgaccatcttcgtggaggactacgtggagtcgcccatggggctcacccgggtgctcaacgcgtcgggcctcgcgcgctacgtgctccccgcctggcgcatgcccaagagcggcggcgactggccgctgctcagcgacatggtccgcgacaaccaccgcctgctcgtcttcacctccaaggccgctaaggaggccgccgagggcgtcgcctacgagtggcgctacgtcgtcgagaaccagtacgggaccaaggggatggtgaaggggacgtgccacaaccgcgccgagtcggccgccatgaacgacctgtcgaggtcgctggtgctcgtcaactacttcagggacctcccgaacctgccggcggcgtgcaaggacaactcggcgcagctgctggacatggtcaccgcctgccacgacaagtccggggaccggtggcccaacttcatcgccgtggacttctacaagaggagcgaccggggcggcgcggcggaggccacggacaaggcgaacggcggcctagtctgcggctgcgggagcatatcggcctgcaacgccaacgggacatgcactccccggcacggcaggacgcccagaggcatcttcaacgcctcatctgacgcagcggcgtggaggccgccgccgccggtgctgcaatggcagaggctcatcctgctgccttctctccttgctcttcttctgggcctgtgaattctacgtattttgttgtatagaccgatacggatcggtttggttgcaggcaccgagcgcattttgttgtgtatatatacacacagatgacagattggttgaagccagctagcagcttagtccatggtagtctgtgtataagacagagtgcatatacaaggttaacacaacatcaacaatcagatgcggaaaactgcgtttaat

SEQ ID NO: 12152 - DNA, 655 bp, Zea mays
  Clone ID: 701161339_FLI
cgtatgtttttgtgtgagttgggaggtggagaagaaaggaactctagtgcatcacacaccttgtgcttgacgaaatgtttgaatcagaatttatcatcgcatccgcaatttggtttaatcatgcactacggcatgattaatggagttactgaagaagggcacccaattcaattgcccccggttgctgatcggacatttcatttgctcaaacagaagttggtccaagctcctgttctaggtcttcctaacgacttcagcaagggtttcgtgctagaaacagctgtcttcatgcaatcgaagaatctcgtggcttatttgaataagcacctttgtccaagaaaccaagcttcatcgaggagtgtttggcaatctttatggcaattattgacgaatggcggccatacttgcagcaccgtcaaatcgtgattgtactccatcttactgagcagagggtgaccttacgtttgtagcataaagtcctgctcaagctcattgacttgcattatcaaattcgcacaaacaggcaacggctgtaccgagcgactgatttggcacatatatatataagccgagacagtgggagaggagagctggacaacaggcaacgaattgtaattgaatcttctgaatactaaaggaaagcggtcacatccct

SEQ ID NO: 12153 - DNA, 1178 bp, Zea mays
  Clone ID: 701161374_FLI
ccgacgacaaattcatccggcaggtgacgacgcaaggtacccgcgccggcgcgggcccgggtctgctcccggaggcgcagttcgcagcgttcgtgaggcggcacgggcggcggtactccgggcccaaggagtatgcgcgtcggctgcgcgtgttcgcggccaacctggcccgcgcggcggcgcaccaggcgctggacccgacggcgcgccacggggtcacgcccttctccgacctcacgcgggaggagttcgaggcgcgcctcacgggcctgcgcgccggcggggacgtccagcggctcatgagtggcgtgccggccgccccgccggcctcgaaggaggaggtggcccgtctgccggccagcttcgactggcgcgacaagggcgccgtcacgggcgtcaagacgcagggcgcgtgcgggtcgtgctgggcgttcagcacgacgggcgcggtggagggcgccaacttcctcgccacgggggagctcgtcgacctcagcgagcagcagctggtcgactgcgaccacacgtgcagcgcggtggcgcagaacgagtgcaacaacggctgcgccggcgggctgatgacgaacgcgtactcgtacctgatggagtccggcggcctgatggagcagagcgcgtacccgtacacgggcgcggcggggccctgccgcttcgacccgacccaggtcgccgtccgcgtggccaacttcaccgccgtgccggccggcgacgaggcccagatccgcgcggcgctcgtccgccgcgggcccctcgcggtggggctcaacgcggcgttcatgcagacgtacgtgggcggggtgtcgtgccctctcatctgcccgcgcgcgtgggtcaaccacggcgtgctcctcgtcggctacggcgcgcgcggcttcgcggcgctgcggctgggctaccgcccctactggatcatcaagaactcgtggggaaagcagtggggtgagcaagggtactaccgcctgtgccgcggaagcaacgtatgcggcgtcgacagcatggtctccgccgtcgccgtggcaccggcgctgtgaacgaatccagtgtactcctgaaacggaagtcctggacggggcatggtattgtctgcacgtggtagtgtaggcttggatacaagtgataaaggaataacaaatcccgatacgtacagccgtacagacccc

SEQ ID NO: 12154 - DNA, 749 bp, Zea mays
  Clone ID: 701161385_FLI
ggctaagatcaagtgtagtatctgttcttatcaatttaatatctgatatgtggactatgtgttcactttgatattaaatttattttttgtgggggagagtccaccaccgtggcttgccactgggccccttgagcgtcgctcggactgggccccttgagcgtcgctcggccgttgcactactggctgagcctggcgcaccccaaccaatccaattcgagattttttccccaaccaatctaatttgagattttttattaactagctcagtgcccgtgggttgcaataggatcatataatagtttgataatttatatatataaatgtatgttatactattataagatagaggatgacatccacgagctgttcgggatgacgttgaagagaaactcgggcgtgagacgcacgagcactcacctagtcatgtagtatacaatatttaacaagacaatttaaaggcaaaaattcaagaatgatcttttatagactactataaattcttagctcactgtaattgacttgtttgaagaacacaataatacgcacgagcacgagcactcttgttaaatattgtatacaacatttaacaagacaatttaaaggcaaaaattcaagaatgatcttttatagactactataaattcttagctcactgtaattgacttgcttgaagaacacaataatactactgtgaatatgtgatataacttaatcacagtagtaaaattacatctgatgttgtatttggt

SEQ ID NO: 12155 - DNA, 1269 bp, Zea mays
  Clone ID: 701161419_FLI
tgtcggcattctcctcgctcctgctgccatcgtttttcctttttcctggacagccactgcaactcctcccaaatcctcccacccggtttagccggctccgctgccaccgccgcgactccacctctgtcgccaccatggtcaagtccaaggccatcagggtccacgagctgggcggccccgaggtgctgcggtgggaggaggtggaggtcggggagcccggtgaaggggagatccgcatcaggaccaccgccgtcggcgtcaacttcatcgacatctactttcggaagggggtctacgccgcgcccaccatgcccttcaccccaggaatggaagccgttggcgtcgtcaccgctgttgggcctggcctcactggcaggaaggtgggcgatgttgttgcatatgccggcaaccccatgggctcctatgctcaggagcagatccttccagcggctgtcgctgttcctgttccaccttccgttgatcataagcaagcagcttctgtgatgctcaagggcatgaccgcccatgttctgcttcgccgggtattcaaggttgagagtggccatactatcctggtccatgctgctgctggtggtgtcggctcactcctttgtcaatgggcaaacgcccttggtgccactgtcatcgggactgtttccaatcaagaaaaagccgctcaggcagctcaggatggatgccaccatcccataatttacactagcgaggatgtcgtcgcaagagtcaaggatattacatcaggaaaaggtgtcaatgtcgtctatgattctgttggaaaggatacatacaaggcttccctggagtgcttggcgtcccgcggcttcctggtgtcgtttgggcagtcgtcaggcaaacctgacccaatcccaacgagcgacctggcttccaagtccttgttcctcactcgtcctagcctcatgcattacactgctacccatgatgagctgctggagtcagccggcgaggtgtttgccaatgtcgctaacggggtgctgcacgtccgggtgaaccacacgtatccattgtcggaagctgcccaggcccatgcagatctggagggcaggaagacatcagggtccatagtgctcatcccgggatagactcaagggcatgtgaatgaataaatggggtgatctggttatgggaacggcgtaataataattatatctatgctgtttatgcggtatgttcgagtctgtttctgagttcctaaatctgaatgaataagtggcgcccttgtgttgttgggtc

SEQ ID NO: 12156 - DNA, 539 bp, Zea mays
  Clone ID: 701161434_FLI
cgaggccaccatgagcactctcaagttctgccgggaatgcaacaacatgctgtacccgcgggaggacaaggagacgcgcaccctcctgtacgcgtgccaaacgtgcgagcatgaggagattgccactgatacttgtgtgtacaaaagggttatccgtaagcctggtggtgagcccaaagatgtcctgaaggatgcagcaactgatcctagcctgcctcgcaccagaagcgtcagatgttacaactgcaaccatccagaagctgccttttttcaggccccgactaagggagaacaagccatgacgctgtacttcatctgctgcaacccaagctgcgggcacaggtggagggactgagaaggatctggcttggtcttcgctgcaaacctgccgtattgttagcctaggtacaagttgtgccgtcaactgacgtttgctgcaagcttataagctactataacctcgtaacaaaacgatggtttggctggagacgaaatctgttgttcctcatgataagaaacagaaacagctatgaactacc

SEQ ID NO: 12157 - DNA, 582 bp, Zea mays
  Clone ID: 701161436_FLI
cccaaatctccctccagcgccgcagctagcccgagaagccgacgaggaggaaaccgaccgccgacgccgagcaccctcggttcctggctttcccggcgcccaatctagacagctctttctcgttcgtctgtatccatggccgccgcctcgagcaagaccatcgctgtcctcctcgccgcgctgctcctcgcgctggtcgcgtccgcggtggccagcaggaagctggaggaggaggacgctttcctgggaagcctttcgccggcgcctgcccccgccgagggcggagccgcggggctcgctagcggcacgccgggggcgtgggccgtcgccgctctggtctctctcatcgccttcctcgcgaactgagcgggtcctgcgatctggattgctgcgggcggaggggaacatttatgctcgccctgtttgttctaggctatcggttccagtgctgctgtcctcacttttggctgtataagagaggattacgcaccgtttcattttatactactacttatctgttactagtgtattgcgcgcgcctatgcgcgcgtgctgaatagcaacttgaaatgttttatgagg

SEQ ID NO: 12158 - DNA, 457 bp, Zea mays
  Clone ID: 701161490_FLI
gcagaacgaatattacagtaccaacatctccatgacatgacatcctagtgttcacatatgttactttcagggctagcaactggggtggagaagacaagaacaagtgccttaacgaaacagagccgatctacaaaaccggatacaaagctgcaactacagactacagcttgatggccaaagctaagcactactttcgaacattggagccgaaaggcatacatgttcagatactgaacatcaccgagctgtctgactaccgcaaggacgggcatcctacggtgtacaggaaacagtttgctcctctgacgaaagagcaaatcgcagacccagccagttacgcggattgcacgcactggtgcctccccggagttccagatgtctggaacgagtttttatatggctgaatctgctatcgccacaggttccagttgtcgtcggcccgccgcaccgcgtgcag

SEQ ID NO: 12159 - DNA, 445 bp, Zea mays
  Clone ID: 701161531_FLI
agacgacgcaagccctcgcctgtcctcactcctaaccctcgcccgactcagatctatctgccccgcgccgccgtcgccatgccgttcactccgggtccctactctggcgtcagcaccctcgcccttgtagcgagggcatcggtcttcggcttcggtgtcgtctacgggagcatcaagctctcaatcctcaaggcaacaaagcctaaaaaggaagaagcgcatgctcatcactaaggacgacagggctgctacatgttaatttctatggaaggatgatataaaaatgtggttgcactctttctccatacgtgcaatttgatttatgatttgtggacatcttgctgtaacacacctgctgagttatcttagttttgtgtcataataaaattcttagccaatgacttgaaatcaggaaggggaaaatcaaaagaacccacttttgttt

SEQ ID NO: 12160 - DNA, 620 bp, Zea mays
  Clone ID: 701161549_FLI
agtgcaggaggctcccacatgagtggggtctggggggagggataaactgaggcaagccttctacctgcaaatgcggagaggctgcttcaaatccatgacatgtcatcctttggtttcattgactaccatgatcgcagatatgctgcactagcaattttatctctcaatggcagacaactgtatggtcagccgattaaagtcaattgggcatatacaagtactccgagggagggcacatcaggtcattttaatatttttgttggggatctttgcccggaagtcactgatgctactttgtttgcatttttctctggttactctacttgctcagatgctagtgttatgtgggaccagaaaacaggacgatccagaggatttggttttgtttctttcaggaaccagcaggatgctcaaagtgcgataaatgacttgaatggtgtgttctctagttccatgtttctaacttatgttccattttgaagtcccgagtgtttcaaaaagtgctagcagctagacgtgcctagcaacctaggtggtgctcaggcgttgcttgacatttgtactttctatggacagtatgccatgttgaataaagtatttttggcatgacatatcagaac

SEQ ID NO: 12161 - DNA, 302 bp, Zea mays
  Clone ID: 701161562_FLI
gttttatacaattttaaaacatctagatcgcaagttcgtgatcatgtttcgtgagcatggtttgcggaaattccaatctgtttatgaaataggtcgtaacttgtgctaaataacatgaataccatttttgcattcgcggtttttcatttttcaagtgacttgcagttcaaatctgaattatccgaagaaattcaattaaacgaactaaatctaatagttaaagcaaacactttgataaatgtgccaaaattgaacatgtatgtctatatactgtaggaacacatcacaaaaaggtttggggg

SEQ ID NO: 12162 - DNA, 492 bp, Zea mays
  Clone ID: 701161565_FLI
gaagcacccggagcagcgcacagcaacagagcacacgccgcacaccgccgcctccgcagcagcagcaatggcgcgcgccggcgctctctgcctggtgctgctctgcctcgtggccgcgcactcagccgcagcgcagaagtccacgacagccccggccgccgcgccggccgccgccaccaccccgccggcgaccccgaccaagaagtcgcccgcgcccgccgccgcgccgcccaccaccccagccaccaagcccgccgaggtccccgcgcccgcgccgtccaagaagaagaagaagccttcctcgtcctccaagaacaagaagaagaagtccaaggccccggctccagcccccgtcgccgaggcacccaccagcaccaagcgctccaaggctaaggcaccttcggccagcgaagccgacgcacccggcccggtaggcgatggcgtcgccgccgacaccgcgggtgctggaaggaccgtggcaggcgtaatcat

SEQ ID NO: 12163 - DNA, 354 bp, Zea mays
  Clone ID: 701161651_FLI
gccagccagcaaaaatattcctaaggttctagactcagtagagctaaaactgaatacatgagatgtgacttcggcactactacatatgaggaaggagatgttaatttagaaggtcaagtagtgcctagaaagaatacatttcagtatttaggatcaatgatctagagagatggggatattaaagatgatagccatagaatcaaagcatgatggaggaagcggtgccaagcatctggcgttctatatgacaagatggtaccacagaagttaaaaggcaagttttatagaatgacaattagatctgctatgttgtatggtgcagaatgttggcttacaaaagacatcatttttagc

SEQ ID NO: 12164 - DNA, 933 bp, Zea mays
  Clone ID: 701161694_FLI
gttggcttaagctcaaggacgactattgacaaaatatggaacattacaacaaacgtctcagagacagacatctatgaaaccatgcataattttctcataaatacatgaccaacaaaccatctctttgtcaatttgggtgactttagctgctctcatgatgtgcccgtaaaactgagaaaactgtacctaagcacctgcttgccatacaccaaccatgtttctgctcatttgtcgcaaggggcagatagttaatacctcttcccattgccaagcaagagagaaacgcacgcgagccgcgagcagaacagagcagcgcggcgccatcccgatctcgctatttcccttctcccccgatgcgatctcgccgaaccctaatccccacgcccgacgcccggccgtcgccggagccctagccccgaatgcggcggtgacgcgcggcgtgccaccaccaccacctcagcgcccgcgcccgcgcccgcgcccgccaccgaccgtcctgcccggccgacaccagctgccatgggcgccgccgacaagtggctgctcccgctcgtctccgtctccttcgtctcgctcctgctcttcctctccgcgctctcgggcttctccgcctcctccgcactcttcgcgcgcctcccgccaccctcctacgtgcgccgaggcgccgccgcaccgccctccttcgcctacctgctcgcgggcggccggggggacggcaggaagctcctgcggctgctcctcgccgtctaccaccccaggaaccgctacctgctccacctctccgccgacgcgccggcctccgagcgcgccgagctcgccgcggccgtcgcgcgcgccgctcccgccgtgcgcgccttctcgaacgtcgatgtcgtgggcaggcccaccgcgggcaccccaatgggatcctccggcctcgccgccacgctccgt

SEQ ID NO: 12165 - DNA, 963 bp, Zea mays
  Clone ID: 701161736_FLI
tgaaatttgtattcgtaaccatttattggcaacttcaggttatcacactctgtatgaatggtatcgatccatggaaagtgagcattttccagatcctactggtcttcgtgctcgtttggagcaatggactctgggactgtatccagcatgtataaaatatcttatggcagcctttgacgtccctgaggtcatggctgtgacaagaataaatatatgcaagaacggaatgatgtctctttcgcggagtgttctgatcatgtactacacttctgtgtttatctatttctggattttctcgactccagttgtttctctcatatttggtagttacctatacatctgcatcaattggttccacatacactttgatgaagccttctcgtcgctgcgcatcgcaaactacaaatccttcacaaggttccatgttaagaaggatggtgatctagaaatatttactcttgcagttgacaaggtcccaaaggactggaagttggatccgaggtgggaatcagagggacgagggcctcatcagctcagccatgaccggaagcatccaagcaagtggaggtcagcctcatcaactgaccctgtgagatctgtacgggttgttgatcatttcaccatcgaaagaacaagaaccccagatatggagccctcttcctgattgtgcagcccttactattataaggagttgctactgctgctagaaaaattaacaataactagcttcaacacacagtattgtttttgtttccacatccagccaataggtggaccgaggtgatctgcccttgtcggcgtccccgctttactgacctcacctgcagcattgtaatctgtatagaaagaaaattcacctgctgcctattgcttgtattcaatcaaaggaactctaaaaaaaagagtgttacagaagaatgttttgagaaagcaaagggatgaatcgattcatcatcatttact

SEQ ID NO: 12166 - DNA, 713 bp, Zea mays
  Clone ID: 701161793_FLI
tggcaccgctggtccgctccacggctccagttccagtgacactgcaccagaccacccggctccagcgagatccagacccaaaacctcacctcgcagccaacctctgctcggaggggaagggaagggaagggaagcaatggcggccaacggaggcgggtaccgggcggaggacgactacgactacctcttcaaggtggtgctcatcggcgactccggcgtcggcaagtccaacctcctctcccgcttcaccaagaacgagttcagcctcgagtccaagtccaccatcggcgtcgagttcgccacccgcagtctccaggtcgacggcaaggtcatcaaggcccagatttgggacaccgccggccaggagaggtaccgtgcaatcacaagtgcctattaccgaggagccgtaggggcactgctggtctacgatgtcacccgtcgcgccacgttcgacaacgtgggccgttggctgagggagctcagagaccacaccgaccagagcatcgtggtgatgctggtcggcaacaagtccgatctccggcacctggtggccgtctcgaccgacgacgccaaggagttcgccgaggccgagtccatgtacttcatggagacgtccgccctcgacgccaccaacgtggacagctccttctcggaggtgctgacccagatataccagatcgtgagcaagaagacggtggaggcctccgaggagg

SEQ ID NO: 12167 - DNA, 196 bp, Zea mays
  Clone ID: 701161794_FLI
gatattgattttgagaaagagcccattggatttggaaaggatggcaaggaagtctacttcagggatatatggccctcgacagaagaaattgcgcaggttgtccaatccagtgtgctgcctgacatgttcaagggcacccatgagtagagtgatgcttctgggacagttagctggttccacattgggttgccttttg

SEQ ID NO: 12168 - DNA, 752 bp, Zea mays
  Clone ID: 701161830_FLI
ttcttagcctcctccatatcctcctctccacttcttctccttcgccatgagttctatgctaggccagcaagaaccatagcgagagcaagcaacagctagtggcagcactcgagaacgagctaggggaggaaggtatcgacaagagaagcaaagtcatctcccttttctcgatcactttggttcttttctatacgtgtggattttggtgtttgcgagcttttgctcgcggtcgccttttctcgcttgttttcgagtgcaactgcgtgccttggatttcctgcgctccttgttgttttgttgttcttggacgagccctaatcccttgttgtttttccccccacagcttcgtgcgggttcctttgttgtttcagatcaatttgcagccagccacacactcacgcgcttcttctcccttcaattcgatctccttttgcgccttccttttggttctttcggaaaaaaaagagccagcttttctgacatcttcttgcgcttgcttgctcgctcgcatgacgtccagcagtagtgacagtctcttggttcttgcttggatagtttgggtttgttcttgccttgcctgaattggagaccgctgcttgttttggtgaagggagggtagagagaagatcgacagccctgctagtgtccaaccacccagaggcaagggcggctaccgaaagggaaaagattcccttgttcttgaccggcttctcagggacaaatctggaggcggcgatggcatccaattcatc

SEQ ID NO: 12169 - DNA, 1006 bp, Zea mays
  Clone ID: 701161833_FLI
caagattcttgaggtccactcccgaggaaaggctttggcgaaagatgttgattttgataaaattgctagaaggacccctggtttcactggtgctgacctccaaaacctcatgaatgaggctgccatccttgctgctcgccgtgatcttaaggaaattagcaaggatgagatctctgatgctcttgagagaatcattgctggccctgagaagaaaaatgctgttgtttccgaggagaagaagaggctcgtcgcttaccatgaggctggccatgcccttgtcggcgccctcatgccagagtatgatccagtagccaagatttccatcatccctcgtggccaggctggtggactcacattctttgctccaagcgaagaaaggctagaatctggattgtacagcaggagctatcttgagaaccaaatggctgtagcccttggtggcagggttgctgaggaggtgatctttggccaagacaacgtgacaacaggagcttccaacgacttcatgcaagtgtcacgtgtcgcaaggcagatggtcgaaagatttggattcagtaagaagatcggccaagttgcgatcgggggaccgggtggaaaccctttcttggggcaacagatgtcaagccagaaggactactctatggcaacagcggatgttgtggacgccgaggtgagggaactcgtggagaaggcctactctagagcaaggcagataatcaccacgcacatcgacatcctccacaagctcgcccagctcctgatcgagaaggagaccgtggacggggaggaattcatgagcttgttcattgacggccaggccgagctgtttgtcgcttgagatgtcacaaggcttgcggtgcgtatgcttttcggtgttttgtgtcagagcgagcaatcacaaagcaatggagagcccagcttgtaggaaccacatcgatgtatagtagttgatacgcatgtactgactaatttgagcaagtaaaatgttactgctcacaattatagc

SEQ ID NO: 12170 - DNA, 401 bp, Zea mays
  Clone ID: 701161837_FLI
ccgtgcgcgaccccgccacctccgcggttccgcgcgttcgcctcctcccgcgcgtcgccgccgccctcctcgccctcgcaaacgggatcaatcgcttccgccgccgcagcagcatgcgagcatgtggcggagaagcccgctacatgcacggccgacgagctgcactacgcgcccgtaccgggcaccgagtggcggctcgcgctatggcggtaccttccgccgcctgaggcgccaaagaggaatcacccgctgatgctgctgtctggagtggccacgaacgccattgggttcgacctgtcgcctggggtgagtgaggcagtgagctagttcataatgacgctattgtctactggtgtggtgtctccataaactaccctgcaaagagtgtgtagtatgtagtt

SEQ ID NO: 12171 - DNA, 776 bp, Zea mays
  Clone ID: 701161853_FLI
cagacaggataggctgcataaacatagagctggttcgtctgaacatttacatacaacccaaaaggtcacatcgcttcccagaagagaaacaaaataaacaagagcaggaaaacccaaaaggtcggttcggttctttgatgatcccttccaagagaaagtagggaaaagaagaggaagaaaccacgaagaaagatgatacaagctcagaagacgttttcttcttcacagcacaccaacatcactgcaaggaagtgtctaagaggtaaacactggacactcagttaccgtcctcttctggccaggaggtgctgttagctgcatgacaaacgcgaggttatcagcaatctggacgcagccaaggtaatggagagatttgatcagttgtgtgttagagagaggtactgacagatgaagagaggtcagatgtcttcagaacgcgcagcctcttcaccgaagaaacaaacatcctgcaggtttgtctgccttcttcccattctgatgttcaagggatgctctgctagaggtggccagatttcttctgaaggcacgaactggaggccacccaataaccggggtatttggagatctgaagttggaccataagatagtgatgaagacatgagaatgaagcatagtagtggatgcatatatagacatgcattataatatgctgataaatgaaatatatatatatatatgctgtttgcttcctggaaatgattcatgttcagaacagatactaacagcttgaaatctaaagttttgtggtattctgc

SEQ ID NO: 12172 - DNA, 543 bp, Zea mays
  Clone ID: 701161875_FLI
tggtatgctgcgggcacggctgcgcggggcagcgcgcgttcgcggcggcggcggcgagggggccgggcggtggacgaccccaggtcacgaggagcgccccaaggggtacctcttcaaccggccgccgccgcctccgggggaatctcgcaagtgggaggattgggagctgccctgctacgtgacctccttcctcaccgtcgtcatcctcggcgtcggcctcaacgcgaagcccgaccttacaatcgagacgtgggcgcaccagaaggcgctcgagcgcctccagcagcaggagctcgccgctgccgacacccaggccgagtgatccgcgcgtctcaggtcctctcgaactctcggctgcctctgatttggttccaataagatggccacaatgtgcggtcctgaatgttctggacttctggtattgatggaacacgagctgaacactatgctgctgttttttctgttctgttttgaaatttgcccggtgatgatggcgaatgtcctgaatattctgaatattttgaaatgtttgactgttgtatt

SEQ ID NO: 12173 - DNA, 948 bp, Zea mays
  Clone ID: 701161894_FLI
gtcggagcacgagcaccaaaggtccccgtaccgcccttacctttgctctccttttcttctcctgttcacccctcgtgccataactgggcgaccgccgctcccgccctacgccaggtgcccagatcttcgtcggccctgcccctgcttccttcaactccaccaccaggcgatgccctagacttaattgaatgggctctcttctcaccaggactggcgtcctgccatggctccacgccaagattgttgatcccatgctgcaggtcatcagaaggggagcagaacccaagcaactagccttctctgctgcccttggtatcacgattgggatctttccgcttgatcgtccctttcttgcgtttgggggaaaccatcactggcagtgggcacttccccttgacagccaacgcattgaagaatgttctcactggtcatgcatcaaaggatgtgctgctgagcatcgtcaatgcggttagtgaacaacctttctgcaatcagtactgctcattcataggataggagcacggttcttgctttgctgcgacattgacataattgctattgtcgacaacagatgctgggttggcttattgctgcaccatttgtacttgccgtgctgtacgctgtttcgttcccttgtttcaaggtcctggttaacaggtttggcagcattccttcgagccccaggaccccattcaaggcggtgtaggtagtgtgtagcatgctgaatgctcctgaaattgtgtacaccaaattctttgtgatgccgttgggttgagatgggttccggcgtcatgttgctcggccatcccaggcactggcgaataaatccgacttgagaggcacgtgtcctctataattctgtatgctggcttggtaatcatatagtgagatgtgtatttatgaatttacgaactcttcgtgaataaagccatgtttggataaaggatt

SEQ ID NO: 12174 - DNA, 524 bp, Zea mays
  Clone ID: 701161896_FLI
ggccacgggcacgggcgctgccgccgtacgcttccctttcggcagcatccccgttacgcacccgtactacttcttcgggcaggccgcagccgcagccgcggaagcagggtgccgtgtgctcaagctggcgccggcggtcaccgtggcgcagagcgactccgactgttcgtcggtagtggatctgtcgccgtcgccaccggccgctgggtcggcgaggaagcccgccgcgttcgatctcgacctgaactgctcaccgccgacggaggcggaagcctagtcgtcgaagcttttaatgactgtctgtcttcttagttctttcttctcctttttctcgaggaaaattcggtactactaagctgagagacgctctcctccgacagacgacgtcgacgacgggcatttttgtaaatagtttttgcgccgggacctttttagtttatgatgaaagctgtattgtcaccgaagacaggtcctgccggcgttgttatggaccggattactatattatattatgcactactagt

SEQ ID NO: 12175 - DNA, 537 bp, Zea mays
  Clone ID: 701162750_FLI
ggctctccagctgctcaagaagaaggagaaggcagataatatcatcaagaaaaccaaagaaaagcgccagaagaagaaacaggagaacgctgatcccaaccggcccaagaggccagcctcttcctttcttcttttcagcaaggaagagaggaaacagctgatcgaggaacgcccgggcatcaataactcaaccctgaacgcgctcatcacggtgaagtggaaggaactgagcggcgaggagaggcaggcctggaatgcaaaggccgcgcctgccatggctgcgtacaagaaggagatggaggagtacactaaggcccaaagctcatctgcttgacagaataactaattcctgcgagtgagctttggttacaaggatcctcatctctgaatcctggtgtggtagattacttcgtgtgatctttagctttgtgtgaccttattagtcgcagcaatcagtgtaatggcggttcatatggtttagtggcagtttatattgttgccacgggcccaggaattgagtaatctttcagttctgac

SEQ ID NO: 12176 - DNA, 1367 bp, Zea mays
  Clone ID: 701162760_FLI
ccttcatcttccagccgctcaccgcttgtgaagatcacagccgtcgttcttatcttcttgcgccgctcctctgttgatatttcatcgctggcttcttcttattcctgtacgcgagctcagcttctctcgtatcctccggcgccttccctccatttcgtccttccaaccatggccgcgtgcctcccggctccagtccgcccactcctcacggtgcccttcctctatctcctccctgctcctctgccccagttcgagctgctcccatggcgccgttggccggatctccctggccgtgtgcccctgcgctcggtcgcctctcctgcagctcgctctctcctccctccatctctctcaagcgctagccgccgtggttccctcccctgggctctgctcgccggagcttcctgctcggccacgcccatgcccaacgcctagccgagcggcctcactgcacgttcctcctttctccaagttgagctccatctccctgcgcgcggtactctctccggcgtccagttttctccgcgccgaagttccctccatgtgttgcccagcaccagttcctctgtggccacgcgcatgaatccctgctagccagcatgctctggattcagccatggagcatctcctgcgtctctctctattcgctggccgagatccctgcctgcgcgctctgtttcttcttgccgagcgccactcgcccagccaaagccacccagccgaagtcccatggcgcttcttcggctgaatttcctgctcgcagccgcgaagtcccctgctcggccttcttcctcggtgtcgcgcgcccggttccagctcgcccctgacgcgcgcgcttctcagctcgtctctctctctgcacgccgagcggctcgcacaggtccttctctctgccccggctcgcggatctcccatgtgccacgcgcgccctcggccatgaaggacgccgcgcgccgctcagccttgtcatttccttgtcatgctcgcccagctctgttgccgcgccctgccttcgtggccgctgcgcacttgcctctgctcggcaccgagtctgtttgccgcggacgcgggtcgccgcgctgcgcaggctgctctctctagtcagactgtctccagcagcgtcccctaaatttcgtcccctaaaggaatattctttgttctttacagaacactctaaaagattttgtcctctatatattctccgtctccagcagcgtcctctaaattccgtcccctaaagctacagtgttaacagattcacattttccatttctttttcatttttctttgttttcttctcatttgacactatataaatgatacgaaaaaattgtatttattaattttgaaagtaataaattcgaaat

SEQ ID NO: 12177 - DNA, 697 bp, Zea mays
  Clone ID: 701162777_FLI
gctaaacctccccaagtccaccgtcgccaggcccaaaaaccaccgaggatttttcacacgcgaagcggcacagccatgcgcctcctctgctgcttggccgctctcgtcgtcctcgctctccaacaccaatgccacggcctactcctcccgctcaccaacacgatgctctcctcgctccgcggggccaatggcaccgccacgcccgtgcatcacctcctccgcgcgtcgtccctccgctcggccgcgcgccacggccgacaccgcgcgcgcaggagcccgtcatcgcctcccagtcccggaagccaccgccagctctcgctcccactctccccaggcagcgactacacgctgtccctgtccgtggggccggcgtccgccgcggcgccggtgtccctcttcctcgacaccggcagcgacctcgtctggttcccctgcgcccctttcacctgcatgctctgcgagggcaagcccacgccgggacgctcgggcccgctgcctccgccgccggactcccgccgcatcctctgcgcgtcgccgctgtgctccgcggcgcacgcctcggcgccgccgtcggacctctgcgccgcggcgcggtgcccgctggaggacatcgagacgggctcgtgcggcgcgtcccacgcgtgcccgccgctgtactacgcgtacggggacgggagcctcgtggcgcacctgaggc

SEQ ID NO: 12178 - DNA, 261 bp, Zea mays
  Clone ID: 701162854_FLI
gcacattgcagaccgcctcagcgcctcaccaagcgaaactcgttggcggctagggttttgctgcctcccgagcccaaaccctagagcacccgcgcccatcccatggcgtgctaggcttcgattgagactggggggattagtaccgcaggctgggattagagcaagcgccgagcggaaatggcatcgagtaaccaattcgatctacttggagacgtcgagaacgacgaccctgcccacctcctcgcagctgccgagaagaag

SEQ ID NO: 12179 - DNA, 734 bp, Zea mays
  Clone ID: 701162862_FLI
gtcatgcaggaggtgaggaggcacttccgccctgagctgctgaaccgtctcgacgagatcgtgatcttcgatcctctgtcccacgagcagctgaggaaggtcgctcgccttcagatgaaggatgtggccgtccgtcttgccgaaaggggcatcgctctggctgtgaccgacgccgcattggacatcatcttgtctctctcttacgatccggtgtatggcgcgcggccaatcaggaggtggatcgagaagagggtggtgacgcagctgtcgaagatgctgatccaggaggagatcgacgagaactgcacggtctacatcgacgccgcgcccggcaaggacgagctggtctacagggtggaccggagcggcggtctggtgaacgctgagacggggatgaagtcggacatcctgatccaggtccccaacagctccaccaggagcgacgctgcgcaggccgtcaagaagatgaggatcatggaggaggacgaggacggcatggacgaggagtaaaaggcgggccggaggacgcggagctgcgcccaggccgcaggtctggcgccggcatcatcgagtgtcttttgaataagcgtgtagataagcccgtgaatatgcagacgaggttgagatgatgttcttgtaacgctgctgtttgtcaagcatggacgaatggtctctcatatagtatcaaagtgacaagtctctcaatcgatgtcttgatgtcattatttttatct

SEQ ID NO: 12180 - DNA, 530 bp, Zea mays
  Clone ID: 701162867_FLI
gagctggccgcgatagccggcgccgcgccgccgccgaagctggaggacttcctcggcggaggcgtcgccaccggtggtccggaggcggtggcgcccgcggagatgtacgactcggacctcaagttcatagccgccgccgggttccttggcggctcggcggcggcggcggcgacgtcgccgctgtcctccctcgaccaggccggttccaagctggccttgcctgcggcggcggctgctccggcgccggagcagaggaaggccgtcgactcctttgggcagcgcacgtccatctaccgcggcgtcacacggcaccggtggactggcaggtacgaggcacatctgtgggacaacagctgccgacgcgaagggcagagccgcaagggccgccaagtatatttgggtggctatgataaggaggagaaggctgccagggcgtatgatcttgcagctttgaagtactggggttctagcaccaccaccaactttccggttgctgagtatgagaaggaggtcgaggagatgaagaacat

SEQ ID NO: 12181 - DNA, 380 bp, Zea mays
  Clone ID: 701162891_FLI
tggccgggtgttagagaagtgcaggctcgtaggtccgatcgccggagtcacatgctctgggctggcttctgctgccaggcgccagctgcctcgctagcccaaccgcaatgcgcgccatcgcctccccactcgcgcctcctcgcccagagccacccattgccgtccgatcaagatccaacgccctcgaacgcgccactttaccaccagtccccctcaccgccgcccgtctccgcctccgccgacaaccggagccagggccctcgccacccacccgattgagccaccccatgcctcctcccactgcgacgatgtcccccgcagctggcggttcctttcctgagctcacctgtcccgcggactttgccaccgtcgccgccccc

SEQ ID NO: 12182 - DNA, 897 bp, Zea mays
  Clone ID: 701162939_FLI
caccaagccatatgactcgcgatggagagaagccttcctcgacaatgtctcgttccacagcagccagttctctgtcaaggagttgccggacaacaccgtggagttctccaccctctactacggtgttcccgggcacctacccaagcctgacgacgaagcctccgagtccattctcttccgggtgaagatggtatgccggatccacgggtcaggcgacgtggttctcgactacgaggtaaaccccaggagcgacctccctccccttccccgggtgggcgtcgtgttcagcgccgggaggtccctgagccacgtcacgtggtacgggcgcgggcccttcgagtgctacccggaccgcaaggcggcggcgcacgtcggcgtgtacgagagcagcgtggaggagctgcacgtgccgtacattgcccccgtggagtgcggcgggcgggcggacgtcaggtgggtggcactccgcgacgccggcgggctcggcctgtacgcgtcggcgcacggcggctccccgccgatgcagatgagcgcgagctactacggcgccgcggagctggacagggcaacgcacgtccacaggctggtgaagggggacgacatcgaggtgcatcttgaccacaggcacatggggctgggcggcgacgacagctggtcgccgtgcgtgcacgagcagtacctgctgccgccgacgcggtacgccttctccctgcggctctgccccctgctgccgtcgtcgtcgtgccatgacatctacaggtctcagctccccagctgatggtgccgtgtgccggagacccgtcgacgtcgagccttgggaaacaacaatgaacgcaatggcctggccagtgaatgaaagtatataatattgtaataaagcagagacgtattagctcc

SEQ ID NO: 12183 - DNA, 285 bp, Zea mays
  Clone ID: 701162952_FLI
gccggggcctagacaagtaaatgacccatgagcattccttgcgaacagcgcgcggagaatgcgagggctgtatctctttgcactgcagttgcacaagtttcatggaacgttgtcgctgacaatgctctactgaacaaagatagctagacggtaaaaaaaaacatttgatactagttcgagctaaacaaagttctgctctgacatctcttcaattggtgcaccggttgcatcccctctttaacgtatttgaaatttcgaaatgcaacactcacgtatataaacatc

SEQ ID NO: 12184 - DNA, 1058 bp, Zea mays
  Clone ID: 701162956_FLI
gtccaaatgcgccgcttgtcctcaaaggaatcacttgcacttttgctgctgggaacaagattggggttgtagggaggacaggaagtggaaaatcaacacttatcagctcattgttccgtctcgttgatccggcgggtgggaggatacttattgacaagttggatatttgctccattggccttaaggatctaagaactaaactaagtattatccctcaagaacctacacttttcaggggaaccgtgcgcaacaatttggatccccttggccagcattctgatgaagagatatgggaggccttggagaagtgtcaactgaagacagcaatcagcaccacctctgctcttctggatacagttgtgagtgatgatggcgataactggagtgctggacagcgtcagctcttctgtcttggcagagttctcctacgcaggaacaaaattctagttctagacgaggcaacagcatccatcgactctgcaacagatgcaatcctgcagaaagtaatcaggcagcagttctcaagttgcacggttataaccatagctcacagggtaccaactgtgacagacagtgacaaggtcatggtcctgtcctacgggaagcttctagaatatgaaacaccagccaagctgttggaagacaaacaatcagcatttgctaaacttgtggctgagtattgggctaataccaagagaaattcaacatgatctaccattattgcaggacatgataaaagatatgatcattttaatcaagatatcgaaagattcaagggttctcaaattgaatctttaacaagacaaggaatgccatcatgattatttgattgatgtggttactgggagtgaataagatatcaacagaaattcaattttggtaatggaagcaatttttggagtgagggctgatgttcgagagaactccagctggttgattgaacatgtggtattcaatgcaaaatgaaatggaggatccacttctagcatgatcaatggcatttttcatacataagccttttttgaataagagaagcgaagtaccaagtcgtgaattgc

SEQ ID NO: 12185 - DNA, 1156 bp, Zea mays
  Clone ID: 701162958_FLI
gaccaagggcctcttctccttctacgaggacggccaccaggagtgctgccgcgtgcgcaaggtgcggcccctgcgcagggcgctcagggggctcagggcgtggatcaccggccagaggaaggaccagtcccccggcaccagggccagcatccctctggtccaggttgacccttccttcgaaggcctggacggcggggctggtagcttggtcaagtggaaccccgtggccaacgtcgacggcaaggacatctggactttcctgcggaccatggacgtccctgtcaacgccctgcatgcccagggctacgtgtccatcgggtgcgagccgtgcaccaggcctgtcctgccggggcagcacgagcgggaaggccggtggtggtgggaggacgccaaggccaaggagtgcggcctccacaagggcaacatcgacaaggacggccaggcggcggcggcggcggcggcggcccccaggactgccaacggcaacggctcggcgggcgccccggacatcttcgagagccccgccgtcgtgtccctcacccgcgccggggtcgagaacctgctgcgcctggagagccgcgccgagccgtggctcgtggtgctgtacgcgccctggtgcccgttctgccaggccatggaggcctcctacgtggagctggccgagaggctggcggggtccggcggcgtgaaggtggcccggttccgcgccgacggcgagcagaagccgttcgctcaggccgagctgcagctgcagagcttccccaccgtgctcctgttcccgagccgcaccgcccggcccatcaagtacccgtccgagaagagggacgtcgactcgctcctcgccttcgtcaacagcctccggtgaggcccgccagtgagcgagaaccatcgttctctgtcagtatgtaccgtgttacatgttggtgtccatctaggtgtgctgtacgtagagagggaggcggagggaactgggatgctagaaaaacagatgcagctgttgcttgtaactgcagaatgatggtaggtatgcccgaagtctgagatcctgtgttatttggcagctgagggaggcagaggttatttgtgtgtgcttgtagttgtagctagtggcgatggagtattctaaggaaaatcaaataagaatcgaagttttgag

SEQ ID NO: 12186 - DNA, 568 bp, Zea mays
  Clone ID: 701162975_FLI
cgctcggctctactgggcagatgcacccatctgtttcgcggagaagcccgtcctcgtcggagactcggagtgtagaggactagaggggcgaagcgatccgaactccgagaaccccagggccagggctcagtccacagcgagagcagagaacgcagcggcctgccggcctccgcccctcactcccgcagccatggccgccgccgccgccgtggttgccgagcccaagaccaagtacgatcgccagctcaggatatggggtgatcaaggccaaactgcactggagaaggccagcatatgcttgcttaactgtggtcctaccggaacagaagcattgaagaatctcgtgcttggaggaataggaagtgtgactgttgttgatggctccaaagttgaagcatctgatctggggaacaattttatgtgtaatttctttgctatgtgattccacctgttcttctgaattcatccccagaaattgatggaactcatattctggtaccttatatttgcattcagtggatgaaggatgtttggggcaaccaagagctaaatctatatgttcattccc

SEQ ID NO: 12187 - DNA, 603 bp, Zea mays
  Clone ID: 701162977_FLI
gatgggtgagcaggtgaagggcatgatccacgacaaggggccgacggcgtcccaggcgctgacggtggcgacgctgttccctctgggcgggctgctcctggtgctgtcgggcctggcgctggcggcctccacggtggggctggccctggccacgcccgtgttcctgctcttcagccccgtgctcgtccccgccgcgctgctcatcggcacggccgtcgcggggttcctcacgtcgggcgcgctggggctcggcggcctgtcctcgctcacgtgcctcgccaacacggcgcggcaggcgttccagcgcaccccggactacgtcgaggaggcgcgccgcaggatggcggaggccgcggcgcacgcgggccacaagaccgcgcaggccgggcacggcatccagagcaaggcgcaggaggccggtgctggcactggcgccggcggcggcaggacttcctcgtaaataagcaaatcatccatggatgcgtgcgtgtcaatgtcagcagggtcgtcgtggaatgctcttctctgtacgtgggtaaccgtcttttggtcgtcttccccgagtgcgtgataaatatcctggtgttcgtcgtgtgtggtgct

SEQ ID NO: 12188 - DNA, 735 bp, Zea mays
  Clone ID: 701163059_FLI
cgcctcggccatcaccaccaccgtacgtgccaccctacgtccccccgacgcctcggccatcaccaccctacgtgccaccgtacgttccgccgacgccgccggcggtgcggacgtgcccgatcgacacgctgaagctgaacgcgtgcgtggacgtgctgagcgggctgatccacctggtgatcgggcaggaggccaggtccaagtgctgcccgctggtgcagggggtggcggacctggacgcggcgctgtgcctctgcaccaccatccgcgcgcgcctgctcaacatcaacatctacctccccatcgcgctcaacctgctcatcacctgcggcaagcacgcgccgtcgggcttccagtgcccgccgctctacgactgatgaacaccaccaccagccaacacttctatacgcgccgccatgcatgcatgatgtgatggcatcctgtgcaagctagcgctagctagtagtagcatgtctaccatttgctccgtgatttctctagttcttgctctcgcgagtatgcgtacgtaatgcgttgcttctcgtcaggactcgggaacttttccaactccgatgctaagcgtgtagcttgcttaatcagtcgatgtaccatgttaatcaagtgctagccctttctctgctctgtcgtcgaagttcttcggtcttcacttcttgatctgcagatgatatatgaaaacgttatacgaaatggaatataatattctatcttgttgac

SEQ ID NO: 12189 - DNA, 409 bp, Zea mays
  Clone ID: 701163067_FLI
cttttgtagtttttttgaccgatgatctctttcttccagacacatattacaccaattatgagaacgaagtatatgcaattttcagtactcctccgtgcttctgtttgtggttgtattggttacacgagtttgcttggtcagccatgtcatctcttggtcacaaggcatacctgattgcaatgtattacaccatgcattgttctgtgccctttggtttcttaggtactatatagtgtacatacatatgatgcttcggttcgttgtcaaatttggcctaacagcaatggtttctgctgaaggatggtggttccttgtcgcttgttccgtttctttgaagcatctttcttcacttctttcggtggttgtaattttgtgggaataaacacagttcaaatcttaagtttttcag

SEQ ID NO: 12190 - DNA, 290 bp, Zea mays
  Clone ID: 701163075_FLI
cagcaaccagcaagcggcaagcgcgcgcacacaccaaacgcaactgcaactgcaactgcaagagcacgccacagcagaaaccaacagttccacacgaagcaaaaaaaggggaccctacccctctgccgatttccatccgccgccgtcgtctgtgaccgaccagaccatggacaagatcctggccttctccatcctgagctcgtcgccggcggacatctccgcggccggcctctcctcctcctcctccgccgcccggctctcgtggcgggctcggccccaggcggcggcgg

SEQ ID NO: 12191 - DNA, 729 bp, Zea mays
  Clone ID: 701163081_FLI
gtcggccactgcatcgccggcgcgcgccgcgtgctcgtctaccagttcgtgcccaacaagaccctcgagttccacctccacggaaaagggcagccggtgatggagtggtcgacaaggctgcgcattgcgctcggatcagccaagggcctcgcctacctgcacgaagactgccatccccggatcattcaccgcgacatcaagtcggccaacattcttctcgacaacaacttccaagccaaggtcgccgacttcgggctggccaagctgacgtcggacagcaacacgcacgtgtcgacccgtgtgatggggacgttcgggtacctggcgccggagtacgcgtcgagcgggaagctgacggacaagtcggacgtcttctcctacggcgtggtgctgctggagctcctgacggggcggcgccccatcgacgccggcgacgcgcgcccgttcctcgacgacagcctcgtggattgggcgaggccggcgctgtcgcgcgcgctggccgacggcgactacgacggcgtcgcggacccgaggctgcggggcaactacgaccccgtggagatggcgcgcatggccgccagcgccgcggcagccgtgcgccactgggccaagaagcgccccaagatgagccagatcgtgagggcactcgagggggacatctcgctggaggacctcaacgacaacgagggggtgcggcctgggcagagcatggcgttcggcacggcggac

SEQ ID NO: 12192 - DNA, 631 bp, Zea mays
  Clone ID: 701163146_FLI
gagaatatgatgccatgcctatgaccacttggctttgatgatggaaactcttgggaagatgcctcggaagattgctagctcaggaactcgttccaaggattactttgatcggtatggagatttgaaaagggtcaggagactgaagttctggcccctagaccgtgtgctcgtagaaaggtacagtttcagcgaacccgacgccaaagggttcgctgactttcttcggccaatgttagatttcgctccggaggacaggccatctgccgcgcagtgcttgaaacactcttggcttaattgatccaacgcgacacgaaagtctgaccaatagatgtttacatacatcctacgtgcaaattcgctgccgaagactctttgtgactgtgattgcagatatccacggactttgatttgatgtaaccaaggctgagaatcaggagccactttttaggcgcagcctgatgagaacgggacatgagattcagctcggatgtagcaagcgtttcgctggtgtgtttgggggtgcagactgcagagctaatgtgatgttaacctgcatgtgtgttagtagggccaaaatattgatgtattattattttttggtaatgtgatctggccaacaaccttttccttt

SEQ ID NO: 12193 - DNA, 1297 bp, Zea mays
  Clone ID: 701163177_FLI
ggcttggtgctgcacttcagtctacctaggaggctatgacaaggaggagaaggcggctagagcttacgacctcgccgcgctcaagtactgggggcctacaaccacgaccaacttcccggtaaagagaactcaaagtcaatctcgggcggcaacacatatttgctgcgagagatggctagctttacctgaatgatccatgcatgcatggcgtaggtgtccaactacgagaaggagctggaggagatgaagtccatgacgcggcaggagttcatcgcgtcgttgcgcaggaagagcagcggcttctcacgaggcgcctccatctacagaggagtcacaaggcatcatcagcacggccggtggcaggcgaggatcggcagggtggccggaaacaaggacctgtacttgggcactttcagtactcaggaagaggcggcggaggcgtacgacatcgctgcgatcaagttccgcgggctcaacgccgtcaccaacttcgacatgagccgctacgacgtggagagcatcctcagcagcgacctccccgtcgggggcggagccaccgggcgcgccgccaagttcccgttggactcgctgcagccggggagcgctgctgcgatgatgctcgccggggctgctgccgcttcgcaggccaccatgccgccgtccgagaaggactactggtctctgctcgccctgcactaccagcagcagcaggagcaggagcggcagttcccggcttctgcttacgaggcttacggctccggcggcgtgaacgtggacttcacgatgggcaccagcagcggcagcaacaacaacaccggcagcggcgtcatgtggggcgccacctctggtgcagtagtgggccagcaagacagcagcagcaagcagggcaacggctatgccagtaacattccttatgctgctgctatggtttctggatctgctggctacgagggctccaccggcgacaatggaacctgggttactacgactaccagcagcaacaccggcacggctccccactactacaactatctcttcgggatggagtaggtgcatgcgctgacaagctagctagctgaaatcaggtggtaggcctaggaagaagctaggactgacatcgaactgatcacaattttggctgctacatataccatgcatgccccatgtatggatgggggtgcgtgtgcttccttctgcttgctattcacgacacttgctgacttactgtggcagagccgcagagggctcgtgtaccatcagcatttctaaattctaattatcaagctcgtttcaagct

SEQ ID NO: 12194 - DNA, 766 bp, Zea mays
  Clone ID: 701163190_FLI
aagaaccttaagctcatcgatgttgatgtcccagttgttggtggccatgctggaatcacaattctgccactgttatcgaagaccaggccatctgtcaccttcacagatgaggaaactgaggagctgacaaagaggatacagaatgccgggacagaggtggtggatgccaaggctggtgctgggtctgctaccctgtccatggcctatgccgctgccagattcgttgagtcttctctccgtgcgctggctggcgatccggatgtttatgagtgcacatttgttcagtctgagataactgacctgccattcttcgcatcaagagtcaagttgggcaagaatggtgttgagtccgtcatttctgccgacctccagggaatgactgagtatgaggccaaggcacttgaggcgctgaaggccgagttgaaggcaagcattgagaagggtattgctttcgtgaacaaacagcgggaagctgctgcatctgtttgaggcgaagcaagtgaaacagaaggaacaatcgtcttgaatggcttttaagttttgcagcctagagttttttgttgtcggcatgtaggaagatgttccagatggttgctgtttgtttctaattgctacatgggggctgaacatccatcccccaagttatcgccggtttctgaaccaggccttatttacacataaattttgccccttctgtatcgtggttctgtttgtagcttgttggagtctacaaactacaaagaggctaataaaccacttttattgg

SEQ ID NO: 12195 - DNA, 1425 bp, Zea mays
  Clone ID: 701163196_FLI
ctcgcggagaccgagcccagtccagcgatgccgccgccgccgcaggcgaacggggggaaggtgaccccgaacctggcgatggacgccgaggccacgcgcatgctcaacctcacagtcctccagcgcctcgaccccgccgtcgaggacatcctcatcaccgccgcgcacgtcactctctacgacttcaacatcgacctcaaccagtggagccgcaaggacgtggaagggtcgctgttcgtcgtcaagaggaactcccagccgaggttccaattcattgtcatgaacaggcgcaacactgataatttggtggaggatttattaagcgattttgaatatgaacttcagccaccatatttgctgtaccgaaatgcttcccaagaagtaaatggtatttggttttataaccaacatgattgtgaagctgtcgcaagcctttttggaagaatattgaatgcttatgcaaaggtgcctccaaaaccaaaagtgcctaccacaaaaagtgagtttgaagaactggaggctgttccaacatctgctgctatagatggccccctggaacctccgctgtcatccacagctgtagtttctaatgcacctgatgaatcgctggtgaattacttcaacggtgctgctagcattgggagcgtaccaagtgcacaaatggctggcagagcacatccatcgaatgatacggtcacaccttcccatgtgccactgattgttccatctgctactccaacacatcaaatgtctcatcctttagggggttcatctgctccaccacttcctctccatgacacaaatccgcatgccagtcagtctgcaaatcttctaacaccagctttctttgcaccaccaccaccctcttcaacatctgtgacaccacctgcttcatccatgatgcctacagcaccacctcttcatccgacttcaacagctgctcaacatccttcatatggcactcccttactccaaccttttcccgcaccgtctccacctccttccctgacccctgcacacaacgatggacttgttatttcaagggataaagttaaggacaccctccagagacttgttcagaatgacgagttcatcgatttgatatatcgtgagttacaaagtgtgcacatgtagactgctgctcactagtctgtacggagtttgtctaaaccaccgatagtcttatggagctgctcgtcgcgacaaagatcgcctccctgtttttcttcttgtgagttttgtatgatttatttcttataaacctgtgcatagtttgttttaatgtagagtgcttatagcagtgcttggtaagcatttatcctgctggtttccaaataactggattgtcgtatagtatttatatgtaactgagcaccaagaatgttagattcccgcgatgcccattctggggcatctcggttttgt

SEQ ID NO: 12196 - DNA, 288 bp, Zea mays
  Clone ID: 701163213_FLI
cacccgcacgcggcggcgacgtcagtcaccctcaactgcacggaagcaccgctcgagtgcctccccctctgccccggcggcggcaaggcctgctccgagtacgccctgcccccgccgccccctatcccggtgatcccgcgcgcgccggtcgccgaccgccacgcgcccgtccgcctcctcctcatcatctccctgctctccgccttcctcttcctctcgctcgcgctctccacgctcctcctctaccgccgccgccgcctcatcctgcgacgccgccggcgcctcgcc

SEQ ID NO: 12197 - DNA, 302 bp, Zea mays
  Clone ID: 701163214_FLI
gccgcgcggagcgcggacggatggtgaccgccggtgacggcaatgctgcaacgggcaataatgcaggggttccggaaggtcgtcccggagcggtgggagttcgggaacgagttcttccggaagggggagaagcagctgctgtgcgagatccaccggcggaagacgtcgacgtccgcggctccgccgtcgcctccgccattcttcgcggcgcctcacttcccgctcttccacccggacgccccgcaccaccaccaccaccaccagttcgtggggggaggagacgacggggctgtggcggccgc

SEQ ID NO: 12198 - DNA, 1035 bp, Zea mays
  Clone ID: 701163268_FLI
ctcgctcgcagtcgcagcaagccgggaacaacacgagcagggggaggggaagaagaggagacctaccataccatagattcggagccagatactcaatcagtatcctgtaccattaccaccaggcgcgcaccaggttaccaaaatctcgtgtggagggaaatggcgcccagcagctacgaggtggcggcttccatcctcctctgcgccgaggacagcagcagcatcctggacctcgaagcggaggccgaggaggaagcgctactggcgcggagcggggagcccggcggcggcgcggagttccccgtgccgtccgaggaatgcgtcgccggtttcctggagtctgaggcagcgcacatgccgcgggaggactacgccgagaggctgcgcagcggggggatggatctccgcgtccggacggacgccatcgactggatttggaaggttcacacgtgctacggtttcggccctctcactgcctgcttggccgtcaactacctggaccgcttcctctcgctctaccagcttccggaaggcaaggcttggatgacacagctgctgtccgtggcgtgcttgtccctggccgccaagatggaggagacctacgtcccttcgtccctggacctgcaggccggggacgcgcggtacgtgttcgaggcgaagacgatccagaggatggagctcctggtcctcagcacgctcaagtggaggatgcaagcggtcacccccttgtcgtacgtcgactacttcctccaccggctccgaggcggcgccgcgccgagcagacgcgccgtcctccgatccgcggagctcatcctgtgcatcgccagagggacgcactgcttggatttcaggccctcggagatcgccttggccgtcgccgccaccgtggccggcgaagagcgcgccgtggacatcgacagggccttcacccaccgtgtacataaggagagggtgtcgcgatgcctcgaagcgatccagcaggccaccgccaccatggccctgccgcagccgctgaaaagtgaaggcccgagcagc

SEQ ID NO: 12199 - DNA, 602 bp, Zea mays
  Clone ID: 701163276_FLI
ccaccctcctcgccgcctcactccctctgaggtcgcagatccgtccggttagacgaagccgcccgcacccatggcctccggtgagctcgcctgcacctacgccgccctcatcctcagcgacgacggcatcgccatcaccgtgtgttctctcgcgctgcagttttcttttaatcgagttttctttttttgagcggtcgagttgttatgtggggggtgtttcttgtttgcaggccgagaagatcgccaccatcgtgaaggcggccaacatcaaggtcgagtcctactggccggcgctcttcgctaagctcctggagaagcgcagtgttgaggatctaatcctctccgttggatctggtggtggcgctgctccagttgctgctgccgccccagctggaggtgctgcagctgctgctgcccctgctgcagaggagaagaaggaagagcccaaggaggagtctgatgacgacatgggcttcagcctgttcgactgaggaggccctcgctacccagccattagcaaattcccttatgctgtccaagacttatcttacgctatgtctgtagccttttgttattacaagtactcaagttttgagtttttg

SEQ ID NO: 12200 - DNA, 817 bp, Zea mays
  Clone ID: 701163301_FLI
ctacatctttgccaactagtgagaaaggatcatttataaaaagtgttcttcgtgagaagctgaaagccttggaagaattctcagcttctgatagcttaccactacggcctggagtggaaaagttcattgacgatgcacttggtgaagctgttcctttggccatattggctgcatatgggagaaatggagaaaagatttcaagatctatagctatgaagttaggccccgaaagaatctcaaaaataaagattgttggaaacgttgaggttgaagaaagcttttatgggcaacttgttcttggtaaaggagccacgtccggtttggatgagcaacttgtcagggaagcccagaaggctgcttctgcagagaagcagaggattgcagaaaaggttgcatcgatcctaaaacttagtgttgacatcacagcatccgaaagctctgacaaggtaatagctgccctccgagctggttcagaatacgttgggtgcgacgtgcaaaactgcatccttgttgcgggcagccaatctggtgtccttgcagccgaacgcattggcatgccatgcatagttgttcgaagcagctttaccgcaagagccgaatttcactccgcgaaggccgttatggatgggttcggcgacacagacttgaccgtttcgaaactgctgagcaaaaagtggttttgattgtctgtcacctgtggaaacgaagggttggattggaggctgttgtgatttatgaacctgtaaatgattcagtgctaaccggagcaaacctttgtataaacaagaggtgttgctgatgaaagttaatgagtgac

SEQ ID NO: 12201 - DNA, 593 bp, Zea mays
  Clone ID: 701163326_FLI
agaatatgctccgccaatgctatgaattcattaagcaagatgattctctcctcaatgcgaatctcgcactcgtgagagcagatatttcgaggctcccttttgcttcttgttcagtagatgccattcatgctggagcggctatccattgttggccctcaccctctaatgcggtagctgaaataagccgcgtcctgaggcctggtggagtgtttgtgggaaccaccttcttatcctctcccaggaacaacccattctctgttgaagcactaaggccacttagacagattgttggaccagttaacaccagctacaactattttactgaaggagagctagaagacttgtgcaaatcctgtggccttgtcaactacagcagcaatgttcagaggtcatttatcatgttctccgggcaaaagccgtactgaagaatcctgtcaaatccaagctctgttgtttcttcaggattccttgcaaaacacgtttacaagtatttgcatatatttgtgccatactgtgcataggttccttaatttctgtactattcctgaatgtattcagtacaacaacaaaaaatgcatgctgcagactctcag

SEQ ID NO: 12202 - DNA, 437 bp, Zea mays
  Clone ID: 701163417_FLI
cagggaagcaagcagaggtatgaaaagctttctatgttgcagccactgacaggcaaaataacgaagttgtgacccaaataggaaaagggtcttgaaccagattgtgtacgagcttccatcagaacatccactagctgaaacaagaccgctgcgagagctgctagggcacacacctccacaggtatttgctggcggagtgcttggatttgcagtagccacatttacagcgatgatcgctgggcttggtagttgactccgcatttgaagaaatggtcaacattcgcattgaagttctggaattcaaattggacacatgtttcctagccagcttatgatagataatgcgttgtgtataggtgtatttaatatgcaaattgctgtcaatttgttgaagagaaacttgcgccattcttttgtagttaatcgacgagtgaact

SEQ ID NO: 12203 - DNA, 787 bp, Zea mays
  Clone ID: 701163433_FLI
cacaaactcgttgagagcgcctcaaaaccaccagaaaaattccccagatcgtccccagcacgaaaaagcgcagatggagcattccggcgccaagaagtcgaacaagatcaccgaggtcgtgcggatgcagcagatgctgaagaagtggcgcaagctctcggtcacccccaaggagccaagctcgcccacctccggcggcggcggaggcaatgccggcgagagcaagaccaggaagttcctgaagcgtacgctctccttcacggacgggccgccctcggggtcccctccgccgccgcccaagggccacctcgccgtgtgcgtgggccccgcgatgcagaggttcgtgatcccgatggagtacctgaagcaccgcgccttcgcggccctgctgcgggaggccgaggaggagttcgggttccagcaggagggcgtgctccgcatcccctgcgaggtccccgtcttcgagtccatcctcaaggccgtcgagaagaacaagaaggacgccgccttctgttactgcggcgtcgagtacgccgccgacgaggtcgggcgcggcacgcctaacaacccgctctgcagataggtggagctcaagaaccaaacggaaatgctttcttatatttccccccattgtaacgtgttgcggtgagggatgagtcgatagtatctccccccgcggattagaattactgctccgatttttatctctgctgaactgagctgatctggactgggtaatgtaacagccatggatgcaacgaatcatggaaaaattgatgtggaaacg

SEQ ID NO: 12204 - DNA, 244 bp, Zea mays
  Clone ID: 701163440_FLI
agataaaacgagtcccttgtccaggatcccaagattatgcgcctgtagtaatggtaagttcccaaaaacagcactagggaacccgtacgcaaaatacaactcaggacatcatgtcatgacgcgacattcttaaaaactccgcaacaacagaaactctctcagttccttccttcctggacacgtacaaaagacacgagcaagcgtgactcgggtgcggcttcagacttctgctgccttcgatcgc

SEQ ID NO: 12205 - DNA, 862 bp, Zea mays
  Clone ID: 701163441_FLI
gcaggcactcgtcttcttcctggagagaaaaagcagaagacaatacaaagatgtccaagatggcggaggagaaggcggcggcagtgggcggactcggaggagccggggcggcggacgcggcgcagcagcagcagctggcagcaggggaggccgcggcggctcgggtgcggcccgtggaaacgctgcttcgcgcggcaccgctggggctctgcgtggccgccatgaccgtcatgctacgtaaccagcagagcaacgagtatggcgccgtcgcctactccgacctgggaggcttcaagtacctcgtctacgccaacggcctctgcgccgcctactcgctggtatccgcgtttacactgccgtgccgaggcctgccaccgtgtcgcgctcctggctcgtcttcctcctcgaccaggtgttcacgtacctgatcctggcggcgggcgcagcggcggcggagctgctgtacctcgcctacaacggtgacaaggaggtgacgtggagtgaagcttgcggcgttttcggcagcttctgccgtcaggcgcgcacctccgtcgccatcaccttcggcaccgtcctctgtttcatcctcctgtccctcatctcctcgtaccgccttttcagcgcctacgaggcgcccccgtcgtcggcgctcggcagcaagggcgtcgagatcgccgcctacccgcgctgaagccgctggagggaggcctcgttgcaaatctctgttatgcgtagtcgatcatgtaataatggcttatcgcatatatacttcgttgatagtttgctgtcacatatgattagtacagtgctgctgctgctgctgctaaattgtgcttgactgggtaattatatagtttgcatc

SEQ ID NO: 12206 - DNA, 817 bp, Zea mays
  Clone ID: 701163477_FLI
gcgattcctgctcacactgttgttgttctacagtaagcaaagcaagtccatcagaggagcaaatgttgtttatgatcgaatcacttctcaagttgatacacctgccatttatgatgtttttcagttggagaaaacatttaagacaacattttcgttacttgttctccatatgtggcttgttctacgccgcttgaaggaagaagggaaggatggtgttaagtttggacagtacatctacgaaatgtacaaccacgatgtagagctcagagtttctaaagctggggttaacttgctgttgacaaaatggatgaaggagctagagaaaatattctatggaaacattgtgaagtatgatgctgcgataagcccagaggctcatcaagatgatcttgtaaatgtcatctggagaaatatttatgctgaggaaggttcagaagctatggatgttgctgctgcccctgctgtgcgggcattggcaagatacacacgacgagaggcaacttgtctgtcattgactgacagagattctatgttctctggaaacttcaaattcacaaccctggtgccggcaactctcagccccagcccaaagaagcatgggcgatgaactgccgtggtacatcaatatttcatacgaagatttttaaacagcaggatcagtggatatatgtcattctctcagcaatacaaataacaggcttcttccattgattgtttattccggggtcctcacgattcgaacccttttgatggaaatacttcgttctagataggatttttttatttaactcaagtgtatttgctctagtagaccacc

SEQ ID NO: 12207 - DNA, 286 bp, Zea mays
  Clone ID: 701163481_FLI
gctccccccgcaaaaaccctagctttacctccccacaagcgcctccaagatgaagctcgtcaggttcttgatgaagctgaacaacgaaactgtgaccatcgagcttaagaacggcaccgtcgtacacggaaccattaccggtatgacgtcatgcgaactttaccactgtgggaattagaggtgcggggcacctttaggtgtgcgggcttagaaagtagcttaatactgtgtttctggctgtaacctaggaacatgtgaccaacagagctactatatgatcttttat

SEQ ID NO: 12208 - DNA, 1044 bp, Zea mays
  Clone ID: 701163506_FLI
gaccgtgatagcagtcgtgactgctggagaatgtctgatggaaataatttcagagttcgaagcaagaattttgtatatgataaaagcaagattcctgcaggaaagcctcttatggagcttgtcgctgttgactggtttaaagatgcaaagcgaatggatcatgttgctagaagaaaaggctgtgcagttcaagtagcggctgagaaggggctctttgcattggctataaatctacaagttcctggcactacagtatggttttctactttgttacgaagaaactgataccaaactccttattgcaacgctttgtggatggtgatgacgaatttcggaatagtaggttcaagttgataccatcagttcctaagggctcatggattgttcgacaaagtgttggcagcactccttgtctattaggaaaagctgttgacattacctatatacgtggctcaaattatttagaaatagatgtggatattggctcgtctacagtggcgaatggagtcttggggcttgtgtgcggtgtcataacgacactagttgtcgatatggctttccttgtccaggctaatacatacgacgagctcccagaaaggctgattggggcagttcgtatgtcgcatattgagctgtcatctgcaatagttcccgtgctcgaggattaatcataatacgcgatactgcatgcattgggcccgacaggattatgccggtctgctgagatcactgacagtgtacacaatgtagtaggaaacatagttctcgacttctcgtgccatcttcctgaggacctttctatgcgatcatgcatgcattgcgtatttagacgtgaactatgtaggctttagaatgggttgtgttggggaaaagaaaggagagattagaagaggtaggaatagaggcactagtgacccaaactgaggtttcaataaatggtacgtacatgcttaacttgagagaccacaccattcttcattgatagtatttcccttgtgtgtaatgttgtgacagccgtatccctgatatgtatttatgtaactc

SEQ ID NO: 12209 - DNA, 1219 bp, Zea mays
  Clone ID: 701163537_FLI
ttggccctcgcctccattaccttccccgtccccctcgtacatttcgacatcccctcccccccgactctcccgtcccgctcccgccgctaccagcgattccaatccgccctcccttccgccgctcaccgccgcggccccgccgcaagcgtttcgcctcgatatctccaccccgccttgctcgagccacgctcccaccgtccaggcgtccgctgcggaggtgtcggcggcccatctgaacaggctctcctcgtcggggcttttttgcttcggagggagaggcttcctgttcggctcgccgtgagaagagcaccggccatgtcgcagactaactgggaggcggacaagatgctggatgtttacatatatgactattttatgaagagaaatttgcaggcaactgcaaaggccttccaagcagaaggaaaggtctcttcagatccagttgccattgatgcacccggtggctttcttttcgagtggtggtcggttttctgggatatattcatagcaagaactaacgagaagcattcagatgttgcagcctcatatattgagtccttcaacaaagagcaaattactttgtgattgtaaaagtacatctagatatggatctttcggttggacagttgatagactggagagaagagggctggagcacccggatgcttgccctctctgcgaccaggaacagaaaccgctcaacatcttctagcttcttgcgtcttcgcccgacatttctggcacaatattctttcaccttttggtttggggcacctctcctggggcacatgtgttgtcttttgctgattggtggaaagaggtgagcagcaaagtacataagaaatggagaaagggcttcaatagcgtcatcattttaggagcttggtacttatggatgcaaagaaaccgggctgtctttgatggtgaatctcctaccattggaaaagtgcagagatccctgcttgatgagctagcatgttgggtgatggctggggtcaagaatctggaaagtttaggcctagcaacagcccttagctctgcaggaatgttctagtgggtagtgtgtggtcgtgtttcttttgtgcctcctgatggatcagtttctgtttttgtgtttttggccgccttaagtggcctaggatgcttgtatctgtccgcttggacttcttttccccctctacttaatataatgatgcgcagtcctcctgcattttccgag

SEQ ID NO: 12210 - DNA, 556 bp, Zea mays
  Clone ID: 701163570_FLI
gcccagcccagcagaagaggacaaaccagattcgattcctcctcctgtcctccatctccccaattcgcacggccatcggaccatggattccggcgtgcctgcctctgcgcctgcccctcccaaacacaagacatgccggaagtgcaaggcgagctatgacccctcggccaacacgcgcctctcctgcaggttccacccttccttcttcgtctgccgccgccacgacgaccagaagaggtactacgagctccgcgacggcgatcctccctacgccgccaagttctacgactgctgcggcgccgaggaccccgacgctcccggctgcaccactgacttgcaccgttcctacgacgacgcccaagactagcaaacctttgctgcttccacaggcctcatcttaatctcaagtctcatctaccgtttcgcttttgcatcccctccttatcctctctagtcagctatcaaattaaaccatctatgtacacttaaataaattttgcttcagatatgttacctactggagcaatttttttctttttcttttttgcaattgatc

SEQ ID NO: 12211 - DNA, 444 bp, Zea mays
  Clone ID: 701163595_FLI
gcaatgttgattgcagaggggatgtggcaacaaatggccatggacagcggtgccactatgcaacctgggtcatatcctgagcgaccaggtgaacccgactgcacttactatctcaggactggattgtgtcgatttggcatgagctgccgattcaatcatcctccggataggaatctggctattgcctctgccagaatgaagggagaatatcctgagagagcgggacagccagagtgtcagtattatctgaagactggaacatgcaagtttggccctacatgcaaatttcaccatcccagggaaaaggctggaattgcagggagggtgcagctaaacacatcaggatatccactccgcccgaatgaaaaggagtgtgcatattatttaaaaacaggacactgtaaatatgcaaatacttgtaaattccaccatccggaacttttc

SEQ ID NO: 12212 - DNA, 730 bp, Zea mays
  Clone ID: 701163606_FLI
gtacccatcctgcacacgaagcctagaatagccctcccctgctccgccacctcctcggatcccgaccaccccacccccaccccagacaacaggttgatggaggctaagatgggacgcttcttcgagtccgtgagcaatttcttcaccggaggcgaccacatcccctggtgcgaccgcgacctcatcgccggctgtgaaggagagcttgtcaatgctgcaaatgaggaacagaggaatgaaagccttatgaggttgtcatgggcccttgtgcactccaggcagacagacgatgtaaaccgtggaatcagcatgcttcaagcttctttggataattctgccagtcctctgcagactagggaaaagctgtacttgttggctgttggattctacaggattggcgactactcaaaaagcaggcaacttgcagatcgttgtttggagattcaagcggattggcggcaggccatatcgctgaagaaggcaatagaagataaaattgccaaagatggtctgattggaataggaattgcgacaactgcggtcggacttctggttggtggaattgcagctgctgttgccaggaagaagtgaggtcaatatattggatcggcagctcattgaactaggggagctcccgtctctgtaattccaacttttctgttgttaccttggtgatattacagttgaattgccactctttatatgtacgaagtaatcgtatgataatgat

SEQ ID NO: 12213 - DNA, 440 bp, Zea mays
  Clone ID: 701163635_FLI
cacctgtccagttccagtgctttagatccgcggccctgttcgcaccttgctcgcctcgcctcgcctcgccttccgctgcttcccgcctctaaccaccacggcatccagatcccgcgactccacctccactcgcggcggcgtgccctcgccgagatctcatcatggacacggtcgagaagatcgtcgaggacttcgcctcggacatcgccgtgagccccttctcctccgggacgagcctccgggagatgatacgcgcgatacgcgcgtgcaagacggcggcggaggagcgcgcggtggtgcggcgggaatgtgcggcgatacgcacggccatcagcgagaatgagccggagctccggcacaggaacatggccaagctcatgttcatccacatgctgggctaccccacccatttcgcgcagatggagtgcctcaagctcatc

SEQ ID NO: 12214 - DNA, 594 bp, Zea mays
  Clone ID: 701163687_FLI
cagacaggaagcccgccgaacatcacaaggctgcgaacctcctagaagctcgaggagatgctctccaagctgtcggcgtggttcgtgaacccgcggaggaatccgctcgcgcgtctccaccggaacgccgtcgcctcccgcctccgcaaatacgggctcaggtatgacgacctctacgacccgtaccacgacctagacatcaaggaggcgctggcgcggctgccgcgggaggtggtggacgcccgtaaccagcgcctcaagcgggccatggacctctccatgaagcaccagtacctacccgacgacgtccaggctatacagacgccattcaggagctacctttttgacatgcttgctcttgtgaaaaaggagagcgcagagcgtgaagcattgggagcgcttccactctaccagagaaccatcccataaagtgcctctttgcatgatccaatcaatagtgcacgcgatgatcagcagaggctgatactgtaatgtgtattgtgttttttcgaggaaatctctactacttattaagacgataagggtagcctgccgttctgacgttatacaaacttagtcatatgttcttgtgcg

SEQ ID NO: 12215 - DNA, 615 bp, Zea mays
  Clone ID: 701163715_FLI
gtgcacagtgccaatgcaaaaaattagctaagcttgtggtatgcggtagagctgcaagttccgtatccagtccagtccagtgaggggaattgctttggatggtgcagggcagatggaggggctgacgtccagtgagatcgccggattcgtggtgggtgccctgctgctcggcgccaccatcgctgcccccaaggtcgacggcttcatcgcctcctcccagagaaggtcactagggatgtgtaagaggtgcggtgaccttcggattgtagcatgctcgcagtgcaagggaacaggatcagctcggagcggagggatgctcagtttgggcgtgctggatgacctctacgagtctcttggagccgaagccaagactgagaatctggttccctgcacaaagtgcaggtcgagaggccgtctcatgtgtccagaatgctccaaggtcgcatgaccctggcctggagccgtgtactcggtcagaacacatgtacggctctgacaaacacaaatcactgctgtcactgtttgtgtttgaacattattatgtgcatggaattcctgacccgactactggtggttagggatggtccactgtctcaatgcagttgttttcagtgc

SEQ ID NO: 12216 - DNA, 769 bp, Zea mays
  Clone ID: 701163768_FLI
gaaaaatctcctcaaagcccttccccctccttttcccccgttcgagtgctcgagctccgaccaaatctcgcagcggtagcaatccccgagcccgaagcgggatcagtggaggacgacaccctcgattctgacctgcggtcggcgcgacttacagacaaccggagatgcagcagggcgacagcacggaggcgcaggtgacgtgggaggaccagcagaacatcaaccgcttcggtcgcctcaacaaccgcctccacgagctccaggacgagatcaaactcgcgaaggaaacgaacgagaaccttgacgatgctgggaacgaactcatcctgtcggacgaagatgtcgtgcgcttccagatcggggaggtgtttgctcacatgccgagggacgacgtcgagactaggctggagcagatgaaagaggatgcggctaagaagctggagaggctagaggaggagaaggaatccgtcctcgcccagatggccgagctgaagaagatactgtacgggaagttcaaggactccatcaacctggaggaagattaataagagtagtactggaggtgtgacgacgtggccctctctttctagttcaggtcctgtttttgttcccctgctccccccacagaagcgcttggcccgctcgtgtaatggaagcttgagtctctcagtctttcagaagctcttttcaccaagaacccagaatagttttcattctgcgggtttatacggattgaagctaatggcgctgagcccatgaatccttttcc

SEQ ID NO: 12217 - DNA, 708 bp, Zea mays
  Clone ID: 701163921_FLI
aaccacaacgccccgccgttctccgcccgcttcgctgaggcgctcggctactacgcagcgctcttcgacagcctcgacgccgtggcggctgccactgccactgccagtgccgccggcgaccgggcgcaggtggagaggatggtcctgggggaggagatcaagaacgtgctgctctgcgaaggagccggccggctcgagcggcacgagaggctcagccagtgggcgatgtacatggacgcgtcagggttccgccgcgtcccgctcagcttccgcgccattagggagagtgagctcaagctcgcgagcttcgggatgagtgggtgccgctaccaggtggaaagcgacggccttctgctggggtggggctccacgcgtctctactctgtatcggcgtggaggccaaacaagtctgggaccagagagtgtacgtttaggagttgatatgtctgaatgtctgatgctgtatctgagttacttaattcataacaagcatcagttttagattgttatctggaaagaaaggaataggagaatctttcaagggaaaatcagcttcttgttgcccttcctatctgagaggtttctctagtttttcttaaggttgctgtgtgttttcttctgtttcttcttttcagttttgttgtggctgtgctcccattagcttcgtggtggtttgtaattgttgtatgtgatgtgatctctttcttt

SEQ ID NO: 12218 - DNA, 648 bp, Zea mays
  Clone ID: 701164037_FLI
gtccccctccctcctccacacctctcgttctctccccctccgcctgctccctctcaggagcgcgcgcgcgcgcgcccagatctagggtttcgtccgcggcaagatgagcagcccgcatggcggtctcgacgaccagatcgagcggctcatgcagtgcaagccgctcgctgagcctgaggttagagctctttgtgagaaggcaaaggagattctgatggaggaaagcaatgttcagcctgtaaagagtcctgttactatatgcggggatattcatggacaatttcatgatcttgctgaactcttccgaatcggtggaaagtgtccagatacgaactacttgtttatgggagattatgttgaccgtggttactactctgtcgaaactgtcacacttttggtggctttaaaagttcgatatcctcagaggatcaccattctcagaggaaaccatgaaagccggcagattactcaagtgtatgggttctatgacgaatgcttaaggaagtatggaaatgcaaatgtctggaaaacctttacagatctatttgattacttccccttgactgcattggtcgagtcagaaatattttgcttgcatggtggattatcgccatccattgagaccctcgacaacatccgcaactttga

SEQ ID NO: 12219 - DNA, 530 bp, Zea mays
  Clone ID: 701164106_FLI
tgcattgttcaggcagagttcaaggcgagggcggccgtggtcatggcggccttcttctcgctcaccgctcccgcgggcatcgcgctgggcatcgccatcgcttccggctacagcaggcacggcgccaccgccctggtcgtggagggcgtcttcaacgcggccgccgcagggatcctggtgtacatgtccctggtcgatctcctcgccgcggacttcagcaacccgaggctgcagacgaacgccaagctccagctggcggcgtacgtcgccctgttcctcggcgcggggctcatgtcgttgctcgccaaatgggcgtagaacagaacagattcgctacccgtcagttttttttttctgccgaatcaccgtcagcgagaatttcggtgcgcagaggaagcgaggaaagaaggcccggatgtgatgtatgtaagagcactcccaactctgctccgtggtttccatagctgccacctagtcaaggaaccatttatagaaactaatcttctcaatgcaaatggtagtttctacgc

SEQ ID NO: 12220 - DNA, 744 bp, Zea mays
  Clone ID: 701164107_FLI
cgcctcgccatcctcttggtgctcctggcggcgtcaccgctgcttggcgcgacgcagaaggccgcgccagggccggcgtcgtcgtcgggctcgggcgcgggcgcggcggacgcggcgccgccgacggacgtgaacaaggcgctgaaggacgagcagttcagcgagttccggcagctgctgcacgacacgcgcgtggacacgcagatcaacgcgcagctgacggacagctacaacgggctgaccatcatggcgcccaccaacgccgccttcgacaagatgaaggcgggcgtgctgaacgggctgtcgccgcaggagcagatccagatggtgctctactgcgtgctgccccggttctacagcctgtccatgctcggcaccctcagcggcaaggtcaacacgcaggggtccggccacgacgggccctacaggtacgacatcaagcggtcggggaacaacgtcaacgtgtccacgggggtgaactggatgctgctgggcagccccgtcagcaaggacttcccgctcgccatctaccccgtcgacaaggtgccgctcccctacgagctgttcgggcccaagccgcccacgccggcgcccgcgccggcacccgcgcccgggccggccaaggccaagaccaagaagaagaagaagtccgccgccatcgccgagccgcccacggccgacgacgacgacaccggctccacctccgacgaccagaaggctgccgccgcgccgccacgcgccagc

SEQ ID NO: 12221 - DNA, 826 bp, Zea mays
  Clone ID: 701164125_FLI
ggggaaagaaaggtatcagtgggcacatcaatgtagattataagaatgaagttctgtctgttgagctgacaatgcctcaagatgcgtctcgtgataccattagagacactagaggactttcaggtggagaacgatctttctcaaccctttgcttcaccttgtctcttcatggaatggccgaagcaccatttagggccatggatgagtttgatgtattcatggatgcggtgagccgcaaaataagcttagacaccctagtagattttgctgtcgcacaagggtctcaatggatatttataacccctcatgatatcagcatggtgaaggctggggataggatcaagaagcagcaaatggctgctcctcgcggttgacagtgttgagacccctgacccttgtaaatgaagcctgagagccttgggcatgggagtgaatctgcttggaactactacttttatattttgtttgtagtttgtacatagcacattttgaggcaatgggcgtgtccctggtcaagagtttgttcctgggcagcatcagcagttctgtagttgcattgctgtttggacagggtcccactgtgctatgttaaagagtggttgatgcatgtcttttgaaataattgggccttgaacatactgcggatgtaaatgaaagaattgcggctgcagatgtcgatgaaggtagccccgacttggactctgctgattgcaggaacctgagttgatgaaggttctgaagttatgctatttttttcatgaaaaaatatgtgggtcccactcaaaactttgacctaactaaatatatccaaacaattgattgggtc

SEQ ID NO: 12222 - DNA, 415 bp, Zea mays
  Clone ID: 701164165_FLI
cagctttgttgcgcccagtccgagggttttgtctttgtttctgtcgtccgaatggagcgagtggtgatggtgaagtgtgtcagaaatagatcggagaaaaatgaaatagaaagcagcaacagcaacaagaaaaaaaaagtgtgttacctcgtgaggctttggtaatgctgctggttagattcgtttgtggccacagcaccgacgcctcacgcagtcacgcctgcccgtggaatggcagatcggcatagataagctacagtttccgtcctgtgcaactgtacgttagatgcccttgacctttgatatatagagtcatcgtcgggtggcatccaatggtaatagtcctccatatagtgtatttctgcaatctggacattggacctatatttatatatagctgtaagcataagaggac

SEQ ID NO: 12223 - DNA, 1254 bp, Zea mays
  Clone ID: 701164171_FLI
cggattggttactttatggcaagtggagactagaggaccttctctctcatttcgtggcaaaacggatttcttttccccaaagcatagatggcctgaagatatagcttggcatccagatagtgagacaatttttgctgtatacactgctgataatggtgattctcaggtttcaatgacaaaccttatatcaggacaaaggaaagttactttcctacccgagaagcctcacacaaaaggcatcataaacgacataagtttcatgccctggtctgatgtatgctttgtaactggaggaagcgaccatggcgttatactttgggaagacaaagatgatttatggaaacccaagagagtgcataaggatttccattcatccgctgtcatgggtgttgctggaatgcaacagaaaaaaacaatattatccgtaggctgtgacaagaggataataggatttgatctctctgctggaaggacagagttcaagaacctaattgatagcaaatgcatgagtgtgttagcaaacccatgcgattgcaacttatacatggtgcagacaggggctccaggtagacagctgcgcttgtttgatgtcaggcttaggcaatctgaggttcatgcatttggttggaaacaagagagcagtgagtctcagtcggctctaattaaccagtcatggtctccagatggatggtacatgtcgtctggttcagcagatcctgtgatccacatcttcgacatcaggcatcatggccagaatccttgccagtctgttcaggcacaccagaagcgggtgttcaaagctgtttggcaccgaacgttgccatatctgacctccatatcatcggacctcaacattgggatccacaaatattcatgaaacgttttgggctgattttggcgcttggcaattttttttgttgtggattaggaaccatgaagacctgtgaaattttcaggactttgcatcaatcaaagatacagcaaattcagcatgctttcgctggacctgcttcaccattgactttctctgtgggagaaccatgcagctcagcagctgaagagccccacggttggatgtttgcgcgagctgacccaaacttttccaccttttgagctgctgctggacagctggagtggtatggtaggtcattcatccgaacactgtttggctcgatgtgttgccctggttatttctgggaaggaaacagtcaactatacacattatatccaacatattcagcaatgtattccccc

SEQ ID NO: 12224 - DNA, 983 bp, Zea mays
  Clone ID: 701164210_FLI
gagacgacagccaggagcaggagcaggagcaggagccaccgagcagtcgtcgccaccgccatgacccaagctaactaaggcagctagaatctctgctttgagttctccccccgtccccgcacgggctgcgatctgcggagtggtggagcgcgctttgggccgcttgataagcagctaggcttgcgccctcggggacgctgcgtgcgtgcgacgtgggtgacgctggccgacaagaagaagaggccgtggaaatgctgcgacgtgcccatctgcaccaggtcctggcctccggtgtgccgctgcgcggacacggtggagcggtgcgccagcacctgccagcactgcgagcaggtggaggagggcggcccccgccgctaccgctgcctcgacacgcaccgcggcgacccggggccaaggtgcggcgacggcgaggacgatggtggggagtggtcgccggcgcggaggctcgcgaggggccaccgtttctagctagctatgctatgccatgctagccatagccagcggggactggtttctagcgcgcagcagggagtacgtacgtgtcttttttttttgtgacgctgatccatcggtcagcctgtgctgattgacgcgaccttcatgcagatgtgcgctacctagctagcttcgttcgtggtgtgtcctctcgtgacccacgagagtgggagtagaataatcatgcattgttgtatgcaacgtgcttagcagcttcgtggttcgtgcgtgtgccctctcgtgacacacgcgtttgagtacaaataacgtggatggatcagcctactgctcctagctagctagctagcagctgggagtagctgcgtgcccttgctgatctcgtgtctctgtcagacctgttgtaaaatctagttgtactgtgttgtaaattgtaatctagactatctagttgtactgtgtgctatcctgatcggatcaggctcctctgaataaataataaagtgggc

SEQ ID NO: 12225 - DNA, 945 bp, Zea mays
  Clone ID: 701164237_FLI
cgccgagcacgagcagccgccagtcgccgtcgcagcagaagacgcccaagtgcagggcgacgccgcctgacaggcgcagggttactcctgctcagacaagccctgctgttgcgcctgaccgtaaacggcctgccgacgctgctgctggcactggcagcaactctgacaacgtgacgacgtcccacgacgacgcgagctcgagcgtgccgaacaaagtatcggaggagctgctccggtgcctgctggccatcttctcgcagatggggggctcggctgctggcggcggccgaggactaggagacgaggaccagcaggcgctgtccccgtcggtctccggctccagcgagagctcggcgtcgtcggaggcggacgcgtacccgcaggacccctacggcatcctggagctgggcgccagggacatcggcgcctacaagcggttccacgtggtcgacgccgcgtccttcgacggcaacggcgacacgcctctcgttcgtcggagactcaaggccttgctgcggaggctgtcgtcggttgacctggcggggctctcccatcagcagaagctggccttctggatcaacgtctacaattcctgcatgatgaacgcgttcctggagcatgggatacctaccaccccgcaaatgctcgtggcgatgatgcccaaggccaccgtgagcgttggtgggcgcacgcacagcgccatgtccatcgagcatttcatcctgaggctgccctacagcgccaagcaggtgaaggtgagccgggaaggggccaagtgcgacgacggcgacgtgacggcggcgcgcggcgcgttcgggctggagtggcccgagcccctcgtcaccttcgcgctctcctgcggcagctggtcgtcccccgcggtgagggtgtacacggcggcgcgcgtggaggaggagctggaggcggcgaagcgggagtacctac

SEQ ID NO: 12226 - DNA, 911 bp, Zea mays
  Clone ID: 701164258_FLI
ctcagcagctaaatatagaagcctgcgaagcttcaccagacaattctagcactttggctaggatggacacgtttttcagaaatgcatgccagtcttcttgtgagggtataatgttaaagactttggatgtcgatgctggatactctgcttccaaacgctgtgattcatggttaaaggtcaagcgtgactatgtgcaaggcttaggtgatagccttgacttggttccaattggtgcatggtatggaaacggacgtaaagctgggtggtacagcccttttctcatggcatgctacaaccctgaaactgaagagttccaaagtgtatgtcgtgttatgtctggtttctcggatgagttctataaagagatgaaggagttctattcgggtgaaaggatactgcccaagaagcctgtttactacaaaacagacgagcaaccagagctgtggttcaccgcagaacaaatctgggagatccgaggtgcagacctgacgttgtcccctgtccaccatgcggccattgggcttgtccatccatcgcgcggcatctcggtgaggatgccccggtacatccgttcagttccagaccggagcccagaggactgcggcacggccgccgatattgctagcatgttcaaagcccagacccggaagatggatgtcagcagcgagggccaggagtagtagggatgcaaagctcggcccatttcctcgtcctagctttgcttatgttcaccagttctgtatatacacagaacgaaccagggtgaagtgaaccaccctactggtcaaatggtgaaaactgaagcgtaggacaggcagcactgatcccactggctttcagtttttctttgtacagaaactgaatgcagttggaacacggaaggaagcccacgagttgcacgttcggggggg

SEQ ID NO: 12227 - DNA, 313 bp, Zea mays
  Clone ID: 701164287_FLI
gagcgagaagcgagaagtcttcccctcgcctcgtctccgcccacaacaaacatcacccgaagccgcgtggagccatcatccagatcggagccagcgcgccgggtgatgctgttccggccacgaaagtagccgtcttgcaccccgacccaagagccatggcggaggatggcgaggagaagctgctcgcgacggtgcagcatatcgtgcagacgctggggagcagcgacacaatgacggaggacatcctcaaggtcttctccaactacgacggccgcctctcgctcgacaagctctacgccgcgcgcgcggcggc

SEQ ID NO: 12228 - DNA, 1030 bp, Zea mays
  Clone ID: 701164304_FLI
ataaaaccttcctccttcgttccccatttctcctcttgctaggtttctacccctctaaatcgatcctcgctccacggccatggtgaggatgaagcaggtaaagatctcggtaaagaaggacgtggattcgtacacaatccgcggcaccaacaaggtcgtccatgtgggcgactgcgtgctgatgcgggcgtcggactcggacaagcagccgtatgtggcgcgggtggagaagatggaggccgacggacgcggcagcgtgcgggtgcaggtgcgctggtactaccgccccgaggaatccaagggcggtcgccggcagttccacggcgccaaggagcttttcctttccgatcatttcgacctacagagcgcccacaccatcgaggggaaatgtgttgtccactctttcaagaactacaccaagcttgataatgtcgggcctgaggactacttctcccgatttgagtacaaggcggccaccggttcgttcacccctgaccgcgtggcagtgtattgcaaatgtgagatgccatacaacccggatgacctcatggtgcagtgcgaagcttgcaaggactggttccatccatcttgcatggctatgaccattgaacaggccaaaaaactagatcactttgtttgctcagactgtttgaaagaaaatggttcaaagagactttcaaatgtatatgccacttcatcaaattcttagcccaaggctgaatcaataaggcagacgaggtgaaaactgagtgccaacatccaggggagatgtgctgcttctgtggcgaatcagccattgcactggcgagagcagaggtgtacagtgtttgctgtggtttgttcgatgtaactagccagtgtggcatgtcatgcagttgttggtagatcagtcattgtgttgacttggtcaacttaacacaacatcccccttcgttgattacattgttgctgtgacggtgcggcatgatcgattactgttctattaacatatgacttttatatgttgatataattaaattattttgatacc

SEQ ID NO: 12229 - DNA, 262 bp, Zea mays
  Clone ID: 701164308_FLI
ggatgatctgcccatctgtactgcctccaccgccgcgtagcctactaggagggccgggggcgaactgattaaccggagacccatcaatcagcttgcatgcattgctgtgtgttgtgctcttgctaagctttattaattagtacgtaccacgaacctaatgcatgggccgtatctcatagtactccgtcagttctattttatttgtcacggtttagtttaaaaatgaactaacggacaacgaatattcgaaaacggttatgat

SEQ ID NO: 12230 - DNA, 1069 bp, Zea mays
  Clone ID: 701164343_FLI
ggtacgtacgtgcagtgcattgcatggctcttctgatccatccatcggtcaatacgaattaaaccgcctctgtggtcttccattccatctgatcgatgctgcagcccgccgaggttgctggtcgacgggccctacggcgccccggcgcaggacttcaggaactacgacgtgctgctcctcgtcggcctcgggatcggcgccacgcccttcatcagcatcctcagagacctcctcaacaacatcaagctggccgacgagctcatggacctggcaatggagaccggccgggccgaggacagcgccagcaacctgagcgcgtcgacggcgagcggcggcaacaagaggagggcgtaccgaacgacctgcgcccacttctactgggtcacgagggagcctgggtcgttcgagtggttcaagggggtgatgaacgaggtcgccgagatggacaagaagggtgtcattgagctgcacaactacctgacaagcgtgtacgaggagcgagacgcgaggacgactctgctgtccatggtgcaggccctcaaccacgccaagcatggcgtcgacattgtgtcagggacaagggtcaggacacattttgcaaggcctaactggaaagaagtatttacgaggatagcgtccaagcacccaaattctacagtcggggtattttactgtgggagacctacacttgccaaagaactgaagaaactgtcacttgacatgagccacagaacgggaacccgatttgatttccacaaggagtacttctgatggaaaatacaagtgcccctgatttcttttagtactagaagatacagataaaaaaattcacaaattttgcgtagaagcgaactgatcctctttcacagtatgtaaatgtacatggtataaagcagagagtagttagaaacgtttttctttctttcttaaccaaatgggagggtgaaaatatgtcctgcgctttcagacagccattggttactgcagatataactgtatagatcatatcattgtatgctaagcatgcaagagacttgaggccaacaatctgaatgcatatcactcaatt

SEQ ID NO: 12231 - DNA, 486 bp, Zea mays
  Clone ID: 701164415_FLI
gtgggatcccagccaccgccgctagaagaagagctcggcgattcccaggtcccgcgagaatatgccgaagcagatccatgagattaaggacttcctcctcaccgcgaggaggaaggatgcccgctcagtgaagatcaagaggagtaaggatgttgtcaagttcaaggtgcgctgctccaagtacttgtacacgctctgcgtcttcgatgctgagaaggcaaacaagttgaagcaatctcttcccccaggtttgaccgtcgaggaggtctgattggatacatggcaacgccgagttgaactacccaagcttctttatcagtagcagagcatgctactctatgtacttttggaacctaagctattagacctgtcagtgttggatgtctggatcttgcatttttggagaaataccaatttacctcgttcaaggatgcaagtatatttcttgtttaactgcacattactttatatttatgcctgtttcat

SEQ ID NO: 12232 - DNA, 129 bp, Zea mays
  Clone ID: 701164465_FLI
ctctgttattgtagttttggtcactgttcacctgatatgtgccatatttcggtaaagtatcgttagtgggcaaccggaactgtgtcctttctacttattccattttaaattattgaacttttatttagc

SEQ ID NO: 12233 - DNA, 143 bp, Zea mays
  Clone ID: 701164519_FLI
ggtgctgcttgcagccttggatatttgcggatgcggagtgaagttaccatggcatccttgctaagaataagaaagtaatgtggttatgaggagatgtgtaattttgtggcgatattatttgcaacaatgatgtatatatgggc

SEQ ID NO: 12234 - DNA, 1445 bp, Zea mays
  Clone ID: 701164538_FLI
atcggtcgtgcccgcagtcgactcgccgcccacttctgtagctgtagactgtagttctgttactccccactcactcctgcgcttcctcgccgcgcggttccttctccctgatcctcctttggcttcgcggttcatggcgatgtggagggccgccgctaggcagctggtcgaccgggcgctcggctcaagggccgcgcacacgtctacaggcagcaaaaagatagtcggggtgttctacaaggccggggagtatgccgacaagaaccccaacttcgtcggctgcgtcgagggtgcactcggcatccgcggctggctcgagtcgcagggccatcagtacattgtcaccgatgacaaggaaggccccaactgtgaactggagaagcacattgaagacatgcatgtcctgattaccaccccattccacccagcttatgtcactgcagagaggataaagaaggcgaagaatcttgagcttcttctcacggcaggaatcggctccgatcatattgatcttccagcagctgctgctgcgggcttaactgtggctgaggtcactggaagcaacactgtctctgtggcagaagatgagctcttgcgcattctgattctgctcaggaacttcttgcctgggtaccaacaggtagttcaaggcgaatggaacgtagcaggcattgcccatagagcttatgatcttgaaggaaaaactgttgggactgttggggctggtcgtattggcaggctcttgcttcagcgtcttaagccctttaactgcaacctgctttaccatgacagacttcagattgacccagagcttgagaaagaaattggggccaaatttgaggaggacctggatgctatgcttccaaagtgtgatgtgattgtgatcaacacacctcttacggagaaaacaagaggcatgtttaacaaagagaggattgcaaagatgaagaaaggtgtaattgttgtgaataatgctcgaggagcaatcatggatgctcaagcagtcgcagatgcatgttctagcggtcacattgctggatacggtggtgatgtgtggttcccacagccagcaccaaaggatcacccctggcgctacatgccaaaccatgccatgacccctcacatctctgggactacaattgatgcgcagctgcggtatgcggatggtgtgagggacatgctgaataggtatttcaagggcgaggacttccccgtgcagaactacatcgtcaaggaaggccagcttgccagtcagtaccagtgaccgcgcgagatgttgctgtgccgtgtaggcttttctggtgagaagctgcgaggaagaaactcctgttgcgtacttgcgttactgtatgagtagctctgagaaacctgtcagcggccacctgtaataaaagaatgccttgctggtatctcaccgtggagatcaataagtctcttttttttcc

SEQ ID NO: 12235 - DNA, 584 bp, Zea mays
  Clone ID: 701164553_FLI
aaatatatatcgaagaacttttaacgacttttagtagtttccaccaaacgatttttagctttttaacggctcacagcctacagcagcttttttcatagctcataacaacttttttcacagaccaaacagacccatagatttgttcgtcacatcacgttcgtgtatggctggccctggccgtttcatgaccgctcgtttcctccgccagcgcagtagcgccgctattgttttttttaaaaaaaacgtgctgcctcgcccactgccagtttcgcaccatgtttgttgtgacttttatccggctgatgttgtctactataatattctacaatattttgtttctatatattacagctgcagtagttcgaacagcagctagctgtgggtgtagggcaaccaaataggatgtcgaagattaacacccagatgttcgtcacgtgctaaatagcggtcgtgaacctaagctggagattattgaagtataataaactctatgtcgtatttatctttatctatctaggtgatattaaagatcttgcgtgacttgaattatgtcgtcacactaaataatgagtccgggtttcgtc

SEQ ID NO: 12236 - DNA, 791 bp, Zea mays
  Clone ID: 701164563_FLI
gatgggtgagcaggtgaagggcatgatccacgacaaggggccgacggcgtcccaggcgctgacggtggcgacgctgttccctctgggcgggctgctcctggtgctgtcgggcctggcgctggcggcctccacggtggggctggccctggccacgcccgtgttcctgctcttcagccccgtgctcgtccccgccgcgctgctcatcggcacggccgtcgcggggttcctcacgtcgggcgcgctggggctcggcggcctgtcctcgctcacgtgcctcgccaacacggcgcggcaggcgttccagcgcaccccggactacgtcgaggaggcgcgccgcaggatggcggaggccgcggcgcacgcgggccacaagaccgcgcaggccgggcacggcatccagagcaaggcgcaggaggccggtgctggcactggcgccggcggcggcaggacttcctcgtaaataagcaaatcatccatggatgcgtgcgtgtcaatgtcagcagggtcgtcgtggaatgctcttctctgtacgtgggtaaccgtcttttggtcgtcttccccgagtgcgtgataaatatcctggtgttcgtcgtgtgtggtgctgccctaggctggggcctggggtcggctgtgtaccggtatctgttcatcgccgctccgtcgcgttcggagatgtgaataagtgatgtgaaggttaagtttcagctttgctattgctattgtggcttgtgcatcagcggtttgctcgttgactgttatggaaataagcattggtgaaggtattgtctatc

SEQ ID NO: 12237 - DNA, 130 bp, Zea mays
  Clone ID: 701164625_FLI
attatataatagtgtctgttgtacaatctgtacacttcagaattgttcatgttgggcttcacagtttacacggctatcccaacatgaacaattctgaagtgtacagattatataatagtgtctgttgtac

SEQ ID NO: 12238 - DNA, 414 bp, Zea mays
  Clone ID: 701164649_FLI
cgcaccctcctcaaactgcaagctcgaaatcaactggtatgccccatatgtctaaccaatccaaaggacatggcttttcagtgtggtcatctgacatgtaaggaatgtggcccaacactatcaacgtgcccattgtgccgcgctctaatcaccatgcgtgtgaggctctactcctaagtcggttggtgtctggagggatgggaccaaacagaaaggagcaagaactttggggcgcaaggactgcgctacgatcttgagatatggtccatatggatgtcatgataacgatgcatgtacagaaaccttgtccgtgcctattcagtaatgtcgttgatgagtatcttccatcaatcacatgtaaaatttctaatgttatcttgtattagtagcaggggattgcttgttgagtggaat

SEQ ID NO: 12239 - DNA, 397 bp, Zea mays
  Clone ID: 701164657_FLI
tcttctgtcagtcctccccggccagcgccgctgcccgtgagttcgtgaagaagaactatggtgacatcaaggcccgcaacccctccctccccttccttgtccgcgagtgctccggtgtcccgccccagctctgggcgcgctacgatatgggtgtggagagatgcgtgaacttggatggcctgacggaagcacagattgataaaaagctggaggagcttgccaaggccggcgagtctcttaaaaccaaatagttttggaactctatcctgccatgtttaactttcccaaataaatgatgccatatgggtgagcaattgttactctatcgttatctgtagttgtgcctggaattaagtctttaattggctcaactttgtgaaataatcactactctttt

SEQ ID NO: 12240 - DNA, 577 bp, Zea mays
  Clone ID: 701164701_FLI
gcgccggcagtcgccgtcatcgatcgatcgccggaaaactaacccctaacgatgtctggagccggcgaggaggacaagaagcccgcggagggcggcgcccacatcaaccttaaggtcaagggacaggatggcaatgaggtgttctttcgcataaagaggtccacccagctgaagaagctgatgaacgcttattgtgaccgccagtctgtggacatgaatgccattgcgttcctgtttgatggccgcaggcttcgcggcgagcagacccctgatgagctggagatggaggacggcgacgagatcgacgccatgcttcaccagaccggaggcagcgttcctagcaccacctaaaagcctcgttttgctctccgtcctgcgtagtactaaacaaaagggaaaaagtctttttaaggaacttgtgatgctctggctccttgtgccattgctgagggacatccttagcctttgtttagtagtatggtttggtactttgttctgtcatcactcgtttatctatccctaatacatgccgccatgattgtactcccaatgacgcgcagatcatttgctttgtttc

SEQ ID NO: 12241 - DNA, 809 bp, Zea mays
  Clone ID: 701164705_FLI
gcgagctcttcctccttccgcttctcttcgacagaaaactagggttttgctcttggaatctctctccccgctgccgccgccgccggacagtgcaccgacgatacgacctcctccttcctccgatctggcctttttaatccgcggatcccgtacaagatgcttcccctctcgctcctcaagaccgcccaggggcacccaatgctcgtggagctgaagaatggtgagacgtacaacgggcatctggtcaattgcgacacgtggatgaacatccaccttagggaggttatttgcacctcaaaggatggtgacaagttttggaggatgccagagtgttacattcgtgggaacaccattaagtatcttcgagttcctgatgaggtgattgacaaggttcaggaggaaacttccaaaagccggtcagataggaagccaccaggtgttggccgcggaagaggaaggggggacgttggtgctaaacctggaggcagaggcatcggacgtggccaagatgatggaggtagaggcagtggtggccgaggaaggggtggagttggtgccaaaggtggtaacaaaggtgggggccgtggccgtggctaaatctggtggacacatgggagaatgccgctttttaaggcctgtaattgtgttgcatagattgcttaggacatgatgaatgaaccgagttggctggtcggtttgggggcaaaaaccagaatggttcctgtcttctggacattgaggaagcggcggcagtcaggcttgtcgctgttctcaaaaacggtttggttgatatcttatccaatctgttc

SEQ ID NO: 12242 - DNA, 901 bp, Zea mays
  Clone ID: 701164745_FLI
caaagtcacatctcatatacttggtactacaattagtgaggatggatatgtaagcttgggaggccaggtatttgggatcgatgctacaaagagacggtgatattgatcaagatgttagtcataggatcaaagcagggtggataaaatggcgtcaagcatcgggagtcctatgcgacaagagagtgccacagaagttgaaagacaagttctataggacaacaattaggtctgctatgttatatggggctgagtgttggcctactaagagacgacatatccaacaactaagtggcgcagagatgcgtatgttgcgttggatatgtggacacacaagattggaccaagtgagaaacgatgacatatgcgatcggctaggagtagaagaaaagcttattcaacaccgattgagattgtttgggcatgtccaccgaagacccccagaggcatcataagatgggacaataatgtgaagagaggtagaggacgaccaaacttgacatggaaggagacaatcaaaagggacttgaagaaatgaaatatcccaatggagttgtgtttggatagaagtgcttggaaagaagctatccacgtgctcgaaccgtgattaggcattttcccttttagcgctctcaaaagcttttccccctcccctttctctctctctctctctctggtgacttcttgttaggtttcaactctagtctaccccaacttgcttgtgactaaaaggctatgttgatgtttcaaatatgttcaaatatgaagtaatactcccttaacttatggacaaaaggacatctggaccatactttaactgtcattttcaaggtagatctattattaagataccaacatcaataacattaggccaatggtggtcacacctaaatcgcgtatgact

SEQ ID NO: 12243 - DNA, 490 bp, Zea mays
  Clone ID: 701164749_FLI
ccgagggcaccgcccccgtggcgaaccggatcgcggacagccggtcgttcccgctgtaccgcttcgtgcgcgaggagctcggctgcgtgttcctgaccggcgagaggctcaagtcccccggcgaggagtgcaacaaggtgttcgtcggcatcagccagggcaagctcgtggaccccatgctcgagtgcctcaaggagtgggacggcaagccgctgcccatcaacgtcaagtaaagaacgccaaggagaagaggagggaggggaggaaatacgtggaaaaaaaaataaaacctgtacacgtgtatgtccagatcgcgtgccgtcgatcgttcttcgttgttgatttttggttgtattgatcgatccgtatgtgtgcgtgcgtgtgtggcgttgctctttcttcttttgtgtagctgccctgccaccggccgacgtgcatgccatggtggcggacagcgttttctaaggtcatatactgttgttgtgtttac

SEQ ID NO: 12244 - DNA, 254 bp, Zea mays
  Clone ID: 701164761_FLI
tcgaataaaaatccagacgaaacccaaaatccccaccgaacgcaacctaaaatctccccatccctcctcgatccagccccgcggagaagagccatggccgattccgcaaccaacgacgcccccctggtcgccagcaaccagcccacggaggaggaggtgacggtggagagggccgcggcgacggaggagcaggaggaggagaggctgcggtacctcgagttcgtgcagcaggcggcggcgcaggcgctggtgct

SEQ ID NO: 12245 - DNA, 469 bp, Zea mays
  Clone ID: 701164768_FLI
ggcgttacttttttctgatcaccttcagatcctacctatacagcacgacatcatgcaaaacaacatttacatcatggatgaaggcaaggcctgaacttggccacctttgcgacaatctaaagctggacaaataggccatcttcatgtgacgtgattatgtagttgtgtcacttccttggacacattcacccagaggccagagtttcaaaaaggaaggagactaaaagaacgggtagagaggaagcagtggttatgggagttgtggacaatgaaagagcagcttaggctgtccgaaagtagggcattgtactatacttgtcggtgttaattgacaccagcaagcatgtatatattgtcaggcgtattatagatgaacatattagatatttctattgtagtattttctcaaattttaaaagaatcatttcatgcagttcattctcatgtatgtatctgatatgcttgcttt

SEQ ID NO: 12246 - DNA, 410 bp, Zea mays
  Clone ID: 701164771_FLI
gcttgaacggctctcaatcccaaccctaacagcaccgtctctcggatctgatctgatctgatcctccaattcgttcgtccacgtctcgccatggaggacgaggaacttgttgatcagaagaaatatcttgaggaacgatgcaagccgcaatgtgtaaaatcactttacgaatatgagaaatgcgtcaagagagttgagaatgatgatactggtcacaaacactgcactgggcaatactttgattactggtcatgcatcgacaaatgtgtagcatcaaagctctttaagaagctcaaatgatttgtgcgatgtgatgcgacttctgacaaagtgaatcgaatttgcataccttacacctttggaaagtgtatgagctcgtacatcttggaataaaacatcaatttttcttt

SEQ ID NO: 12247 - DNA, 1238 bp, Zea mays
  Clone ID: 701164791_FLI
acgtgatccccaccttccgctccaacttctcctcgctcctcgccaccgtggaggcggagctggccaagggcggcaaggccgagttcaacaagctcaacgacgtcacctccttcgacttcatcggcgaggcctacttcggcgtgcgcccctcggcgaccgagctcggcaagggcgggccgagcaaggcggccaagtggctcatctggcagctccacccgctggtcacgctcggcctccccatggtcctggaggagccgctgctccacacgttccacctcccgcctttcctcgtcaagggcgactacagggcgctgtacaagtacttctccacggtggcgaagcaggcgctggacaccgccgagggcctgggcctgtcgcgcgaggaggcctgccacaacctcctcttcgccaccaccttcaacagctacggcggcctcaaggtgctgttcccgggcctgctggccaacgtggccagcggcggcgagaagctccacgagcggctggtggccgagatccgcggcgccgtggccgacgccggcggcaaggtcaccctcgcggcggtggagaggatggagctggccaagtcggtggtgtgggagtcgctgcgcctggacccgcccgtcaagttccagtacgggcacgccaagaaggacctgctggtggagagccacgacgcggtgttccaggtgaggaagggcgagatgctgttcggctaccagccgtgcgccaccaaggacccccgcgtgttcggcgacaccgccggggacttcgtgcccgaccgcttcctcggcgaggagggcagcaagctgctgcagtacgtgtactggtccaacggccgtgagaccgagaaccccagcgtcgacaacaagcagtgccccgggaagaacttcgtggtgctggtcggcaggctcctcctcgtcgagctcttcctccgctacgacacattcaccgccgaggtcggcaaggagctgctcggcaccagcgtcatcttcaccggtgtcacgaaagctacctccggtccgggcagcgagtaaaccgcccggccggcgcgcgtcgttggatatatgatgagtggacgtgacagagtgtcccattatttcttaatttcgtcattttcctccttccttctaataagacttctctctcaccctcggccccaccttcacgtgtgattggaggtgtttgtcgcttttgtaataattataatgcaggatggcatgttgcataaattgctcccc

SEQ ID NO: 12248 - DNA, 817 bp, Zea mays
  Clone ID: 701164834_FLI
ttcacaagcgccttcaaactttcagaacacgcacttctgctagctagctagtagtagccatggcttccgcagtctcgtctctcttcctcgccacggcgctcgtgatgatggctctcatgatcatgctcgagggcagcaccacatgccacgccgcgcggcatcttgccgacacgacgaccgccccgaccgctgctcctaccgccatcccggccattcctgccatgccgaagccgccggtcgtgcctaccaggcccgcggccacccttccaccgatacccgccgtgccgacgtcgacggtgcctgcgctgggcgtgccaccgatccccgcggtgccccctatgccggctgtacccgcagttccaaaggtgacggtaacgctgccgccgccgatgcccgccgtcgtcgtccccaaggttggcgccttgccgccgatacccgccgtgcctaagctgacactgccgccgatgccctcgatcccgggcgtgcccatgccgtttctggcgccgcctccttcggcataattcaattcaccaatgtctgatgatagattgtccatatatctgagtattcgagttgatctcactctcgatcaataatccatgtgtacgatcgtcgctgggcacgcatgctgcagatttacttaattggtgtatgtatctgattctatatacttctatatattgttgtatccagtctttttcaaagttataatgttgtgtcaagctttgtcagttcattttctttcattttttttttggttggaggtcgtcatttgttgtaatctgtaagtggatacgtatgtacagagtgctcgact

SEQ ID NO: 12249 - DNA, 524 bp, Zea mays
  Clone ID: 701164869_FLI
atacagtctgatcctgggctcaagagttcttcagaccccactccatcatgtgaccgaaagataatatcgagtgggcgaaaggccttcacaggatctatcgtcgagcacgacgatgacgatctttcaaccattcaaccttctgcgggcaattcgttggcaaaacctggtacttctgcgtcttcaaggcccatgtcaaaattcaagatgcagaaaggagggcggtaagtctcgataccacggggcgatgtatcttcggtggttgattagatgcatctggaacaatcatgttaagtggtagttttgtgcgagctgagcacctggaagctagacattttgttgtggagcgattgccctcttggggcctgttgttgtggagtgcaccttcaccagtgagactgtttggcggggatacatgggatgttcagttagattcagtttaattagtggctggtggtgcagtatctctttcagaaacctatatatatatgccgccatgccgtttgtaaatctttcggcaacaaaag

SEQ ID NO: 12250 - DNA, 1038 bp, Zea mays
  Clone ID: 701164876_FLI
ctcttccgtcgtgtcttctcgcgctttccactcccaacgagatccatcacccccgacctctgtaagcttcccttgacgtcgtcgtcgtcatccatggagagcaaggacggcacccacgatcccgccacgacggccgcgccaccggccggcgcgccgcagcccgcgatgccttccgcggagacggcgcggtggggcacgcggcagatgggcccgccggcggcccccggggcgcacccggagaaccaggaggcggcgcggtggacggccgcgcgcggggaccaggagctgccgccgtacgtcatcatcggtgagcccgtggcggcgccgccgccgccacagcataggggcaagggggacagccccatggagcacatcctcgacttcttcaacacctggagccgcaaggccgaggagctggcctccaacatctggttcaatctgaaggccgcgccatccatgtcggacgccgcgatggggaagctaagcctcggcgcgaaggcgctgtcggagggcggcttcgagaagctgtacaagcagacgttctcgtccagccccgacgagcacttgaagaagacgttcgcatgctacctctccacggccacggggcccgtcgccggcacgctgtacctgaccaacctgaacgtcgccttctgcagcgaccgcccgctctccttcgccgcgccgtctggccagaccgcctggagctactacaaggttatgatcccccttggcaagatcgcgacggtggagccggtgacgatgaaggagagcccgccggagaagtacgtccacgtcgtcaccgtcgactcccacgacttctggttcatgggcttcgtcagctacgacaaggccgtgcacaacctcgtcgaggccgtctcccagcacggcgtcgccactgccggcggcaagtgacgaggcgacgccgctccggagactgggcgttcggcacccgtcgtcgtgtatatatagctgatggctctgcctgtgcattactcgtgttctgctactactatacgatggtgtcccggcgtgtgtttg

SEQ ID NO: 12251 - DNA, 797 bp, Zea mays
  Clone ID: 701164902_FLI
ctaaaataagacgttgcagccaaccaggggaggccctccgcggtccgtggctccgtgccatcctctcctgggcagcgagcagtggtggccgcgggttcccccgcctcgtcctcccggatccggcgacgaagattaattgaataacttcgataagatgggtcgtggtattagcagtgggggtggtcagagttccttgggctatctctttggcagtgacgaagctccaaaatcatttgagaagcctgcaccagttcaaaagccaactcctccatcctctgcagagagactaaaagatatcgctgctggtattcaaagtagtaaatcaaacaattacaaaagatctgaaggccagaactgtggaaatttccttacgattgcggctgaaaatgcacaaaggcaaaatctctaccttgaaatatttgtacatttgcggatattagctgttgtgggatgctgcaggaccgtccgtcgaccaaggtgcaagcagctccaggtggcgactcttcactcggttatctttttagtggcagcaaagatggcaagtgatgtacacctgctgttagtgttcgccatgatcatgggagaaggtttctgcttaacaaaggaaaaagggaaaagaatcttgtattcccatgagtaaatatcaaactgctcatggtatctatgttgttgggattgcttgtatgtgtgtacatgttcgtgtgtgtcgtgtgttgatccacagctactggtagcaagagcttctatccctgctgatggaattgtgcgcaatgccaatgttgacattatcgtgggtg

SEQ ID NO: 12252 - DNA, 293 bp, Zea mays
  Clone ID: 701164923_FLI
caccaccgaccctttcgccgtcaagaccgcagagacggccctcgcctacatggtcagctggttcaacaagcacctcaactgaatgaagcctgcacctgcacccaccagtcaccagactgaattcaataaaccacagcagtgctgtgatattttgtttcgattcgtggctccccagattgatttatcatggctacgacctcttctactactgtaatttccctcattttttccccgcaccttttttgtctcttcaaactctctgtatttcttttttgcttttttatgatcgctat

SEQ ID NO: 12253 - DNA, 1068 bp, Zea mays
  Clone ID: 701164929_FLI
gtcttcttctaacaaaagagtactgtttctttcatgtgcaagtaatgctgataagatgaaaagcagatgccagcctggaatgacatcttcaaggaggatttggtcaacttggagtgcttgaacttggactcatgtaagattggtgatgagggtctatttcacctaaaaggcctcatacagctaaaaaacctggagctttcagacactgaagttggaagcaatggacttcgtcatctctctggtctgcgtaatttgcagagcatcaatctctctttcacattggttactgacattggtttgaagaagatctctggcttgagttcactgaagtctcttaatcttgacaatcgccaaatcacagatactggtttagcgtctcttacaggtctcactggattgacacacctcgacctatttggagctcgcataactgattctggcatgagctgcttcagatttttcaagaatattcagtccctggaggtctgcggtgggttgattacggatgctggcgtgaagaacatcaaggacctgaaagctctgacgttgctcaacctatctcaaaacggcaagctcacggacaaaaccctggagctgatctccggcctgactgcgctggtgtcgttgaacgtgtccaactcccgggtctccaactcgggcctccaccacctgaaaccgctgcagaacctgcgctccctatccctggagtcctgcagggtgacggcaagcgagatggataagctccggctggtcgccctccccaaccttatcagtgtgcggccggagtgatacgaccgccagcgctcccacagcgacctgtaactgtggagcaagtggcgcctggctagagcaggccgccttgtacatacttttgcaaaaacgaggtgtctgtacatattgttcgtcgtgtcgtgtcgtgtcagtgtgcctgatggcaacgggctaatacgtccgtgccaacgtgtgcatggtatcccacggaccctgtggtagtaaggagcagttgtaaatatgccgtgcttcctctccatgtggggtgctgctgtataaatagattggtgcattgct

SEQ ID NO: 12254 - DNA, 640 bp, Zea mays
  Clone ID: 701164932_FLI
gtccacctcaacaaaccttcgtccacgcttcgactcctgcagggagtgagggagagtgatggagaggtgcgggagctgggactgcgacgcggcggcagcgcagaaggcggtaccggcgccgttcctgaccaagacgtaccagctggtggacgacccggccacggaccacatcgtctcctggggggacgaccgggtctccaccttcgtggtctggcgcccgccggagttcgcgcgcgacatcctccccaactacttcaagcacaacaacttctcctccttcgttcgacagctaaacacctacgtgagtcgccttcgcacttggccttggtttagctaagccttggaggccgcgcggagcgcggacggatggtgaccgccggtgacggcaatgctgcaacgggcaataatgcaggggttccggaaggtcgtcccggagcggtgggagttcgggaacgagttcttccggaagggggagaagcagctgctgtgcgagatccaccggcggaagacgtcgacgtccgcggctccgccgtcgcccccgccattcttcgcggcgcctcacttcccgctcttccacccggacgccccgcaccaccaccaccaccaccagttcgtggggggaggagacgacggggctgtg

SEQ ID NO: 12255 - DNA, 1574 bp, Zea mays
  Clone ID: 701165026_FLI
gagtgctgcgtgctgagcgccgtgcgcgacgggctcaaccggatcccgtacatctatacggtgtgccggcaggagagcaccgcgctcggagacgacgcgcccaagcggagcgccatcgtgctctctgagttcgtcggttgttccccgtccctcagcggcgcgatccgcgtgaacccgtggagcgtggagtccgtggcggaggccatgaacgccgcgctgcggatgccggaggccgagcagcggctgcggcacgagaagcactacaagtacgtgagcacccacgacgtcgcctactgggcgcggtccttcgactcggacctgcagcgcgcctgcaaggaccatttctcgcgccggcattgggggatcgggttcggcatgagcttcaaggtggtggcccttggcccgaacttccggcggctctccgtggagcacattgtcccttcgtatcggaggacggagaatcggctgattctcctggactacgacggcaccgtgatgccagagaattcgatcgaccggacgccgagcagtgaggtcatctctgtgctgaatcgtctgtgcgaggaccccaagaacagagtgttcatcgtgagcgggcgtgggaaggacgagctgagtaggtggttcgccccctgcgagaagctgggcatcgcggcggagcacggttacttcacaaggtggagcagggacgcgccatgggaggcctcagcattggccgccgacctggactggaagaacaccgcggagccggtgatgcggctgtacacggaggcaacggacggctcctacatcgagcacaaggagagcggcatggtctggcaccacgacgaggcggatccggacttcggttcctgccaggccaaggagctgctcgaccatctcgagaacgtgctggccaacgaacccgtggtggtgaagagaggccagcacatcgtggaggtgaacccccagggcatcagcaaaggcgtggtggtggacagcctgctgtcgtccatggtgaggacggggaagccgccggacttcgtgctgtgcatcggcgacgaccggtcggacgaggacatgttcgagagcatcgtgtgcccggcctccagcagcggcggcgtgaggctcccggccagcagcgaggtgttcgcgtgcacggtgggcaagaagccgagcatggccaagtactacctggacgacacggtggacgtggtcaagatgctggacggcctggccagcgcgccgtcgccgccacgacggcccgggccggcggcggcggtgcagctccgggtctcgttcgaaggctcgctctgagggggggaagggaagtaaaacacacagcgctagcggtaaacagcaaacgtcgagcaaagaaaaataaccagtgatgatgaacaggattcagacaggtgtggcgtaggattagctgcagttacaggatcgacagttttttttttggtttcttcttctacattgctacccccaaaatcgttcgtgcctgtatatatgccgttaatgataatgtgcgaagaatgtttggaccacctttgtatatggtagtagctgacgatgacgatgatatcatcagaagg

SEQ ID NO: 12256 - DNA, 591 bp, Zea mays
  Clone ID: 701165103_FLI
ccggactaaccagaaaacaaaacaaaaaaagacgaaagcatgagccacttcgccgccgccatgaagagcccccttgcggtcgccgtcgcagcgcccgccgccgccgccgacgccaagagcccgctcttctgccccaagccgcggcgccccgcggcgccgctgcggtgccaccagagcggcggcttctccgacgccggcacggatctgctcgacctcctcctctcgaaggtgcttggatccttctggcgcgtcgtccccggtatcgtgttttttttgtacgtacagtacatggcgctgacgtttccctgtccgaacgctctttccagggcgacgagagcggcctgtcgtcggcgtccccgcagccgccgctgttctgcggctcgccgccgcggcgagcgtcgaacccggtggtccacgacagcaggttcggcgcggactgcccgcccatgcccgtgccgggactgcccgtgcaccggcccagcccgcgcccgtcggcggcggcgccgtccatgtcgccgcgagggtgcgcccgcgcgcggttcgcgttccagcccgccgcggtccgcgtcgagggttttgactgcctcgacc

SEQ ID NO: 12257 - DNA, 861 bp, Zea mays
  Clone ID: 701165106_FLI
gatgaccattggcattgcgctcatgttggcttggtcttccatacaccttcaccatttataactttggagcccagaagacagtgcaaagctggtacatgcaaacaaaatttgattgaccattgaagtttttagcataaagttaacattacaatctttctttgcgttaaattcatcaagcaactgttcttatgtgttgcagttgatatttatgctgggctaattgttggttttgttataaagtaacttatatttcaatctcacactaatttaaatttatcaggcaattgttcttatgtgtggcggttggtctctgggctggcttagtcattggttttattactgagtactacacaagcaatgcctacagccctgtataagatgttgctgattcctgcagaactggagctgccactaatgtcatttttgggcttgctctgggttacaaatcagtcattatcccaatttttgctattgcgtttagtatcttccttagcttcagccttgctgccatgtatggtgttgttgtggctgctcttggaatgctgagtaccattgccacaggccttgctattgatgcctatggccctatcagtgataatgctggaagcttaagtctgtatgggtgcatcttatcatatatatgtatatctgaaagcttaagtattttttaaatagaagatgtctggaaactttagtaacgacatgagtttcaggctttcagctatagcagtcttattcgcttttaagacagagaagatttttatttagagtttagaaagagtaggtgctatgggtgcatgttatcatttatgtggggaacatctctggtggaaattaatcagtaacgacatgagttaagac

SEQ ID NO: 12258 - DNA, 664 bp, Zea mays
  Clone ID: 701165114_FLI
gttggcttctcctcccccaccggttcgtgttcaggttctggttcgtgggcgagagggaagagatggcggcgtcggacgttgagtaccgttgcttcgttggcggcctcgcctgggccaccgacgaccactccctcaacaacgccttcagcacctacggcgaggtcctcgagtcgaagatcatcctggatcgggagacgcagaggtcccgcggcttcggcttcgtcaccttctccacggaggacgcgatgcgcagcgccatcgagggcatgaacggcaaggagctcgacggccgcaacatcaccgttaacgaggcccagtcccgcggcggccgtggaggcggcggtggcggatacggtggcgggcgccgtgatggaggcggctacggcggtggcggtggaggctacggcggtggtcgtggaggctacggcggcggtgggggatacggtggtgcaaaccgcggcggcggctacggcaacaacgacgggaactggaggaactgagcggtggggtccgctgaggcctagttatcttgttcgcttctgctaccgtgttcaccctagtctagagggggtttatcttcgtctgtggtcgtctcgtgtccgtatgtttcgtttcgtgttcgttgttgttgttgcccatctgtgtttttgaccgcaagctcgct

SEQ ID NO: 12259 - DNA, 757 bp, Zea mays; identical to SEQ ID NO: 10489
  Clone ID: 701165132_FLI

SEQ ID NO: 12260 - DNA, 566 bp, Zea mays
  Clone ID: 701165180_FLI
gctaccataaaccgtataggaaaatctagtggccttaatagctttggcctgatgtggtgcaatggtcttgtctgtggaccttcagtactgttcttgacttatattcagggtgacctaaagaggaccatggaatttccataccttcattctcttgggtttcaggttgtgcttctattttcgtgcatcttagcatttctactgaactacaccatcttctggaacacaatcctgaattctgcactcacacaatctatgtgtggcaacttaaaggatttcttcaccgttggaattggttgggtgctatttggtggtcttccttttgatcttcttaatgttatcggacagggactaggctttctgggatctggattgtatgcctactgcaagatcagagggaagtagacggaaattccattcaggggccagtgtgcttaacaaagtagcgttgtttatgctatttgctcctacatatgggagagaaattttgtaggtgtcctatatgtattgaacttcagtcctcatgaacactacaaaactgacaaggaaatagagtataccgaaatttt

SEQ ID NO: 12261 - DNA, 382 bp, Zea mays
  Clone ID: 701165181_FLI
gaaggatgtaaatggtccgaagacaactggatacaaaggaaaacggcccctgaaccgctctatgtgtcttagcaaaaccagtaactagtgccgtaaaacaatagagattcccagcaagtgatttgtggatcgcttctctgcacaataaaatgggggaatcaagctgcgccatgctgtttccgtttcacctgtaaacatatgagggcttgttcggttatttccaatacacatggattggatgagattgaaaaaaattgagaagaagtttgacttgtttgggattcaaactcattcaatcccactcaatccacatggattgagagctaaccgaacaagccctaaactgtaaatactattgctactgtaataccataaaaaatcc

SEQ ID NO: 12262 - DNA, 1032 bp, Zea mays
  Clone ID: 701165182_FLI
aaaaaaaaaccactcatcaggcgagacgcgagaagatcaatgcgaggatggagctgctcaaggagctggtccccggctgcagtaaggtatcaggaacagcgttggtgctagatgagatcatcaatcatgttcagtctctccaaagtacttgtcaatgaggcttgcaactgtaaacccgaggggcgattttggtgggctagatagctttctgaccacggagataaatgtatcattagagtatcatggctggcccacatattactttcaagaacgtcttggaaaatgttcagatatgcacacttgctgaagtttaagcatttctgagtgtggaaggatagcaagcttcaactgcaagaacggaatcgacttggagcaggtaacctggccagaaatgggtgttcatggagcaaggcagctgatgcaactccaacagcagttctggcatggtgatttggcgcatccacaccaagtggtttcacagtgggaaaagcggggggatggccatcctcccgtcttcagcaactccagtccctctctcttcggctatgatctaacaagctctggagcccagcaaaacccggcgagcaagctaaagaccgagctttgatcgacaacggtaaatagcatgtcaggggagcaagatggacatatggggggagggggacacagaatttcagcaaattgatcaaggcacaaacgagctgcgaatgaatgatggctgtggatggttgatgtcaagcccagcgaaatcaacattttcagagaggggatgtacatatagcgatagagatactgttggtgttgagctgaagacggggatgcatatgatgggcgaggataccgcagtcgttggagagacaggcaagccctgttgctatcgttgcagagatggccaagcgataccctggtttcgttactgatgatgatgacattcttagtgtatttctgacgactataatggcagtcttaaggttatatgggcagcattttttacgaacgcaagacatttcaacaagcattggaaaatttggc

SEQ ID NO: 12263 - DNA, 571 bp, Zea mays
  Clone ID: 701165192_FLI
agcaaaggctgtaccttggggccgctaaagcagcttggtccaagctgtctgtagaacttaagcaactctgatcccagccacggcacacggcaggttgaagccatcagctccggtttctggcgccggatttgggatccgcgcgatgtcttggtccgcgcccgacgacatcctcctctccacctcactcgcgggcttcctggacaagaaacttattgtcctgctaagagatggacggaaacttcttggcaccctctgctcatttgatcagtttgcaaatgttgttcttcagggtgcttgtgaacgagtgattgtagggggacaatattgtgatgttcctcttggtctgtatgtgatccggggagagaacgttgttttaatcggagaattggatcacgaaaaggatgaactccccgctcacatgacatgtgttttagaagcagaaattagaaaggctgagaaggcggagcgggaagcaagggatctgaaaggcacgatgaggaaacggatggagttcctagacttcgactgataataaacccgttcctgtggtggttgctgctcccctcccatt

SEQ ID NO: 12264 - DNA, 480 bp, Zea mays
  Clone ID: 701165201_FLI
ggctaccgcgctcggtggggagcccaaccccaccgccgacgccatggaggtcgaccctccgcgcgcctccgccgacgagaagcatgtcgccactattattgcggggggtagtgatgcagtgacaggccacataatatcgactacgattgggggaaagaatggtgaaccaaagaggaccatcagctatatggctgagcgagttgttggaactggatcgtttggggttgtcttccaggcaaaatgcattgagactggtgaaactgttgcaattaagaaggttctacaggacaaaagatacaagaatagggagttacaaataatgcgatcaattgaccattgcaatgtcatttccctgaagcattgtttcttctctaccacaagtagggatgaacttttccttaacttagtcatggagtttgttccagagtcactttatcgcgttctgaaacaaactccatgactaagttaaggaaaagttca

SEQ ID NO: 12265 - DNA, 1147 bp, Zea mays
  Clone ID: 701165213_FLI
tctgttatagagatctttcgtttaacaatctcagtggcccattacccaagatttctgcaagaacctttatcatagctggaaatccaatgatttgtggtaataaatctggagatagctgctcttctgtgtcacttgacccactctcttacccaccagatgatctgaaaactcagccacaacaaggtattggaaggagccatcatattgctacaatatgtggagcaactgttggttcggtagcttttgtcactgttgtagttggtatgcttctttggtggcgtcataggcgaaatcagcagatcttttttgatgttaacgatcaatatgatccagaagtttgtttgggtcatctaaagcggtatgctttcaaggagctccgtgcagctactaataattttaactcaaagaacatcttaggtgaaggtggatatggcatagtatacaagggttatttgcgtgatggttccgttgttgctgttaaaaggctgaaggattataatgccgtcggtggggaagtccaattccaaactgaagttgaagtcataagcttggctgtgcatcggaatctcctccgtcttattgggttctgcacttcggagagcgagaggttacttgtttatccatatatgccaaatggaagtgttgcttctcaattgcgggaacatataaacggcaagccagctctagactggccaaggagaaagaggatagcgctaggcacggcacggggcctgctctaccttcacgagcaatgcgacccgaagataatccaccgggacgtaaaggcttccaacgtgcttctcgacgagtacttcgaagcgatcgtgggagacttcgggctggcgaaactcctggaccacagggagtcccacgtcacgaccgcggtgcgcgggaccgtcgggcacatcgcgccggagtacctgtcgacgggccagtcgtcggagaagaccgacgtgtttgggttcggggttctgttagtcgagctgatcactgggcagaaggcgctggatttcggaagggtggcgaaccagaagggtggagtgctcgactgggtaagcatgcacgcatgcagcttgtgtttactttacttgtccgatttcaggtttgctttgaaacttcaaaatgaagaacgtctgtctgtctgtct

SEQ ID NO: 12266 - DNA, 339 bp, Zea mays
  Clone ID: 701165271_FLI
gtggttttcagcgttcacggagacgatggaatgaagtagcaatcgttggttggcttggctggttgctcgtcgctttccctgcctcccaaggcccaggggcaccttgcccaacttgcgaaagtatagatagatcgccatggaagcagccacggccatccaggtcgctagctagctagggcggcaagccaaaaatactgttatctttgccactatgtatttatgatttgtgaaatatcccagcgcgggccggccggttcttgtttaagcgggattaggagcatgattactcgtgtaaggaagaaggattaactaaccaatcaggaaccatgattacactgc

SEQ ID NO: 12267 - DNA, 617 bp, Zea mays
  Clone ID: 701165304_FLI
ctgctggcagctgtcaaccacccgtggtcccgtggaagagaagagagcatcgccggacccggggacggcgcgccgagaaggaacaaaagaagacggcggcggggcggagatggggagccctctgggcgggtggccgtcatacaacccgcacaacttcagccagttggtccctgccgacccctccgcgcagccctcgaatgtcacaccagccacttatgttgcgacccacaggacagatccgccacccaatcaagtgataaccacggaggccaggaacatcctgctgaggcacttgtaccagaaatccgaggagaagctgaggccaaagagagctgcgccgaacaacctcgctccggagaacaacaacaagaagaagcagcccaggggacctgtgggcgacgtcgggggccagtcgagcgcaagaagctgaagacgcacagctggtggccgtcctcccctgcttctcatctatcggtgtcatgcagcctgcatctctcactcacagctgagctggtagctggtggtggttgccctcccctcccctgtgcgtcctcttcgcctctcacgtctcgtatgtacgtatggtatgactcggagagctagtttgcatacaatgg

SEQ ID NO: 12268 - DNA, 1300 bp, Zea mays
  Clone ID: 701165359_FLI
acgcccggggccaggcgtctctcgtacggccacaaggacgtcgccttcgcgccctacaccgactactggcgccagatgcgcaagctcttcgtcgtcgagctcctcagcgcgcgccgcgtccgggccgccgaccacgccagggaggccgaggtggacaagctcatcgccaggctgagcagcgccggcggaaagccggtgcagctggaggaccacatgttcgcgctcatggacggcgtcatcggcacggtggcgttcgggaacatctacggcgcggagcagttcgcgcacaggaaccacttccacgacgtcctggacgaggccttgagcgccaaggccggattctccgcggaggattactaccccaacgccgccggccgcctcgtcgaccgcctcaccggcgccgccgcccgccgcgagagggtgttcagggacctcgacgccttcttcgacaccatcatcgaccagcacctggtcgtggtcgacccgtcgtcatcgccgccgtccagcgccacgacgacgcccgacctcatcgacgtcttcgtcgacctcatggaggagagccggcaccagccacaggtccacggctccctccgattcactagggaccacatcaaagggctgctctcgaacgttttcaccgctggcgtggacacgagctcggtgaccatggtgtgggcgatggcggagctgacccggaggccggcgatgctgaggaaggcgcaggaggaggtccggtccgtggtgggcggcgacagagagagggtgcacccggacgacatgcccaagctcaggtacctgaaggcggtggtgaaggagacgctgcggctgcacccggcggcgccgctgctgctgccgagggagacgatgcggcacgtgagcgtctgcgggtacgacgtgccggccaagacgcgggtgctggtgaacgcctgggccatcggcagggacccgcgcagctgggggcccagggccgaggagttcgaccccggcaggttcgaagacggcggcgacgtggggttcaacggcacgcacttcgagctcatccccttcggcgccggccgccggatgtgcccgggcatagccatgggcgtggccaccatggagttcacgctggctaacttgctctactgcttcgactgggagctcccggagggagtgggggtcgaggacgtgagcatggaagaggccggaagcctcaccgtccacaagaaaacgccgctcctccttgtccccacaagatacaaagccaactgtcagagtcgtcactctttccaattttgaaaacaacggtacaaggctggtc

SEQ ID NO: 12269 - DNA, 433 bp, Zea mays
  Clone ID: 701165362_FLI
gttccttgaaccacagatacatgccggcataaatcgcttccaaatcgatatggtagttaacgtttcatctgctattccatgtagaaaaaaatggatattggattgagagtgggccacggccacccaatttattcagaaactagcttcaataagttcttgctttcttgcagtcgatgtacccaatcttggagaggctccatgatgcatacatgcaaattcccgcattccaagccgcgcttcctaaaaatcaaccagacgcaccttcatcataatcatcaagattatctcaataatttgcatgtcattttgtaataatttggatagggagccactgcttcctccatcccgttgtggatcaaaagggtgaacgattggcacttacctgcatggtccaatacctattatatttcttaaacagatactatttacggcc

SEQ ID NO: 12270 - DNA, 522 bp, Zea mays
  Clone ID: 701165460_FLI
gcaaaccctaacctttcgattgccgccgcccgccgctcgctgctgcccgccgctcgccgcggccaatgatggcgaggggccgccgcggcccgggtggacgggggaggttcggcggcggcccgctgggcgacgagcggccagtccgtcacggcgtccgcgtcgaggagaacccgtacttcccattaccgcgtcgggcgtcgggctggggagtggcaccgccgtcgcggcacctgtgggtgggtggcctggcgcccagcgtcacggcgtccgacctgtcggagctgttcctccggtgcggcgacgtcgagggtgttgcccgcgaacccggccggaacttcgcgttcgtgagcttcctgcgggagggggacgctgtggccgcggtgcgggagctccagggggctcgcctggctggggcgcctgttaggatcgagttttccaagggggtcagtgttgaacatcctctgttcattatatgtttatttaatttgactccaagcaattatcggtgcggtgttcttctcc

SEQ ID NO: 12271 - DNA, 790 bp, Zea mays
  Clone ID: 701165466_FLI
aggccgcggcgcagggcggcgcgcccgaggcgcccgcttctgtggctccaggagacgcgctggaggaggagcggacggagcctccgcccgccatcccgtccctcagcaagctcaagctgtcggggaacctcgccgccgcctactccttcgacgccttcttccgcaacgccgccgagaagaaggcggcggcggcgggagggggagcggtccggcaggctgcgggtgcgggggaggtgacgctggaggccgcggcggatgcgctgctggccaacctcttcgcgggggtctcggcggtgaaggcggcgtacgcgcagctgcagctcgcgcagttcccctacgacgcggaggcgatccagtgcgcggacgccgccgtggtcgccgagctcacgaggctctccgacaccaagcggaggtacctgagggaccccgccgccgcggcccggggcgcggcggcggcgggccacaccgcgctcgcggcgcacgccgaggagcagcgccacctcctcaagacgtaccagatcacggcgcgcaagctggagtcggacctccgggccagggacgtcgaggccgagcgcgccaggagctccctcaccgccgagctccgcgccgagcgcgccctggaggcgcggctccacccggggcggaccctggcgtcgctggacgagctccacctctccggcctgaacccgacccacttcctgaccgcgctgcggcacacggtgaagtcgatccggtccttctccaggtcgatgctgagctcgatgcagtccgccgggtgggatctgggcgc

SEQ ID NO: 12272 - DNA, 390 bp, Zea mays
  Clone ID: 701165471_FLI
gccgaggatctcggcatggcccagaggccggtggcgccagcgaagaagaccaggcgcgggcctaggtcgcggagctcgcagtacaggggcgtcaccttctacaggaggacgggccgctgggaatcgcacatctgggattgcgggaagcaagtctacctaggtggttttgacactgcgcacgcagccgcgagggcatacgatcgagctgcgatcaagttccgcggcctcgacgcggacattaacttcagtctgagcgactacgaggatgatttgaagcagatgaggaattggaccaaggaggagttcgtgcacatactccggcgccagagcacggggttcgcgaggggaagctccaagtaccgtggcgtgacgctgcacaagtgcggccgc

SEQ ID NO: 12273 - DNA, 209 bp, Zea mays
  Clone ID: 701165478_FLI
gtgtatggttccgtctgttttctgtcctataattgactggttctgcactccccccaatccaatttcagaaaccgaagacgtttgagattgcggggtctgagtctcttgatttgtgcctagagattggtttttcactttccacgaattgttggactgaaagaaaaaagatctataaaagagaaaaaaaacagtaatgatttataacttgc

SEQ ID NO: 12274 - DNA, 519 bp, Zea mays
  Clone ID: 701165490_FLI
aagcaccacaagcacatggagcagctcggccagctcggcgccatcgccgccggcgcgtacgctctgcacgagaagcacaaggccaagaaggacccggagaacgagcacggccaccgggtcaaggaggaggtggccgccgtcgccgccgtgggctccgccgggttcgccttccacgagcatcacgagaagaaggacgccaagaagcacgcccacaactgatccgtcgcaggctgcctcagccgaagcagcagcacatcgtcgcggttgctgtttcatctgttctcccagcctcgtcttcgtctactgtgtgccgggcaggccttgatttgaggctttgagctaccgatatttgcacggacgtaggaactgtgttggtcctcggcgttcttgtatcaagatcaaatcaggccttcaataagtgtgtgtgtgtgcatatatcttttttttaaaatttatctctttttttttgtatcgagagatgttctgaataatgtgaatttacgtgtgtttatataaacg

SEQ ID NO: 12275 - DNA, 1116 bp, Zea mays
  Clone ID: 701165517_FLI
attttccggcccgaaaccgaaagcacccgcaccaatctctgcgtctcttcgtcttcggctgcgcggcggcggcagcagcggaggaggttgaggagatgctgtccggcgacatccccccgagccagaccatctacctcaacaacctcaacgagaaggtcaagaaagaagaattgaagagatcgctttatgccttgtgctcacagtatggaaggatactggatgtggtggccctgaaaacacaaaaactgagagggcaagcatgggtggcgtttagcgaaattacagctgctaccaatgctttccgtggattgcaagattttgatttctacggcaaaaaaatgcgagtacaatatgcaaaaacaaaatcagactgtattgcaaaagaagatggtacttatgcacctaaggagaaaaggaagaagcaagaggagaaagctgctgagaaaaaacgacgaacagaagaggcacaacaagctggcctcaatgctgctgctgcccaaagcaatggaactggctatcaagcgtctcgtctgggcaaggcttcacaggagccacctgcgcctccgaacaacatcctcttcatccagaatctgccagaccagaccacgagcatgatgctccagatcctgttccagcagtaccctggcttccgggaagtacggatgatcgaagctaaaccaggcatcgcttttgtggagttcgaggacgatggccagtccatggtcgcgatgcaggctctccaaggcttcaagatcaccccggagaaccccatggctatatcctatgccaaaaaatgagaaccctaggggactctgtaccggctttgtttcggtactctagtattgatcccaaatccacatgtgctgaggtggattgtggtgtaaattagtttaagttacaccctaatctacctcaatacatgtagattgagctcaatactagagtatcaaactagacctaagatctttccgctccgcctttagaaatcgagccacggtacccactttccagtcatgtgtttttggaaagcactcgcttgatttcgaagttaaactcttaacacttttaaatcaggtttggtcctcagtctctgttcactcggcttttgctcttgtc

SEQ ID NO: 12276 - DNA, 762 bp, Zea mays
  Clone ID: 701165540_FLI
gccgaacaccaaacaaggcagcagccgccaccacttcattgcgcgaatcggagcccgtggccgtcgcctccgccttcgcgattcgccgccgttgcccacgagcgaggcttcctcctcttcgtcgccgccgtcgcaggaggggaaagaggataaactgccatggcgggcaggcttctcgcgaatctaatcgtcatgggcggaaccgtggttggcagggccatgctccaggcctaccgccaggccatcgtcaatgcaaacaaaactggagctgcccaagaagctataaatggtattagacgggctagcaaggccatgactgagcaagaagcccggcaaattcttggtatcagtgaaaattcgacgtgggaagagattgtccagaagtacgacacaatgtttgagaggaataacaaaaacggcagcttctatctccagtcaaaggttcatagagcgaaagaatgcctggaacctttatatcaaaagcctgatgtactgaactgagattttgcagacgccctagcttctgtttgaagcggtatgcctaattgatcgatttattagtgtgctcagagatcaacgttcagtttattgatcggtttgccaatgcgcccagagatcaacgttcagttttgagttatgtgttgggcgcatcaggttggttccttgtaatgccagaataatgtttaacaaacataccgaattttggctgattctcattggcaacgtctcagtcactggttttaattcatagtatgttatttc

SEQ ID NO: 12277 - DNA, 329 bp, Zea mays
  Clone ID: 701165560_FLI
ggcccgcattctcgtcagaggcttcggcatccgcctgcgcctgttgacgctcagtgtgcccaagccgttggtggatttcagcgacaagcccttgatcatgcactaggttagcacgatcgatccttatctggtacaaatttcagttccttatttaattcattagatacatcgtagggggaaccaggaagttcgtttttaggaattggccatggttgaccaatctgagttgttacagtgcaagatgtaatgcaaatgtaatttatggtctccaaataatgcttttataaggtggatccatatgaatggattcccacagaaatattcatctc

SEQ ID NO: 12278 - DNA, 1030 bp, Zea mays
  Clone ID: 701165603_FLI
tctcaacaatgttcgtcagttggcaatgtatcacaaggaacgattgcaggagcttctggagcctgtagttcctcttatcgtgaaatctgtgaagaacccaagaagtgctgtatgcaaaactgcactaatgacttgtgctgacatctttaaggcctatggtgacttaatggttcactcaatcgatccactgctagtacaactgtttctgaaggcttcacaagataagcgttttgtctgtgaagctgcagaggcagctcttatatcgatgacaagttggatctcccctttactactcttgccaagaatgctgccttacctcaagaacaagaatccacggatccgagcaaaagcatcagtgtgtttcagcaagagtgtaccacgccttgatgtggtgggaatcaaagaatatggtatggataagctcatccagattgcggcaacccaacttagcgaccagcttcctgaatcaagggaggctgctcgcaacctggcactggaactgcaagcattctatgagaagtctcaggcctcaacttctgacgaacacgaggtcgaggcctctgcctcgccagatgctgaatcatgggaggctttctgccagtccaagctctccgcattaagtgcccaagccattcttcgtgtgacctctactactacaaaagagtgcgtcacctctgccccaaaagaagggttggctgtgggttgctagcacaagccacaggggagatattgcgatttttcaccctgttcgctgttttgctgtacatgcttttggtttgtcctgcggtgcacccagtcgtgaaaaggttaatcattggttcaggagttcaggtgtgaccacggtgttaatattggtgtgggatatatatccattatagttggttgtacaatcatttggttccactacttggtattggagtgtagatttttttccccatggttcagcgttatacacaacagtccttattttttgtttttgatgctggttctgttattttgaaggaaatgacatattttgtgtttcggacct

SEQ ID NO: 12279 - DNA, 236 bp, Zea mays
  Clone ID: 701165625_FLI
tgataagggaagggatggcggggcaggagcttggcgagcagaccatcttctaggccttctccattaccagtttccgggagaaagaaacttgtagtagattctatgccgacaatgtacttgtagaaaggtgagctttttgacttgctgatgatgtaaacacgactcgcgattcaatcataccaaagtatgatgattgtctaatttggaggaagagaaatgttttgacttgttgcttc

SEQ ID NO: 12280 - DNA, 451 bp, Zea mays
  Clone ID: 701165648_FLI
ggccggacttggggtgggtgtcggagctggtgatgtaggcgaggcatatgccagcgcctgcccggtgccgacgcccgaaattaatcaaagccaagacgtggacgccgccatctccagaggcgcctctcgccgtttggaacagcttcattaagcaatgtttatttttagcatttccatgaattgcatcattcttctgtggatagaccaaacatggtgcaagtattattaatactgcaatctgtaagcgtggcgtgtgtgccccccttctctttttttttccggagaccatggcctcactcaacatgctactgtcgtccatggttttcgttcgatcgtgttactactaccagtaccagtgtacgtctaaccaagtgcagttggcagtgtgtgttccattccatccctgcagctgcagggatcgatgttgcatttgcaaaataggaacccaagc

SEQ ID NO: 12281 - DNA, 469 bp, Zea mays
  Clone ID: 701165681_FLI
cgcggcggcgggcgggctgcggcggctgctggcggcggcggcaacggcgggagccgcggaggtgcgggcgtccatcttcggccacgcgctgaaccctacggggaggcgcgcggcgacgaagctcctgcggaagaaaatggtcggcgaccaggtggcgcagtggtacccctacgacatcaagcgcgacgacccgctcgtcatggcgcgcgaggagaaggagcgtctggctaaactggaaatgctgaagcgtcgtggcaagggcccgccgaagaagggtcagggaaggcgtgccgtcaagaggagcaagtagtcgagctgtgctacctatcaatgctcatctctgtttctggagcttgccttgttcttacatgctgtaacgtactacactactaccagtgatttgtcgggtgagtgggcgacgatagatgcaaaaaaaaaaaaaccgccttttctatcaagtttagcttac

SEQ ID NO: 12282 - DNA, 961 bp, Zea mays
  Clone ID: 701165755_FLI
gctgccttcgcccaaatgtcgagcagcctgcaccagcccgcagtccttgtccctcctccagcacgttccctagccatccgtccagccgatggccatggctgaggccacccacctcgccagcttcatcatgtgttcgttccccgtggcgtgtccttatcactggtcgttggactcggcttagaccccatgctttgcgtcctttcgacgttgacgacgcttagctccctcctatagctctccgtgcggcaagcccagctttcatctccagctccagcagctgcccctcctggctccagtcctctgttcgtccctcgtcgtcgatctgtgcagccttgacgcgccatcggctccctgtccgacttcatcctcgtcgccgatctcatcccgttcaggctgtctgctcgagctccagccctcgctatcatgacttctctatggtcgccaccttcagttcaccggcgtgctgctccctcgcctcggcgccctgcgagctccttcttactcgcccagtttgcagctcaggcctcgatggatgtcaacgccgtttctttgacctcgccttgacactcaatcgctgcagcacgctatgtcatgtgtgctacaatatcatcgttcgctatactcattctcgccaattttccttgtcgtttctcggctactacctcgtcagctcctgcgcgtcgtgcacgtcttgtgttcggatcaagcaccaggattttgaggaaaagaaagctccagtgcatcggccggtaaaataaaactggtggtagtcatcgtccttgcgaaatccaagactagcttagtcgcggtaagctcatatattactctagctatttgatttgattaacgaattaaatgagtatattggtcgcgacaattctttagttagttgcacctgtgttgtggttatattaaatgtttgctaaaatgccttaatcaaatatttgttcaatttaaaacc

SEQ ID NO: 12283 - DNA, 726 bp, Zea mays
  Clone ID: 701165759_FLI
ggcgcgttcgaatccatgggtgccgggctcgccatggcgcctggcgacatcgccttcaagtcgaacttcgctacactggatgagaacactggagttatcatcagcaggagggcagatcggcactttgaagaggaaggccctatactctgtgctgcgttggatgggatgaaacttcggtcgtttcctgagtatgaagtcagagtaagatatgctaccgagcatagatgtggtgtggttgtcaaaggaccaaagctgagtgggaacatttctggaactgatcccttgaaggacaaccgcttgcatctgaaggctgaaccgttggatggctcagaagaagctaaaaacactgcagctgtggtcaatgagctttctatggagattacgcgcatactggtttctcaccccatcaacgcaaagcgtgcagctgaggggaagaacatcgcaaatgttgtgttgctgcgaggttgtggtattcggattgaggtgcctgcctttgaaaccaaacatggacttgcaccttgcatggttgctcctaccaagatcatagctggcctgggactgtcactggggattgatatccttgaagcacctggagcaactggagattatcgtactctcttaacttctaaagctaaagccatagccaaggcactctctgcccctatggatacaccacctcgtgtttttgtgcctggagaggatggatacaaggctggaaaagaaaat

SEQ ID NO: 12284 - DNA, 1088 bp, Zea mays
  Clone ID: 701165760_FLI
cccgagtacccgacgcgctagctagttctattgccgcaccccagatctccaggagggactcgttcgttcagctaactacactgcacgcaatggccaccacggcgaccgaggcggcgccggcgcaggagcagcaggccaacggcaacggcgagcagaagacgcggcactccgaggtcggccacaagagcctgctcaagagcgacgacctctaccagtacatcctggacacgagcgtgtacccgcgggagccggagagcatgaaggagctccgcgagatcaccgccaagcacccatggaacctgatgacgacctccgccgacgaggggcagttcctgaacatgctcatcaagctcatcggcgccaagaagaccatggagatcggcgtctacaccggctactccctcctcgccacggcgctcgccctcccggaggacggcacgatcttggccatggacatcaaccgcgagaactacgagctgggcctgccctgcatcgagaaggccggcgtcgcccacaagatcgacttccgcgagggtcccgcgctccccgtcctcgacgacctcatcgcggaggagaagaaccacgggtcgttcgacttcgtcttcgtggacgccgacaaggacaactacctcaactaccacgagcggctgctgaagctggtgaagctgggcggcctcatcggctacgacaacacgctgtggaacggctccgtcgtgctccccgacgacgcgcccatgcgcaagtacatccgcttctaccgcgacttcgtgctcgtcctcaacaaggcgctcgccgccgacgaccgcgtcgagatctgccagctccccgtcggcgacggcgtcaccctctgccgccgcgtcaagtgaaaacatggcctggcctggcctgccccaccaccgccaccgacggcgccgccggccgcatcctcattccaatcataatagacgacccgcagcattaattatccaccggctttttttttggctctttcttgcccctgtaatctttctcctcctcttccttcttgggaattgtcgccgccgtttcgatacgtaaatcacgagatcggtaatacagtaatgctcctc

SEQ ID NO: 12285 - DNA, 623 bp, Zea mays
  Clone ID: 701165781_FLI
cacccgcctccactcccccctcccaggtgctgcccaggtaagtcggcggcggcgatgacaacgcgcttcaagaagaaccgcaagaagcgcggccacgtgtccgccgggcacggccgcatcggcaagcacaggaagcacccgggaggtcgcggtaacgccggtggcatgcaccaccaccgtatcctcttcgacaagtaccatccgggctacttcggcaaggttggcatgcgttacttccataagctccgcaacaagttctactgccccgcggtcaacatcgagcgcctctggtcgatggtgcccaccgacaaggcggcggaggccggcggcgacaaggccccgcagatcgacgtcacgcagttcggctacttcaaggtgctcgggaagggggtgctgccgccaaagcccattgtcgtcaaggccaagctcatctccaaggtcgccgagaagaagatcaaggcagcaggcggcgccgtcgtgctcaccgcctaggtttcagtccttgttcgcctcctggttttgaaatctatatctgaactgatagtgctttcctgtctcggcaatttgtgttaagaaaacctgtagttttaaaatatgtggttcctgcctgtttggcagtgctt

SEQ ID NO: 12286 - DNA, 814 bp, Zea mays
  Clone ID: 701165827_FLI
gaatgacaactggcacgatatcttgtatcgataaatcatataataaaaaatccaccacctacatatgttgtcgaggaaaatgaaaggtaattaaccacgtactaacattttcaatttgcatcttgtatatttcccgacgaaacagaaggtcaaagtcgtcagcgcctccgacgaaaatcaggagcagaaaccgtcggatggaaacgaaacaaactcaaaactgaaatgacaacaactcacgagctaatcgcacagtctttttcgcgtggcttggctgacatgtgaaaaagctaggcgcccccgataaaaagggcctccccgctccccggacgcggcggctactgtttctgtttcttccttcgaccccggtcgtcccgtcctccgctgggcatcgaaagtcgaacgcctcctccctccctccctccctcccagttccgtcgtcggctcctgcagcagcagcaagcaatggcggcttcctggagagccgtggcgctggcggtggccgcagtggtctggcttcttgccgttgccggtggcgcgcgggcgttcccggccgaggacttggtcgcgcggctgccggggcagcctccggtcacgttcaggcagttcgccgggtacgtggacgtcgacgccaaggccggcaggagcctcttctactacttcgccgaggcgcgggaggacgccgccgccaagccgctcacgctgtggctgaatggaggtcggttgctaccgctcgcctcctcctctcctctcctctcctctctctcagtaaagcaatttttttttgctggagttcgtacgctcttgtgtttac

SEQ ID NO: 12287 - DNA, 866 bp, Zea mays
  Clone ID: 701165842_FLI
tgcaagcgctctctcctctcacacacagagtcacactacactccccggatttcagcagctagctctcggtctaagcaggcattaaaaccctatccttttcaggtcactctcgccttttcttttccgttctccgttcactcctatttccggtcgtttgcacgcttgcctcttgagtcttgacacgagctcccacacgtacactgcataaataggcgagcagcgggagagagacgaccgacgaggacgaagaggaattaagccagagcgatcgaggtggtgtagtgtagcttccgagcgaagctcctaccgttgccgccggccggagatatgtcgtcgggcggccgacgtggcaggatcagcgacgacgagatcaacgagctgatctccaagctccaggctctcctcccggaatcctcacgccgccggaacgcgagccgggtatgtagcgcgtgtacacagaacggagctagctcagtccactacttcggtctatctctactcttccccaaaatgcgcaccgtacgtatctctcccgcagagtgcgcgtcggtgcagcgaattaaagcctgacgatcgacgacgacatggattatccatagcttgcgtctcttcttgcttgccctgctgatgcatgccggccatgtgatgtatctctgcagtcgtcggcgtcgaagcttctgaaggagacgtgcgcctacgtcaagagcctgcaccgggaggtggacgacctctcggagcggctgtcggggctcatggagaccatggacaacgacagcccccaggccgagatcatccggagcctcctccggtgactccagagtccaggttccagccatgccgcttgccgccccggtcgtccggcgcgc

SEQ ID NO: 12288 - DNA, 574 bp, Zea mays
  Clone ID: 701165845_FLI
acgcacccaggttgtcgtcctccccaccgcaccaccaccacggccactgctgcgacgatgacgagggtgaccgtcgatgcctgtctgctgccacctgaccagtacggtcgcgtgcccgtcgacccggatccgtacgcccagctttcgtgacaccgatgcggcacccaaggagggtgcctcgcgggggacccagacctccacctcttcgtcgtcttcaatggctggtagtgatgtggcgtctctgttgctgcaattgccaagtggatgaaacagatcggtgtgagagtcatgtcaaggccacaaccaacaaaattgacggggtgacgaagggtttgagggattctgctactgcaaaagtcgagccacacgatgatgctccccctatcgatgtcgatgttctatccttggatgatctgataaaaaattgttgactttggttcaagagccttgataggtgaaggtatttatgggacattgtactatgcaactcttggtaatgtaacaaaaatgacagtaaagaaactttactgaaaatgaacccattgtcgagttcttggtcgaggttggtgttgcc

SEQ ID NO: 12289 - DNA, 502 bp, Zea mays
  Clone ID: 701165863_FLI
gggctctgcctccccaggatacttcgccccccgttccaccgcgagcccttccggcttccgcctctgttccgccgctccagcctccaggatccgtgagaggaaaagtagtagccccatccccaaccggtcctaacccacggtacccaatacttgactcggctctctccatgagctactgttccatctccatttcttcaatcatttctcgcctttcatgttcaagggcgttgcttgccaaccacggtatcgttctagccgccggggccgaacgaagtcggggatgtaattgaatccagcgatctttggatgctcgtcatacgtgccaacagcagggtcaatttccctcgaaagagaaggccgaggaaatggaagccggtttcctgtggaaagagatcggtgaccaagccggtgcggcgagaatgtccggtgggaacaagaacaggagcctcgactgggatttgaacgactggaggtgggacgccaacctgttcctggccacacc

SEQ ID NO: 12290 - DNA, 204 bp, Zea mays
  Clone ID: 701165889_FLI
cacgacgagaacccgagaccaatccagccgccgcctccgccttcgccttcgccttcgccttcgcctcgcctagtattccctccgattcagaggccgatggagtgcatcgccgagatgccccgcgcgccgctggacagcaggctgcgcaagcgtcagcgtctcggctgggacgtcggccctgccgagatgtataaggccgtgcgg

SEQ ID NO: 12291 - DNA, 394 bp, Zea mays
  Clone ID: 701165896_FLI
gttcagtctagggtttcggccctcgcccgccgatccgtccccccgccggccatgtcgaagcaaggagggaaggccaagccgctgaaggcgcccaaggtcgacaagaaggagtacgacgagagtgatcttgcttatttgcagaagaagaaagatgaggaaaaggcactgaaggagctgaaggccaaggcacagaagggcgcaattggaggctcgggtctcaagaaaagtggaaagaaatgagcctggcccacccacccacccatctctaaaacaccttggagaacgataaggcagctgcttagtatctgtgttgcgcttcactatatgtggctgtgagacaatgctgcctcttgtattccgtgttacgcggtgttccagttggtttgcttgatcc

SEQ ID NO: 12292 - DNA, 150 bp, Zea mays
  Clone ID: 701165907_FLI
ggctccgtcgtgattgacggcgggggtcaggaaacttcggggttggggtgggtgcactgcattggaaacctcctttttttttttctccgtccggtgaaaggtgacttgaatgatgtactgctggattaactagtttggtgttgagaattg

SEQ ID NO: 12293 - DNA, 359 bp, Zea mays
  Clone ID: 701165939_FLI
gtcgccgccggtgccaacaagcatgctgcggcatcctgccgtgaagaggagcagagcgacaccgggtcgtcgtcatccgtggtggacgcctccccagcggtcggcgtggggttcgacctcaacatgccgccgccggccgaggtggcgtaggtggaccgaccgccgcagcgcccggtgacacgagacgagacggctccgagaggtcgcgtagatgattagaaacaagctgtattagtacgaggttgggttcaatttgccgcgatgggttactgctagccaggtgtacatagacctttttgcatcggcagctaatacctatttgccgatgttacaaaaaaaaaaagagcgaaacgttttgt

SEQ ID NO: 12294 - DNA, 740 bp, Zea mays
  Clone ID: 701165961_FLI
tggtaagtgcaatcaacccttcaagcatttcaccaagtgtccagttctcccttttattgggattttcctaatgcttataaaaccaagggatgccatggtgttgctaacgatccatccccgtttcctctgtaggggaccgtaaagttgcggcgatagggatccacggttctcggatgatagtttatcacgggctcgcactaaacataacaactgaccttgctccattcagaatgattgatccttgcggcataaaggaccgcggtgtggggagcattaaggagatactacaaagggtgtctgatgcggaagagatcgatgacgcgtcactgatggatatagtgtatgattccatgatcaaggagtttgcggaactcttccagctcagtctagacttcagccctggttgcagtttccagtgagaacaacgcttttagcagaccgtatgatgctgccgttgtattctggacggaatgttagctcacggcctttcgtgctcggtatctccgtgtctgctgcactccaccatgtataccacatccacctttcagtcgcaggatatctctggaatctgtagcagtagagtcgggttcttcggtgtcctctcttcatgggctctggtgtttatagagcatcactgctctctctctctctctctctctctctctctctctctctcttgtatgtaacagtgtatacttacacattcttccatctgagcagataataatatcccagccagc

SEQ ID NO: 12295 - DNA, 1057 bp, Zea mays
  Clone ID: 701165994_FLI
cctccgggcggtattcatcaactcctccctgaacctggcccgcgccaacggcttcgacggcctggacctgtcgtggatcttcccggccacgcaggcggacatgcagaacctcggcgccctgctcgcggagtggcgggcgaggatcacggaggaatccgtcgccaagtctttgcctcctcaacctcaaccccttctcctcaccgcgacgctctacttctccaaccacctgttcggcacgcccgacggcaacctcgactaccccgtggacgccatcgcgagcagcctcgactgggccaacgtcctcaccttcggcttccgcggggacagcggcgtcaccgcggccgacgcgccgctctacgacacgtcctcgcacttctcggccagctacggcgtggtctcgtggctggacgcggggctccctccgtgcaggctggtgatggggatacctctgttcgggaggtcgtggttcctcaggaacaaggccaagaacgggctaggcgcgccggccgccgccgccgggacgaagcagaggaggagcaaccagactgggataatcgcgtacgcggagaccgaagagtacctgagctctcaaggcaccgtcgtcacctacgacgaccagtcggtggcggagtatttctgcagcggtgacctctgggtcagtttcgacggcgcgcaggtcgtgcagcggaagctggagttcgcggcgaggtctcagttgctcggctacttcctctggaccgtcggcttcgacgattcgaacagcacaatctccaggaaagcatcggagtcatggcaccagtatgctcagggtggttttggaatcatgcacgcaggaggttcaaaccaatacgttgcatttaactcgtcttcagtatcacttggtagctgctattcgagatctctcagctgtttgctgtcttcagtacttctgttggttattctgtttcgttaaagcgtatcagtaaacaggccagaaatgtaaaataatagtttcaggtgatatattcatcaaagcgaacgtctaatacatgttcaggtgtatttgttgacttctctc

SEQ ID NO: 12296 - DNA, 441 bp, Zea mays
  Clone ID: 701166010_FLI
cacgtcttctctccggttgcgagcacggtcggaggagctagggtttcgtcgcggcgagatgtcggcgtacgacgaggtggagatcgaggacatggagtggaacgcggagctgaaggcgtacacgtacccgtgcccctgcggcgacctcttccagatcacgctcgacgacctccgcctcggggaggagattgcgcgctgcccctcgtgctccctcttcctcaccgtcgtctacaacgccgaggatttcgccgactccaaggagccgacccacaagccgtccccgagcccagtagccgtcgcctgatgtggcccattcgaggctagatggtgaggccccagtttccctggagttcctgtagccgctctgaaatttcgccttttgaagccctccgttacatgtctcgtttggaccagtcggtagctatgaaatttgtgtgcatt

SEQ ID NO: 12297 - DNA, 694 bp, Zea mays
  Clone ID: 701166061_FLI
gccagatattattgcagcctccggtcctcccttcccttccctcctcgtctccccctctgattgatttgagagctcgggcaccagatctgaagccctcttgttctgtggttgtgtgcctttcggctggtgtagcattgagaggaggcgctgttccagttccagttccaggatgagcaaggaggatgtgctcaaggtgcagactttgatgctgagagtgaacatacactgtgacgggtgcgagaagaaggtcaagaagaccctccacaagatcgacggtgtctaccagagcagcatcgacgcggaacaggggaaggtgacggtgtccggcctgctggatccggacaccatcatcaggaagctcaacaaggccggcaagccggcccagctgtggggctccaagcccggcgtccctcagaacggccatggcggcggcaagggccagcctaaggacgccggcggtggcaagggccattccaaggatgccggcggtggcaaggcccagaagggcggtgcgggtggcggcggtcacaagggtgccggtggtgccggtggcgggggtggtggggccaaggatcctaagatggtgatgccgcagccgacgccgcagcagctccagcagctgcagcagcagttgcagatgaaggggctgaagctcccgccgcacctcctgggcggcaacatgccggcgttcccc

SEQ ID NO: 12298 - DNA, 441 bp, Zea mays
  Clone ID: 701166145_FLI
catggacgaggtgctgcgcgctgtcgactcgctgctcaccgccgccaagcatggcgggaaggtggccacgcccgccaactggaagcccggggagtgcgccgtcatcgcgcccggcgtctccgacgaggaggccaggaagatgttcccgcaggggttcgagaccgccgacctgccctccaagaagggctacctccgtttcaccaaggtttagctagccgacgtacggcacggacatctagctcgtctgtcagtccgcgtcgaccggggtgcgcggatcttttgtgcctgctggtggtttctctgactagtactagtatatatataggctctatgtatgtgcgtactatgccgtgccgtgttgtctcgtgtagtggtggcaaccggttcgtggcactaccgcgctagtattgtccacccatatcaatgtcctcttctgaactt

SEQ ID NO: 12299 - DNA, 1055 bp, Zea mays
  Clone ID: 701166216_FLI
agcagctgcattaacgcccttgtggagggcaagaagcacataccgtatcgcaattccaagctgacccaactcctcaaggactcgcttggaggagcctgcaacaccgtcatgatcgccaacattagcccctctaacctttccttcggcgagacacagaacacgcttcactgggctgatcgtgccaaggagataaaaacaaagacgcaacaaaccactgtgaatgaggaggttctggaccaaccagactctgaaactatgcttgtactggagcttcagaaggaaaaccgcgtgctgagggagcagttggcgaagcaacaacagaaattactgactgccgaggctcagctactcgcttcaaaaacctcgccacaacgatctcctgctccctcgtctcacgtctcaactccaggatcaactcaaaggaagaccagacgatctatcttggctgctggtggggggaactacttcagcacactggactcaaagaggcatgcagccgacaacgcacaggtcagggagctgcagaggaaagtgagcacgttggagtccgagatcgagaagatgaaaaaggagcacctattgcagctgaagcggaaggacgagttcatccgtgacttgatcaacaggaaggatcctaataacaacagtgaagaaacagcaacagttgatagaagagttgtcacgagggcgagcgtgcgaaaggcacagagagacgcatcagccgcagtcgagctgaaaagccccagccgggtgttcacatcaccggcgccaactgcaaagaagcgtactttctgggacatcggaggcaacagcccttcagttcttgctgccaacggaagaaagactcgaagccatgtggcaacagagacaccgaagaaagcatcctccaagctgcttcagccaggatttgcacggcaaacatcgacccatcaaagattcacatgaaagactgcctacaactcattcattactaattggagtttaatcgaagtacattgtaatgttttttagtttttttatccatattgagttattggaactgtttttttaaaatt

SEQ ID NO: 12300 - DNA, 822 bp, Zea mays
  Clone ID: 701166245_FLI
ggcgagcaacattcttctcgacaaggacctcacccccaagatctccgacttcgggctggcaaggctcctgccgcccaacgcgacccatgtcagcacccgagtggcaggaacattagggtacttggctcctgaatacgcgatccgaggccaagtgacgaagaagtccgatatctatagctatggggttcttcttttagagattgtaagtgggagatgcaacaccaacacgagattacctagcgaggaccagttcctccttgagaggacatgggcactctacgagcaaggacgtctagaggacatcgtggacatggacatcggcggcgaccgggacgtcgaggaggcgtgccggttcctgaagatcggcctgctgtgcacgcaagacgcgatggcgcgccgtcccaacatgaccaacgtcgtccggatgctctcgggggagaggaggatcagcgtagagaagatcactaggcccgccatgatctccgatttcgcggagctcaaggtcagcagcaaggagcgaaggccgggcgaggcacgctcgcccacgacggctcccaccacgaaatcgttcaccaccacggagccgttctcgtcgtcggagacgcccacgcagtcgtccatgtgaagtcgtgggcgtacgacgcatttttttttttggtttagtttgtatagtgtgtggacgtgttaggtgggcagggttacaggttttttttttgagtttcttgtttgttttgctgtgaggaaagatctcgtaggcctcttattgcatctttgatcatgtaaatatctgtaaacgaagatgatcaagataagctttgcacg

SEQ ID NO: 12301 - DNA, 344 bp, Zea mays
  Clone ID: 701166248_FLI
ctttctctcctttggcaaataaaatacgagtgaagattataccaaaaatggagagatgcttggagcgatggcgaaggatgagttatggagtggagtggaagcctttgttttcgtcgaagactccaattccctttcaatacacctatgactcggtttgaaattcacttgaatacacattagtcatagcatataaaagagatatgatcaaaggtatatttatgagctatgtatgcaagacatcaaaagaaattcctagaatcaagaatatttagctcatgcctaagtttgttaaaggtttgttcatctattgttgtccaatgatattgatatattgttcccctgtc

SEQ ID NO: 12302 - DNA, 1559 bp, Zea mays
  Clone ID: 701166388_FLI
gtcggccgtcgcaaaaaaacaaaacaagaccaccgcaccatggaatcgctgacgcttcgcgcttcgacggccgcctcgccgctgcagcgacgccggctgctccccgggcggcagcgcgcgacgtacgtccgcgccacggcctccgccggcgagccggacctctccgtgcgcgtgaacgggctgcagatgcccaacccgttcgtgatcgggtcggggccaccgggcaccaactacaccgtcatgaagcgcgccttcgacgagggctggggcgccgtcatcgccaagactgtgtcattggatgctgaaaaagttatcaacgttactcctcgttacgcaaagcttcgggcagaaccaaatggggctgccatggggcgcatcattggctggcagaacattgaactcatcagtgacaggcctctggagaccatgctgaatgagttcaagcagttgaagaaagagtatcctgacaggatacttatcggttcaattatggaggagtacaacaaagctgcatggcatgagcttattgaacgtgttgaagagtctggagtggatgctcttgaaattaatttctcatgtccacatggcatgccagagagaaaaatgggtgccgctgtggggcaagattgtgatttgctagaggaagtttgtggttggattaatgagaaggccactgttcctgtttgggcaaagatgactcctaacattacagacattacacagcctgcaagaatatctcttaagtctggatgtgaaggagtttctgcaattaacacaattatgagtgtaatggggattaatctcaagacattgcgtccggaaccttgtgttgaagggtattctacacctgggggttactctgcaagagctgtgcaccctatagcacttgctaaagtcatgcagatagcaaggatgatgaaagaagagtttgctgatggacagtctctctctgccattggtggtgtggagactggcaatgatgctgctgagtttattcttcttggtgctgatacagtacaggtatgtaccggtgtgatgattcatggttatccccttgtgaagaagctttgcgcagagttacaggatttcatgagagagcacaacttttcatcaattgaagagtttcgaggggcctcgcttccgtatttcacgacgcacacagatctggttcaccggcaacaagaggcggtcaggcagaggaaggccatcaagaagggccttcaatcagacaaggaatggacgggtgatgggttcgtcaaggagaccgaaagcatggtatccaactgatgcatctctgccaccccccaccgggccattccctccaccatgctccaacttcatctttttaataaacgcgcaccagaaatgccacacaccaagcatctagtcctcatctgtacatggttctgaaccttgggccttcagtctatagaacaggccatgaatccacacaaagtcgtgacaacgggtgacattgagcgatatatttgtcatgtgaacattaatttgtagcactgagctgagggcttgaccttgtaaaatcttggagacttaaatcc

SEQ ID NO: 12303 - DNA, 684 bp, Zea mays
  Clone ID: 701166404_FLI
ccgccgtgcaatgtgcctcggtctctggtcgaaggacatcggtgccctctgcccttgctcacctctctggtcgtgctcgtcgggacattattctctagccaactgctgctgcgagctcgcccggacacctcgcctccttgtcgtatcatgcgccatcctcgagcaacgtgtgcacgccgcgtccctgctcttccttgccggtcttgtttggcttcaacgtccgcctcttggattccttgccgtttgttcctgcttcgactcctttgtggtgggcgaggaccgccactcaggtgctcagccatgcctaggctgctagacgcccgaacccggggtcgccacgccatcattttcgtcgaatagaatcggtgtgccaacacgtcgatgtcgtcatttgcctccgcactattgctggtaggcgatcttgctgtcgtcgtgctcgctccgactctgtctctacgtgctcgccttcgatcaccgctgtaatcttgggagtttgagtgaagtagtggaacccacggggcgcttgctagggactcgacaggaggcaggaacaagaatcatcaatgtttgcttggagttctagttaattcagtaatcgttctctagttcgctatttttattaattgattggatcgatggattgaacagatatattaatcacaatgattatcttgattgaagcat

SEQ ID NO: 12304 - DNA, 921 bp, Zea mays
  Clone ID: 701166461_FLI
tcacagcattgttatctgctgttgctgcaggttccctcccatgcttggaggtcctaattgaggctggtgcaaacccaaatgtcaaggctggtggagcaaccccattgcatattgctgcagatagtggaaatatagaagtcatcaaatgtttgcttaaagctggagctgacccaaatacctgtgatgatgatgaattgaagccagttcaggttgctgcttggagaaataaccgtgaagctgttgaacttcttttaccgttaacatccccaattccaggtgtttcaaactggaacgtagatgggattatagaacacatgctccctaaagagtatgaggaaaagtctcaactgaaggaagcggcatctctgaaatcaggcctaacacaaactattgaggtgtcatctgaagcaaaaaagaggtccttggaagccaaatcaagaggtgatgatgccttcagaagaaaggactaccttgtagcggtggatgcttatacgcaggctacagagttggacccaactgatgcaacagtgctctcaaacagaagcctgtgctggctgcgggcagggcaagctgagcgtgctctggaggacgccaaagcatgccgtgcattgagaccagattgggcgaaagcctgctacagggaaggtgcggcgcatcgtctgttacagaggtttgaggaagccgcaaacgccttctatgagggggtgcagcttgagccggagaacacggagctcgtcaacgcattcagggaggccatcgaagccgggaggaagttccatggcgtcaacacgccaaactcaacacaatgagactttgctgtttggttggataggtagatgatgaagcggatggacatgaacgttgtcttagttggaagttggtgagatgatgaatgagatgataatgaaatttgaaagagcg

SEQ ID NO: 12305 - DNA, 924 bp, Zea mays
  Clone ID: 701166557_FLI
cggccagcgtctcatcggctgggcgtggtctacactgcacgcacacttaccaccagccaccgcaagtgaatcactagccggaagacaggccaaccccactgctagtgctaggaatctaggagcgagaacgagagaccatgtcctcagaggccagcagcgtcgtcgtcgccgacgagaatggagcggcggagacggtcggcgtcgggcggtacgtggaaatggagaaggaccaagagtcgagcgcagccaagtcgcggctctccggcctgctctggcacggcggctccgcctacgacgcttggttcagctgcgcgtccaaccaggtggctcaggtgctcctgaccctgccctactcgttctcgcaactggggatgctgagcggcatactgttccagctcctgtacgggcttatgggcagctggacggcgtacctcatcagcgttctctacgtggagtaccgggccaggaaggagagggagaaggcggacttcaggaaccatgtcatccagtggttcgaggtgctggacgggctgctcgggaggcactggaggaacgtcggcctggccttcaactgcacgttcctgctcttcggctcggtcatccagctcatcgcctgcgcaagcaacatctactacatcaacgacaagctggacaagcggacgtggacgtacatcttcggagcctgctgcgccacgacggtgttcatcccgtcgttccacaactaccggatctggtcgttcctgggcctcgtcatgaccacctacacggcgtggtacctcgccgtcgcgtccctcatccatggccaggttgatggcgtgaagcactccgggccgaccaagatggtgctctacttcaccggggccacaaacattctctacactttcggagggcacgctgttaccgtggagatcatgcacgcgatgt

SEQ ID NO: 12306 - DNA, 255 bp, Zea mays
  Clone ID: 701166637_FLI
tcgaataaaaatccagacgaaacccaaaatccccaccgaacgcaacctaaaatctccccatccctcctcgatccagccccgcggagaagagccatggccgattccgcaaccaacgacgcccccctggtcgccagcaaccagcccacggaggaggaggtgacggtggagagggccgcggcgacggaggagcaggaggaggagaggctgcggtacctcgagttcgtgcagcaggcggcggcgcaggcgctggtgctg

SEQ ID NO: 12307 - DNA, 122 bp, Zea mays
  Clone ID: 701166704_FLI
aagcagcagcaaggatgttttaaaggacgaacatggaatattgatactgaacgacacctctggaaacaaagaatctggtacctccacacagataccaaatgaaaagcaaggtgcattacttg

SEQ ID NO: 12308 - DNA, 882 bp, Zea mays
  Clone ID: 701166706_FLI
actagcgttccctcaccagggcgtccatcccagcagccatggcgatggcgtacaagatggcgacggaggggatgaacgtgaaggaggagtgccagcgctggttcatggagatgaagtggaagaaggtgcaccgcttcgtggtgtacaagatcgacgagcggtcgcgcgccgtgctggtggacaaggtgggcggccccggggaagggtacgaggagctcgtggccgcgctgcccggcgacgactgccgctacgccgtcttcgacttcgacttcgtcaccgtcgacaactgccagaagagcaagatcttcttcatcgcctggtcaccggcggcgtcgaggatcagggccaagatcctgtacgcgacatcgaagcaaggcctgcggcggctgctggacggggtccactacgaggtgcaggccaccgacccctccgagatgggcttcgacgtcatcagaggccgcgcgcaatgaggcccccgctgcgctctgctcctatttacgtacttacctgtgcgtgggcgtgttctcctactactcactgctcagtagtcagtagtcatctgcgttcgtgtgtgtgtgtgtgtgatcggccggatgctaattggcgttggtgtgctcccgtagcgatcgatgctgccaatctgacgaggcttcgcgtgtgtttgctttgctattttcggttctcgggagagatggtgcaggcgtggtgtgttgatgttgatgggtggagtagaagctcaggggagtggcagcggactaatgaaacgtccacctctgcgacgtagaattccactgaaaaaaaaatgctccagtgtaccataagctgcttcagatttgatcgtgttttctctcccatggtggcgtttctacctacatttttctt

SEQ ID NO: 12309 - DNA, 1344 bp, Zea mays
  Clone ID: 701166747_FLI
gcattgtcacagttgtctaactgtgccctaacacagaccggagcgtcgcggcgctatctcctccgcggctctgcgcgcagtcgtgttggcaactgcagcggggcggcggcgtgcgtccctgctgtgagcttcatcgccccgtatcaagctagtttaggctgtcagcgggccacaacttcagccacacaacccggaactccgacaaccctcgcggctcgtgccgccctctcccgctcggtcgttcccatggatccaccgcaagagttggccgccgccggccgcaagcggcgccggcgaggaggcgtccggaaccgcaaaaggctttcctcgcagaaggggctccctccagcgactgcgcccccaacgccggcgtccccacctgtcaagcggcggcgcaaggacatcgctggacaggccgctgctatgccgaagagaggcaacacctcgagtctactggacaagatgcgtgcaaggttatctggtggccattttagaatgttaaacgagaagctatacacttgcagtggagaggatgcatttgactacttcaaaaacgaccctaatctttttgatgtgtatcatacaggatatcaagagcagatgtcacactggcctgaacagccagtgaatgtaataatcaattggttgaagagtcagaatgcgtcatggactgttgctgattttggctgtggcaatgcagcagttgcaaaaaatctgaagaacaaggttttctccattgatctcgtttcagatgaaccttcagtgattgcttgtgatatggctcatactccattggagccatcctctatagatgttgcaatattttgtctttctttgatgggaatcaactatccaagttatttagaggaagcaaatagggttctcaaaccaagtggttggcttgttattgctgaagtgcgaagtaggctagacccgagcaacggaggtgctgatcctgaaaagttttctaaagccattatccagcttggcttttcgcttgtttcaaaggatgtgaaaaacagaatgttcattctgttctacttcaggaaaaaggaaaaaagtaaggtggcgaagagcatcgattggccacagctgaaaccgtgcttgtacaaacggcgatgagccgcttgtctcgtatccaccagtaatactgtagttgttgtagtagagctcttcaaaagtttcgtcaaaactgaaagtctagatttaggtccctccgtacctgtatggctgcatctgtgtgccacgctattccattattttccacattagctgcgtctttcatttgttggacctcacaagaaaagatcacatagggaacgatgcattgtttggaagcagatc

SEQ ID NO: 12310 - DNA, 250 bp, Zea mays
  Clone ID: 701166759_FLI
caccaagcccgccgaggtccccgcgcccgcgccgtccaagaagaagaagaagccttcctcgtcctccaagaacaagaagaagaagtccaaggccccggctccagcccccgtcgccgaggcacccaccagcaccaagcgctccaaggctaaggcaccttcggccagcgaagccgacgcacccggcccggtaggcgatggcgtcgccgccgacaccgcgggtgctggaaggaccgtggcaggcgtaatcatg

SEQ ID NO: 12311 - DNA, 711 bp, Zea mays
  Clone ID: 701166789_FLI
ctcgccgctgcctcctctcttctcctctagagaaaccggccgaacattctcggcaataattaaaaaaaaaaaacagtccagcctgcctgtgcctgtttcgtgtgtctgaggatctcctgatctcctcctcccccctcccctgctccctccccatcgtcatccacctcctccacccatcccctcctcgctcgctctctcgcggcttccctctcctcctctgacctgcgcatctgaagcatagatagcaagcaaggaccctgctcagtgctcacctcgccggaggtgctgctgctacggcggcggcggcgtactactactactacgacgagactctgcgcgcgcacaagcccacaggagtgcagaattgaccgcgcgcacgacgacgacgaccaccaacagcaacaggagagaggaggagatcgataagggatggagggcggcgagacgacgctgtccgggttcggcggtgccggggcccccggcgtggacaccaaggtgctgcacgcgttccagaccagcttcgtgcaggtgcagacgctgctggaccagaaccgcctcctgatcaacgagatcaaccacaaccacgagtccaaggtgcccggcgacctctcccgcaacgtgggcctcatcagggagctcaacaacaacatccgccgcgtcgtcgacctctacgccgacctctcctcgctcttcgccgcggccgacggcggc

SEQ ID NO: 12312 - DNA, 418 bp, Zea mays
  Clone ID: 701166808_FLI
gccacctgaatggtatggagctctggagtgggtattccctgaatgggcgaggaggcatgcccttgacaagggtgaggcagtctttataaacaccatatggtctatattttgcagcaagaaggactggcactagactggcatgccaatcattgacaacaaacatgcaattctgtccataaatatatcctcccaattcaaggaccaaaggagcctcacatgcagcatagcaaaggagtgtgtatctgaactgattatcaccaaaagcaccaaacttatctccatataaatttccaggtctgtgatatgagggatgatcaacaaacacccagtcaactgaatctctatactcatggaagaaggtaacttcatgttcaccgccaaagcatggaatccgaatgtgtttttctgtgtaaaatgc

SEQ ID NO: 12313 - DNA, 940 bp, Zea mays
  Clone ID: 701166809_FLI
gggcaccactgggtacggcaggcagctggcgtccaccgtctacgagaaggtcgccggtgtcggcactgccgtcgcgcccaacctccgtccgcaggagggctcggccaaggcggaaggcgcacacagcgaggcgacgccggtatcggacaccggcgttgaggagtggaaaggcgccccggctgccacggacgcggccaacggcgcgtcggggccggcgggctatactcacaaggtcaagtccgcggctgcgggcaccacggagtacggcaagcagctggcgagcacagtgtacgagaaggtcgccggcgtcggcaccgccgtggcgggcaaggtgcagcaggccacacagtcgcccagcacggcgacgccgggagccgacgcgcagcaggacaccgacgccgccgcgacggccacccccggcaccggcgggcagtccaagggaacgaccgtcacggggtacatcgccgagaagctccgtccgggcgacgaggaccgcgcgctcagcgaggcgatctccggcgccgtgcagcgccgcaaggaggacgtcgggggcacggtagcgcagcgcgtgccggcgcccggccaggtggtgaccaaagcgcgcgaggctgtcgcgtcgctcaccggcgggaagcgggtctcggagaccgtgcagcccaccacagcaacaggtacattggaacaatacaactttttgttttttgcagaacgaactcgccgttagcggagctgacgagagacgaactctggattgcagggaaagatgtgaaggaagcctatgcggcggaagcgcctgtgatctgcggggaggagatcggcggcccgaagctgaacaccaataccatgtgagctgctcatggagagcgccggtttgtgggtttgtgtcaggtctgtgggtttgtgtacacgtgaatggtgtggtttgcgctgtggactagag

SEQ ID NO: 12314 - DNA, 760 bp, Zea mays
  Clone ID: 701166811_FLI
atgactttgcagaagataaccttttgggagaaggtggatttgggtgtgtgttcaagggcattttgccggatggtcgccctgtcgccgtcaagaagctcaagattgggaatgggcaaggcgagcgtgagttcaaggctgaggtcgatactatcagcagagtacatcataggcatttggtttctctagtaggctattgcactgcggagggccagcgaatgcttgtttatgattttgttcccaacaacacactatattaccacctccatgtaagtgaaacatcactggattggcggacaagggttaagattgcagctggagcagcccgagggattggttacctccatgaagattgtcatccacgtattattcatagagatattaaatcatccaatattttgttggacaacaactttgaagctcaggtttctgattttggacttgcaaggttagcggctgattccaatacacatgttaccacacgtgtcatggggacatttgggtatttggctccagagtatgcattgtcaggaaagttaacagcaaagtctgatgtatattcttttggggttgttcttttggagctgatcacaggaagaaaacctgttgatgcttctcagccattgggagatgaaagtctggttgaatgggcccgctcccttctgacgaaggcgatcgagcatcgggagttcggggaccttcctgaccccaggatggagaacaggttcgacgaaaacgagatgtttcacatgatagtagccgc

SEQ ID NO: 12315 - DNA, 434 bp, Zea mays
  Clone ID: 701166845_FLI
cccgccgcacctgctgatctggagggtgtccctaagggtcggggaggccggggaggaagagagcggcggcggggtagagctcaacgtcgttgaggaggatgtgctccgatcccgatctgtgtattgtgaccagtgcagagtcgtgggctggagtggacacccggtctgcgtgaagcggtaccatttcatcatcgagaacgacagtagccacctttctggccgccggcgcacctgctgcctccgctgcggaacacccatggccgctggagaatcaaggtgtgctctgtgcaatttcgatatggatggggaggagattgaagagtgtgcatacctgcatctggatgaccccacccacttgctgcacgctgtggtgcatgcaaatggttatgggcatcttctcagggtaaatgggcgtgaaggtggctcaagattcc

SEQ ID NO: 12316 - DNA, 408 bp, Zea mays
  Clone ID: 701166872_FLI
acggcggcgacatgaagtacatcttccatggggccgccgctggacatacggctggtggaagccggcgccttcgacgcgctcatggacctgttggtcagccagggcggctccatcaaccagtacgagacgccacggtgcatcgagccgggcggcgccgcgctggagctgctcgactccaaggccaccgcctcgttcatcagcccgtgccccgtgtaagctttcgggcttctggtgactgaggttgttccgagctcgatctgctactctaaagctagctaatcctctgctggatctaaataatctgagaattttcgtctgggttatcccgccccgttacattgtacttttgtgaggctttgctactatgcaaagaagcctttttcttatatgagatcgttcgtgatcatc

SEQ ID NO: 12317 - DNA, 1189 bp, Zea mays
  Clone ID: 701166880_FLI
gatcgagatgcctactcatcaagatatattagtgaatatggtggtacctacaatatgaaccctaagatatcagattttggtatcgcaagagggaaccaacaggaagcaaacactaaccgagttgctgggacgtatggctacatgtttcctgaatatgcaatcaatggacctttttcagtcatgtatgatacatatggccttggtgttattgtgttggagatcatatgtggtctgcaaatcacttcgactcactccacgagtttccctggcctattagcttatacatggagcctatggaatggtggcagggcaatggatttggttgactcatacctactagaaagttgctcgacaagtgaagctctgaggtgtatacacttaggactcttgtctgtacaagacagtccacacagtagaccatccttgtcattagagattttgctggagactggtacgagtcgtcctagtccttggccaaattttgttttggatggtatgcgttctgcaactggtcactaaaacctccatggccacatctacgtccacgacaagaatttatctccctcgttatttggttgctgcaagcagtcagttgtctgccagtttgtatgaggtgatccaacaaattgtttcagtactcctgctatcacagtgaagggccacaattcctctgcaatggtcatcttgctgttgatctgaggttgtcgaaaagtacaagatattggtacgcatgggttcggatcaaggggttccaattctatggccaagccagtggaatattcaccaggtttgctatggttctatgcacacttgaggaagcttattcaccattcatagtcaacactaccagcggcttgggggcaagccgcatttcaagcggtggggattgtcagcatactgtcatgtggggcctcgacagattggcaatgggtcacctccagctacaaaagagggagctgtacaggaaagcaggcatcgaagaatcattttgagaacctagactctatcttccaactactgctcatcttcttcctcccttctctcatgtactcggattctctcccttctagaacacgacagctattgtgcttctccaatctacttctcttgctgctaccctccctaaactcctctctgattgtaccagattatatgcttagcgttttcatgctattgagttgagtttgtc

SEQ ID NO: 12318 - DNA, 1458 bp, Zea mays
  Clone ID: 701166881_FLI
ctgtatcctagtgacatgcatccagttcaaccctgttgatgatagatacttcattagtggttcactggatgaaaaagtccgcatatggagcattcaaaaccgtgaaattgttgattggaaagatttgcatgaaatggtcactgctgcttgctataccccagatggacaggttttaatcatctatacataattctttgatttaatatcttcttcatgttacgatctgacacatctctttctttctttctcgaagagtgcactaattggttcccataaaggcagctgccatatttatgatacatctgataataagcttctccaaaagaaacaaattgacctgcaaaataagaaaaagaagtccagtcagaagaaaataactggatttcagtttctcccagggagtacttcaagggtccttattacatctgcagattcaagaatcagggtttttgatggccttaatctagttcacaagtacaaaggtttccgaaacactaacagccagatttcagcatgtttagctgctaatgggaggtatgtgatctcagcaagtgaggattcccatgtgtacatatggagaaacgatggtagccttgaaaaaggcagaagcaaggcgaatgttactgtcaccagttcctatgaacatttccactgccaggatgtgacagttgctgttgcaccgccatctaatggctcagcagtggtatccagatcaaactccacgaagcacgatgagcgggattctgtattggagcatcctctgctgcatgctgtccctgaaaaactgcaagattcctccgatctgcagcctcaaagtggcaatatcctaagcaccagttcaaatcacagcggtgatagagcaacttggcctgaagaactgatgacgccaacaaagcagagccctcagtctagtgccagtcttctcagcggtgctgatcaagctccatgctggtcagcctggggaactgtaattgtcacagcaggccgtggaggtcagatcagagcatttcagaactttgggtttcctgctcgagtatagtactgtagctatgagaccgctgcctggtcttggcgtctgccctgcagcaagacgggtgatttttgtgtatagataggtgaaagtttgggtgatctgcacgcagtctgggactggattctgttgctgctcctaggtgcacctgcctgcgaacttcaactaacctacgacctggtactcaaggtacggcgaattcgtttgcccggaattgtatatgagaatggagcccgggaaggacgagcgggcgtcggccggttggagctagatctttgggatctttttgccagccatcttttcatctgttttctccattgagtccagtttagctttttcattttttttactttatgtttaccagctattatatatttttgtaagaaatcttagttctacagaaatagaaaagcaaaaaagagttgcat

SEQ ID NO: 12319 - DNA, 260 bp, Zea mays
  Clone ID: 701166916_FLI
aaattctcaaagtcgtcgatccagcggtagcagcgcacataccgatcgatctaggagagggagagaaccaaccaatttcatcgccgatcaaacaaggaaaaaagatcccggccatggcgacgcggtcgctggagctgacgctgatctcgggcaaggacctcaaggacgtgaacctgatgtccaggatggaggtctacgccgtggtgtcgctctccggcgacccccggtcgcggcagcgggtccaggccgaccgcaccggc

SEQ ID NO: 12320 - DNA, 381 bp, Zea mays
  Clone ID: 701166918_FLI
ctctactcattcagatcccgtcactcgctctccacaagcagagcaccgcagcagaacgaggatgctggccatcttccagaagcaggtggcgcacgcgccgcaggagctcaacagcccccgcgccggcgcgtcgcccagcaagccccggaaccccgacgagatcctgcgcgacttccacgccgcgcacccggccgccgccttctccgcctccttcggcggcggcgccgcgctcgcctgcgtcggcccctcctccgccaccgccgccggcaccggcaccgacacctaccagcggatgttctgcggcctggacgacatctactgcgtcttcctgggccgcctcgacaacctcagcggcctcatccgccagtacggcctgtgcgg

SEQ ID NO: 12321 - DNA, 501 bp, Zea mays
  Clone ID: 701166935_FLI
gacaattttgtcatttgcacttagcagcttgaacaacgcattctccctatgtcgtcttcctacgtcaacgtaacgaagcttgcttcgtcgcacttccattgatctatgtctgtaatacccactttgtaagaaaatctaaaaggagagattatattcctttacatgtatgtgtgttatccctatttatcatttcatgtggacacctcacctatacaaataaataattaacaaaagacactcaaataaattatgcatcatgctgagtttttacttgattgtgtatttgtggatagtaaaataaatgtgttactaaccatatattaaaatattaagggacacatagaatttaaactctaatttggagaaacatagcactagctttaataaaataaatattgaaaataaataagttcacccgtgtcatgtttaagggggacatgtgatagggaaacaaatttactatgaagtttgaatttgaatagggatttaaatttggaatct

SEQ ID NO: 12322 - DNA, 247 bp, Zea mays
  Clone ID: 701166946_FLI
aaacggaggaagtatcctgtatcaggatgtggtaccatgcgaatcgcactgttaatgcttgatgctgtcactgccatggtgggagcctgacttgtaaagttcagtatcaccggaagtgtttgtcggcgcgtgctggtactaacggtgtaccttcggcggttggatggtgtcaagagtaaaaatacaccgcttgttctcaaactttgactggatgctaatctccaaaatgtgagaaccaagttaccgt

SEQ ID NO: 12323 - DNA, 897 bp, Zea mays
  Clone ID: 701167024_FLI
gccgccgtcaggaagtaccgggagaagaagaaggcccacaccgcgtcgctggaggaggaggtggtccatctcagggcgctcaaccagcagctcgtgaagaagctccagagccacgccgcgctcgaggcggaggtggccaggctccgatgcctgctcgtcgacatcaggggcaggatcgagggggagattggcgcgtttccgtaccagaggccgccgccagcggccaagaacgtcgacctcgtgtccggtgttgaccagggagggttccttgccggggctgctgcccaggttaccagttcctgtgatttcagatgcaacgatcagatgtactgcagccctggaatgcagggcgctgttagcggccaggtgttgggacaaggtgcctgcgatgtctcgagtatccaatgcgttggaagcaccaggtctgcgtccactaagctacctgtctgcggggggatggatgcagtacctgctgcctgcttgccaaatgttcaaaacaagtgacggactcccggcagtgtttatggtcccttccttttcagagactgctgggacttcccgttctgcctcgaaggaacgctgtataaaccgctagcttttctatgtagggccgaatctggttcaaactgctacgtgtgtgagttcgtcgtcgccgatgatgcttctatagtgcctgaggcgattcaagtttgttagctctagagctgataggatatcctcgtttactttgcttagttctcagatgctctccgtctccgatgaagtgcagcaactgaaccggatccgaaggagttggacatgaacaggttaaaatttggcatatgtggtctaagaagacgctgagatgtttgtagcgaatctcaagttcaatgcgaaccctgttgcctatgtatattc

SEQ ID NO: 12324 - DNA, 1317 bp, Zea mays
  Clone ID: 701167084_FLI
gaaacaggcagctctccacggacaacgcgattctatttagttatctggcggctgccagtgccagccagccgcctttcgaaaccgagcacgagggagccgacgtggtggtctctggaacctggttcgagcgagcgagcgatccatctatccagccgcccgccgggaatttctgtgacgaggaggaggaggaggagggggtatggcaatggtggcgtcgcagggaggcggccggagggacgccgaggcggagctcaacctgccgccggggttccggttccatcccaccgatgaggagctggtggtgcactacctctgcaggaaggtggcgtgtcagcagctgcccgtgcccatcatcgccgaggtcgacctttacaaattcgacccgtgggatcttccagagaaggcgctgtttggccgcaaggagtggtacttcttcacgccgcgggaccgcaagtacccaaacggctcgcgccccaaccgcgccgccgggagagggtattggaaggcaacgggcgcagacaagccgatcgcgcccaagggcggtggcggggcggcaggaatcaagaaggctctcgtcttctactcgggcaaggcgcccaggggattcaagaccgactggatcatgcatgagtaccgcctcgcggacgcggaccgtgcgccgggcaagaagggctcacggaagttggatgagtgggtgctgtgccggctgtacaacaagaaaaacaattgggagaaggtgaaggcggaggagccagaggcggcggcgccgctccgtaaccagcagggcgcagccgaggattccatgtctgacagcttccagacgcacgactcggacatcgacaacaatgcctttggtgtgcagaacggcttcggtaacatggtgcacgggcaggccatgaccatgaggaacggcattggcagcgtggcgaggacggtgaaggaggatagctattggttcacggacctgaatctagatgatctgcaggcgccctacaacgtgacccatgtgttgaatccgaacccggtccagacgatgaatctggcggctgggcaaggccatggctacttgcagtctatgagctcgccgtcgacgaagatgtggcagacgatcctgcctccgttctgagagttgctgtgatggaagggggaagagatgatcttgggcgtaggagtggttagactggctaggaacagcaggtttaaaatttggagggtttgaattctgcaactgttgctggtagtcttgtaagggttattcatttgttaaattatgtgcttggtaatataccaaaaggaaaatccatctccctttgcact

SEQ ID NO: 12325 - DNA, 1133 bp, Zea mays
  Clone ID: 701167176_FLI
agtccatatttataattagttttataattaaactatatttaatactctaactagtttacaaacattcgattcgataagactgactaaaagttctcgaccccctgatttcgtctgattcccaaacacagtgtggagctgatccaaacgcgaccgcccgggtgctcctgcggtcgctgaagccatccctgcacgccaacgtcgactgcacggcgctctttgcagcaatcgtgagccgtcaagtcgctgtggtccgccatctgcttcaggtgcgcgcatcatttgtgaaaagcagccgcaaaaatacactcatgttcaggaatggacgcttgacaccatctgcccactccatgtccaggccggcgtgaagagggacacgaaggtgaggctgggagcgtggtcctgggacgcgtccaccggcgaggagctgcgcgtcggcgccggactcgccgaaccttacgacgcggtatggtgcgccgtggagtactacgagtccacgggctccatcctacgcatgctcctccgtagcgggttcacgtcgactgccgctcacctcggccggacgctcctccaccacgccatcctatgcggcagcgctggtgccgtccagaccttgctggcgtccggtgcagactcggaagctcccgtgaagacgaccaggagcaacaggtccaggccggttcacctggccgcgcgcctcggccagccggagatcctgcggatgctggctgacaggggctgcgacctgaacgcgagggcggaggctggcgacactgccgccatcatctgctcgcgccacaaacgcgaggactgcctccgagttctcgtgtccgccggtgcagatgtcgcgctgttaaactcggctggcgactcgtcggcctccgtcgcttcctctgggggatggaagaccggcttcgaacgggctgttattggcgcgattcggtgcggggccgtcccacgctccagcgaacggagcgtgttctccccgctgatgttcggcgcgctgtgcggcgacgcgaccgcgatggaagtgctgctttctcaaccagacgtggacgtggacgagcaggattcggacggatgctcgcccataatggctgctgccaagatgggaaacgtcgaggccttccgcgccc

SEQ ID NO: 12326 - DNA, 857 bp, Zea mays
  Clone ID: 701167204_FLI
gtgctcaagacagttctatcctctacaaagaccgactcgccaaaacaggccgcttcacagttggcattgacccggacaaattcaacgagacactcaagcaagatgaagtccaagcacgcatcaaagaattgaacgaacgatacaaagatatgaaagtgattgttggcgttgatcgattggactacatcaaaggcctgacacagaaattgcatgggttcgagcagtttttgacggatcatccgaaatggcagggaaaggttgttttgattcaggttgcggtgccgagccgggaggatgtcaagcagtatcaagatctagaaacggaaattagctgtcaggttgggaaaatcaacgggaagtttagtaaaccggaatactcacccatcatctatctgcaccgctccatcccgttcaccgagctcacggccctgtactcaattgcggatatgtgtctattgacatctagccgcgatggcatgaatctggtcgctttcgagtacatcgcctgccaagaacagcgacacggcgtcttggcactgtccgagtttgcgggtgcatctgtctttatggctgatggcgcggtccaattccatccggcgaatatcaaggagatggtgcagggtatatacaaggggctgaccatgtcgaaggaggagaggaaggagagatatgacaaacttgagaagtttgtgcatacgaataccagtgcgaaatggggtcaggactttgtgacggagctgtcaaaacttcatgcatagatgtggctgaatatggggattaatccgtggattagatgtgttcttgatcagtggaagtctgttttgcgcattagctagttcaatacacaagattgattg

SEQ ID NO: 12327 - DNA, 392 bp, Zea mays
  Clone ID: 701167273_FLI
ctaacgaggactcggtccctgctctcattctttgctacatccagcgacgagttgatgaggactccatcctttctaatgcaacgtcccagggtttcaggcttgtggacaaatggataaatggagttcacgagagtaacggtaccatcagttcttggttctctggtaatgatgtctgcagtgctttccggcatacagtactttcagtattgtacttcgagctgtgaatgctgctatgcatgtgcaaggttactgtgtaacctgaaggatttttgtagcagctgtatcaagcaacggcaaaccaactttgaatatttaggccttgtttggttatttcaattttatgtgtatcggactgtactggaatggattgagatgaattttgacttctatgg

SEQ ID NO: 12328 - DNA, 1275 bp, Zea mays
  Clone ID: 701167287_FLI
ggacgggcggtggacgtcggcagcgtggcgttcaccacgtccctgaatcttctctcgcgcacaattttctcctgcgacctgacgaacctcgacgaccacaccggatcggcgaaagaattccaagaggtggtgacagagatcatggaggttgccgcgagtcccaacctgtcggatttgttcccagcgctggcttgcgccgatctgcaaggattgcgacggagactggcaaagctctttgcacggctgcaccaggtgttcgacgtggaggtcgaccggaggttgtgcgagcgtgatgctggcgatcgccggaagaatgacttcctcgacctgttgcttgacaccgacggagggacggcagcgttggaccgcgactcgctcctgtcattattcacggatttgtttgctgcaggaagtgatacgagctccagcacagtggaatgggcactgacggagttgcttagaaacccagtcccaatggctaaaacgtgcgatgagctcctggcagccactggcgcggcaagaaacattgaagaatctgaaatcgagcagctgccctacctccaagccgtggtaaaagaaacttttcggctgcatcctcccgtcccactgctgttgccgcgacgagctggggccgccacgcgagcaatgggtcacacgattcccaaaggcgcacgcgtgctggtaaatgtgtgggcgatggggcgggacggagacgtttggccagatccagagaagtttatgccagaacgattcctgggaaggcctacggattttagaggtggagacttggaactcataccgtttggtgcaggacgcaggatctgtcctgggatgccactggccagcaggatggtgcatctggtccttgcatcgttgttgaatcagttcagatggaggcttcccgccgaggtcgaaagagatgggactgacgaaatggctgagagttttggtgtcactctaaagaaggcgtcgcctctttgtgctatagccacacctgtttgaatgagaagcccagatcgacagggtcaaaaaaaaagtattgagtgttcttctgttgaataatgtttcttgcaagtcattgaagtcattacgagtcttacggtgattggcaaaaatttagaggccgtccaacgggaagaaatctaccgatgataaaacaggtattattttattaatgttaaatctttaaaatgtcacaatattgatggaagaaatctaccgggacttgtattaatgttaaatatatatttgttttattttaatgagggtaacttt

SEQ ID NO: 12329 - DNA, 1009 bp, Zea mays
  Clone ID: 701167349_FLI
gtgtagcaaagattcgataccttctgcccgaatggttttgattaaaagttactctgaaacagaaggttttaaattttatacaaattttaatagtcgaaaaggaaaagagctagaagaaaatccgaatgccgcaatgttatttttttgggacgaacttaaacgacaaattcgaatagaaggcaaagttataaagcttagtgaagaagagtcaagcgtttattttaaatctagaccgattaaaagtcagattgcagctgtgtgcagtaaccaatcgaaaccgattgaatcaagagacaatttggaagaacaatttaatcaagttgaagctagctttcaagacgatccggacaatggtttaaaaaagccaccaaattggggtgggttcacattaattccgaataattttgaattttggaaaggacagagcactcgattgcacgatcgtattgtgttttcaaaacaaaccgacctaaactcgttaccaaaaggtgtgatgttcaaacaagcgtataaagattggattatgtatcgtttacaaccttaatcaatacttattgaaatataattaaaaagtgaacaaacatttatcaaacaaatagttagtttccgtagtattttggataattgatttggttcatttgttttaaaataaagtttgaatgttggaaagaaaaagcatagatggttaaggttatatttatatatgtacataaaaactgaacaagtttacatagctcaaaacgagaacacaaaaggataatgttaattcaaaaagttacaattgttcttttacaatcactcgagcttgaattgtaagctcacttccggttggcccagatttatactcaatttgtttaaaccagagcttatgacaaagttctttgtcattttacttttcactctcttatcacttaattttgattattgttaaaagtctgtaacccttttaattttttgttttatttttacatgcatatattttaaattgttttatgtttcaatattaatg

SEQ ID NO: 12330 - DNA, 839 bp, Zea mays
  Clone ID: 701167363_FLI
cgaagtctatctactctgttataagatgtcacaagatgtgcgcgcaccgcgttgtgccgcagaacggaccaccaggttggcgttgctggaagagaaggagctgtcggcggtgcttaaaacctgtgctctacctactggcgtagccaggaagatagtacagcctgccgctgccaagtacagttatgcattccaagtccccagagaagcaatcacttctgggatcgaggagaaacccagcaaataatgggagtacggaggatgaaaagggagacggcgggatcccatggctgacatttctggggttcgtgttcctgaccttcaactcgggcatggcgatctaccgctcggaccgcgaccccgggtcaatagcgttcgtgtcgggctcgtacgtcgacctgctgctgctcttcctctgccttcgcctgttcgagcggacgccgcctgactcgccgcgccgggggtggatcaaggcctgcgtctgggggctgaccacgctgctcaccgtcatgttctcgcagaaggtggccgccatcatgccgccgctgctggcgctcgtcgtgtgggcgatggcgttcgccaccatcggcggtggcttctacgcgttcttcatccacaaggacaaggccgcccttgtggaggcggagaacccgtagatgtctctgccgctgccatgcgctcgtggctgtttcagactatctccagccccggtcctatgattttgaggcctctagtcgaactgatcatggtggaccctctagactataaaaaaaattctatattatacaatagagcatattaatacttcgtaaataaatgatcatgtatattgaaattggttt

SEQ ID NO: 12331 - DNA, 300 bp, Zea mays
  Clone ID: 701167458_FLI
gccacctccccgaagctgccgcgaccgatcgagcgaagcgtcgctccccgcgccgccgccaaaaccctagcttctcctactccatggccactgtctcgctcaccccgcaggctgtcttctccacggagtccggtggcgccctggcctctgctaccatcctccgctttccgccaaactttgtccgccagcttagcaccaaggcacgccgcaactgcagcaacatcggcgtcgcgcagatcgtcgccgccgcgtggtccgactgccccgccgctcgcccccacttaggcggcggcggcgcga

SEQ ID NO: 12332 - DNA, 1099 bp, Zea mays
  Clone ID: 701167652_FLI
gccgtcatcgcgttcaccctagttctttctttcctggcagcgacaactgcgcagcggcgccgccaccggacgtcagatctccgttgggtgtttgatggcgatgagcacctgtcaggtactctaaggccactttctctcattaaggtagtactgagttcattgcatgactatgacttctgaagatggagacattttggctcttctgtctgagccaagcctaaaggaagagcaacttgaggcttctgaatctgatgctatgttttctgcaattatgaaagccattgaatcaaataagaatgtagttgaagtttcacctgaggaagctgcctgggcagattcatgcttcgtgcagacttctgaactgtcatatgatgactggggagcgatgaggagtatgctgcttgatgccctcgaaaagccaacagaaagtcccagtgatacttcagaaagtgcacataatgcaatctcagaggcaaaacctcactcccttcctgctgaaaacatttctgagcatggcgacatccacatggagcaaataaacaataccgatgatgacaaggatggtactgaagcttttgaaattgctgatgtaatcagacgtgtagacgataatggtaagcaaattgatagttatgtagcagacgctggtgatgagttggtccttgagcagacccagtcaacaggttctatatttaaggtttgggacctggaactgccattttctgatgatgatgatgatggcgagcttgaactcgtcaaggatctgaagaagcttctcaagaagaacagccttccagaggatatatatccaactcttcctccagatgatgcagccaaacccttgagccagataagcatcaatgaaattgtggcgggcttgagcgatttatcaatacagcaagcccatgagtgactattatttctcaaatagctgtggcacaccttggtcgtccaggcgatattttgttttgtgcaaatcacttgggtggtttaaacagcaggtttaggctaactgttgtgctgtctgttttttctgtatactcgccgttttgatttctgcttaacttgaaatcagctaaaaatgaagatgctttggtag

SEQ ID NO: 12333 - DNA, 285 bp, Zea mays
  Clone ID: 701167685_FLI
cacccgtcagccagtgcaacaacgggtcgtcgggcggcggatcgaaggcgacgcctttcctgccatctggtggtgcgtcgctcggggggccggcggctcttgtgctcgggctcgccgcggctgctgtttacgccgtggcagctacgtgagcgtttgtgttgtgtgattcagggatcaggatgcgttgcgtcgtgtcaactttcgcttttcagaacgggcaggggggattttgagtgctttgtgtctatggctttgtcgcatttgtgaaattggttgattcggtct

SEQ ID NO: 12334 - DNA, 633 bp, Zea mays
  Clone ID: 701167790_FLI
ggctcgagcatgacggagctccaggccgtgctgcagccccagatcatcgacgcgaacctgggggccatcgtcgaggactgcatgcggcactacgacgagctgttccacctgagggccatgctcgcaagatccgacgtgttccacctgatgaccggcctgtgggcgaccacggccgagcgatgcttcctctggatgggagggttccgtccttctgaaatcctcaagatgctgataccgcagctcgaccctctcgcggagccgcagctgctagggatgtacaatctgcaacggtcgtcggagcagaccgaggaggcgctcgtgcaggggcttcagcagctgcaccagtcgctggcggacgccgtgggcgctagtcctctcagcgacggcgcgaatgtcgccaactacaccgctctcatggccctggcacttgacaggctcgacaccctcgagagcttttaccgccaggcggacagcctgaggcagcagaccttgcaccagatgcggcggatcctgacgacccgccagacggctcggtgcttcgtctccatcagcgagtaccaccgccgcctccgcgccctcagctccgtctgggcatcgtcccgccctccaactcctccaagcgagggcgtcgtt

SEQ ID NO: 12335 - DNA, 574 bp, Zea mays
  Clone ID: 701167890_FLI
gccgcagccgccactccggcttcgtggtactggggaggaactgggcgtggttctgcctgttcgggagcctcctcttccttgccggcggcctgctgaacctgctcaaggtgttcaagacgcaacagatgggcggccggggcctggagaagctgcgcggcggctcgcaggagcggctggccttggagcgggagggcaaggtgccgctcatcctggagcacggacacggcggccggaggggccctgcgataccgccgccgccgcccgggtcttacaaggacgcgctcgtcagtagcgccagctaggaacagaaatggccttgtagatgctcagcattttacgttgaactgcatcctctgtttttaatcatcaatcacgttcacgcctgcttgaataagcttttactagccgtttgctacacctccacttgattagcatagtaatacatccgttcttaaatatatggtaaatatatgtcttaaatatatggtaaatatatggtaccttgacttttttttaaaaaaaaaacttagaccactcgtcttattaaaaaataacgggttataattattttgtt
